United States Patent Application Publication US 2005/0228172 A9 - sequence listing, part 42

SEQ ID NO: 158498 - DNA, 546 bp, Homo sapiens
cttagttgggcctgcttagccttgctggaagaagtggtgatctctagcctgtgaacctccaagtctgtcttgcctatgactatcagaaatgaccatgtgtacaagaaactgaatcaaacgttccagcaacaaccagagggtgagagttctcttggttgttggaaatctgtcacacagggcakgagagacaaagttatcctagaaaccacagggcccctgaaaggctacataagcctaagatgaaataaaggatcccttccttctccacagaaatagcagagtgtccatcagccccatttaagccaatacagtgctgaattgccttattctagcagaagacactttctgtgactagtggccctttgtccctggatcctacaggcatttgaagcttatgagaaacatcaattttcttggcttgcttcactggtctatacctgtggaggagtgcctgggcctactaattccaggtcatactgtttttcttgcctgtgcttctagtattctgcaatttcctctgctggtgaattgcaagggtatgtgtat

SEQ ID NO: 158499 - DNA, 546 bp, Homo sapiens
cttagttgggcctgcttagccttgctggaagaagtggtgatctctagcctgtgaacctccaagtctgtcttgcctatgactatcagaaatgaccatgtgtacaagaaactgaatcaaacgttccagcaacaaccagagggtgagagttctcttggttgttggaaatctgtcacacagggcatgagagacaaagttatcctagaaaccacagggcccctgaaaggctacatargcctaagatgaaataaaggatcccttccttctccacagaaatagcagagtgtccatcagccccatttaagccaatacagtgctgaattgccttattctagcagaagacactttctgtgactagtggccctttgtccctggatcctacaggcatttgaagcttatgagaaacatcaattttcttggcttgcttcactggtctatacctgtggaggagtgcctgggcctactaattccaggtcatactgtttttcttgcctgtgcttctagtattctgcaatttcctctgctggtgaattgcaagggtatgtgtat

SEQ ID NO: 158500 - DNA, 546 bp, Homo sapiens
cttagttgggcctgcttagccttgctggaagaagtggtgatctctagcctgtgaacctccaagtctgtcttgcctatgactatcagaaatgaccatgtgtacaagaaactgaatcaaacgttccagcaacaaccagagggtgagagttctcttggttgttggaaatctgtcacacagggcatgagagacaaagttatcctagaaaccacagggcccctgaaaggctacataagcctaagatgaaataaaggatcccttccttctccacagaaatagcagagtgtccatcagccccatttaagccaatacagtgctgaattgccttattctagcagaagacactttctgtgactagtggccctttgtccctggatcctacaggcatttgaagcttatgagaaacatcaattttcttggcttgyttcactggtctatacctgtggaggagtgcctgggcctactaattccaggtcatactgtttttcttgcctgtgcttctagtattctgcaatttcctctgctggtgaattgcaagggtatgtgtat

SEQ ID NO: 158501 - DNA, 414 bp, Homo sapiens
acagacaaatcttgaaacctattttctcaagcagtgactcccaaacgtcagagtgtggatgcatcctccagtgatcatgataaaatctagattcccaggcaaaacttcgggagattctgatactctaagctttggtttggggcttggaaatgtacaagaagtttcagatcataacccccaatctcaccatacacctgcactttacaaagaatactcccataaaaatcatactccttttgggaacttaaatttgtcagaacaatactggacctttaaaaaaaaagctattccataaaaaagtgctatagttatactgactttccatttcacagggattcatgattcagtaagattaytacggtccccaaacccagaggctataacttatcactaccagtgtgtgagtttttaaat

SEQ ID NO: 158502 - DNA, 544 bp, Homo sapiens
tgtaactgggttctggtctctagttctgagcttctcctgaggcttcaatcaaggccatcatcatcttaaggctcaactaggggggagtctgctctcaacctcactcgcgcagttgcttgaaaaaatccacaaagatttggttccttgtgggttgttggaatgagggtctcagttcctgttgaactccaggccaggggcatctctaggcatgagaagctcacaacatacagcaactcacaatgatcacagtaaacaagcaagagggcaaaagaggaacaagatggaaaacacagtattttataacctaatcttggaaataataatacgattcatatgctatttgttagaaactggtcatcagacccagcctacactcaaggagaggggattataccaggacatggatcccaggattcagggacctttgaargcaatttcagaagctgctaccttggtccatcctctgagtcatcctttttcatgaaaactagagcttgtttgtaactgattagtttacttgacttgctacttcccattagaattc

SEQ ID NO: 158503 - DNA, 542 bp, Homo sapiens
tgtgctggcaacaaattctttagtttttgttgatttaaaaatgtcattattacacctttattcttgaagaatattttcactgattaacaggcttttttttttcttgcagtactttaaagagtttcactcaatcctggatttaattttttgttttaatgagaaatcagttatcattcatattgttgctgacatctatataatgtgtaattyttctctgactgctttcaagatttcctctttctccttggtcttcagcaatttgaccattatgtacagtaagttctcacttaatgttgtcaatatgttcttagaaattgtgactttaatgagacaatgtataaagaaatgatttttttctcatcaacaaaacaaagttgaacaaaatgatcttcttcaaggacttgctgtagggctttcgcttaaagtctcagtttccaagaacttattgaagacgttaagtgaggaattaatgtatgtaataattttaggtgtagttttctttatatttatcttacttaggattcatgagcttcttaaacatg

SEQ ID NO: 158504 - DNA, 542 bp, Homo sapiens
tgtgctggcaacaaattctttagtttttgttgatttaaaaatgtcattattacacctttattcttgaagaatattttcactgattaacaggcttttttttttcttgcagtactttaaagagtttcactcaatcctggatttaattttttgttttaatgagaaatcagttatcattcatattgttgctgacatctatataatgtgtaattcttctctgactgctttcaagatttcctctttctccttggtcttcagcaatttgaccattatgtacagtaagttctcacttaatgttgtcaatatgytcttagaaattgtgactttaatgagacaatgtataaagaaatgatttttttctcatcaacaaaacaaagttgaacaaaatgatcttcttcaaggacttgctgtagggctttcgcttaaagtctcagtttccaagaacttattgaagacgttaagtgaggaattaatgtatgtaataattttaggtgtagttttctttatatttatcttacttaggattcatgagcttcttaaacatg

SEQ ID NO: 158505 - DNA, 542 bp, Homo sapiens
tgtgctggcaacaaattctttagtttttgttgatttaaaaatgtcattattacacctttattcttgaagaatattttcactgattaacaggcttttttttttcttgcagtactttaaagagtttcactcaatcctggatttaattttttgttttaatgagaaatcagttatcattcatattgttgctgacatctatataatgtgtaattcttctctgactgctttcaagatttcctctttctccttggtcttcagcaatttgaccattatgtacagtaagttctcacttaatgttgtcaatatgttcttagaaattgtgactttaatgagacaatgtataaagaaatgatttttttctcatcaacaaaacaaagttgaacaaaatgatcttcttcaaggacttgctgtagggctttcgcttaaagtctcagtttccaagaacttattgaagaygttaagtgaggaattaatgtatgtaataattttaggtgtagttttctttatatttatcttacttaggattcatgagcttcttaaacatg

SEQ ID NO: 158506 - DNA, 587 bp, Homo sapiens
aggggagataaaaatgtttgaataaagaagatgaaaggtgttctgacattgtctgagctaattgaaccagaatttaatagaccattgacctaaaatatattattattttagtcagaatgaactaggatatctgaaagctgttttctgctgcaaaatgaaaataggccacataaaacaaattcagaggtattagttaaatagtgttattgtgcattatctgagctgtgactatgcaggttttacctattatgtgcgacttgtagaactaaattttcattccaaattatttcaatctgtgacacttctaatttttcttatgctcatctctctttttctcttccaagttggaatcagtcgccatatctagtaaaatcattctccaattctctcccattaatccatycatttttcatgtcaatgcccaccattagttaatccatgtgtaattttcgcaactgttttctttgtaatttttatacgtccctccttacctcatgctagctctgctatggtatattaattctactaagatctgtttttttgtgtgtgtgcaaatattgccctttccttattaacacttgactgga

SEQ ID NO: 158507 - DNA, 587 bp, Homo sapiens
aggggagataaaaatgtttgaataaagaagatgaaaggtgttctgacattgtctgagctaattgaaccagaatttaatagaccattgacctaaaatatattattattttagtcagaatgaactaggatatctgaaagctgttttctgctgcaaaatgaaaataggccacataaaacaaattcagaggtattagttaaatagtgttattgtgcattatctgagctgtgactatgcaggttttacctattatgtgcgacttgtagaactaaattttcattccaaattatttcaatctgtgacacttctaatttttcttatgctcatctctctttttctcttccaagttggaatcagtcgccatatctagtaaaatcattctccaattctctcccattaatccattcatttttcatgtcaatgcccaccattagttwatccatgtgtaattttcgcaactgttttctttgtaatttttatacgtccctccttacctcatgctagctctgctatggtatattaattctactaagatctgtttttttgtgtgtgtgcaaatattgccctttccttattaacacttgactgga

SEQ ID NO: 158508 - DNA, 369 bp, Homo sapiens
ggtatgcaacaaatacaaactataattgtttttaaaatgcacttactaaaattaatgagaatgtgacagtgatttgtgatgttatattgatcataataatgttttgatttattcagtcagttaagttttttaattgtcctactcctatagcatttgaaagattgaaaaagagataaatttacaaatgtcttatgacatacaaatgctgcttaataatttttaaattatggaargttttcaggtatttctaaagcataaacacattttttaaattttaattagtggagaatatttgtgttcatcaagaacttcttgtttattatctttgagcttttttataacttgttcaattgtgagcaaggcagtaat

SEQ ID NO: 158509 - DNA, 369 bp, Homo sapiens
ggtatgcaacaaatacaaactataattgtttttaaaatgcacttactaaaattaatgagaatgtgacagtgatttgtgatgttatattgatcataataatgttttgatttattcagtcagttaagttttttaattgtcctactcctatagcatttgaaagattgaaaaagagataaatttacaaatgtcttatgacatacaaatgctgcttaataatttttaaattatggaaggttttcargtatttctaaagcataaacacattttttaaattttaattagtggagaatatttgtgttcatcaagaacttcttgtttattatctttgagcttttttataacttgttcaattgtgagcaaggcagtaat

SEQ ID NO: 158510 - DNA, 622 bp, Homo sapiens
taagtaaagaagaaatgttttaatgacataatgtaaatgcttatctaactaatgagaaaaacttgacaagcaaagggtttagagagaagtacaaaattccattattttgaaggtaagtacttctaaatttattttgaaattgaattttgtttaattaaacaaaagtactctcttggctctctgagtatacaggtgggaatcaatgcaagttgtttatcgttgggttcaacttataaaattttcatagtgaggttgcytccatattttaaaaataaacactaaaattagaaattgctgtagagtacaaaaaggaaataaaatgcactttaattccttagagaattttattcctattatagcatttttctcattttaataaaatataacaccttgcataatttaaataaaaagttttatgttgaaaataatgaatcttaaattcacatactaaaaactaaccttttaaaattatctgatatatcaaaaatcttaaagcaccaatacatttgctgaaagactaccaaataacagattttgaaaaagatctaataagtgtatttgctgaattatctcaacatgaatgttagttatttcaccctggtgaaaataatgcttaaaaggt

SEQ ID NO: 158511 - DNA, 350 bp, Homo sapiens
agtaagataaagtgctgaaacacacttacagacatgtaagtccagatcaaagcctgataaatattatgaaaattaacaatgaaattttttttctttatttaaccaataattttggtcaatattattatatcttagaagtagaaaatcctaggtgtttaagactcagagtatccaaaacctgtcctacagacacacatttgaaaggacacatatgggagaagatatcctggataaattatccaggataatttataatatgcttcttataatatggctctatataaytttgaagtaaaacccataattccagtgagctgaacttacttgtatgagttcacaagtactgtatt

SEQ ID NO: 158512 - DNA, 598 bp, Homo sapiens
tattatcccttatgtttaaagggttagaatgtaatctcatcattgtacccagttgcaaagtattttgagaatgtgcaagaatttaaaatggagttacgataccaaattttaatgggagactcaatatgggaattgcaactaatagtctctgccacagaccaaattttatttttatcattcagggtcaaaatttggggactagaatgttttgtctcgactctgtctagtcacatcatagagtcaaaacgtagagtttcgtgacaaaaaatatagsattgactttagactttgtaaagtgccaaagatactttactgaatggtacaattcccttcatatatgagaaatctaaaaacagagacatggaagagcttaatcacttgaaattcattgttttgtggtttaaatatgctactttctaagtaaacagagtcatttactctaaaactagtacatggactttctgtacttctttaaccagtttttttataatgtcatttcattttcttcaaaatgtttttcctttcttttttaatgcttttcttttttaaaaaatacatagctctcctcttgcttatctccattaacaatgttcaggtt

SEQ ID NO: 158513 - DNA, 413 bp, Homo sapiens
  misc_feature (1)...(413): n = A,T,C or G
tagtacatggactttctgtacttctttaaccagtttttttataatgtcatttcattttcttcaaaatgtttttcctttcttttttaatgcttttcttttttaaaaaatacatagctctcctcttgcttatctccattwacaatgttcaggttgagcacatgtgtcactttaagcttcccaggaggatattaaatagtatttaagaacaaatcttggaaatcaggcactctggtttcaaattctacctctctcccttaatagttatctctcataaaaacttcaagctttgttttctggatctataaattgcaattatcattgtccctactatttaaggagattccatagtttaaccaaaataatgattaacagtactttgcactgttaagatttctactacganatctttttaa

SEQ ID NO: 158514 - DNA, 413 bp, Homo sapiens
  misc_feature (1)...(413): n = A,T,C or G
tagtacatggactttctgtacttctttaaccagtttttttataatgtcatttcattttcttcaaaatgtttttcctttcttttttaatgcttttcttttttaaaaaatacatagctctcctcttgcttatctccattaacaatgttcaggttgagcacatgtgtcrctttaagcttcccaggaggatattaaatagtatttaagaacaaatcttggaaatcaggcactctggtttcaaattctacctctctcccttaatagttatctctcataaaaacttcaagctttgttttctggatctataaattgcaattatcattgtccctactatttaaggagattccatagtttaaccaaaataatgattaacagtactttgcactgttaagatttctactacganatctttttaa

SEQ ID NO: 158515 - DNA, 571 bp, Homo sapiens
ccatatatgtacaaaaacatatgaaatatataatattaataaagatatagaaataataaacaaggcctaattgaaattctaggttaaaaagtacaataactgaatagaaggattcactagaagaccttaaaagtatatggtaacaagaataaaaataaatcaataaatttgaggcaarattggtagacattatgtaatctgaagaacacagagaaaaaagaatgaagaaaagtgaatagaccctcaaagaaatgtgtaatatcattaagggcagcaagacacacatattggagtacaagaagaaaggaagggaggaaaaataaggagagagagcaaaagacagagatggagagtagaatatatttgaagaacgaatgggctaaactttccaaatatgatttaaaaaattaatctacatgtacaagaagttcagttaacatcaagtagaaaaaatgcagatcaacacccatacacatcctagtgaaatgttgccagctagatagagagaatacattgaaagaaattaaagcaatcatttatttacaaggtaatcaccataagttagcagttc

SEQ ID NO: 158516 - DNA, 571 bp, Homo sapiens
ccatatatgtacaaaaacatatgaaatatataatattaataaagatatagaaataataaacaaggcctaattgaaattctaggttaaaaagtacaataactgaatagaaggattcactagaagaccttaaaagtatatggtaacaagaataaaaataaatcaataaatttgaggcaagattggtagacattatgtaatctgaagaacacagagaaaaaagaatgaagaaaagtgaatagaccctcaaagaaatgtgtaatatcattaagggcagcaagacacacatattggagtacaagaagaaaggaagggaggaaaaataaggagagagagcaaaagacagagatggagagtagaatatatttgaagaacgaatgggctaaactttccaaatatgatttaaaaaattaatctacatgtacaagaagttcagttaacatcaagtagaaaaaatgcagatcaacacccatacacatcctagtgaaatgttgccagctagatakagagaatacattgaaagaaattaaagcaatcatttatttacaaggtaatcaccataagttagcagttc

SEQ ID NO: 158517 - DNA, 628 bp, Homo sapiens
atcactctgatttgattattacatatcgtatttgtatatatcacaacatcacatggatgtcataaatatgtaaaattattagatgtaaaccaaaaatgaaagaaaaaatatgtaacataaaaggaaaaacacaaaattatcaaatagtgtttatgttatgaattcacaaataataatcagagtagatatgtggtattgcttatgttgacatatatggataagacatgatcttaagaattcatagaaaaaactaattataaaactacacataaaataaaatttctaattttaaatgagaataataaaataaaattgcataatgtgtcaacactaaattgtaaatttttttttaacacagagtgggagaaaatatttgcaaattacccacctgacaagggattaataaccagaatatataaagtaaatatttttaaaatctggatattagttttccagaaaacagatataacaggatatacctctctctctcattccctttctctctctctcccgtatctatataatatataaaaatattatatatatgtattttaaatgaktattgagctttcttaaaatctgtcatacattagagagaaggaaattatagaaattggctcatgcaatt

SEQ ID NO: 158518 - DNA, 640 bp, Homo sapiens
agtaagtacagtgaatttctaaattagacactattttaaaatatttgtttttaaaatgtttatgtatcttttaagtaaccacttaaatcagcccctttgtaatacaataagctgcatattattataggtacttttaatttaaattacatttccaactttgtaatcatataagcatatgttccacataatgacagtcatcaagataatattgatgtataattcattttggaagttagccacattcttgcctgctctgaacacagaaacctgtcatatgaatatatcattctatttagattgggaattagaatgtgtagacttttatgacagatcttagaaaacaaaaacaaaaactaaaacaaacaataaatagtgttgtacccctatgtagatctatgattaaaattagcttccatgtctggtttttattgtttatgtttattttgttttatttatttatatatttttaatttcaacttcaatatataaataaaagagatatktagttaggtttccctgagcaaatccaatgcaagttcttttattattatttttatttaattgtgttaagaacacttaacatgagatctacccttttaacagatttttaagtgtacattacctcttcttaactacaagt

SEQ ID NO: 158519 - DNA, 467 bp, Homo sapiens
tatgaagtgggactacaagaatatttactatttttttcaaattatgtttgtacatgttcattggcatacatcattcttgtcatttctgcctgtgtatctctatttttattaatgtattttcttttacataattagaaccatgctgtatacattgcattgtatcawggctctttttttcccaattaaaatggtaaggtgaatattttgcctgttttattaaatcttcttggaaaatatgagtttgtaaggcctaatttacatacaattaaaggcaaaaccttacatgaagtctgagcagaaattacataggtaaaggggatgcgtttgacaaatgggtgcgcccatttaaaacacacctaatcaagatatagaacatttccatcctcccagaatgttcctttacatcctgtctaaatcaatccttggacttaccacagaggcaaccactaatctgacttctttagctg

SEQ ID NO: 158520 - DNA, 314 bp, Homo sapiens
gagactacaggcacacgccaccacccctggctaatttttgtatttttggtagagacggggtttcgccatgttggccaggctggtcttgaactcctggcctcaagtgatctgcccaccttggcctcccaaagtgctgggattacaggtgtgagccacyctaccctgccattatattctggttattaatcacttgtcagatggacagtttgcaaatattttctcctattctataatttttctctttatcctgttgactgtttcctttgctgtgcagaagcttttgagattgaagtaatttcatttgtctgtttttg

SEQ ID NO: 158521 - DNA, 585 bp, Homo sapiens
ggaattctttcaaactcattctatgagtccaacaataccctgataccaaaaccagagaaggacacaacaaaaaaaaggaaatacaggccaatatccctgatgagcatagatgcagaaattctcaacaaaacaccagcaaaccaaatgcaataacactttaaaaagataatacatcatgatcaagtgagatttatcctagggatgcaaagatggttcaatacaagcaaattaatacatatattacattaaaataacagaatgaagaagaaaacataaaattatgaaaacataaaattatctcagtagatgcagaaraaaattgataacattcaacatcccttcatggtaaaaactctcaacaaattattcttttagggagcatacctcaacatgataaaggccatatatgacaaagcctttcctctaagcactaaacaaggatgtccactttcaccattctcattcaacatagtactgctagtcctaactagagcaaccagataacagaaagacataaaaagcctccaaattggaaaagagaaagtcaaattgtccctgtttgcagatggcatgatcttatatata

SEQ ID NO: 158522 - DNA, 554 bp, Homo sapiens
tccgttctaaactcttccgattacaagctgtgtaccactgagaaagttgctatgagaacctcagtttcctcatctatgtaatggtgaaaataataactatttcatttggttgtggtggtcataaaatgggttatataatcagtaacatctgtcaacatcttaaatgcaccttatctttggttcagtaattccaaatgtaggaatttgtattacagatatattggcacaattgcacaaatgttatttatggaaagatttgatatgcttctgaatgtgaaaaaaaaacagaaagagattaaaaggccacctataatgtggggaaaatctggraaaatgatatttaatacatgaaagctcttaaaattaattcaagaaaaaatatcatattagaaaaatgggcaaagaatataagtatttagataattaaagaagaaatttagttgattgctgtgttaatatttaccaggaataaacaaacacgcacaaaaaatataaaataactatataccatttgttcattataaaatgagcaagatttatagagataataatag

SEQ ID NO: 158523 - DNA, 175 bp, Homo sapiens
tagggactttggagctgaggtagctccaaagaaagcaattttcagctaagtagtacctgtgaggaatgtagaactatstgcaggctgaacaattgcccttcagctccaccctgaggtgtggagtagaatgaccaagttggaaggaccttagaggtaatctaaaccatgtgattcc

SEQ ID NO: 158524 - DNA, 612 bp, Homo sapiens
tttgtttatgtgattactctgaacttcccacccttctttactgcctacctgtcgaatgctttttctaatagttctagtcatcgataatcatccttgggtttgactcacgttgtgattgatgaaatcttttttttgaactacaaataggaaaagcatccwcttttttctttgaacacttaaatcacatgatagcattatttattataaaatcactaatactctctaaatgtcttgctgaaataatttagttcagtagtccctttcctttcatgtgtatttagactagattccttaaagaaatcataatttcttttagaagaatacttgtcacacacaccaaaaaacaacccaaagtgattgtgttgagtgaaaagaacaaggtgagaaattgtgaatgtatttaatagtattgcatcttcattcgttctctcaaaagaatatttgctgaatatttactatgtgacagttactgccgtaggagctggtgatatgacaaggaacatacaagatgggatctttgccatcaagttgcacgcatgtatacgtacatgcatatgtgcatatgcatagacatagagtaaaacatcagtctgcaacaaaacagattaagag

SEQ ID NO: 158525 - DNA, 530 bp, Homo sapiens
tactgccacatcactggcttctaacatgtgaaaaataattcaccttagacaaagggagaagaaaaacatgaaccagcaaacttaactttctcactatttgtttggactaaatttaatttgttatgtgttaaatctaccaaaaatgaatcagcagatgatttgtagtgttccaaaatcttcctcacttgaaaagagtttacctcatgaaaccctaactagtgagcacctacagtgcactgaagtgcttttttaaaagattcctaactggattgtaggcaccctttaaactattaggagccgaaatcaacaccaaacagaaagaaatgcaaattctcacattttaattgaaattatatactgtcatatgatagtgttatgtatccagattatctgcgtaagtccagttctaatatattctaatgtgtactaatgacagcagataraattttttaatctctactgattttctgcaactgaaataaattagaatgttattgtgtttgtgcactaacaccaaaggtcccattctg

SEQ ID NO: 158526 - DNA, 398 bp, Homo sapiens
taaatattgagactagccagattaaaaggtgtagagggcaggaaagggtgacggcatgccacgcagcagcaagagcgggagcgactcctgaaagagtgaaagtatttgcctacaatagaaggatgagtgagtagggcaytgccagcagttcagtaatgccagagacagggcacacagggaaaagggctaaagatggagagtggggcagaagtcagattatgaaagcattatgtgtaattttaagatgcttgaacattaatgttcaaaagtggtcccgggtcctatctgcatttagatatagatcatttcaatgccaaaaccaatattcctagtgaacaattattcattaagacaaggtgacagatagctcatgtggacacagctgagatgatacaatg

SEQ ID NO: 158527 - DNA, 466 bp, Homo sapiens
agttgtataattattttattatatattacaatgtaataataatataaagtagcacaataagtgtaatgtgactgaacaatcctgaaaccatccccaccttcccccagcccatggaaagattgtcttccacaaaaccggtccctggtgccaaaaagattgtggacaactgacctaaagtaattcactatcacaagtcttacctgggttgctgttttcagaagagtattttggcatctgcttttctttgtagtcagaaagtaattcrcaaattctatgtataaaaatataacaaataaaattactgttttaaaatactgatctggaaacttaccaaatgtaaaattcttagagtatttcaaacaatatcagaatatcagaacttaacagtattatcccatccacttatgcgtacgttctacaaacttctcatgaagcttctaattaaagaagaaaaaaaagtaagatg

SEQ ID NO: 158528 - DNA, 391 bp, Homo sapiens
ttacctgtgatactcttcactttcgttgtcaggaaattgctgattttcaggtgttctgctcttcctttgaggaattaatccattatcaccattgccagcagtgacaccattastcaggttttctagtaatcccacattattactttcatgcttcttcatttcttcttcaaccttgagtgggatattaaggatagttatcactttattgaataaaaagaacctttttaattgattctatcaattgactcagtttgtcattattttagtcattaaaaatatttcacacttaaatttgatcatatatatagaaatattaccatataactttaagatgtaattatcatctcattaatatatcacagaaatttttgtaaagtttgcttcatttctg

SEQ ID NO: 158529 - DNA, 211 bp, Homo sapiens
tcacattgaatagccatacaattttctagctggaagatacacagaataaraagctatcttctttagccacattatctattgataatcagactaaaaccaagaaagataaaatgattggtccaaagctcctaaagtggcattacctagcattttatagcaccattcaggattgttccataataatcaaagaatatctctaggctttgtatct

SEQ ID NO: 158530 - DNA, 211 bp, Homo sapiens
tcacattgaatagccatacaattttctagctggaagatacacagaataaaaagctatcttctttagccacattatctattgataatcagactaaaaccaagaaagataaaatgattggtccaaagctcctaaagtggcattacctagcattttatrgcaccattcaggattgttccataataatcaaagaatatctctaggctttgtatct

SEQ ID NO: 158531 - DNA, 393 bp, Homo sapiens
attgagactagccagattaaaaggggtagagggcaggaaagggtgacggcatgccacgcagcagcaagagcgggagcgaggcctgaaagagtgaaagtatttgcctacaataggaggatgagtgagtagggcattgccagcagctcagtaatgccagagaaagggcacacagggaaaaggcctaaagatggagagtggggcagaagtcagattatgaaagccttatgtgtaattttaagatgcytggacattaatgttcaagagtggtccctgatcctatctgcatttagatatagatcactttaaatgccaaaaccaatattcctactgaacaattattcattaagacaaggtgacagatagctcatgtggacagagctgagatgatactat

SEQ ID NO: 158532 - DNA, 551 bp, Homo sapiens
catttacaaaatggcttttatttaaaaaaaagcctgccaactattaatgttatttcttacataaaaaaaattaagcaaaacaaatgaaaaaagcataacaccaaaaaaacaaaggccaacatattaaaacaagtagttgagattcctaactttatgtatttcactaaggacgggtgaaaaccttgtaatacattgatgctactccaaggatgtatgacaaggaaactatagctgactactgcraaaacttcctttgtctcctggtttctttacatggtaaagaaccttccatcaatcccagcaaactataggccacaggccaaatccaatctgccttatggctttgtaaataaagttttataggagctcagtcatgcctgtttgcttacatataatcatggtggctttcacactacaacagcagacaacagcagggttaagtagatatgacagagaccacatagtctaaaatattgcccacctggccatttacagaaaaagcttgctaacccgttttacaccataaccagaatgccttaatactcaaattt

SEQ ID NO: 158533 - DNA, 478 bp, Homo sapiens
atacctctcttctgcctctgctttatattcccactgccactgggaacacaaacatttacaaaatggcttttatttaaaaaaaagcctgccaactattaatgttatttcttacataaaaaaaattaagcaaaacaaatgaaaaaagcataacaccaaaaaaacaaaggccaacatattaaaacaagtagttgagattcctaactttatgtatttcactaaggacgggtgaaaaccttgtaatacattgatgctactccaaggatgtatgacaaggaaactatagctgactactgcgaaaacttcctttgtctcctggtttctttacatggtaaagaaccttccatcaatcccagcaaactataggccacaggccaaatccaatctgccttatggytttgtaaataaagttttataggagctcagtcatgcctgtttgcttacatataatcatggtggctttcacactacaacagcagac

SEQ ID NO: 158534 - DNA, 572 bp, Homo sapiens
gcccctgcagcacacattgttggctccctatcaatagccattccttattctttcttgaagaagaaatccaagtctattgggatatttattatcccaatccccctcctcagcctcagaaacagaaatgtttattctaagctaatcaggtatttaccttcccagtgcctggtttgggaatgagcatgtggtgtgacccagccagtgaaatgttacaggaagccctttgcatgcttctaagttttctccctgtttaaaagacacatgtgaagaaaagcagcccttgcratgttgtgttgtgagaacaagatgtttggagctgctgcggattagccaaccatgaaaggagacgtgaataaaacactgtcaacagcacagctgaaagagggaaaagtgggatcctaggatatcaatgaacaaccaaaacaactctggttcctactgttttagccactgttcatctagtatttgcagtccaaagcattctacccagtaaatttcccatggcacacaggataagacctactcatttctatagtattaaaaagtctatcataaacttgccttagctaagt

SEQ ID NO: 158535 - DNA, 514 bp, Homo sapiens
aagtcagtaatagtgagaacttattgggacaagcatatgtaacatgacttgtgcttcagtgttcttttgtgatcaaaaattccttacttttacttttttatctatggtaggaccacgcagagcaggggtctcaactcccaggccacagactcataccagtccatggactattatgaaccacaccacacaggaggaggtgagcagcaggcaagccagggaagcttcatctgtatttacagccactccttatggctcatattacmgcctctactctgcctccagtcagatcagtgatagcattagatactcattggagcatgaaccctgttgtgaactgcccatctgagggatctaggttgtgtgcttcgtatgagaatctaatgcctgatgatctgtcactgtctcactttgcccccagatgagaccatccagttgcagaaaaataagttcagagcttccacggattctacattatggtaagttgtataattatttcattatatattacaatgtg

SEQ ID NO: 158536 - DNA, 514 bp, Homo sapiens
aagtcagtaatagtgagaacttattgggacaagcatatgtaacatgacttgtgcttcagtgttcttttgtgatcaaaaattccttacttttacttttttatctatggtaggaccacgcagagcaggggtctcaactcccaggccacagactcataccagtccatggactattatgaaccacaccacacaggaggaggtgagcagcaggcaagccagggaagcttcatctgtatttacagccactccttatggctcatattacagcctstactctgcctccagtcagatcagtgatagcattagatactcattggagcatgaaccctgttgtgaactgcccatctgagggatctaggttgtgtgcttcgtatgagaatctaatgcctgatgatctgtcactgtctcactttgcccccagatgagaccatccagttgcagaaaaataagttcagagcttccacggattctacattatggtaagttgtataattatttcattatatattacaatgtg

SEQ ID NO: 158537 - DNA, 548 bp, Homo sapiens
catgattgaataatcctgaaaccatccccaccctcccccagcccatggaaaaattgtcttccacaaaaccggtccctggtgtcaaaaagattggggacaactgactaaagtaattcactatcacaagtcttacctggattgctgttttcagaagagatttttagcatctgtttttctttgtagtcagaaagtaactggcaaattctatgtataaaaatgtaataaaccaaattactattttaatactgatataaaaaaacttaccaaatgtagaattattaagagtatttcaaacaatatcagaataacagaacttaatagtattatcccayccacttgtgagtacattctacaaacttctctttaagcttctaattaaagaagaaaaaaatgtaaggtgaaatagtcataaatcgagggcactgtgacccagtaaattagctagcattagcatgacataatagaaagtgtcccaactctgcataagtcctagctccataatgaacagctatttgttcttggacaacttgcttctcttaggctcaatg

SEQ ID NO: 158538 - DNA, 489 bp, Homo sapiens
tcataggagtttcagttaatggtgccaataaccatgtgctaggcactgaattaaatgccacatrtatctttcttacttatgcacagccaactttgaaggatatattctcctacttttcatatatgacaacatatttggtggtaaataacgtccccaaggtcacacacctagcaagtaagaaagttactaattaaacccagtcttgtgtgaatccaaagcctagctcttttctctttatcacccacgtacggcttgtcttcattaaaggaaaagtgtatccacttaaaactatcttcactccctctctccataccaattaaaaataaaaacatcaaaatacactggaaaaacaaaaggaaaaaagctgttgaacccacagtatgtgggaacagcaattaattgttatgtagggataagctaacactaatattcttcaaagaaagcaacttaaagcaaagtcattaaaaagacaaaaggattttcaacccc

SEQ ID NO: 158539 - DNA, 489 bp, Homo sapiens
tcataggagtttcagttaatggtgccaataaccatgtgctaggcactgaattaaatgccacatatatctttcttacttatgcacagccaactttgaaggatatattctcctacttttcatatatgacaacatatttggtggtaaataacgtccccaaggtcacacacctagcaagtaagaaagttactaattaaacccagtcttgtgtgaatccaaagcctagctcttttctctttatcacccacgtacggcttgtcttcattaaaggaaaagtgtatccacttaaaactatcttcactccctctctccataccaattaaaaataaaaacatcaaaatacactggaaaaacaaaaggaaaaaagctgttgaacccacagtatgtgggaacagcaattaattgtyatgtagggataagctaacactaatattcttcaaagaaagcaacttaaagcaaagtcattaaaaagacaaaaggattttcaacccc

SEQ ID NO: 158540 - DNA, 453 bp, Homo sapiens
ttgagtggttcttaagcaggagtgtatccagattttgagaaaattgttgttgttgtcgtygttgttgttgttgttgttagagacagggtctcattatgttgaccaggctagactcgaactcctgagctcaagcaatcctcccacctcagcctccctagcagctgggactacagccatgcaccaccatgcctggcttcaaggaaacattttcaaatatacatatccaggctttattagacttactgtatcaaaatattcagaaaaagcctagacttgttatttaaacattttcctcaggttactaggatgcacaattctagctgaaagctagtgcaacagacaattacttcagtctcatttctcacccacatgaccaattccctttctcatttgaagatttggccaaaaagagtaaggagtaggagagagacccatttgctgaaaacaccacat

SEQ ID NO: 158541 - DNA, 562 bp, Homo sapiens
aagaatttacatattacatttatgtattgagtggttcttaagcaggagtgtatccagattttgagaaaattgttgttgttgtcgttgttgttgttgttgttgttagagacagggtctcattatgttgaccaggctagactcgaactcctgagctcaagcaatcctcccacctcagcctccctagcagctgggactacagccatgcaccaccatgcctggcttcaaggaaacattttcaaatatacatatccaggctttattagacttactgtatcaaaatattcagaaaaagcctagacttgttatttaaacattttcctcaggttactaggatgcacaattctagctgaaagctagtgcaacagacaattacttcagtctcatttctcacccayatgaccaattccctttctcatttgaagatttggccaaaaagagtaaggagtaggagagagacccatttgctgaaaacaccacatgattttccccggtaagagaagaacagggtctagtcaactcaaaatccaacttgatcttgttacttgtttatcttccaccttcc

SEQ ID NO: 158542 - DNA, 537 bp, Homo sapiens
aaatatggaagactggcccttacacaggtcaatgttaaaatgaatgcatttcagtattttgaagataaaattggtagatctataccttgttttttgattcgatatcagcaccatataagagcagtgctttggccattaatttatcttcattatagatagcgtagtgcagagtggtatttccatactcatctggaatatttggatcagtgccatgttccagcaacattaacgcacattcatcttcctggcattgtacggcctgtcagtattagaccaaaaacaaattacaaatcttaggaattcaaaataacattccacagctttcaccaactagttatatttaaaggagaaaactcatttttatgcyatgtattgaaatcaaacccacctcatgctgatatagttggctactgcatacctttatcagagctgtcctctttttgttgtcaaggacattaagttgacatcgtctgtccagcaggagttttactacttctgaattcccattggcagaggccagatgtagagcagtcctat

SEQ ID NO: 158543 - DNA, 597 bp, Homo sapiens
caaaatacactgtattttcaatgtgaaaaacaaagggttatcgtatgtattatcaataaagttatatagtttyccataaaaataacattaataatggaaaattctaaaagaaaaataattaaatttcttttaggacaatttaaaaatgtatctgtcaattttaacatgaaaattctcttacatttatacatcccacattctaataaggactaatttttatgagcagtaaagaaatgtgtgtatgcgtgtctgtatacttataggtatatatctgtttctgtgaaaatctctcttttagagtcagaaaatctgtttggtcccagttcttactaataatatatgatctcactaaagatacttaaattcaataaactcaataaactttactctcaatgaggtaagaatgagaacacaggtgccagccatgagctgcggttccactggcacaggcttcagagatcctacctttaacatcctcctttcattcatttgagcctgataagaaaggagtctcttgggagagaagcaagcatacaccttggggccagacagcccatggtcaaagttgaactccaccactgttcagctgtgtgactt

SEQ ID NO: 158544 - DNA, 597 bp, Homo sapiens
caaaatacactgtattttcaatgtgaaaaacaaagggttatcgtatgtattatcaataaagttatatagttttccataaaaataacattaataatggaaaattctaaaagaaaaataattaaatttcttttaggacaatttaaaaatgtatctgtcaattttaacatgaaaattctcttacatttatacatcccacattctaataaggactaatttttatgagcagtaaagaaatgtgtgtatgcgtgtctgtatacttataggtatatatctgtttctgtgaaaatctctcttttagagtcagaaaatctgtttggtcccagttcttactaataatatatgatctcactaaagatacttaaattcaataaactcaataaactttactctyaatgaggtaagaatgagaacacaggtgccagccatgagctgcggttccactggcacaggcttcagagatcctacctttaacatcctcctttcattcatttgagcctgataagaaaggagtctcttgggagagaagcaagcatacaccttggggccagacagcccatggtcaaagttgaactccaccactgttcagctgtgtgactt

SEQ ID NO: 158545 - DNA, 597 bp, Homo sapiens
caaaatacactgtattttcaatgtgaaaaacaaagggttatcgtatgtattatcaataaagttatatagttttccataaaaataacattaataatggaaaattctaaaagaaaaataattaaatttcttttaggacaatttaaaaatgtatctgtcaattttaacatgaaaattctcttacatttatacatcccacattctaataaggactaatttttatgagcagtaaagaaatgtgtgtatgcgtgtctgtatacttataggtatatatctgtttctgtgaaaatctctcttttagagtcagaaaatctgtttggtcccagttcttactaataatatatgatctcactaaagatacttaaattcaataaactcaataaactttactctcaatgaggtaagaatgagaacacaggtgccagccatgagctgcggttccactggcacaggcttcagagatcctacctttaacatcctcctttcattcatttgagcctgataagaaaggagtctcttgggagagaagcaagcatacaccttggggccagacagcccayggtcaaagttgaactccaccactgttcagctgtgtgactt

SEQ ID NO: 158546 - DNA, 527 bp, Homo sapiens
gagctccaagatgtcagcagtawgttcactggcattcctgcagggtgaggctagggagaggaagcagctccgtaacagatatgaaactctggaagcccttcccagccaaaatctctggaccacattacacccagaaatgggtgccctctcagcacacttctctctgcctccctctctgagctgcctcctggccccacatgccccagcctggaccagggcttggagcccagcaggtgttcagttcatggtgttgactgcttcctggcacaggagagcccttggtagctctgtgactcctcctgtggaacccctgcctctgcctcaggacctccctattcccatgggaagaccccaaggattgccccacctgcccagggatcctccaaccccataggccttacttgatgccttatccctcccagaacatgacatgtttctcacaaggtgacttacttccaaggccatctgtggatgtttgctggggacctcttgctgttctcctttatgatctgtagggcaggaccaag

SEQ ID NO: 158547 - DNA, 527 bp, Homo sapiens
gagctccaagatgtcagcagtatgttcactggcattcctgcagggtgaggctagggagaggaagcagctccgtaacasatatgaaactctggaagcccttcccagccaaaatctctggaccacattacacccagaaatgggtgccctctcagcacacttctctctgcctccctctctgagctgcctcctggccccacatgccccagcctggaccagggcttggagcccagcaggtgttcagttcatggtgttgactgcttcctggcacaggagagcccttggtagctctgtgactcctcctgtggaacccctgcctctgcctcaggacctccctattcccatgggaagaccccaaggattgccccacctgcccagggatcctccaaccccataggccttacttgatgccttatccctcccagaacatgacatgtttctcacaaggtgacttacttccaaggccatctgtggatgtttgctggggacctcttgctgttctcctttatgatctgtagggcaggaccaag

SEQ ID NO: 158548 - DNA, 527 bp, Homo sapiens
gagctccaagatgtcagcagtatgttcactggcattcctgcagggtgaggctagggagaggaagcagctccgtaacagatatgaaactctggaagcccttcccagccaaaatctctggaccacattacacccagaaatgggtgccctctcagcacacttctctctgcctccctctctgagctgcctcctggccccacatgccccagcctggaccagggcttggagcccagcaggtgttcagttcatggtgttgactgcttcctggcacaggagagcccttggtagctctgtgactcctcctgtggaacccctgcctctgcctcaggacctccctattcccatgggaagacyccaaggattgccccacctgcccagggatcctccaaccccataggccttacttgatgccttatccctcccagaacatgacatgtttctcacaaggtgacttacttccaaggccatctgtggatgtttgctggggacctcttgctgttctcctttatgatctgtagggcaggaccaag

SEQ ID NO: 158549 - DNA, 527 bp, Homo sapiens
gagctccaagatgtcagcagtatgttcactggcattcctgcagggtgaggctagggagaggaagcagctccgtaacagatatgaaactctggaagcccttcccagccaaaatctctggaccacattacacccagaaatgggtgccctctcagcacacttctctctgcctccctctctgagctgcctcctggccccacatgccccagcctggaccagggcttggagcccagcaggtgttcagttcatggtgttgactgcttcctggcacaggagagcccttggtagctctgtgactcctcctgtggaacccctgcctctgcctcaggacctccctattcccatgggaagaccccaaggattgccccacctgcccagggatcctccaaccccataggccttacttgatgccttatccctcccagaacatgacatgtttctcacaaggtgacttayttccaaggccatctgtggatgtttgctggggacctcttgctgttctcctttatgatctgtagggcaggaccaag

SEQ ID NO: 158550 - DNA, 606 bp, Homo sapiens
aagaactccccggaaactcaaaaggagggccgtcctatccctgcagggtatggggagaattttctggtattagcatagaaagggagctggaggtacctctggaagagcgggggtccacggcatctcagacacaggagtctctgcttgttcagggtgacagatggtgaaacagaaatgacctaatggatctctagacacccggttgcatcttttctccaggaatccagtttcccattgcagggtatttgactacacttgataagaggccagggaaggaccaggattgaggctgggtgttctgttggctgaacccttgtctggagtcaccctaaaagtgatggcaggggagttcctgcaagggactgccccaaacctttccaggatgagagccagttgggattccaaaggaagaaacacttaatgccagggtggtcagtccaaagcatttgttagggagcttacatacagagggggctgcagtgtrccctcacgagggacagccaggaaagaggttgtgcctaggcacaccgcactgagggggtggggtgtggagtttctatgagggtgcaaggaatttggctggggtgggaccagtttccacgtgct

SEQ ID NO: 158551 - DNA, 520 bp, Homo sapiens
aaataattagcaatttgttatcatagactctaaacagaccttcaaaatgcattacatagatttggtaaaacagattgtcagtctgccaaaagtaatcacyttggtttgatttgcattgaatgaaaattttaaaatgtaaagctaaactcttcaggatcactgcactgggtttctataggacaacactgaacagggctgccactgaaacaccttggatgagagcctcaaactccctgaacacagcttccagcacactactgggagaatgattgggactcaaaaatatgtgcaatgaatgtacttacgaccttgttggaaaggaagtaaagaggttgtatgtaattacctcaaattaatactgctacagataaagtagtaattagcactgacaaagtaatagtagcgctaaagtagtattaatagccctacactagtagtagtaataaagtggcatcgctattgattctatccgtctacctacctacctgtctggataggagggcataggatttgactgtaa

SEQ ID NO: 158552 - DNA, 606 bp, Homo sapiens
gaattcattgaaaatctctggaaataattagcaatttgttatcatagactctaaacagaccttcaaaatgcattacatagatttggtaaaacagattgtcagtctgccaaaagtaatcactttggtttgatttgcattgaatgaaaattttaaaatgtaaagctaaactcttcaggatcactgcactgggtttctataggacaacactgaacagggctgccactgaaacaccttggatgagagcctcaaactccctgaacacagcttccagcacactactgggagaatgattgggactcaaaaatatgtgcaatgaatgtacttacgascttgttggaaaggaagtaaagaggttgtatgtaattacctcaaattaatactgctacagataaagtagtaattagcactgacaaagtaatagtagcgctaaagtagtattaatagccctacactagtagtagtaataaagtggcatcgctattgattctatccgtctacctacctacctgtctggataggagggcataggatttgactgtaagattgggcttagcagtgaaaacaaaagagctcatgcatgctttggacaggtatgcactcaaactt

SEQ ID NO: 158553 - DNA, 502 bp, Homo sapiens
cacttgaaatcttccaatcaaggtgactagtactactccaggttatgcaggaatcatgcctaaaatctcatcawccttcaacccacccataggacagacctggaggtggtatatactatctgcaaactaatataccacttttccttttatttgattttctgtcctccctattctgcccaatccgcatggtttgaaattgagcttatggcccattgtcttctttctctccttgagtttctcccaagctggttttagcttggtgggacaaatcagagaaaggtatagtgtgtgtacttctcctttgtgtttgcatgtttgcacttatgggtgcttacacccactctatgcagagacatcccagcctcgaccacaggatctggagccacctctaccctgagctgaaagaggaattttttttttttttttgagacagtctcactctgtcacccaggctggagtgcagtggcatgatctcagctcactgcaacctccgcctgccggg

SEQ ID NO: 158554 - DNA, 351 bp, Homo sapiens
aagcttcacaaagcattacttactcttaatacttgctcttacattttctattctattgcttttcattttttcatttttttcctttttaatactgcctatagcttctaagttgatttcagcatctatagtttggcttasagatttttagattaaaaagagacatttatgatcattttatagaaccatctgtaaagctatgattgaaaaatccagaagagatatttttaagaaaatgtaaaaaagaaaaaaaccagaaaatgaatggttgcgagctactaacagagtgggaaaagagacaaaggatagataaaatcaggtcatagggtggacaaagacagtatcaaagaggac

SEQ ID NO: 158555 - DNA, 517 bp, Homo sapiens
cattgcaacacaattacttctcgcctttgagaactgagacttaaaagaatattatttatcaaaaatgtggtgatttaataataatgctatatcagagaagccaatgtgtaggaaaagtagagttaggaccacaaatgaagataaaatttcataataacttcccaatgaaaactgtaggaaatttatttcaacattgttgaaaaataaagacatagaaggaatggagtacattagaaaagaaagactaatgtttacccagtcattgattaaaaccagagccaggtgtttcaatcaagaagaagatgagagctagaaagtgtttttggttggtggctatctttaagagtcagcaagaaaaagtcaataaataatttgcctatccttttatcttttatttttccaacataggtgatcaaaaaaacaactgtggtataaattctattayatttacttttctaaattaaaactagatttaacataggcaatacagacctgccctgtaaaatcatgacagatt

SEQ ID NO: 158556 - DNA, 647 bp, Homo sapiens
gatcctcacttactcttctcttgcaaatcacattcttttggggatttggccaatgggagatactggaaggagactgggaaaagggaagaaggaaraaaacaggacaattctcttctctcattctccctcaacccccttgatatgtctctctggtttcacggacattatccagcagtgactaggtgactgggtctcctctgtggttcagttctccaccagacagatccctccataatcccaaatattgtactgccaagcacccgctccatggtgccactcctgccacagagttggtccatgtgaccatcatctgggcttcagtaacgtccctctgctagtggctttctgcgttgctcatgtctgccacactctatttgatgctcaattcttccatcacctgtgtagctacttccttgtgttcaattccctttgtttgaaatacttagagtagtttctgttttcctgaccaaaactgttctcaactacagagttttatcattagagcagccctcactgaccactgggtcactgtccagcccatgtacccatttcaggtctcttcattgcgctttttactatctgctgtttttgtttgtttatccatgtatttgcttggtgctatcttgcttatcattgtatccccagag

SEQ ID NO: 158557 - DNA, 531 bp, Homo sapiens
gtctatataatttgtagtgataactccacttttttcctggtattgttaatttatgtattatcttttattgtattgacacccagctagtgtccactggagacccttttggtgaattgcttggtgtgtgagaaaataccccaacacatcaggagtcacagaagtgttctttgttrattacattaattttctgctacctctcacagtagtttcaattgcctgattttcttcttgatacctttctatttccttacaaacctccttaaataatttgcaatggaatgtttaacaatgatggtaagttttacaagagaggctttatagttttctcttggcagaaatagtgtgggtctgattagtttaaatccatttatggattgagctatgtaaatacaagttcatagctttataaatctaagacacagttttataaatctcttacaccatatttcaatggtgtaagtatctaaatctttcacctaaaaaactgcagcatctttatctcctcagcatcaagaaactctaagaattaca

SEQ ID NO: 158558 - DNA, 640 bp, Homo sapiens
atataatgcaattattaaatttaggaagaacaaaaaggcacacaatcaaggcaattgaactaagattaaaatcttagttcattacttggctcattagggaataagacacaattcaaatgagktatataattatagagggggaatgaagcagtcgaaatatggatatgatgaactattaagatgttacattctaacttcaataataggaagtcaatagataatactcacatttaaagagtcaggaaacttcatgggcgtatttttaagaaatacatggtaaaagaatgaacaaactattcctactcataagaacataaatgattgctatagacataatattgagcaaaatagagcagggaagaatacacactgtgttctgcttacataaacttcaaaaagaagtaaaattaaacaaaggcaattggatagtggtttcctttggtatgggtaataggtgggaggacgcatgattcacaagtaccttctgaagtgttgataatattctattttttgatctttgtggtgtttatacctatgcataaactcgataaaaattaattgtgctataaactttgacttgtggaattttatctatatactatattttgtacttcaacaaaacttttctttgaaaagaaat

SEQ ID NO: 158559 - DNA, 640 bp, Homo sapiens
atataatgcaattattaaatttaggaagaacaaaaaggcacacaatcaaggcaattgaactaagattaaaatcttagttcattacttggctcattagggaataagacacaattcaaatgaggtatataattatagagggggaatgaagcagtcgaaatatggatatgatgaactattaagatgttacattctaacttcaataataggaagtcaatagataatactcacatttraagagtcaggaaacttcatgggcgtatttttaagaaatacatggtaaaagaatgaacaaactattcctactcataagaacataaatgattgctatagacataatattgagcaaaatagagcagggaagaatacacactgtgttctgcttacataaacttcaaaaagaagtaaaattaaacaaaggcaattggatagtggtttcctttggtatgggtaataggtgggaggacgcatgattcacaagtaccttctgaagtgttgataatattctattttttgatctttgtggtgtttatacctatgcataaactcgataaaaattaattgtgctataaactttgacttgtggaattttatctatatactatattttgtacttcaacaaaacttttctttgaaaagaaat

SEQ ID NO: 158560 - DNA, 640 bp, Homo sapiens
atataatgcaattattaaatttaggaagaacaaaaaggcacacaatcaaggcaattgaactaagattaaaatcttagttcattacttggctcattagggaataagacacaattcaaatgaggtatataattatagagggggaatgaagcagtcgaaatatggatatgatgaactattaagatgttacattctaacttcaataataggaagtcaatagataatactcacatttaaagagtcaggaaacttcatgggcgtatttttaagaaatacrtggtaaaagaatgaacaaactattcctactcataagaacataaatgattgctatagacataatattgagcaaaatagagcagggaagaatacacactgtgttctgcttacataaacttcaaaaagaagtaaaattaaacaaaggcaattggatagtggtttcctttggtatgggtaataggtgggaggacgcatgattcacaagtaccttctgaagtgttgataatattctattttttgatctttgtggtgtttatacctatgcataaactcgataaaaattaattgtgctataaactttgacttgtggaattttatctatatactatattttgtacttcaacaaaacttttctttgaaaagaaat

SEQ ID NO: 158561 - DNA, 426 bp, Homo sapiens
ataggagaatgtgtgcagatttgagcaaattctacactattttatatgagacaagattttatggattatatattatgtatatacatatatatatacacatatatatatatatatgtrtatatatatatataatacacacatgcggaaatattattaagccttgaaaatggttgtcctgtcatttgtgaaaacatggatgaatctggaggacattatgctaagtgaaataagccagatacagaaaagaaaatactacatgatctcacttatatgtggtatctaaacaaaacaaaacaaatatattcaaatacatggaaacaaagtgaaaaggtggttgtcaaggggcagagggctgagtgtggggagaaatgtggaaacggcattcataggatacaaagtttgggttatgtagaataagtaagtcta

SEQ ID NO: 158562 - DNA, 410 bp, Homo sapiens
ataggagaatgtgtgcagatttgagcaaattctacactattttatatgagacaagattttatggattatatattatgtatatacatatatatatacacatatatatatatatatgtatatatatatatataatacacacatgcggaaatattattaagccttgaawatggttgtcctgtcatttgtgaaaacatggatgaatctggaggacattatgctaagtgaaataagccagatacagaaaagaaaatactacatgatctcacttatatgtggtatctaaacaaaacaaaacaaatatattcaaatacatggaaacaaagtgaaaaggtggttgtcaaggggcagagggctgagtgtggggagaaatgtggaaacggcattcataggatacaaagtttgggttatgt

SEQ ID NO: 158563 - DNA, 462 bp, Homo sapiens
aatgaaattgaaacaaaaatattaaaatgatcaatgaaatgaaaacttggttctttgaaaagattaacaaaactaatagaccattagttccattagccaagaagagacaagattaaaagaagttttagaaataaaaatgaaaatattacacctgacatcacagaaatataaaagatcatccaagactactatgaacacttctatgcacacaaactagaaaatctggaagaaatggataaattsctggaaacacacaaccctactagcttgaatcaagatgaaatagaaatcctgactagaccaatatccatcagtgagattgagtcactaattttaaaaaactgccaaagaaaacccaaggccacaggaattcacaaccaaattctaccagatattcaaacaacaattgataccaatgctgctgaaactattgcaaagtattgagagcacagacgcaaaaat

SEQ ID NO: 158564 - DNA, 441 bp, Homo sapiens
tctgttttttcttgtgaattcttcccttggactcatacattagttagaagtatattgtttaattcccaaatatttatagatttcccaggatttttgccttgttaattttcaacttagttgagctctgatcacaaaatatacttcatttgatttcaatcattgtaaatttaaaatttttttaaattttttgagaatttttataggcctagtatatagtctgtcctgaagactsttccaaatacacttgaatagaaggtgtatttactattgtgaatacccactgcgtggtggggagttctatagaatacaggtaggtcaaggtggttgatggtatcgtttaagtcttctatatccttgctgattttttgtctagttattctatcagttttataccacttcacggaagtataattgatatacaaatacgtatacatacttaat

SEQ ID NO: 158565 - DNA, 592 bp, Homo sapiens
caaagaaacatagactcctagacaataatagtggaaaaattcaacactccacaaacagcattaggcagatcatcaaagcagaaaattaatagatattcaggacctgaactcaacattggaccagatgtatctgtttgacatctacagaactctccactagaaaataacggaatatacattcttctcattgccacatggcacatactytaaagtcaaccacgtaattggacataaagcaattcttagcaaatgcaaaaaaaaaaaaaaaaaacaaattataccaaacacactctcagaccacagtgcaataaaaatataagtcaagactaagaaaaccactcaaaaccatgcaattacatgaaaattaaacatgctcatgaatgacatttgggtaaataataaaattaaggcagaaatcaagaagttctttgaaacaaatgagaacaaagatacagtgatacggtttggctgtgcccacccaaatcttgaattgtagctcccataattcccatgcgtcatgagagggacctggtgagaggtaattgaatcatgggggtgggtatttcttgtgctgttctcatgatagtgaata

SEQ ID NO: 158566 - DNA, 592 bp, Homo sapiens
caaagaaacatagactcctagacaataatagtggaaaaattcaacactccacaaacagcattaggcagatcatcaaagcagaaaattaatagatattcaggacctgaactcaacattggaccagatgtatctgtttgacatctacagaactctccactagaaaataacggaatatacattcttctcattgccacatggcacatactctaaagtcaaccacgtaattggacataaagcaattyttagcaaatgcaaaaaaaaaaaaaaaaaacaaattataccaaacacactctcagaccacagtgcaataaaaatataagtcaagactaagaaaaccactcaaaaccatgcaattacatgaaaattaaacatgctcatgaatgacatttgggtaaataataaaattaaggcagaaatcaagaagttctttgaaacaaatgagaacaaagatacagtgatacggtttggctgtgcccacccaaatcttgaattgtagctcccataattcccatgcgtcatgagagggacctggtgagaggtaattgaatcatgggggtgggtatttcttgtgctgttctcatgatagtgaata

SEQ ID NO: 158567 - DNA, 559 bp, Homo sapiens
gttatttaagtattattaagttaaaatacatatttaacaagatcaaataataaaagaagatagataaactttaaagataaactttaaacttgaatggacagctaaactttagctaatcttgcccctaaaaagtccagattcttataagattaaaattgcaattattatatgtgtatatatgcatgtgtatgtgtgtgtgtgtgtgcatgtgtgtgtgtgtatatatatataattttttmttttttgagtctcagtctcactctgttgcctaggctagagtgcagtggcacaatctcggctcactgcagcctctgcctcccaggctcaagtgatcctcccacctcagcctcctgagtagctgggactataggtgcatgccaccacgcctggctaatttttgtatatttttggagagatggggtttcatcatgttgcccaggcttgtcttgaactcctggctttaagtgatccactcgccttggcctcagaaagtggtgggatgacaggcgtgagccaccacccctggccattagttattaatatatgagttattaaattc

SEQ ID NO: 158568 - DNA, 559 bp, Homo sapiens
gttatttaagtattattaagttaaaatacatatttaacaagatcaaataataaaagaagatagataaactttaaagataaactttaaacttgaatggacagctaaactttagctaatcttgcccctaaaaagtccagattcttataagattaaaattgcaattattatatgtgtatatatgcatgtgtatgtgtgtgtgtgtgtgcatgtgtgtgtgtgtatatatatataattttttcttttttgagtctcagtctcactctgttgcctaggctagagtgcagtggcacaatctcggctcactgcagcctctgcctcccaggctcaagtgatcctcccacctcagcctcctgagtagctgggactataggtgcatgccaccacgcctggctaatttttgtatatttttggagagatggggtttcatyatgttgcccaggcttgtcttgaactcctggctttaagtgatccactcgccttggcctcagaaagtggtgggatgacaggcgtgagccaccacccctggccattagttattaatatatgagttattaaattc

SEQ ID NO: 158569 - DNA, 586 bp, Homo sapiens
attgaactgagcaatctggaggtaaatatgaagcactacagtgacagtgctttttgttattgcatacctaaaagaaggagaaatatcaccttataagataagcaactagatttatatatgttcaagtagaattataaaataatatgtaggtcagctaaggccaattttcctatatgttttggtgtgtgtgtgtgtgtgtgtgcgtgtgtgtgtgtgtagcaatgyagtttcctaaaattaggctcaatgatttctattttcacctcatagtactgctacttacacctctatcattgcatttgtcagtagtacaatcataacccaagtatgaagaactcacacatctttgattcctgcaaacctaaaaaggatgagcaaaaataagttaattgacatgccatctagagttgccatttaattaaaagcattccataccataccatattaccatggactaataaaaagggtattgatttagcaacaagaattagtatactaacaatgaatagttaatgtattgagctactatgtttccagcactagatgagactctgattatctaggagtaaacaaaacaataacagct

SEQ ID NO: 158570 - DNA, 540 bp, Homo sapiens
caaagcgactaatggtaagcccaagaacatgtaattagaaatattttttattttaaaagtttgctaaagaatattggcaatattttgggagatttttcctcttrtaatataggatcataacacactaacttttaaagtcagagagttaatctgttcacatagtttttgcccaacattattgagtatgaaaaaatacattattaattgtgttggctaattacggcaatgcatacctccatttaagatttatggggaaatggactaatgatgaatagatggccaggttattttggatggctgtggtagtagtacaaaaagtactagctctggatactggatacagattagtgctgctgtagttataaatctatctattctgttagcatgcttccttcacacttaactacaatttaaatacagtagttagatatataatttgcagagctattgtccagaaaaaagtaaacctaattttcagaaccattaaatatattaattgtctagagaaacaaaagttgaggaagggttgttggtattact

SEQ ID NO: 158571 - DNA, 540 bp, Homo sapiens
caaagcgactaatggtaagcccaagaacatgtaattagaaatattttttattttaaaagtttgctaaagaatattggcaatattttgggagatttttcctcttgtaatataggatcataacacactaacttttaaagtcagagagttaatctgttcacatagtttttgcccaacattattgagtatgaaaaaatacattattaattgtgttggctaattayggcaatgcatacctccatttaagatttatggggaaatggactaatgatgaatagatggccaggttattttggatggctgtggtagtagtacaaaaagtactagctctggatactggatacagattagtgctgctgtagttataaatctatctattctgttagcatgcttccttcacacttaactacaatttaaatacagtagttagatatataatttgcagagctattgtccagaaaaaagtaaacctaattttcagaaccattaaatatattaattgtctagagaaacaaaagttgaggaagggttgttggtattact

SEQ ID NO: 158572 - DNA, 540 bp, Homo sapiens
caaagcgactaatggtaagcccaagaacatgtaattagaaatattttttattttaaaagtttgctaaagaatattggcaatattttgggagatttttcctcttgtaatataggatcataacacactaacttttaaagtcagagagttaatctgttcacatagtttttgcccaacattattgagtatgaaaaaatacattattaattgtgttggctaattacggcaatgcatacctccatttaagatttatggggaaatggactaatgatgaatagatggccaggttattttggatggctgtggtagtagtayaaaaagtactagctctggatactggatacagattagtgctgctgtagttataaatctatctattctgttagcatgcttccttcacacttaactacaatttaaatacagtagttagatatataatttgcagagctattgtccagaaaaaagtaaacctaattttcagaaccattaaatatattaattgtctagagaaacaaaagttgaggaagggttgttggtattact

SEQ ID NO: 158573 - DNA, 468 bp, Homo sapiens
atcttgtctgccgattctaagaccttgggaaaagtgcaatatttgggtaggagtgccccatttttccaggtagtctgtcacagcatcccttggctaggaaagggaaatccctcgactccttgctcttcttgggcggggcaatctgcgcttcagctcgccttccatgggctgtacccactgtccaaccagtcccagtgagatgaaccaggtacctcagttggaaatgcagaaatcacccatcttctgcatcgatcacactgggagctgcagactggagttgttcctattcggccattttggcaagtrtattattttctattcctatttgaaaagaagattagaaacagtttacattcacatagagtggataacaggattcatttagaatttttctccagggttaagtttactctgtttccctccatcataatatagtagaagagatttggacttcccataaaatgtaac

SEQ ID NO: 158574 - DNA, 547 bp, Homo sapiens
tttacccaatgatagattacaaatggcaaaatacagcatccatgggataagataacctttggtatgtttgtggcatagaggggatctaaaagttcttaaatttttaacagataagttaaatatactggaaatatctgtatgctgggagaaattgtggatcaaaatgaaggttgtgtatactgcagaaatgtactttctaggtatcatgacaggaatgataggcacaataaaatgtgcagaaagagaaatgcaattagccactctcagcaaattttgtttaataagtgaccaggctggccaagctatatcaaagtggggcaagtgactaattctcccagagtgcggtaaaatatgaatggtctaagacaactagaacttagagaacaaaattgggctctataatgggaatgaagtcgtgtcttcacgctgagttaagcatatacatttcaattctgctattaagacagttgcatttagttgttgtgcaccataaaataatgtttyagtttggcatttttcagttgttatactatcaattaacagtatg

SEQ ID NO: 158575 - DNA, 608 bp, Homo sapiens
attacactggcagttatgttgtcaggagaacatggaggactaactatcctgctaggctgatataacaagtatgtttagaacaaatgacagagcagaaaataactaggaatttaacaaggaaattcaaaattacgtggatrtatggaaaatttagaatgccatatgcatgattattgcaagattcatgctagaaaatatcaaagaagataatgagctgtcacctgaggctaattcctaggctcagcgaaagtctggctcagtgtaaaagcagtgctccagcacagactcagcctgcactgaatagaagagttaagagttattttgtttgtgcttgtttcctttgttttttggctatgtacttattattagtattaaaaattagctcctgttttccaaaaagtcactgtcaaaacattacctgaacaaaaactctgggagtcagacttcagtgactacaaagccaaaaaatacagtctttgcaaaaatagcctggtaagtcactaaacaaatgaactaattaagtcttcaaaaatcaagaaactggcaaaccctgagtaaggtagatgaggagataatcagagtttccttgttatgacagtcaaatagcc

SEQ ID NO: 158576 - DNA, 517 bp, Homo sapiens
cttaagtttagatggtcatgtggatttttagtatgagtgactcattttaggcctgccatgttttctttaagtttccaccttttgccagactcagtgataccgagcggtttgatcaaaatttaaggcattagtgccactctcagtcatcatgrtgctgcagttttttatttagtctcagagtgaaatttttaaatcacaatttcaggatccatggtcgatcttttctgttgctctcaatcttgttctaactgtagaattagatcaactgttgtgtgggggatagctgcaagcaagcattaagattcatgagaggaggcagtgcactccggagattactagaataactactagcaaaattgtacccaataattggtcataattcttggttatagaggttcagtttttgactcaaagtcaccatgagccaaatcaactaaaataacaaaagaaaaacaaaagttgatggctagaacaaacgatttttttttctctgagttcagagggcagttagttgaaa

SEQ ID NO: 158577 - DNA, 501 bp, Homo sapiens
aaacaacttaagtttagatggtcatgtggatttttagtatgagtgactcattttaggcctgccatgttttctttaagtttccaccttttgccagactcagtgataccgagcggtttgatcaaaatttaaggcattagtgccactctcagtcatcatgatgctgcagttttttatttagtctcagagtgaaatttttaaatcacaatttcaggatccatggtcgatcttttctgttgctctcaatcttgttctaaytgtagaattagatcaactgttgtgtgggggatagctgcaagcaagcattaagattcatgagaggaggcagtgcactccggagattactagaataactactagcaaaattgtacccaataattggtcataattcttggttatagaggttcagtttttgactcaaagtcaccatgagccaaatcaactaaaataacaaaagaaaaacaaaagttgatggctagaacaaacgatttttttttctctgag

SEQ ID NO: 158578 - DNA, 369 bp, Homo sapiens
aactcactataaagctacagttatcaagtcagcgtggtactgtcattaacagacatacaggtcagtaaaatagaataagaaaccagaaatagacatgcaaatatatggaaaatggatttctaataaatgttcaaagcaatacaatggataaactttagctttttaaacaaattgtgctagaataattatatatttatatgtaaaaaagataaacttagagctgtatttcacaccatgtycaaaaattaactcaaagttgattacataccaaaatttaaaacttctagaagaaaacataagagaaatcctcagggactttgagcgcagattttgtagatatgacaccaaaaatatgaccccaaaatgtga

SEQ ID NO: 158579 - DNA, 498 bp, Homo sapiens
cttgactttctattgactgggctgtttgcaattattgggtggcagaggttaatgtgcagatttttgtctggtagaaatgcaaataatttctctctggtggatgagataacccacatattattattcattattctctaaaacactaatcagttttgtatctaaaacctacaattctatcctaacatgtttattaatatactcctagcttctcaaatgctctttgatatggtttggctctgtccccacccaaatgtcatcttgaattgtagctcccataattcccatgtgtcatgggagggacccggtgggaggtattgaatcatgggggtgagtctttcccatgctgttcttgtgatagtgaataagtcttatgagacctgatgctttcataaaggggagatcccctgcacgcgttctctggcctgccaccatgtaaratgtgcctttgctcttccttcctcttccactatgactgtgatgcttccccagccatgtgaa

SEQ ID NO: 158580 - DNA, 531 bp, Homo sapiens
tacataattaagaagagctagttttctcaaaccacagaaatcttagataaagcacctgggttgaagggaggtgaggagagcagagataaagggaatgaaataagggaaaggagatattgaaactcatagtgaatggtacaggctcaaaaggatcacaaagactaagtagacttcattgtgccctacaatggtcactcatgtagccttccaaccttaaaagtatgtttatagatcctgagatatgtgatatgtttttaaaaaattgttcctcgtcacccacttgtttttgcttggttgggtttgaatggaaacatcttgaaaatttcttcttcaatttgacaatcatgtatctaagctctcgaaatgttatrtaattgaggcttaaaccactgagatataactttcccctctagaattacagtagatagcaatgacagtgacaattcttagaatagctgtgaaaaatactgacaactctgtgcttccaagtatcttgctataactcatatgaagactactaaactcatgatt

SEQ ID NO: 158581 - DNA, 510 bp, Homo sapiens
aatgaacttccttggtttttcagttcccaaatgccacattagattgaactaattcaaagttaagagatagaagtacctacagtgtctctggggcccatgacccatcccagatacaagagagaattttattaggttggtgcaaaaatatttggcaaaaacctcaattccttttacaccaacctaatacctgctcatcagagtcatttttgtcttaaatatgcatgctgtgagtagttcatctcagccctggaaktcagtggagtagatgatattaagggatgaaggcttagttatcaacttgtggccaacccccattagatattagggtatgtaactaattctgagaatttacaacactggtaaagaaattcattagatgcaaattctgactcatcataactagtcacaaaatgtgtctgagatatgtccataaatacactagcctttcacataagaatattatagatttttatggttttatggaggtataattgacacacaaaatactgc

SEQ ID NO: 158582 - DNA, 510 bp, Homo sapiens
aatgaacttccttggtttttcagttcccaaatgccacattagattgaactaattcaaagttaagagatagaagtacctacagtgtctctggggcccatgacccatcccagatacaagagagaattttattaggttggtgcaaaaatatttggcaaaaacctcaattccttttacaccaacctaatacctgctcatcagagtcatttttgtcttaaatatgcatgctgtgagtagttcatctcagccctggaagtsagtggagtagatgatattaagggatgaaggcttagttatcaacttgtggccaacccccattagatattagggtatgtaactaattctgagaatttacaacactggtaaagaaattcattagatgcaaattctgactcatcataactagtcacaaaatgtgtctgagatatgtccataaatacactagcctttcacataagaatattatagatttttatggttttatggaggtataattgacacacaaaatactgc

SEQ ID NO: 158583 - DNA, 510 bp, Homo sapiens
aatgaacttccttggtttttcagttcccaaatgccacattagattgaactaattcaaagttaagagatagaagtacctacagtgtctctggggcccatgacccatcccagatacaagagagaattttattaggttggtgcaaaaatatttggcaaaaacctcaattccttttacaccaacctaatacctgctcatcagagtcatttttgtcttaaatatgcatgctgtgagtagttcatctcagccctggaagtcagtggagtagatgatattaagggatgaaggcttagttatcaacttgtggccaacccccattagatattagggtatgtaactaattctgagaatttacaacactggtaaagaaattcattagatgcaaattctgactcatcataactagtcacaaaatgtgtctgagatatgtccataaatacactagcctttcacataagaatatyatagatttttatggttttatggaggtataattgacacacaaaatactgc

SEQ ID NO: 158584 - DNA, 594 bp, Homo sapiens
aatagcctctcagctcttccgtatcgcccttgtaaaagaacaaccctcatttttatctcataaagtgttagggaggattagaagggtttacatatggagggcactgagaaaagaggctgacatttagaaggtgctccaaaagcagcggccatggtgatgggctaaggtactgcagggaaatgcaaaaagacaaaggagggtcaagttcaggagcaccacctccatttagcctgtgcctgagagagaagacatggggatggacacagagaattaagaggatgaaaatgacrcagagctccagtctcacaacaatgtgggagggcagagagtcaagtcacagtgtgggtcagtgtcctctgacgctgcagagagcttggggagaatacgagctgagactacacattgaccactggagtgtcccttggtcacctgtgagatggttatttgcacagcactcagattaaaagggtagtaaatgggtgaccagagataagaaaccaaaccacagattgctcttttttcagaagtgagaaggaaacacagcttgaagaaatgaaagatgctaaagatgttttgcttataggatgaggtact

SEQ ID NO: 158585 - DNA, 575 bp, Homo sapiens
ttttttctactcttgagcatcatataaatggaaacatagagtatgcatgcctatctggcctcttacgctctttataatgtatatgasattcatccacatcagtgcatacatcactgctgatctggttatgaatgttttttcaatcagagagagttgttgattgcaaatttgtctacaactatgactgcagatttatctattactggctttagttttgtcaacttctgcttgatgtattttgaagctgtttattagcagcatacatatttagggctgttatatcttcctcatgaattaaccatttgatcattctgaaatgtctcttttccactttgctaatacttcttcccctgaagtcaactttgacagtaatacagacacaccagctttcttatccttactattcatatgggatatagttttccactcttttactcaatctaactgtgtctctgtatttaagacgagtctcttgtagtcagcaaataacggattcttgctttttattatagtctgacaatctctgctctttaagtggagtgtttagtccacttgcacttggtgaaattatttct

SEQ ID NO: 158586 - DNA, 436 bp, Homo sapiens
aaggaattccaaatccacctgtttatttaaactttattaacaccaatttctgttaataacctccagtaatgctgaggatgatgatatatgtatgggcccatacttattaggtgctaaggaatccactgggtttcatgtgtgtttcattttatttgttttgtttttcttgagatggagtmtcactctgttgcccaggctggagtgcagtggtgccatctcaagtcactgcaaactttgcctcccgggttccagcgattctcctgcctcagcctctcgagtagctgggactacaggcatgcaccaccatcccttagtaacttttgcatttttagtagagacagggtttcatcatgttggccaggctggtctcaaacttatgacctcaggtgatccgcctcagcctcccaaggtgttgggattacaggcgtgagccacc

SEQ ID NO: 158587 - DNA, 541 bp, Homo sapiens
ggaattcactgtctatcaaaatcctgatagccttaatttctctgttcaagtggaaacctacagccttctcaaattgtaaccttaattcacccttcagagaattagggtgatttcagccagtccccagaccttgaatgccaccctagagtaagtgctgcaaaacctatcttccagccctgacctcttccctgagctccaagtgattaggtccaattccttaayctacatctctacttagatatctaaatttcaaatttaactctgccaacatagaatttttttttttttttgagacagggtcttgctattacccaggctggagtgcagtggtgccatcatggctcactgcagcctcaacctcctggactcaagcaatcctcccacctcagcctccccagtagctgggactataggcgtgtaccactacacccactaattttttattttttgttgatatggggtctccctatgttggccaggctggtctcaaactcctggtctcaagtgatcctcccacctcggcctcccaaagtgttggtat

SEQ ID NO: 158588 - DNA, 591 bp, Homo sapiens
cttcagaacttcaactaggtgtgtctggctccaaggtcattgttgtttttaatgtcaccacaatgattgcacaatcattacttcaatccagcattagttattctttcaaaaaccaggcaggaacttcaaccttcttaaaggcacaaaaatttctagaacatctgaagattgcacaagctcattaagataactatattattttcgtggtgtcccatattgaagagtgtccatgagtcattcactagaattctatggaaagaaatagaaatcttcataaaatagtatgtgcagagtagctacagattggacttgaactttatgtccacmgtagacaggaataagatgcaaattataattcaacaataaattaggctcattataaggaaattattctcaaatttaaagttacttaatactagcatgagttcttttctaatttttttaggaggcccatatatggctacttctaactgccaagaactcacattagaaatagtattggctgtcttaggagacagcaaactcccttatgatagaatgtaaaatcaccaaattgggttagtgttaggcaacttcaaactgctgtggaga

SEQ ID NO: 158589 - DNA, 454 bp, Homo sapiens
catttacattattttgcacatgacctgttagtctatttagaagacagtgaagatcattatctctgatgttctaaaacttcatgattgtataccatggtgtgtttgtgtgtgtgtgtgtgtttgtctgtgtgtgtgagtgtgcattactctgtttcctttaggctttttgaacactttcaagtatcttcttctgtgtttttactgttatctctatctaaaacttgaattaaattttgagacttccaattacacttttaaaaaagtttgcatcttctacttttcatattttwatttttgcttttggcttactcttaataccttctcttgatgttatctcttcagcattctaatgattaaggaatacatgcacacacacacacttatatgaaatgttcttaactaaaaaataattttatttgctctttgaattttatgatttcctattggcttgatt

SEQ ID NO: 158590 - DNA, 560 bp, Homo sapiens
tttgacatatatgggacatgccacaacaacaacagcagaatatatttatttatttatttatttaatttatttatttttaagacacagtctcactctgtcacccaggctggagtgcagtggtgccatcttggctcactacaacctctgcctctcagattcaagtgattcttgtgcctcagccacccaagtagctgggactacaggcatgcacctggataaattttgtatttttagtggagacrgggattcacaatgttggtcaggcttgtcttaaactcctaacctcaaatgatctgttcaccttggcctcccaaagtgctggaattacaggggtgagcaactgtgcctggcctatgtacttatttttaagaactcagaatattctcaaagataaccattttcctggccattaaaaaatgagtttagatgagttgaaatcataatgaatttgttctctgacttcaatgaaatcaagttagaagttaattataacaaaaaatcattaaaatatttaaaaataaatgatactcttttaaataatcaataagtcaaataggaag

SEQ ID NO: 158591 - DNA, 618 bp, Homo sapiens
gtgccaacattcaaatcagaatatatatgttgttgccatccaaattccaaacaataaggttgagatgataatagtcgctgagttacagtgacaaaaagtattggtcaaagggaaataagaaataaacagaaaagtcaactgaataaataaaaagtyggcaatcagcaggtggtttagaaaaattctgaacttaagttgtcaaaaacacaattgtaaattttatgcccatttttatctgtgcctatttgttgagaaatatttatatagagggtcagttatacagcaaagaaatatttccattacataaccatcttcataatgtattttatagttcttttttatgtattcctcctgactacaatatgagcttcttgaaaacagagatggcattttctttatcatgttaattctagtacttagtttaagacctgagccagaataagtggccatgaatgttggttgaattaatgaatgaaaaattatcataaggcagcaacaagaacgtcacttaaataactgaatagtggtgtaattataataaaactgcccagaactttttgctgaaatattttcctgatcttggtaaattcagatgatgccagcttcttttttcctcca

SEQ ID NO: 158592 - DNA, 445 bp, Homo sapiens
ttgcacctggtaggtggaggttgcagtgatctgagatcacgccaatgcactccagcccgggggatggggccagactctgtctcaaaaaaaaaaaaaaaacagaagaagttagcactctgcaagaatactatgatyccattgaggatggagaatatttttatttatctctatctactcagtgtctatagtagtctactgcctatagtaggtgccatggctttttttgatgattgaataaatgcatgtagctttctgggcagaaatgcagacagacagtatgtggatgaactgaaatacagtaacacatatatattactttctgttatctagtgctgggactatgaaacgttagcaatgaggaatcagaagctataaaggaggaagagccaaaggtggattaaaagaagaaagatggttagtctgtcttaacactcatgacatatac

SEQ ID NO: 158593 - DNA, 544 bp, Homo sapiens
atgtgggagctaaacactaggtatggatggacatgaagatagaaacaatagacactggggactccaagtgtttccaagtgggaggagggagggagggcagtagggttgaaaaactacctattgggtacgatggtcattattttggtgacaggttcaatagaagcctaaaccctakcattatgcaatatacccatgtaacaaatctacacctgtacccctgaatctaaaataataatatgcattttaataattcaactgtattttttgatgttaatcactgttgtccacaatatgtgggaacagaaagagtccagagagacagatttttgtcaaattttgaagtgttctacaatgtatcctataggcaaaggagagccatcaagaggttggaaggggaaaacattcctgtggtctgtatatgtggtcagcctggcggcagtgtggatgaaggagcaaagaagtgagcaaatacaatatgcgatgtttgaaaagatgttcagaggcataagcagtagaggtatttgaataggttagatgatctcct

SEQ ID NO: 158594 - DNA, 574 bp, Homo sapiens
ctcaaaaataaataaataggccagaagcagaggctcatgcctataaacccagcactttgggaggccaaggtgggtggatcacttgaggccagaagttcaagatcagcctggccaccatagcgataccccatctctactaaaaatatagaaatttggctgggcatggtggcacgtgcttataatcccagctactctggaggctgaggcttgaactgggaaggtggaggttgcaatgagccaagataatgccactacactccagcctgggagacaaagtgagatgctgtcttaaataaataagaatgaaaacctcaaatggcaaaattaactgaggtttttaaaattccttggccaaaatattttccattagttttgcttagcctaagattaaytcccttcagtaagcaccaactgtctccacttggaattgtaacaggtagatctttgaaaatgtctctaggaaaattttgaatcaatgatattaaaagagaatgtggtcttaaaaacagctaactgaaaactgtaatttagaacaagactctacagtgagctcctggacctcaaggaccttggg

SEQ ID NO: 158595 - DNA, 594 bp, Homo sapiens
ggggtaaataactgatagaataaatcagttttagagttgagatccaaagtctaactctccactagaaagtgttaacaagaaactgacggtctaaaacaggcggaaattggtatccatacccatgyagttccacaataactaaccagagctgggccaagaaaaaacaatgtgaagaacaaatagtaaatattgaatatttgctagagaaagtaaccacccttctcttcctatttacttggtggaaaaaaagaggaaacccctttccaaatctagatctggcaaatcaaatcaaattctcaggtatgaaacatcagcatcaggtgaattaaagaggtagagttagctaccaccctaaaggtgacaaacaacagagatatggcccctaatagatatacccaagttttgaagtacaagctgtgggaagcctgtgaaattgatacaagggcttaaaaaaattatttaggcagatagtgagggtaagagagacctttgtgaaatttccttttaataaaaagcagccccaaagtaatttcttttctaacaaaaagcagcctgaaaaatcaagctgcaaacatagctaagcaagcaggaagc

SEQ ID NO: 158596 - DNA, 594 bp, Homo sapiens
ggggtaaataactgatagaataaatcagttttagagttgagatccaaagtctaactctccactagaaagtgttaacaagaaactgacggtctaaaacaggcggaaattggtatccatacccatgcagttccacaataactaaccagagctgggccaagaaaaaacaatgtgaagaacaaatagtaaatattgaatatttgctagagaaagtaaccacccttctcttcctatttacttggtggaaaaaaagaggaaacccctttccaaatctagatctggcaaatcaaatcaaattctcaggtatgaaacatcagcatcaggtgaattaaagaggtagagttagctaccaccctaaaggtgasaaacaacagagatatggcccctaatagatatacccaagttttgaagtacaagctgtgggaagcctgtgaaattgatacaagggcttaaaaaaattatttaggcagatagtgagggtaagagagacctttgtgaaatttccttttaataaaaagcagccccaaagtaatttcttttctaacaaaaagcagcctgaaaaatcaagctgcaaacatagctaagcaagcaggaagc

SEQ ID NO: 158597 - DNA, 580 bp, Homo sapiens
aaacttgttgaagtcccctttcatttctcctgaaatttgtgctgttacagtcacagaatttgctgttatatatgtaaataaacatccccactaaattatttttgtaaaaacactcaattatcttttaaagagattaaaataatagaaaatatcttatatatttacttttgtagttactcttcgttcttttgygtaaatgtagatttttagattaaatgatttttctactgtctgaagggataactttttaacctttcttgaaatgtgggtctgttagtgattaattaatttttctttagtgtgtcagaaaaagtattgatttcatctctatcttcatagatatgattgctgggaaaagaattctaagttgatagttttattcttttagcactttaaatatgtcgcttcactatcttcttgcttatcttatttccaacaaagtttctgctgtccatttttacctttctctttctcttttttctttttctttctctctctctctttcctttctttcttttttcttccctccctccctccctctttctttcctttcctttcccttcccttccctttcccttcc

SEQ ID NO: 158598 - DNA, 580 bp, Homo sapiens
aaacttgttgaagtcccctttcatttctcctgaaatttgtgctgttacagtcacagaatttgctgttatatatgtaaataaacatccccactaaattatttttgtaaaaacactcaattatcttttaaagagattaaaataatagaaaatatcttatatatttacttttgtagttactcttcgttcttttgcgtaaatgtagatttttagattaaatgatttttctactgtctgaagggataactttttaacctttcttgaaatgtgggtctgttagtgattaattaatttttctttagtgtgtcagaaaaagtattgatttcatctctatcttcatagatatgattgctgggaaaagaattctaagttgatagttttattcttttagcactttaaatatgtcgcttcactatcttcttgcttatcttatttccaacaaagtttctgctgtccatttttacctttctctttctyttttttctttttctttctctctctctctttcctttctttcttttttcttccctccctccctccctctttctttcctttcctttcccttcccttccctttcccttcc

SEQ ID NO: 158599 - DNA, 546 bp, Homo sapiens
aggcatgcacatggagtcccagctacttggaaggctgaggggggaagattgcttgagcccaggattttgagactgaagtgactgccactgcactgcagcctgggcaacagaataagactctttcaaaacaaaacaaacaaggatgctcacccttggcatttctcttcaacatagtactagaagccctagctagagcagttgggcaagaaaaagaaatgaaagacatccaaatctataacaaagatgtaaaattatctctgttcacagatgacacaatcaccctaaagattccacaaaaatgattagaactaataaatttagcaaagttgcaggatacaaartcaacatacaaaaaaacagctgtttctatacactaacagtgaacaatctgaaaagggaattaagaaaatctcatttccaatagtgtcagaaaaaatacttaggaataaacctaaccaaataaaagaaaggcttatatgcaaaacattgctgaaagaaagaaacacaaatggaaaacaatccaatgttcatggaaaacttaatatt

SEQ ID NO: 158600 - DNA, 526 bp, Homo sapiens
tatggtatgtctacgtaaggaagtactaagcagctataaaaaagaatgaggatgatctctatgaactgatgtggaacgttctctagggtacattgtaaagtagaaaaagcaaaggggaaatgcatatacgccaccatttttgtaaaaaaaaaaaaagaagggacataagaatatatccataaatatgcttatttttgcataaagaaatacatgagagctggtcaggcrtggtagctcactcctgtaattccagcactttgggaggccaaggctggcagatcacaaggtcaggagatctagatcagcctggccaatatggtaaaaccccatctctactaaaaatacaaaaattagccaggtgtgatgctgtgtgcctgtagtcccagctactcaggagtctgaggcagaagaatcacttcaacccaggaagcagaggttgcagtgagccaagagtataccaccacattccagcctgggcaacagagtaagattctgtcaaaaaaagaaaaaaggaaaagaaaggaaa

SEQ ID NO: 158601 - DNA, 645 bp, Homo sapiens
gcaatgattttctgataaatgctgtaatttcttaattacaaagagagataaattcttcaaatgaaatatcatacaattagctatcataaaatacacatacttatatatgtgaaatatactaggcttcataatttatggtcaatgttattattcacacacatgcacacatatacacccatacgtattttatatatatatgarttttatatatattatatatatataaaagactatcctaggaatctgttttgaaattactcacatacatacactacaacaaactgacagaaatataaaacgttctagacaccatcagtttcttttctgctaaaagacacaccatgctccccttgtgaatctatggagttgagggtttctgttatttcacccagcacgtcacctgacacaaaactgaaagagaggtctgttttagcttcctacttctcataatcaggatgaatgagtggaatgaaggatacatgattgcaagagtttggtaaagcaggaatacaagattgctctgctgtgtcctaggattccaagttgatgtgattatacacagaaagtaaatggcaaataacatacggaaggagataacagtttgcaaaggttttatatggaccttggtgctgagatcttgagatc

SEQ ID NO: 158602 - DNA, 373 bp, Homo sapiens
aattcactcctctaatttgcttcagtcaacaggaagttagtagactttacacagatatttaagacagcttccatgttggagtttcctgctcttttccttttaccatgaggacatcatctggctagtacactgttcccagaagaagaatgagaaactaatggagtcagaatgccactacctgatccagcctaaatcagccaaactagctgcaagatgcagtatgtggcccatctccaatcaccagagccatctgccaaaccaagcttagaaaaaygaaatccaaagacttatgagacacaaatatctaaagcagttttggaggattttctcttgcagaaaaacataactgatataggtattctgctaaactaag

SEQ ID NO: 158603 - DNA, 379 bp, Homo sapiens
agttagtagactttacacagatatttaagacagcttccatgttggagtttcctgctcttttccttttaccatgaggacatcatctggctagtacactgttcccagaagaagaatgagaaactaatggagtcagaatgccactacctgatccagcctaaatcagccaaactagctgcaagatgcagtatgtggcccatctccaatcaccagagccatctgccaaaccaagcttagaaaaatgaaatccaaagacttatgagacacaaatatctaaagcagttttggaggattttctcttgcagaaaaacataactgatataggtattctgctaaactaagagtgtgggtaacatgaccacmcttgttgtgttaggaattc

SEQ ID NO: 158604 - DNA, 595 bp, Homo sapiens
ttttcattgtcaataatttttattgctccttgcatgttcaactttgcattttcagtcatttttattttctctgaaaaatattttcaatttctgtttatgaagttctactactctttggaaatgcactgaagacatgtttccattgagttccttcttccatgttttctgttaaaatcaggttgtatttagaatgcagttcttttcaacacacgacatactctatcttccacctctcgctacttttcagattttctattggtctttggtgtcctgtattattttatgctaatttggtttaatttatcatgcttgaagtttgagattactaaaaatatatggaggaatacattttatcacttttggaaaaatccttgcaacatttctcttgcttsattttctctcctctaatcttacagaactccagaagtatgttaggtgttctgactgtagcatcaatgtgataccctctagcttggtatatttccatctgtttctctctatgcttcattctgtttagctatcttccaattcactaattctctcttctactgcatctaacaggctaattctgtctattggattctcaatattgata

SEQ ID NO: 158605 - DNA, 416 bp, Homo sapiens
ttgaattctagcttccatgctttctgctgaaaatcasttgtcattcaaacagttgatcctttcaacataatctatcttttttctcaggctacttttcaaattttctattggtctttggtttcctgtagcatttatatgttaatttgttttcagttatcttgtctgaggtttgttggtttctcgaatgtatggattgatacattttattatttttggaaaggtctcagcaacattacttcttccctacattctctcttctaatcttccagaactccaaaagtatgttaagcctttctgactgtagcctcaatgctcttcccctttagcctgtatttttccatctctttgtctaattatgcttcactctgtgtagttatcttccaattcactaattctttattctaccatttctaact

SEQ ID NO: 158606 - DNA, 596 bp, Homo sapiens
atttctgtttggttcattgacttttaaagcctctcttttgaaataagagtttaattataaaatggtttattgactttatctctcttattatacaaatgctatttacactaaaaactaaatatttctggtagttagcctctgatgagtttaagattatttataaatcatttgttcaagcaatgcattttaagtaaaaatacactcaacttctaactctaaatgtattaagtttcacataagcyttgctctttaataatgcaacttacccacaataataatctttaggaaattacctagacattctccaaatcgtgcatgtaaacatttaaaaaacaaatagttaaatgaaatatatgatgatgatagtggtggtggtggtgatgatgatattaatagctaaatgagagaaccctacctgataaatgtgatagatgtgacctcactctaatttcctgaatggaagagttcattttgtctggagaaaacaacaattcttccctatggccttatcattcttacaccattctctgcatcagggcttaacctggaagaatattttcacctactacttcatgaagactaatataaaaccaaca

SEQ ID NO: 158607 - DNA, 453 bp, Homo sapiens
tccaatggtctagtcactgtactttggttagttaatgctaaggttgattttatttccaacattaatcaataatgttgattttattttctaacgtactggctcacacttctactgtaactcatattgaactagcaatgaactgaaacagattttgcttaaactattactagtgtaatttttaaatctaatacaaaatttcaaacatggttgattatagttttgaactgagaggtttcaaatcctgattttgatatctaccaaatttaatagaactttcagctttatgtcctcaaattgataaattcattytctattttcaaaatcagttatgtgtctaatttaattttggcaagtcttaatgaaattatcataaaccttagtgattattttttttgctaaggtaccaaatcatttatttaataaataactctaaaatattatatgaatcacagc

SEQ ID NO: 158608 - DNA, 591 bp, Homo sapiens
ataaacatctggttgtgaaggagctgaggtatgaaatttagatcttcttgcaagtgcaatgggaaaatcttggaggtgaaacacaaaagtgatacgatctaatttctatccttaaaagatcactctgactattgtgaggagacctgatatgggaygtaacgagaatgttaccaagacaagatggaggctgttaatgtcctccaggagagagaatcatggcctgaagcagagccctgtagtaaatattatgcaagtggtcatattgcaatgcattatgaggagtgaaacccactggatttgctaacaaccagggctagcagagagaaaggcaaatgtgaatccaatgtttgtgaatgactgaatgaaatagctgttgttgactgagaagagattgggtagtgttctgggctaaatatgctccccctactcatatgttgaagccgccagttcctcagagtatgacggtatttggagacagggcctaaaaagagatgattaagttaaatgagagtgttacagtagaacaaaacccaatcttatggtgaacttattgactgctctatacctaattgactctgctatggccacact

SEQ ID NO: 158609 - DNA, 591 bp, Homo sapiens
ataaacatctggttgtgaaggagctgaggtatgaaatttagatcttcttgcaagtgcaatgggaaaatcttggaggtgaaacacaaaagtgatacgatctaatttctatccttaaaagatcactctgactattgtgaggagacctgatatgggatgtaacgagaatgttaccaagacaagatggaggctgttaatgtcctccaggagagagaatcatggcctgaagcagagccctgtagtaaatattatgcaagtggtcatattgcaatgcattatgaggagtgaaacccactggatttgctaacaaccagggctagcagagagaaaggcaaatgtgaatccaatgtttgtgaatgactgaatgaaatagctgttgttgactgagaagagattgggtagtgttctgggctaamtatgctccccctactcatatgttgaagccgccagttcctcagagtatgacggtatttggagacagggcctaaaaagagatgattaagttaaatgagagtgttacagtagaacaaaacccaatcttatggtgaacttattgactgctctatacctaattgactctgctatggccacact

SEQ ID NO: 158610 - DNA, 498 bp, Homo sapiens
tatatacatctgcagctattgtaaaaggagttgagttcttgatttgattctcagtttggtcgctgttggggtataggaaggctactggtttgcacacattaattttgtatcctgaaactttgctgaattcatttatgagatctaggagctttttggaggagtctttagggttttctaggtatacaatcatatcatcagcaaacagtgacagtttgtgttgttctttaccaatctggatgccctttatttctttctcttgtctaattgctctggctaaaacttccagtactatattgaawaaaagtggtgaaagtgggtatccttgtcttgttccagttctcagagagaatgctttcaatttttcctcattcagtattaacttggttgtgggtttgtcatagatggcttttactacattgaggtacgatccttgtatgctgatttttctgagttttattcataaaatgattttgtcaaatgccttttctgtatctatca

SEQ ID NO: 158611 - DNA, 608 bp, Homo sapiens
tgaaaaaaaaccacatgtacttgcaactatgtgactaaatttcagaaacataatgttgagtccaagaagccacaaacaacaagaacatgtaggaatgcacctacacagagttcaaagcaggccagaccaagckatggagtttagggttgcatacctagttggtaaagtatgaagaaaattaaggaaataatcaatataaattatggatattgcttatctcaggagatgtgaagaagggtttagggggttggaaagtggcatggaggtggacctaggctgttttcagtgttccttgtcttgctccacataatggttacttgaatgtttatgatacactgcggtatttcccatttttgttttggttcatttctaagtgtgcattataattttaacataaaaagttttaattaggagaaacgtctcatagaaattattattactcgtctcattatatactgaggggaaaaataaactattggtatacattcttatacaactctaagagagttgaagtaagaactttatttagttgcaacatgaggaaatttgagatgattttatttgccaccccagatttttccaaaggatttcttctagccttaattatc

SEQ ID NO: 158612 - DNA, 608 bp, Homo sapiens
tgaaaaaaaaccacatgtacttgcaactatgtgactaaatttcagaaacataatgttgagtccaagaagccacaaacaacaagaacatgtaggaatgcacctacacagagttcaaagcaggccagaccaagctatggagtttagggttgcatacctagttggtaaagtrtgaagaaaattaaggaaataatcaatataaattatggatattgcttatctcaggagatgtgaagaagggtttagggggttggaaagtggcatggaggtggacctaggctgttttcagtgttccttgtcttgctccacataatggttacttgaatgtttatgatacactgcggtatttcccatttttgttttggttcatttctaagtgtgcattataattttaacataaaaagttttaattaggagaaacgtctcatagaaattattattactcgtctcattatatactgaggggaaaaataaactattggtatacattcttatacaactctaagagagttgaagtaagaactttatttagttgcaacatgaggaaatttgagatgattttatttgccaccccagatttttccaaaggatttcttctagccttaattatc

SEQ ID NO: 158613 - DNA, 556 bp, Homo sapiens
gctaagcctaaaagctcaaattatgccctagagatagagtacctttcttcatctcttcttctctatgtttgctttgctgtcttcattcttttatccagatattcccccaaatgatgctcctctgcaaccacagttaaaaagtattttcctaattattccagtaaacagtccttgcctggggtcctatatttctatttgggtcacctacacrtaatacacaggatggatagtcaggtctttatcacatctagctctggttgtggggttaggatcatccccaaccaaaatacaagaaatgaaagtgaagcaatggttcattccacagttgaaaattggtgcacttttatagaaggcaaaaagcatacctggtagaagataacaagggtctactgtattccatgccttggtagctcagagataatatgtccttgtatccataagacacattaaaaataaacccatttaatgcgataaaagtacttcacctaccactaaaaatgtacctaccttatattctcaaggagataacaataattctgcgcagatataagtccaa

SEQ ID NO: 158614 - DNA, 556 bp, Homo sapiens
gctaagcctaaaagctcaaattatgccctagagatagagtacctttcttcatctcttcttctctatgtttgctttgctgtcttcattcttttatccagatattcccccaaatgatgctcctctgcaaccacagttaaaaagtattttcctaattattccagtaaacagtccttgcctggggtcctatatttctatttgggtcacctacacgtaatacacaggatggatagtcaggtctttatcacatctagctctggttgtggggttaggatcawccccaaccaaaatacaagaaatgaaagtgaagcaatggttcattccacagttgaaaattggtgcacttttatagaaggcaaaaagcatacctggtagaagataacaagggtctactgtattccatgccttggtagctcagagataatatgtccttgtatccataagacacattaaaaataaacccatttaatgcgataaaagtacttcacctaccactaaaaatgtacctaccttatattctcaaggagataacaataattctgcgcagatataagtccaa

SEQ ID NO: 158615 - DNA, 492 bp, Homo sapiens
tctggtttcccaaaaccagattatgaaatattaggttgagcttttttacacacgaactcaaggagaaactgggaagcaaatttgacacatttgaaatagacacagccaggtgtggtggtatgcacttgtaatcccagcactgtaggaggctggggcagaggaatcatttgagcccaggagctcaagaccagcctgcgcaacatagtgggaccctgtctctacaaaaaaaaaaaaaattagccaggcatggtggcatttacttgtagtcccagctactcaggaggattgcttgaacccagaaggtcaagactgcagtgagtcatgatcacaccattgcagtccagcctgggtgacagattgagacctatctcaaagaaaagaaatagacacttagaaaattactgaattgagtgtgagtgccaaacatacatatctatgtgtatatgtagattcttaatatatgtaaaatactrttatactcaagtacacaaa

SEQ ID NO: 158616 - DNA, 550 bp, Homo sapiens
gagactcttccaatataattagtggtgctcacaaaagaatcacaacctccaaaagagagaaatatagataataatcatgaattcatcatttctattgatctctcatataagcaaaaaggttctaatgtaattttcaaggcatgattccacacggccatagtatctctttttcacaagcttgaagtatcaatttctaaaatrttgaacacccaaggaactgcattagcaggagtagaagagtccagaccagggtttggcaagccactgctagtaggctagccagctgtttttgtaaaagaagttttactggaacagaacgatgcattttcttatattggctatgctagtttctcatgaagactgcagttggatagctgctatacaatctgtatggccaacaaactcaaaaatattcactctctgagtcttaaaaggaaatgtgttagggatgcaaattattaaacaagtaatttttgaatgtttactataaactaggtgctagagatacaaaaatggggaaagaaaaagacaaagatccttgacgttttag

SEQ ID NO: 158617 - DNA, 484 bp, Homo sapiens
aacatatttgctttgttattattgatttctgttgaatttcgatygaatcattcctcagatttccagttcttctaaagcaatgatgaatgtgaatataggtatatgcctgtaacggaaatttgtgagccctgttgaaatgaggtccagaagttgcacttccaaagatgattgtcttcaaggcaattgcttcctgccagtttggtgatccctggtgctggctgagaggacagagtctaacagctgcagcaaataagcagcccataactgcagaaactccctgataggagggaagcgaaagcagctaacacaggccactgaaggaatcatttgctctatggctttggcctataaatggtaatatttcacagttgtgttgtggttttgttttaagatacaatgccccattgagccatatcatagcctgagacaaaaggaaagatcaataatactaatcacatctttatttaaaaatgtattagtttgt

SEQ ID NO: 158618 - DNA, 535 bp, Homo sapiens
cacactggcacacaagctaaggcagccagtcctggagccctaaagccacccagtcctggagccctaaaggcagggctatgcagcaggtcatcgatggtcaagagtgaagaaccctcttccaggaggacacctctcaggagataaaccatgccacttctgacagcatatatcactcctctgcccaaatcaccaaaggtaatattgtgaaagaagaaccggcaaatacaaataggttaattgatatctaaacaaatgaataaataattaataacaagcatgaaayatgaaataaaacatatttaaaaggtgttcagttgaacaaaaacaaaaaacaaacaaaagaaaaaaccacaaaagaatcaacaccaaagcagtagaactaataaagcaaactgaaaaagactgtaagataagtaaaattaatattctaggagagactgtggtgactaaggcaggaggactacttaagctcaggaattctaggctgaagaaagttttgattacaccactgcactccagcctggaagacaaagca

SEQ ID NO: 158619 - DNA, 602 bp, Homo sapiens
aaaaatgggaatatgtacctttctattttcaataaattgtatttttctactgccaacatcatgttcaaatatgcttccttacatggatactttaaaaatacactacatagaagtcttcaaactttgagtgatgagagggacatgattgaactattctagctctgaagttagatagtaaaaggaaaattcatgtcaattttatgctayaagtttaaattaaagcattaaaactattgtgtgttgcagaaactgaaaaagaagcaaggatgtaccaaatacataaaataaaacatattttataaagatctctatatatttcaaaatgttgcaccaagaaattatatacatttgaactttaattgataaagatcaatgataatgaattaggtactacagcaataattccaagatacaaaatggaccacacttccccttaaagatacagacctcaatcacacaggaagtttttccaaagtatgaattcatcaacacctcccacgccgttttactccatatgcacaaagttctggtatttcttggtatggggtgctgacagtgacttttccccatactatcctaagcctctcccgtcaccatcacct

SEQ ID NO: 158620 - DNA, 418 bp, Homo sapiens
gggatgaacagaagtgttaaataaaggaaggcataattctataagtccaaattacaaaatgtgctatgataaaaaaaaaacaagtttctgtgagaacctacactggattaagtagtcacacatggattctttgaaatggccagttaacttgagattttgcaagattgatggagtttgccaagcaaagaactggaagaagaatgttgaagcagaaagaaacaagtgcaagggtcgccaggtcagaacaaagttgttacatctgaaaaactgcaaaaattccacagcagccagaatattatgaacaagggaaaagagtcacgggttttgaggagagaraggcagtgcccagattgcaaagggccttgaagtgatggtaagaagttcagaagccattgaaacacagaaacaaatgacaata

SEQ ID NO: 158621 - DNA, 588 bp, Homo sapiens
aattcagggaagaagagaaagcaatggtgggtggaagttgggtggtgcatgagggagggagaggtgagctatagtaaaagcctccagaagactgaagaaatttcttgagatacaaaaagggtgccttcctcagcctgtttcccaaacagaacctggattccttggtggtgaccaaatgaacacacyggttgccagatgaaaggttcagaaaaaaagtcgtatgggggttcttaaacatcaaataataacattttcaaaatgacattttgatgagttaggggtgaataaatcagagacatacagataaaatttcccttgaaatacacagaggtttaacatgatggggaaaagcacttggcaaaacataatatgtgctttgccaaacctaatatttgaaaaatggtttaagacattcagcataaccccaaagctggacatgttgtcttatcctaagtgagagaaagtaagggagggaggctacccatgaaaacattgctcaacaaacttattaaagaatataaataagttgaaatgagtaaaccatgcctaaatctgaaatcaaatttcatgctgaaatcaaacacgctt

SEQ ID NO: 158622 - DNA, 445 bp, Homo sapiens
tcccacctttccagaacaaaccaatgattattttacatacgttagttgatgtctcatgtctcgtttgttaaaagtaataagtacagtgaatgggataaatgtcttcggtaaactttttgcataaattaaaatcttaaagttatttttaatgctcatttaatatctgggtcatttccaattaagaagagttgtaatatggggaaaatatgtttctaaaattgtgaattgttcttacctataaatgcccactattattcaggatttcttyctttttagggttccactaaagttttaggttactaaggataaaaattttagttaacacgtaattctgtacgcaaagtgtgccagaaagggttataagtgagaaaaaaaaaaagaataattctgtctaattcagaagttatctaagagttagttcaaattacagatttgaaaaggttat

SEQ ID NO: 158623 - DNA, 509 bp, Homo sapiens
ttttcttttttgttgctatctttgtctgatttggtatcagggtattactaacttcataaaatgaattgagaaatcatctctcttcctctttttctggaagagattgtgtagaattaatgttaattcttctttaaacatttgacagaatttcccagtgaaaccatgtagtcatggagatttcttttttgggagtttaacaattacaaattcaatttcctttatagttatagggcatgaaatttacttatttcatactgagcgagttgtagcagtttgtgttttttgagaaatttgtccatttcatctaagttgtcaaattcatgtccatagctttgtttgtggggtttccttgctatttttttgatgtctrcagggtctgtaattatatcttctgctttattcttaatattgtcaattttctaggagtggcaggctcgctggtttgttcttaatatgtgtatatttttagttacacaagttatatgttggtacatttttgttatagaatt

SEQ ID NO: 158624 - DNA, 509 bp, Homo sapiens
ttttcttttttgttgctatctttgtctgatttggtatcagggtattactaacttcataaaatgaattgagaaatcatctctcttcctctttttctggaagagattgtgtagaattaatgttaattcttctttaaacatttgacagaatttcccagtgaaaccatgtagtcatggagatttcttttttgggagtttaacaattacaaattcaatttcctttatagttatagggcatgaaatttacttatttcatactgagcgagttgtagcagtttgtgttttttgagaaatttgtccatttcatctaagttgtcaaattcatgtccatagctttgtttgtggggtttccttgctatttttttgatgtctgcagggtctgtaattatatcttctgctttattcttaatattgtcaattttctaggagtggcaggctcgctggtttgttcttaatatgtgtatatttttagttacacaagttatatgttrgtacatttttgttatagaatt

SEQ ID NO: 158625 - DNA, 567 bp, Homo sapiens
tttagttgcatccaaatttcctctattaccacagaatgtgwgtctctctctagaatgtatacccagacatccattgctgtgctgaattatatagatatttcagtttagtagttactgccgtggtgtatttctttctttgttcaagcattttttttctttcttcattcttcaataatgattaatgcttttctgcacaaatgttatatacaatttttattcgatgcagtccaagatatcttttcttttcattctccttgtaaatggtatgttttttctattatatcttagaattggttattactgatgcatattttaaattttcatttcacatctagcaacctttttgaaatttttcaggtgtaagtatttctatatagtattctgtatttttctatattcaatcatattaaatacaaataaaaagaattagttttttcctttttatttctagacggcacttttatttttcttctgttactgaacaggctaggacctctggtacaatataaaataatagtgaccataaaaataacctaatttttaaaaaaaggtgagaatgattgttga

SEQ ID NO: 158626 - DNA, 570 bp, Homo sapiens
tcacaaataaaatcagagtataattttttttcttacattacccttgtccattttttttttwaaaaaaccaaaattagctatctcctatgccatgatttttttcctctcatccctgaaagagcttctgtggaatgggagttcacttagtcctttttttttaaaatttaattttattttaagttccaggatacatgtgcaggctgtgcaggtttgttacatagctaaacatgtgccatggtggtttgctgcacctgtcaacctatcacctaggtgttaagccctgcatgcattagctgtttatcctgatgctctcccttcttccctcctaacaggccccagtgtgtgtttttcccatccctgtgtccatgtgttctcattgctcagctcccacttacaattgagaacatacagtgtttggttttctgttcccgtgttagtttgctgggaataatggcttccagctccatccatgtccctgaaaaggacatgatcttgttcctttttatggctgcatagtatcctatggtgtgtatgtaccacattttctttatccagtcagtgcaggattca

SEQ ID NO: 158627 - DNA, 570 bp, Homo sapiens
tcacaaataaaatcagagtataattttttttcttacattacccttgtccatttttttttttaaaaaaccaaaattagctatctcctatgccatgatttttttcctctcatccctgaaagagcttctgtggaatgggagttcacttagtcctttttttttwaaatttaattttattttaagttccaggatacatgtgcaggctgtgcaggtttgttacatagctaaacatgtgccatggtggtttgctgcacctgtcaacctatcacctaggtgttaagccctgcatgcattagctgtttatcctgatgctctcccttcttccctcctaacaggccccagtgtgtgtttttcccatccctgtgtccatgtgttctcattgctcagctcccacttacaattgagaacatacagtgtttggttttctgttcccgtgttagtttgctgggaataatggcttccagctccatccatgtccctgaaaaggacatgatcttgttcctttttatggctgcatagtatcctatggtgtgtatgtaccacattttctttatccagtcagtgcaggattca

SEQ ID NO: 158628 - DNA, 466 bp, Homo sapiens
gtggctttatttataagttctctattctgttccattggtctatgtatctgtttttatagcagtactatgctgttttggtttctgtagccttattatatattttgaagtcaggtaatttgatgtttccagctttattccttttgctcrgaattgctttggctgtttgccaggttggttatttgcccattttttttctatttcctttaagaatgatgttggcattttgatagcaattgcaatgaatctctaagttgttttggggaatatggtcaatttaatgatattaattcttgtgatccacgagcatgagaatttttccatttgtttttgtcatctccagtttctttcaccagtgttttataattttcgttgtagagatctttcatctatttagttaaatttactcttaggtattttacttttttggtagctattataaatgggattgctttcttgatttctttct

SEQ ID NO: 158629 - DNA, 651 bp, Homo sapiens
accaagtgtactatccagtttgtggattagtgccccactggcttcagggttggtattaactaccaacctcccactgtggtgcctagtggagacctagccaaagtacagaaagttgtgtgcatgttgaacaacaccacagctgtcgctgaggcctgggctcacctggaccaaaactttgacctgatgtatgcaaagcatgcctttgttcactggtacgtgggtgaggggatggaggaagaagagttttctgragcccctgaggacatggctgcccttgaaaaggattatgaggaggttggagcagatagtgctgagggaaaggatgagagtgaagagtattaacctgtgtgctatacttttatactccattgtcttgggactgtctcatttttgttctgtgaaaatgtccattatatccctaaattgtcaataaaagtaataattccattttaagtgtcaaaaaaaacctcactaagcatcctagttcaagtagttaaatgtgagaaatggggtagggggaatccaacaggggagtaagatggtgagaaagagaagagaaaaaaaaatcattaaagggtctgttattcactgggtaatattataggcaaccggagctaatccgcagagaaactctgggaatcagaaaattcc

SEQ ID NO: 158630 - DNA, 578 bp, Homo sapiens
gcaggtcttgtgatggcatggtagtggcaaattctcttagcatttgtttgtctgaaaaagaatgtatctttcccttcatatatgatgcttagttttactggatacaaaattcttggctgataattattttgtttgaggaggctgaagatagggccccaatgctttctggctcgtaaagtttctgctgagaaatctgctgtgaatctgataggttttcttttataggttacctggtgcttctgtctcacagctcttaagtttccttcctttatcttaactttcaataagctgatgacaatgtgcctaggcaatgaggaataaactctgattttttttattttgyccaaattcctatctaagggagtctgaggaattcatgccctacaaatcataaattcttattggataagttttatttaaccctatatgtcgtgatttactttccaacctgattctggcacagcattacgagacaaagaagatcaaaatattttaccctaaaacatgtttctttgccatattttgaaatggccttgcaaagctgttctttgtgggggacaatttgcatctgtaaagaa

SEQ ID NO: 158631 - DNA, 476 bp, Homo sapiens
tggtccaatagggtggtcaacttcaggggctggtgctggagcagggagtgggtctgggccatgagtggggtgaggcctcccacaagctccccctatgccaggggcaggctgggaaggctggagtagttgataaagccctgcctgctgaggatggcatctacgtcattgatgcagccacctagcagcagcaggaatggcacagtccttaagatccttaccatctccttgaccttgggctcttcactgaccagcagcatgttgtgccccacaaaaaggggcagsagattttggtacttggagtcctccaggaagggcttcaggacctggttgtggaagaccttcatcaggatcttgtgtttccgcagctggtgtcgcataagaagcttgtctgctacgctcagagccacgctctggcagatagctatcattcggttgtcctggaaaactgctgctctctcccggcagagaagcctgat

SEQ ID NO: 158632 - DNA, 601 bp, Homo sapiens
cttgaaggagattgcttataacttctcagccatagagattgcagtttgcagaagttttccaaaagaattattgcttaaaagaaaagaacaagccagaaaaaaacacaagtctaaacagagcgaaaagtgagataatttaaatttgttaatttcttccaaaattttagtagattggaaaaatatggtsctgtgtctcactggtatgtattgaaagaaaagatctttttccccttcccttagtttctttctctagaagacaccatatataagagaggaaactttccctctatctggtttaaactaatctcaaagatgttaatatgaaagtcaacctaggtacattacagtatatgaatttagctactttgtttccacattattgtttcttcttatgtaatcttacacatgacatacttgtcatcatttttttcttataaatctactggaaagacccaatcattaggcacattattttgtgcatagaaatttgcctttctcccttgctattcatgatttgaatcagggccacctaaagcaaaaattttctacataccttcctcctcttaatctattccatgaactcactgctccacagatggta

SEQ ID NO: 158633 - DNA, 547 bp, Homo sapiens
tattgttaatttttcaaactaggaatgtccatgcccatagatgacataaatttggtcaggcttggagtttttagttttcacaggtgacttttttttcctctcctcagaatccmaacaaagacaagtttcctttttgctttctgtatcagtgggtagaattgttcttatccccttttcactgaggcagcagctcttctcttatcccagctttatggtgggcatgatgctttagctcccccacctttcctgagcccaaagccatgtcttctgtacctacatgggcattaaaaacacctttaggtatacctgaagacttaaatgttgggcaatttgcctcttgttgctgaagtcctaggtcctgaatttaaagtacctcctatttatctgtcattttcttgtttttgaattcaggtatgccattaaacattgttttattgaatatatctagcatttatatatcttcataaataaatgacaaagctctgagttatctttgtcatattgctgaaacaactctttaagttagcatggcatcattccaaggatt

SEQ ID NO: 158634 - DNA, 547 bp, Homo sapiens
tattgttaatttttcaaactaggaatgtccatgcccatagatgacataaatttggtcaggcttggagtttttagttttcacaggtgacttttttttcctctcctcagaatcccaacaaagacaagtttcctttttgctttctgtatcagtgggtagaattgttcttatccccttttcactgaggcagcagctcttctcttatcccagctttatggtgggcatgatgctttagctcccccacctttcctgagcccaaagccatgtcttctgtacctacatgggcattaaaaacacctttaggtatacctgaagacttaaatgttgggcartttgcctcttgttgctgaagtcctaggtcctgaatttaaagtacctcctatttatctgtcattttcttgtttttgaattcaggtatgccattaaacattgttttattgaatatatctagcatttatatatcttcataaataaatgacaaagctctgagttatctttgtcatattgctgaaacaactctttaagttagcatggcatcattccaaggatt

SEQ ID NO: 158635 - DNA, 451 bp, Homo sapiens
cccatgtttcttgccccctgactcccttcttccgttrtcaaaactagcaatagcagggggtgtctctttccatctctctgacacctcctttcatcctcctcctttctctcattgcacccaagaaatgttctacaattttaaggactcatgtgttttgattgagcctacccagataatctagggtaaactatcaaagtcctcaaccttgatcacatctgaaaaatctttctttttttttttttttttgccatgtaaagtaacatgcacagattgtgaggattaggacttgtatatgtaaatttgggagggtcagtctgccaaccacatcattattctgccaaccacagcatcccagagataccagaatccttgaaatagttggcttcttaggtggttttgtttattactttaacttgcctagcttactctttagttatttagactacagtaa

SEQ ID NO: 158636 - DNA, 452 bp, Homo sapiens
ccatgtttcttgccccctgactcccttcttccgttgtcaaaactagcaatagcagggggtgtctctttccatctctctgacacctcctttcatcctcctcctttctctcattgcacccaagaaatgttmtacaattttaaggactcatgtgttttgattgagcctacccagataatctagggtaaactatcaaagtcctcaaccttgatcacatctgaaaaatctttctttttttttttttttttgccatgtaaagtaacatgcacagattgtgaggattaggacttgtatatgtaaatttgggagggtcagtctgccaaccacatcattattctgccaaccacagcatcccagagataccagaatccttgaaatagttggcttcttaggtggttttgtttattactttaacttgcctagcttactctttagttatttagactacagtaaac

SEQ ID NO: 158637 - DNA, 453 bp, Homo sapiens
cttgccccctgactcccttcttccgttgtcaaaactagcaatagcagggggtgtctctttccatctctctgacacctcctttcatcctcctcctttctctcattgcacccaagaaatgttctacaattttaaggactcatgtgttttgattgagcctacccagataatctagggtaaactatcaaagtcctcaaccttgatcayatctgaaaaatctttctttttttttttttttttgccatgtaaagtaacatgcacagattgtgaggattaggacttgtatatgtaaatttgggagggtcagtctgccaaccacatcattattctgccaaccacagcatcccagagataccagaatccttgaaatagttggcttcttaggtggttttgtttattactttaacttgcctagcttactctttagttatttagactacagtaaacttcttgtga

SEQ ID NO: 158638 - DNA, 453 bp, Homo sapiens
cttgccccctgactcccttcttccgttgtcaaaactagcaatagcagggggtgtctctttccatctctctgacacctcctttcatcctcctcctttctctcattgcacccaagaaatgttctacaattttaaggactcatgtgttttgattgagcctacccagataatctagggtaaactatcaaagtcctcaaccttgatcacatctgaaaaatctttctttttttttttttttttgccatgtaaagtaacatgcacagattgtgaggattaggacttgtatatgtaaatttgggagggtcagtctgccaaccacatcattattctgccaaccacagcatcccagagataccagaatccttgaaatagttggcttcttaggkggttttgtttattactttaacttgcctagcttactctttagttatttagactacagtaaacttcttgtga

SEQ ID NO: 158639 - DNA, 608 bp, Homo sapiens
aataaatattttttaaaacctttccagatgattttaaaggactatcaggttaagaagcacaaaggaaaaagtattactttatttatattgataataaagattattaataatgataatgatgataccacaaacagtaacacttatcttcatgctgcagactctggtaagtgcatgattgcatgacttagtgttggtagagtcaggacaggaagctggatgtgaaggacttcaaaacttataccttcagttcttctgtgaattatatattttatggggccatccacagagttactgcacaatgcatgactttactttcttccaaggtaacagacaatcattttggcagtggccattggagtctgtgaccttggctttgtatagtggcataatagtctaatggttaaaagcatgcatagattctggacctgtgtcaccttggtttaaatactggagcractactaactagctggatacccggctctactagttaccagttgattaactatgtctcagtttcctcatcagtaacatggtaataataataataataataactcctatcagttacatgtttgtgcccctccaaaatgcatatgttgaaacccta

SEQ ID NO: 158640 - DNA, 619 bp, Homo sapiens
tcattctgctggcaaagatgaataagaaagattctttataagctcccatttttgacccctttaaaggtaacagtagcaataagaatcaattttatggtataggtcttccatagagaagtccttttcagattttatagggctttttgcttcaataaggccccattttcctttttatgtttttcctcaggtttttrcagtcttcctttgttcaagtataagaaatgatgatggctctaccttcaggaaagtgaaacgaataagatttttctattgctgccaaataaatgaaaatgataaatgatcgtgtaaaaattgacaaatctcaagcaatagacttttaaccatgtttatttgaagcaacttgctgtacttcagtgcacaattacaaatcatcctttcaagttcttcagaagctaagacctgcaaagagctaattagctgctctgacagcaggaagatgtggcaacagaaggcacagtttctgaatgactgcaaggtatttaatttgaataaaaggagaattaaacagcagcaatgtgcaaacatagcagtagatagagaatgcctatattaaagactcttacttgccttcaaaatcgaccactggaaatgtatattg

SEQ ID NO: 158641 - DNA, 407 bp, Homo sapiens
tattaaaaaatctaataatctgatcagaaaatgagcaaaagatgcatttttctttaggtctgctgatttcaccttctctggagcatcttactgcctttagattttctttatttctctactttttttaaaactcaagttctgtaaaggtctcattcattctcttcgcttgggcatctctgcagagatcctctttcagtcctctacscttctgccctcatctggaccgaatgctttctatttatgctacattacaatttagtgacttccttccactgcttttctgaatcacaaccactgttttctaggtgccatattcagtggtgtgcaggtaaaaatttaacataggttctcgaaacatgcatataaacaaattctaattttcagcattttctgatttccattttgca

SEQ ID NO: 158642 - DNA, 407 bp, Homo sapiens
tattaaaaaatctaataatctgatcagaaaatgagcaaaagatgcatttttctttaggtctgctgatttcaccttctctggagcatcttactgcctttagattttctttatttctctactttttttaaaactcaagttctgtaaaggtctcattcattctcttcgcttgggcatctctgcagagatcctctttcagtcctctacgcttctgccctcatctggaccgaatgctttctatttatgctacattacaatttagtgacttccttccactgcttttctgaatcacaaccactgttttctaggtgccatattcagtggtgtgcaggtaaaamtttaacataggttctcgaaacatgcatataaacaaattctaattttcagcattttctgatttccattttgca

SEQ ID NO: 158643 - DNA, 615 bp, Homo sapiens
ttttttttgtttgtttttctgaatgaatggcctgcagctgctcttcagggtttcctttttttttttttttttagtattttagttatgtttggacatttaaaaaatacatatttgtatcactgatggccctataaataaaatgctgcatagaaaagttcccaggaactaatttttagagaaaggttcctggggactaattagagtcacaagcagagacaagcaggaggttgaaaacactgtgttgcttcttatcttgctctgatattttgcgttttagccatgtctgaacatttatggattcaagagatgaatcctgaatgtatcctgaatcatatcactccatgatcaggaaatacccgtgaaatgaatgtggrtctgttgtggttttctttaggcttcgctctcttctcttttccgccaccgcttgctgaaggcaaatcttaaccaaggtaaattcagcttactggatagaggacatttctttatgtccaaggaaattaaagctattcaagcatacacctgccacataactagaaaaatacccagggagccattttcatttcaaagctgcagtttccagtgccatcagtatggctaatcactggatcattttat

SEQ ID NO: 158644 - DNA, 582 bp, Homo sapiens
cattatcaccactggcaatcttaggaaaggaaaagaaagagacaagatttggctaacgtatatttcacacaagaaagcagggataggtagaaggttttttttgttttttgttttttttccaaaatggtactagttctagtgtcacaagcctggagttctttgtttttgatccaattatgttatactaagccaatcgttttattaaaaataatgatatgaaataagccaatcacagaaagacaaagttcacatgttctcccacttatttgtgggagcaaaaatttaaaacaattgaactcatggagatagagagtagaatgatggttaccagaggctgggaaggggagcgaggaaaagataaaatgaggatggttaataaatgcaaaaatagaggtagatagaatgaataagatcyggtatttgatagcacaatggggtgactatagtcaacaataatttatcacatattttaaaacaattaaaatagtggaattggaatgttcctaacaaaaagaaaagaggaatgtttaaggtgatggatactctacttaccctgctgtgattattacatatgtatgccta

SEQ ID NO: 158645 - DNA, 536 bp, Homo sapiens
gtaatggtatgggggaataaggaacaatttagagctaagtgacaattaaaaacctatatatcaacaattgagggcatagctcaatcaagaaatttatggaaaawttacagctttcaatggatctatcagaccacaagaggaagtgaaaacaagttagatattataaaaaacataaaaaatactataataaagccaaaaataaaaagaaaataaaaaaattaaaggcagcaatcagtgaaataaaaaagaaacattaaccagtcaaaaagatgaggaaaccaaaaattgattatttgaaaatactaaaagttagataacctctgttaatacttatttttcagtgtctatgggagggcaatagaccaaataaatatattatagaatttgaaagggaaatatctccaggtattaatgctataataataaactactgttttgtgcatccatatgccaataaatttagaaatctaaaacagaatacatttctagaaaaatataaaatgccaaaactagtaatattagcctaatgaatagac

SEQ ID NO: 158646 - DNA, 536 bp, Homo sapiens
gtaatggtatgggggaataaggaacaatttagagctaagtgacaattaaaaacctatatatcaacaattgagggcatagctcaatcaagaaatttatggaaaaattacagctttcaatggatctatcagaccacaagaggaagtgaaawcaagttagatattataaaaaacataaaaaatactataataaagccaaaaataaaaagaaaataaaaaaattaaaggcagcaatcagtgaaataaaaaagaaacattaaccagtcaaaaagatgaggaaaccaaaaattgattatttgaaaatactaaaagttagataacctctgttaatacttatttttcagtgtctatgggagggcaatagaccaaataaatatattatagaatttgaaagggaaatatctccaggtattaatgctataataataaactactgttttgtgcatccatatgccaataaatttagaaatctaaaacagaatacatttctagaaaaatataaaatgccaaaactagtaatattagcctaatgaatagac

SEQ ID NO: 158647 - DNA, 550 bp, Homo sapiens
actattagacaaaagtggcagaaagtagatcctcgaataatactaattctactcaaactatgccaaaacaatagggatggaggaaaacttccaaactaattctacaagaccaccattaccttaatatcaaaactagacaaataaaactataggccaatatcagtgatgaacattcatgcaaaaatcctcagcaaactgaagtcaataacctattaaaaagatcattcttcttgatcaggtgggattcatctcagggatccaaggatggttcaatatacagaaataagaactgtaataaatcacattaatagaatcaagtacaaaaaccatatgaacattcaataaattctagaaagagcatttgataaaattcaacacacttcatgataaaaactctcaasaaagtgggtgtagaagaaatatacctcaaaacaataaaggccatatatgacaaacctatagcaagcgtcactgtgaatggaacgagacaagtatgcccactttcactacttttattcaacatagtactggatgtcctagccagagcaat

SEQ ID NO: 158648 - DNA, 597 bp, Homo sapiens
gaagaggtgaagatatttgcaaaaatatctgaaagggtattaataaccaaacaactcaataacaaataaacaaataacatgattttaaaatgagcaaaagtgctaaatggacatttctcaaaagaagacatgtaaatgacaacctggtatatgaaaaaatgctcaacatcactagtcaccaggggactgcaaatcaaaaccaaaatgagatattatctcacccgagttagaatgactattatcaaaaagtcaaaaagatgataaatgctggtgaagatgctgagaaaggggaacacttgaacactgttggagattatacaaattactgcagtcagtcactgtgaaaactcatatggaggtttttcaaaaaactaaaagtagaactaccatatgagctagcaatctcacttctgggtaygtattcaaaagaaaggaaatcaatatattgaagagacacctgcactctcatgtttattgaagaaccattcacaatagtcaagatatggaatcaacttatgtgcccttcaatggatgaatgaataaagaaaacatggcatatatacacaatggaatatcattcagctgtaaaaaagattg

SEQ ID NO: 158649 - DNA, 529 bp, Homo sapiens
tcatgctcagacccatttcagtgaagaggttcactgtagttgatgtcaaccttaaaatgctaggtctgatcttcctcttaaaataaacaatcagttatttcattataagttgcttcaaccatgaccagacataataaaaagaaagcataattggtgaactaaaaaattgttgttgtgacaaggacacaaaaagaaaaaaaaagaaagagagaagaaggaaagaaggaaagaaagaaagaaagaaacaaacaaacaaacctgatcacagctttcttttgcagtacttttttaatctctggtttcaaggttttattagtgggatggccaaatccttaaaatatatgcygcctaaactgttaataaataaaaggggatatataagtcctaatcttgtcactaactaaccttaattaaagcacctatttacaatgactttcaacccttaggagatatgatgctgtttcctttgcctctttatttcccttccatggtgccacatgaaacataattttcctctaaattgacacaa

SEQ ID NO: 158650 - DNA, 598 bp, Homo sapiens
aaaaccattaaattgtgcattttgattttttctaatagcaattaaaatatatatcaaatactttttaaatttgtcaagctaagagaaaawctttagctgtaaaacagaagaaacaacgtcttttccagattatcaactctttcaatagcagctgtatcattaggaaaatgtcttttttaaaaaaaaagaacttgaacttcagtgccttcttaattgtgaacactcattaagagttcataaatgacattattctctaaagctcacactcattaagcaaagcatagccgctgtagttattaagacactagggaatcactgcaccagtaaggaggcaggaaaattggaggccacgtacggaaattaaaaattcctgctaagaaactaatcacacaaacaatacagaagaaatgaaacctctgctaccagaaagaggagctaaagttagtctaatctacgctaatcatgttatacaacacgttttagctccatttttttgaaagcgggtcttcatagcctttcagaacctttcccatattccctgacaccattgaaatctactctttatattatctcaatcatgaactctgttgaataaatg

SEQ ID NO: 158651 - DNA, 598 bp, Homo sapiens
aaaaccattaaattgtgcattttgattttttctaatagcaattaaaatatatatcaaatactttttaaatttgtcaagctaagagaaaatctttagctgtaaaacagaagaaacaacgtcttttccagattatcaactctttcaatagcagctgtatcattaggaaaatgtcttttttaaaaaaaaagaacttgaacttcagtgccttcttaattgtgaacactcattaagagttcataaatgacattattctctaaagctcacactcattaagcaaagcatagccgctgtagttattaagacactagggaatcactgcaccagtaaggaggcaggaaaattggaggccacgtacggaaattaaaaattcctgctaagaaactaatcacacaaacaatacagaagaaatgaaacctctgctaccagaaagaggagctaaagttagtctaatctacgctaatcatgttatacaacacgttttagctccrtttttttgaaagcgggtcttcatagcctttcagaacctttcccatattccctgacaccattgaaatctactctttatattatctcaatcatgaactctgttgaataaatg

SEQ ID NO: 158652 - DNA, 594 bp, Homo sapiens
tggaataggatgtatgctataattgtatttatgtcagtaaatttaaagtttggtgcatacatacatttaggttagtgtgtataataggcattgtatttttggatcttaggaaatatgtatagctgacccttaaacaacatgggtttgagctgcatgggttcaattttatgtgaatttcctttcaactcagttcccaagacagccagaccaactcctcctcttcttcctcctcctcagcctatgaggctgaagaactttatgatgattcacttccacttagtaaacagcaattatattttatcttccttatgattttcttaataatattctcttttctccagtttattttattgtaagaatacaatatataatacatataacgtacaaaatatgtgttaaatgactatttcattgttaagscttccatcaacaataggctattagtaattacttaatatgttttaggagagtcaaaagttatatgcaaatttttagctgcaaggggaatcagtgccccatgttgttcaaggattgtttgtactttatacaaatattgtaaacacttagaaggatgtctgggaaaatataaaacaa

SEQ ID NO: 158653 - DNA, 410 bp, Homo sapiens
ctgggtgagggtatctgggattagctggttagggcaataaacacctacaaacacacagtcttccatcaataatcacaaattaattagcctgatatccacaatgccttcttaaatcaatcatttatcaataattttagcaatcttcatagataaaaactcttcaaggtcctcagaatatagcattaaaccaggcttgtctcagtttcccagaatttcatggtataaaagagaaagttcattttgctaaaagcactatatttattaagtgcctatgacatgccaagtatcatacaagatagtgggaataaaaacatcagcaaaatagccccagckgctgctcttacagagatgactatttagagagggaaacagatattaatcaaacaatcacaaaaacaattccacggtca

SEQ ID NO: 158654 - DNA, 410 bp, Homo sapiens
ctgggtgagggtatctgggattagctggttagggcaataaacacctacaaacacacagtcttccatcaataatcacaaattaattagcctgatatccacaatgccttcttaaatcaatcatttatcaataattttagcaatcttcatagataaaaactcttcaaggtcctcagaatatagcattaaaccaggcttgtctcagtttcccagaatttcatggtataaaagagaaagttcattttgctaaaagcactatatttattaagtgcctatgacatgccaagtatcatacaagatagtgggaataaaaacatcagcaaaatagccccagctgctgctcttacagagatgactatttagagmgggaaacagatattaatcaaacaatcacaaaaacaattccacggtca

SEQ ID NO: 158655 - DNA, 328 bp, Homo sapiens
attaagaatgtgcaacttagtaatttactaaaaatcatccaattgtatatttaaagtgggtcaagtttatggtttataaattgtaactcaatataacatccataggctaagatagaatgatctcttgcatatattaagtgaaaaaagcaagaagaagaatgggatgtagagcatatagatttycatcgcttttagatatttttaatgaacagggcaaggaaatatgtacttttgaaaaatgaaaactatcatgaattcatattgacacttccagtgtaaatttaacattaaagaatttgtactttcactttacggtttttaaattaga

SEQ ID NO: 158656 - DNA, 328 bp, Homo sapiens
attaagaatgtgcaacttagtaatttactaaaaatcatccaattgtatatttaaagtgggtcaagtttatggtttataaattgtaactcaatataacatccataggctaagatagaatgatctcttgcatatattaagtgaaaaaagcaagaagaagaatgggatgtagagcatatagatttccatcrcttttagatatttttaatgaacagggcaaggaaatatgtacttttgaaaaatgaaaactatcatgaattcatattgacacttccagtgtaaatttaacattaaagaatttgtactttcactttacggtttttaaattaga

SEQ ID NO: 158657 - DNA, 569 bp, Homo sapiens
gttttttcaaaagtttcccaactggccctcagaaatgttaagtaacctgtccaagaacactgagccagaaaggcagaggtaggtttacttcaaagctaccagtcttttaggaaaagggcatggcaatgaaagtaagctttggtgcccttagcaactaattatggaaaaaacaatgataataataataacaacaataacagcatagtaactgaaaatggggcagcttgagcagaaaaaggtctgtgatggagagggcatcttgttgaaagcaagtgcagggactggattgatcgcattgctcatttgtttagyagacaactaagaatagggtaagaattcaccttctctttgcttgtcacaccatgctgtggtttcatattgcctgaggagcagggcccctactgcagtctgtgttagtaacagaagagttatttccatggttcccttatggtttctaaagacaataatatatatttttaaagcttggctgattttattcatggaatccacccaatagctgacacattaaaagtggcataagtccatattttgtaacatgtatcaacatc

SEQ ID NO: 158658 - DNA, 523 bp, Homo sapiens
tgctgatgaatatagatgaaaaatctgtaacaaaataccagcaaactgaattcaacaatacattaaaaagatcactcatcatgaccaagtgggatttatcccagggatgaaaagatggtttaacatacacaactcgatcaatgtgatacttcatattaacagaatgaaggattgaagaaaatgatatgatcattttaattgatgctgtaaaagcatttgaaaaagttcaacattcattagtgataacaaccctcaaaaaaactgggtatagaggaaacatacttcaacataataaaagtcatatgatatggtttgtctgtgtctccacccaaatctcaccttaaattgttgttcccataatcccatgtgtcatgggagggacccagtgggaggcaattgaatcatggaggaggttaccctcatgctgttctcatgacagggagtgagttctyatgagagctgatggttttataagggattttccccctttgcttggcacttttctctcctgctggcatgtgaa

SEQ ID NO: 158659 - DNA, 523 bp, Homo sapiens
tgctgatgaatatagatgaaaaatctgtaacaaaataccagcaaactgaattcaacaatacattaaaaagatcactcatcatgaccaagtgggatttatcccagggatgaaaagatggtttaacatacacaactcgatcaatgtgatacttcatattaacagaatgaaggattgaagaaaatgatatgatcattttaattgatgctgtaaaagcatttgaaaaagttcaacattcattagtgataacaaccctcaaaaaaactgggtatagaggaaacatacttcaacataataaaagtcatatgatatggtttgtctgtgtctccacccaaatctcaccttaaattgttgttcccataatcccatgtgtcatgggagggacccagtgggaggcaattgaatcatggaggaggttaccctcatgctgttctcatgacagggagtgagttcttatgagagctratggttttataagggattttccccctttgcttggcacttttctctcctgctggcatgtgaa

SEQ ID NO: 158660 - DNA, 600 bp, Homo sapiens
ctgcgtgaggaagcgagcagctctttggggtttaaaaccggggcgctttcgcggatgcttcgggtttggtgcggctgcggggtgcctcttacaagcctggcagctgcgtgtgaacccacatgcctgctgccatacaggggacaacccgatcctcgagccaccctcgaaggacagtttgaggcagagcccctgaagttctctttttgtcccaaggagcttggcggttgaaggacaattgcgcccgcaggggtgactggaaacgtcggtcccaggggaagtcctgagagaaggggtgctcttcggatgcggatcccgaatccctccggatgcggatcccgaatcccttcgggagcactgcgcaagcaaaaacagcgcggtgggcgcgagtgctgcgtggacgtcatttggtgtgtttgcaacctagggatgctggacctgctggaaggcggctcctttcctcctccagtcctgccaggtcccagcacaaacactctcctcgttatcctacccagccctgtttactggaaccttggttctaaacaccagtcgatcagaagagccagagatttgccgggyaaaaaagactctcaccgtaagagt

SEQ ID NO: 158661 - DNA, 463 bp, Homo sapiens
ttagggcaatcatttttcttcctccttgaaagccacagacaatgatgtgcactatttaccccataagaagaacacgtattaaccagggcacagcttctcrgtgtctccaaaaagccttatttgtttaagagattcatctttgacagtttaacaaataataataatgttagtcaatattattagtagatatagtactttcacctctagaaacagaaattgaccgcaaccttccaaacggtagctcttctaaaaaaggttttttaaattaaagttactttacattgggcaacttgctacacatgtatgtttagaacttcagtaaataagtacattaaattattgaaatatctctaattaataacagctaacatttattgatgttagcatacactacgctaagcactttatttaatcctcatggcaaatctataagattgatacaattatcatcatccccatttta

SEQ ID NO: 158662 - DNA, 463 bp, Homo sapiens
ttagggcaatcatttttcttcctccttgaaagccacagacaatgatgtgcactatttaccccataagaagaacacgtattaaccagggcacagcttctcggtgtctccaaaaagccttatttgtttaagagattcatctttgacagtttaacaaataataataatgttagtcaatattattagtagatatagtactttcacctctagaaacagaaattgaccgcaaccttccaaayggtagctcttctaaaaaaggttttttaaattaaagttactttacattgggcaacttgctacacatgtatgtttagaacttcagtaaataagtacattaaattattgaaatatctctaattaataacagctaacatttattgatgttagcatacactacgctaagcactttatttaatcctcatggcaaatctataagattgatacaattatcatcatccccatttta

SEQ ID NO: 158663 - DNA, 527 bp, Homo sapiens
ctttttgcatgtttgcccagcatttctaaaattcacataacgtggaacatctgactgggamcaggaagctgttgtgtcccagagctctgtgcttgtctaataaaagcttctgagtagctctagtgtctttgtgttagctctgcctttgtgtctcttgaggaaatggagagctgtaacattatgttcatttgttcaccgtccattcatgcagtatttgcccagcagaagtggcagaggtggtcatcactcctcttcctgtatgtggtgagcgccaccttagttccaggcaccatgactcctgccctcccttcctcctacccccttcaggaggctttccctgaacctccccctgcccctggggctgagggctcctctctgctggtcccactgtctctctagaccccagtctgggatccttgggcctctctcatgtgccctcaggggacaaaaccccacttcacaccctgagcccagtccagtcctagctgccactgggagagggcagacgggccgcctgtccttttcct

SEQ ID NO: 158664 - DNA, 546 bp, Homo sapiens
ctaagaatgcatcagaatttgcacacttccactagtatcccactagtcagaactcaaccacatggcctcacctatgtccatcgggaaaggctgctgggaaatagcctattttataggcaaccatatgctcaactcaaaactgagagttctattactgaagaattaggtaaggaatattacctaactarggaggcaattggtaatccccagcacacagcacactgggctaagggatgagaccatagacattcactgactgccttgtcagcagggtcagttgtttcagttttccagggacaaatgtgaaaatgaaccacatttctggccctgacagtttctgctcacaatccctcagtacaccttaaggcaagtcttgtaaaacgacaagcatcacatgctcagtctcagaggcagtgtatggtgtggtctggcttcaggcactggaggcagactgcctgggttcaaatcttggctatactacctactggctatgtaatcttgagcaagttgctagcctctctctgtgcctcagtttctcatatgtaa

SEQ ID NO: 158665 - DNA, 471 bp, Homo sapiens
tttggtttgtgatattaaaagacccctacatttgctcagggacatgagggtccagtcgactgcaggmttggaggaaggagcccggggtcaacactggctcaagccaggaaaccctgggcagtagactcgctgggttccatttcctctggataatctgaattcctcctgtgttcctggtgtggggctagaattaaatgaccgtggccttggaaatgggtaagtgctgggaaaagggctcctggcggccagccaccgcactgccaggcccacggatgtgtgctccatttgtccttggagaagggcagggaaaggacactggagggaccagccaggcgggacagtaggcctggaagcatcagggtttcccttttacacccctacctttccactctgcccacccaaagcccaggaaatacagcagaggttttccaactttactaggcaaaagtgttgcaaaacgcagttgcagaa

SEQ ID NO: 158666 - DNA, 471 bp, Homo sapiens
tttggtttgtgatattaaaagacccctacatttgctcagggacatgagggtccagtcgactgcaggcttggaggaaggagcccggggtcaacactggctcaagccaggaaaccctgggcagtagactcgctgggttccatttcctctggataatctgaattcctcctgtgttcctggtgtggggctagaattaaatgaccgtggccttggaaatgggyaagtgctgggaaaagggctcctggcggccagccaccgcactgccaggcccacggatgtgtgctccatttgtccttggagaagggcagggaaaggacactggagggaccagccaggcgggacagtaggcctggaagcatcagggtttcccttttacacccctacctttccactctgcccacccaaagcccaggaaatacagcagaggttttccaactttactaggcaaaagtgttgcaaaacgcagttgcagaa

SEQ ID NO: 158667 - DNA, 471 bp, Homo sapiens
tttggtttgtgatattaaaagacccctacatttgctcagggacatgagggtccagtcgactgcaggcttggaggaaggagcccggggtcaacactggctcaagccaggaaaccctgggcagtagactcgctgggttccatttcctctggataatctgaattcctcctgtgttcctggtgtggggctagaattaaatgaccgtggccttggaaatgggtaagtgctgggaaaagggctcctggcggccagccaccgcactgccaggcccacggatgtgtgctccatttgtccttggagaagggcagggaaaggacactggagggaccagccaggcgggacagtaggcctggaagcatcagggtttcccttttacacccctacctttccaytctgcccacccaaagcccaggaaatacagcagaggttttccaactttactaggcaaaagtgttgcaaaacgcagttgcagaa

SEQ ID NO: 158668 - DNA, 471 bp, Homo sapiens
tttggtttgtgatattaaaagacccctacatttgctcagggacatgagggtccagtcgactgcaggcttggaggaaggagcccggggtcaacactggctcaagccaggaaaccctgggcagtagactcgctgggttccatttcctctggataatctgaattcctcctgtgttcctggtgtggggctagaattaaatgaccgtggccttggaaatgggtaagtgctgggaaaagggctcctggcggccagccaccgcactgccaggcccacggatgtgtgctccatttgtccttggagaagggcagggaaaggacactggagggaccagccaggcgggacagtaggcctggaagcatcagggtttcccttttacacccctacctttccactctgyccacccaaagcccaggaaatacagcagaggttttccaactttactaggcaaaagtgttgcaaaacgcagttgcagaa

SEQ ID NO: 158669 - DNA, 562 bp, Homo sapiens
tcagactatatgaagaatttctacaaattaagaaaacrtaagcaatccaatagaaaaacaagcaaaagtgatgaagaggaaattcattaaaaattaaatgcaaatgatccacaaacatttgaaaagatactcagccccatttgtaaccagaaaaatgcgcattgaaaaaacaatgagacatggttttttgtgtaccagattagcaaatatttaaaagtttgatattatcaaaatatgagtaggaagtgggtaatccttagtttttttaatatactgctagtgagagtgtaaagtgataatgccatttgtaagtatctacaatgtttaaaatgtgtgctctttggaagcaattctatgtcttcctattcatcctagaaaatacttcacatatgcataatgaagtatttataaggctgctaactgcagcatcatttgtataacaaaatatggaataatacttctctgctgctttattctccaaactgaaataaataaataggtgctagcaccctcacattctagaggaatccactaatgatccccaaaacttgttccctaagga

SEQ ID NO: 158670 - DNA, 517 bp, Homo sapiens
tatacagaaggacattagaatgctggatagcaaacaataatttctattcagtacaaaatctactgccttaatctattacatctgatacattccaataaatgtaaagttatccaaatggctatatccaaggcagtaaattcacagcctgtctaccaaatcgaagcagtcaggtttgacagtttttcttttagttcttttacggtgggcatttacctcaggtttaacactgttcccacaacttcctaatgtatttcactcatcctgacgctcaagtttatagccctgctttcttgggtatatgaattgtaacccttggactatgccttctaagcactsttttgtgaaagtttcgtttgaattgtaaggtcaataaaaatagcagtagaagacataaaagtcccagccctgctaccatttgctatttgagaccaggaaaaaccatgtaccttatttcaaaaagtagtgaattcaatgagttggacttccttatttctaaaatgtatgaagaaatagtgta

SEQ ID NO: 158671 - DNA, 555 bp, Homo sapiens
gccccacccaaactccagaaaccatacaagcaaggcaaggctgccagaactgataagggtttcttgaacctggaccctcaaaagcccaaagtggattggagagtataaaagtgcaggcagaagggcccttttggcctcagaagtaagaattcatagccagtgtgtcatcttccttctcctgcaagagtaytgtagtcttgttttccaagtctttttcccatctacgtacagacactgctgtatgtgtgtattgaaaggtgtggttgatttggaattgaataaaccttttcttggaaactcctaactgtatgatacaacaccatgaacaacttccttattatatgaaagggtagcacagtaacacactaatggccccaaatggagagtaattattattgcaaattcttgagagaacagaaacaaaaggcaaaagatatatatagattacaacatgttcttgacacagcacaaaaattgaatggaggtgaggacagtttcagcaacaaatgacttaaacattgaatctaaaaggaaaacatggctatcaaacttaaa

SEQ ID NO: 158672 - DNA, 322 bp, Homo sapiens
gggaagagaggaaataaagacaactagttagcataggcaactcttgaatttttctgtaagatggagcagaaaaatgagatggtgactggaagggatgtgaggtccaggaaggctctttgttttgttttgtttgtttctggttttgttttatttttaacagaccttatttktcagatcagttctagatttacagcaaaattaagtggaagctacagagatttctcatatacctccctgctaagcccacatatgtgcagccttctccactatcaaaaccctgcaccagagtggtacatatgttacaatccatgaagctatatcg

SEQ ID NO: 158673 - DNA, 558 bp, Homo sapiens
aaaaccctgcaccagagtggtacatatgttacaatccatgaagctatatcracatattatcaccccaaagtccataggttacattagggtccacacttggtgtatattctatgggtttgaacaaatgtataattacatggggttttgggggggttgtctgtttttgaaacggtatttttctttcacccaccctgcagtgcagtggcacaatcgtggctcactgccgctttgaactcttgagctcaagagatccacctcagcctcccgagtaactgggactacaggcacatgccaccatgcccagataactttttttttccattttttgtagagatggggtcgtgtcaccatgttgctgaagctggtcttgaactcctggcctcaagggatcctcccaccttgacctctcaaagtacaggcataagcaccatgcccagccaagtgtataatgacatgtatccatcattattgtatcacacagagtagttttacttccctaaaaatcctctgcgcttctcctatttatccgtctttctcacctaactcctggcaaccact

SEQ ID NO: 158674 - DNA, 267 bp, Homo sapiens
agatctaaaggctttgaaaagtaatttttaaatgtttttkattatctctgtcatctacatatcccaatacataacttggcacccaaacctagcaggttcttaatgtttgctgaatcagtaagaaaactgaagtttggagagtaccttgtccgaaaacacacagttagggaagaaagtagtggaaccagaattagatcccaaattctatgcacattcttttcacaacaccacaacaacaaagggtctcccataaccctttaatgctta

SEQ ID NO: 158675 - DNA, 395 bp, Homo sapiens
aaacatggaagtgaaaaaatagatcataatcacagtgtctgtggtagctctccataattagtaagcagaagcctggaagatacctgaatcagttcacattccaaagctgttcagcttttcacataaaatgcagtataatcgtgtatgtatacatggtgtcctattatataatgtaataaaaatccatctcatagtattttactcatttataatcacttgtgatgtataacttayatccatcaatttcatacttgatgaaattgtgaatgaaatagtgaataaagagcatttgcctcaagtcagccatatctataaaaccaaattaaccttacaaattcttgtaatgcagagctgctacaattaccagaatgaaagacttttcttagctaaaggaa

SEQ ID NO: 158676 - DNA, 603 bp, Homo sapiens
cttattaaatgcacttaacagtaattgagacagagatgctttccaatgactcacttcttaatcaaaaacgtgctttttaaccggaagtaatgataatatcagaagcacaagggtaaatctaagacaccagaaaaggctggtttgagtacaaacctaataataaagacaatatccatgtgactgacaaaaagctccaaccctagctcaagccatcatccaccttctccaggcggatagctgagcagatgaggactgaggagracattttaccccatagaacaacagctgcccactcatctttctatgtttctctagtcagccaatgattaaatttctgtattattccacatcttttccattctcttcaaaccttcaacgattcaatgaacttccactcctgagacaggcctgtgaaaaggagttttagaaatgaggttaatggattaatccaagtcactcccgagagcttggaacatgttatctctagcagcgtttttttttttttttggagacaaggtgtcacccagtgtcacacaggctggagcgcagtggcacaatcttggctcactgcagcctccacttcccaggcttaagcaatcctcc

SEQ ID NO: 158677 - DNA, 500 bp, Homo sapiens
cgggcttaattaaacctgggtgatgaaataacctatacaatacatctctgtgacatgagttaacctaagtaagaagccttcacatgtaccgcggaaccaaaaataaaagttaaaaaagaaaaaaaaaagaaacacgcccaaggtcacacagaaaatggggactggaacgtgaacccagggagtctggcctgaaaatccacagccttcagcacacacagtgctgggtcttccgggagctgagggaagacgatttctgccatcactctgggagcgccaacaggaaactaggcaagtcggacactaagccacctctctccatgttttctttgtatttaatttattttctgtagcttggccatctttgcatttccagccctgccatcagtgatgttctgggcttggtaaggcggaggaaggcccgggcagaaagcagccccggagtygggcactgtggcgtgcaggtggcacacgggtgtggagcatgtgttccagcaagcaca

SEQ ID NO: 158678 - DNA, 488 bp, Homo sapiens
tttactgtcccaccaacagtgtaaaagtgttcccatttctccacatcctctccagcacctgttgtttcctggctttttaatgatcgccattctaactggtctgagatggtatctcattgtggttttgatttgcatttgtctgatggccagtgatgatgagcattttttcatgtgtcttttggctacataaatgtcttcttttgagaagtgtctggtttctrtcacttagcaccatgcgttcagggctcattcacgctgaaatccacagatggcagggtttgcttcttgtttaaagctggatatacgctgctgtgtccacacaccaccccattatctgtgtgtccgctggtggatacttaggttgcttccctggcacggctgtttctgtgaacgatcccattgaagccacctgagtctcgcgtggctggccctctctgcacctgagactcccggacagcatccgggttgggggtcctgtggagcagatc

SEQ ID NO: 158679 - DNA, 488 bp, Homo sapiens
tttactgtcccaccaacagtgtaaaagtgttcccatttctccacatcctctccagcacctgttgtttcctggctttttaatgatcgccattctaactggtctgagatggtatctcattgtggttttgatttgcatttgtctgatggccagtgatgatgagcattttttcatgtgtcttttggctacataaatgtcttcttttgagaagtgtctggtttctgtcacttagcaccatgcgttcagggctcattcacgctgaaatccacagatggcagggtttgcttcttgtttaaagctggatatacgctgctgtgtccacacaccaccccattatcwgtgtgtccgctggtggatacttaggttgcttccctggcacggctgtttctgtgaacgatcccattgaagccacctgagtctcgcgtggctggccctctctgcacctgagactcccggacagcatccgggttgggggtcctgtggagcagatc

SEQ ID NO: 158680 - DNA, 488 bp, Homo sapiens
tttactgtcccaccaacagtgtaaaagtgttcccatttctccacatcctctccagcacctgttgtttcctggctttttaatgatcgccattctaactggtctgagatggtatctcattgtggttttgatttgcatttgtctgatggccagtgatgatgagcattttttcatgtgtcttttggctacataaatgtcttcttttgagaagtgtctggtttctgtcacttagcaccatgcgttcagggctcattcacgctgaaatccacagatggcagggtttgcttcttgtttaaagctggatatacgctgctgtgtccacacaccaccccattatctgtgtgtccsctggtggatacttaggttgcttccctggcacggctgtttctgtgaacgatcccattgaagccacctgagtctcgcgtggctggccctctctgcacctgagactcccggacagcatccgggttgggggtcctgtggagcagatc

SEQ ID NO: 158681 - DNA, 488 bp, Homo sapiens
tttactgtcccaccaacagtgtaaaagtgttcccatttctccacatcctctccagcacctgttgtttcctggctttttaatgatcgccattctaactggtctgagatggtatctcattgtggttttgatttgcatttgtctgatggccagtgatgatgagcattttttcatgtgtcttttggctacataaatgtcttcttttgagaagtgtctggtttctgtcacttagcaccatgcgttcagggctcattcacgctgaaatccacagatggcagggtttgcttcttgtttaaagctggatatacgctgctgtgtccacacaccaccccattatctgtgtgtccgctggtggatacttaggttgcttccctggcackgctgtttctgtgaacgatcccattgaagccacctgagtctcgcgtggctggccctctctgcacctgagactcccggacagcatccgggttgggggtcctgtggagcagatc

SEQ ID NO: 158682 - DNA, 380 bp, Homo sapiens
tgtaccctctcacctacatttctccttttcctctctctaccccatccctgataactagttttatctctttatataattccacatataagtgacatcatgtaatatttttcttcctgtgtctgccttatttcatttagcataacggcctccaggtccatccgcattgtcacagatggcaatgcttgagaattgcttgaacctgggaggtggagtttgcagtgagccaggattgygccactgcactccagtctgggcgacagagcagaactccatcaaaaaaaaaaaagaaaagaaaagaagcaaatctcaactgtaggctgcctgcaagagattcatctcacatgtgaagacagccacaggctcaaagtaaatgtacggag

SEQ ID NO: 158683 - DNA, 466 bp, Homo sapiens
ctaccaacaagaaaaagccctgggacatacggattcacagccaaattctaccagacataaaagaaagagctggtacaaaaccaacaaaactattccaaaaaatcaaggaggagggacttctccctaactcattctatgaggtcagcatcattctgataccaaaacctggcagagatacaaagaaaaaagaaaacttgtgctaagtatcctgataaacatagacacaaaaatcctcagcaaaatmctaacaaatcaaatccagcagcacattaagatgctaatccaccacggtcaggcaggcaatattgattcctggatgcaagtttggtttaacaaacataaataaatgtgattcatcacataatcataactaaaaataaaaactacatgatcatcttaatagatgcagaaaaggctttcgatagaattcaacatcctttcatgttaaaaaccctcacaaactagt

SEQ ID NO: 158684 - DNA, 348 bp, Homo sapiens
gatttctgttcttaattctgtttatgtggtgttatcacatttattaacttgcgtatgttaaaaccatccctgcatccctggtatgaaacccacttgatcctggtggattatctttttgatatgttgttggatgcagttagctagtattttgttaaggattttaccatctatgttcaacaaggatatcggtctgtagttttcgtttttggttatgtcctttcctgattttggtattagggtgacgctygcttcataaaataaattagggaggcttccctctttctctatcttgtggaatagtgtcaaaaggattgttatcaattctcctttgaatgtctggtagaattc

SEQ ID NO: 158685 - DNA, 348 bp, Homo sapiens
gatttctgttcttaattctgtttatgtggtgttatcacatttattaacttgcgtatgttaaaaccatccctgcatccctggtatgaaacccacttgatcctggtggattatctttttgatatgttgttggatgcagttagctagtattttgttaaggattttaccatctatgttcaacaaggatatcggtctgtagttttcgtttttggttatgtcctttcctgattttggtattagggtgacgcttgcttcataaaatraattagggaggcttccctctttctctatcttgtggaatagtgtcaaaaggattgttatcaattctcctttgaatgtctggtagaattc

SEQ ID NO: 158686 - DNA, 402 bp, Homo sapiens
taattttcataataatgggttattgaacttyaaaacaagattgtgttttctcttatggatattccttgctttcattaaatgtcatctaaaaaaagattgtggattatgacctagtcgtggaataaatacgaaatcaattgatgttagaaattaattaaaacccaaatctccctaaaggtagaggcagcacagggtgtataagcaaagaaaatatctttcggtatagaaagaagtaggcttcagctttgttcctatgtaaaaccatttttggtgagagatggcaaaattccttggtaatgacgttatgagttgaccaagactttcagaaatatcagttaatcatcatctcaacaccaaaatgaaataaatggctgttagtagattttctccttttctgaattc

SEQ ID NO: 158687 - DNA, 589 bp, Homo sapiens
attcataacatgcagcacacagtgcctagaacacagaaagccctaaactaataatacgtaaaagtttgaaaaagtttatctgtactagtatgaaagaaagacccatagtcaaayggctgacattttttagcaagtttgatgggcacaataaccttatggtggtggtattactacctctgtctttgagatgagggaacctcagctttttttttttttttttgaggaagtaagcttcccaagctcagaaaggtaggggagagggccaggcatggtggctcacacctgtaatcctaacactttgggaggccaaggcgggcagatcacctgaggtcgggagatcggggccatcctggccaacatggagaaaccctgtctctactaaaaatacaagaaattagccgggcatggtggcacatgcctgtaatcccagctacttgggaggctgagccaggagaatcgcttgaactcaggaagcagaggttgtggtgagccgagatcacaccattgcactctagcctgggcaacaagagcgaaactctgtctcaaaaagagaaaaaaaaaaaagaaagaaaggtaggggagagatttg

SEQ ID NO: 158688 - DNA, 508 bp, Homo sapiens
cagccgaccttcattattccttaatgcaaattagcaccctacactttgtacacattcatagactatgatgtcactgggcagaatttagatcatgctataaaactgttcttatgtattcgtccttgtgtttgccttcccaattagattacatgacccgcaagggtaagagcaattccttttatttctttttctattttaccttacctacagcctctcacccaatgtcaagttcaacagacatcaggcctaccaccatcttgtttgcttagggagttaaaaaaaaaggttaaacaaggagctgaactcttctattctagttaaatataaygttgaatttcagttatacataaatataaccttgaatttaggacgcatagagactggattagcctttctgaagcatggaaaaattttcgtaatcctcccaaggatggtatataactaatcccattctagctacatataagtaaatgtgttacatacaatgagcattggggcttaattatca

SEQ ID NO: 158689 - DNA, 508 bp, Homo sapiens
cagccgaccttcattattccttaatgcaaattagcaccctacactttgtacacattcatagactatgatgtcactgggcagaatttagatcatgctataaaactgttcttatgtattcgtccttgtgtttgccttcccaattagattacatgacccgcaagggtaagagcaattccttttatttctttttctattttaccttacctacagcctctcacccaatgtcaagttcaacagacatcaggcctaccaccatcttgtttgcttagggagttaaaaaaaaaggttaaacaaggagctgaactcttctattctagttaaatataacgttgaatttcagttatacataaatataaccttgaatttaggacgcatagagactggattagcctttctgaagcatggaaaaattttcgtaatcctcccaaggatggtatataactaatcccwttctagctacatataagtaaatgtgttacatacaatgagcattggggcttaattatca

SEQ ID NO: 158690 - DNA, 606 bp, Homo sapiens
aaaatatttttatgcatttgcactccaatatatgtctaattatgtacttgtactaaaatataaacataatacaaatatgacagatgtactataaaacttgaccaattataggaattgaaaaagtataaagataagtagaatgcaacattatttatcttttcagtgtgaaaaactttttttctcrttagattttagtaattatattttagtcaatattaatgttacttctatttttagtattttagtgaaagtctcctgactgcattagatctgatgagactatcattgatctttaactcataagtgtctgatgagaaatgtgctcaagtaagaatagagatcctagcactgccattttctaattgttcagttgtatgtatgttaatagaattgcctttgatctgtggctcctttgcgggagtctttttaaatttcttgttcattttgtgagggtgaatttcattaaaactacacaatgtactctgtaaatcgacttaactggtgtgcttaaattacaatagttcaaatatgagcaaaggccacctgtcttattgaactcctactgttccattaggatgctccaataaactatacagcatgtttgat

SEQ ID NO: 158691 - DNA, 426 bp, Homo sapiens
ggtcttagatttaagcctttgatccatcttgagttgatttttgtataaggtcagagataaggatccactttcattcttctacatgtgayttgccaattatcccagcaccatttgttgactagagtgtcctttttcccacttttttttgtttgctttgtcaaagaccagttggctgttaagtatctggctttatttctgtattctgttccattcgtctatgtgcctatttttataccagtactttactgtttgggtgactatggccttgtagtatagtttgaagtcgggtaatgtgatgcctccaggtttgttctttctgcttagtcttgctttggttatgcaggctcttttttggttccatacaaattttaggatttttttttctagttctgtgaagaacgatgatggtattttgatgagaattgc

SEQ ID NO: 158692 - DNA, 464 bp, Homo sapiens
agctgattattatgatctgatactttagcagatggcaagtatatgatacatgttagtctgtctactgcagtctctatgctgtacattagcggtccaggactgtttcctcctgcatggctggaagcttgtactgtttgaccaacacctccccactttcccacctgtgttgttcaaaccctggcccagtgtccatctgtgccctggcattgtcctgcagcccgaatgacagtcttgaatgaggcaattcaaatctctgcttccactgacccrttaaaggggggtctgcagattttactcaagaaaaaaatagaaaataccatttcagatgtgaataaactaaccagggcatatggcagaaggaggaagggttacttcagtggtcatggagtgctgctctggggaggggccatttgtgttgagactggatgaggtgaaagagctcaagctgcaaggggcctggggat

SEQ ID NO: 158693 - DNA, 579 bp, Homo sapiens
cattgataaatatttaaaaaatttaatgttgaccaaacttacaatggactctgacaaaacagtatttcgtggtgccaaggctgctggccccacctacaaacatcctgctaaatcctggggccaacgataggcctcatgcattctgttgtcacttatattttgctgtaacatataatgccagctgctggacggagacagacaccgtgtgtaatgtggggaaagtgtcagtctactcctatcttacagtttttctctctttacatcaaaaatgtatgttgggttttatcgaaattgtagttgayatacatctagaggtctcctttactaacacgtttcttaatatgacatcattcttacatgtttgtcaaaaccatttggtgtcattaatgtgttatattatcccacctgacttattattttattggaggctttatggatgagtttaattatttttatgaatgagacttttctttatgatttttcttactatcatttttagatttcagtgcctggattacgttggcttcctaaaattcattaaaatattttttccttttttcccatgttccatttctatta

SEQ ID NO: 158694 - DNA, 579 bp, Homo sapiens
cattgataaatatttaaaaaatttaatgttgaccaaacttacaatggactctgacaaaacagtatttcgtggtgccaaggctgctggccccacctacaaacatcctgctaaatcctggggccaacgataggcctcatgcattctgttgtcacttatattttgctgtaacatataatgccagctgctggacggagacagacaccgtgtgtaatgtggggaaagtgtcagtctactcctatcttacagtttttctctctttacatcaaaaatgtatgttgggttttatcgaaattgtagttgacatacatctagaggtctcctttactaacacgtttcttaatatgacatcattcttacatgtttgtcaaaaccatttggtgtcattaatgkgttatattatcccacctgacttattattttattggaggctttatggatgagtttaattatttttatgaatgagacttttctttatgatttttcttactatcatttttagatttcagtgcctggattacgttggcttcctaaaattcattaaaatattttttccttttttcccatgttccatttctatta

SEQ ID NO: 158695 - DNA, 625 bp, Homo sapiens
catgtgacccatagtgaggcacagatggtgttttgtgtcagctgccctgggtcaccagttggcccgtcggtctctcacacttgcgcacttcacttattctcatgatctgcctggtcctcgttagtacctgtgttttccatccctgctgtaaaggaatctacaggctttggtactggggagtagcaggaaaactgccaggaccccatggaagggcggagggagactcctcccccacagacagaggttgagcacagaagggactggggcttgtcctctgaagatctcgcgtgttagacagctctgcagcctggggcacaggctgccctcttctcaggaggctctccctaggagtctgtcatctttctgccaaaactcatcccatcctgagatggtggcacagaaatacttgggtcacaggacatgctgcctcaggcacgtgcgtacagtcattttatgagctttagagctgaaaatgtccttgatcatygaatcctaaaaaaagtcttctagatgacctagggtccaaccccagcacatctcccctgccatgactgaatttctcctaacaagagagtctcttatcatctaatttaatctgtagctgtattggaattgccccagaaag

SEQ ID NO: 158696 - DNA, 625 bp, Homo sapiens
catgtgacccatagtgaggcacagatggtgttttgtgtcagctgccctgggtcaccagttggcccgtcggtctctcacacttgcgcacttcacttattctcatgatctgcctggtcctcgttagtacctgtgttttccatccctgctgtaaaggaatctacaggctttggtactggggagtagcaggaaaactgccaggaccccatggaagggcggagggagactcctcccccacagacagaggttgagcacagaagggactggggcttgtcctctgaagatctcgcgtgttagacagctctgcagcctggggcacaggctgccctcttctcaggaggctctccctaggagtctgtcatctttctgccaaaactcatcccatcctgagatggtggcacagaaatacttgggtcacaggacatgctgcctcaggcacgtgcgtacagtcattttatgagctttagagctgaaaatgtccttgatcatcgaatcctaaaaaawgtcttctagatgacctagggtccaaccccagcacatctcccctgccatgactgaatttctcctaacaagagagtctcttatcatctaatttaatctgtagctgtattggaattgccccagaaag

SEQ ID NO: 158697 - DNA, 499 bp, Homo sapiens
gaattccatcatcccacaagcattagtaatttctaaaataatgacagggtctgygagctggtaaactggggcagcatttaaagctgttttttgatatgaaaactttaagacatgctttatagttataaaagatgaataaccaaattggagagcattcttcttatttttcctgtgaccccaacttcagcctgtattccttttcataattattgcaaaagatgatgttccctttctgtttgtttgtaacccccaagtatctgccatgacaggacctagcatctattaaggaatagcattggttggaaaggtggcatgggaaggctaacaggaagagggagggagacaaacctggggagggagagagactctgacatccaccagaaaagggaacatcagggcgcaaccttccacagcctgaaggcaagcaagcaagggttgcagaaagcggaatgctggagcggcatggacagttgtgctgcatagccaggcaggtggtgaa

SEQ ID NO: 158698 - DNA, 506 bp, Homo sapiens
tctaaaataatgacagggtctgcgagctggtaaactggggcagcatttaaagctgttttttgatatgaaaactttaagacatgctttatagttataaaagatgaataaccaaattggagagcattcttctyatttttcctgtgaccccaacttcagcctgtattccttttcataattattgcaaaagatgatgttccctttctgtttgtttgtaacccccaagtatctgccatgacaggacctagcatctattaaggaatagcattggttggaaaggtggcatgggaaggctaacaggaagagggagggagacaaacctggggagggagagagactctgacatccaccagaaaagggaacatcagggcgcaaccttccacagcctgaaggcaagcaagcaagggttgcagaaagcggaatgctggagcggcatggacagttgtgctgcatagccaggcaggtggtgaacaagctaggtttcaattattctgaaactcaatagaatt

SEQ ID NO: 158699 - DNA, 593 bp, Homo sapiens
ggcgtgagctatcatgcctggccactctctctttatttcttatggcaacatgaaaccatccagttggatgaagagcatttcatgcccctggagtgtgggaagaaacacaacattacacgtaatacccatgaaggttcgtcttcgctcctttcaggaagctgattaattacagttcccttttctgtatggttttttttcccttgtgacaaaagcaggccccattttcgccacgaggtgttacctcccttgtgcatttgtattgctactgggccttatggggtcactgctgcggaagctcaactccacacccacagtacagggtctcgttggagcctagatttagacagaggaaccagagcttctgcaggtctaggcaggtcggatgtgggccccaggggcgctgcagctcccataasgggagcaagggaagctggtgggcatccagccctccacctggaggaggcagggcagcatgagcctcagaggaagagggagtggtggacatagcccaggcctggggggtggaaggatgctgagctgagaggggcacaaactgggcctggcaccatgcatttgacacacagtcatttgag

SEQ ID NO: 158700 - DNA, 564 bp, Homo sapiens
aagtgctaaggctgtctcctagcatcttccatcactggctgcagacgtatctggaaataatatacaaagtgttcatccttttagtatcaatcattcttaaagaaaaagtgtcaaagcagagtttcgtgggacaggaatccatctaagagtgccaattccttctgctaccattcccctttctctgtgaagagagcctcctgatctgtactcttttttttttttttttgaggaggttttgaactgtcctctacctccayagtcctcaatagctggcagcaaatatatacaccccaaattactctttcatccagtcccaaggtactttaagctacttaaaagttacattgccactgtagggtcctctctactaaatagagcacatcctgttaacactattcctgctttaacctcccatgatgcagactaaatctggcccaattttgtaccgttaaagttcaaatgctacattcatgtaactatcagatttagttatgtttctattatttatgagttggaaaattttattttatccatcttcttggaaaatagggtctgaagttgttt

SEQ ID NO: 158701 - DNA, 486 bp, Homo sapiens
atttaatttacataattacaattaacccatttaaaaatgtatcgctcaatgttttagtatatacgcaggtatacgtaaccatatgattgtgaattttagaacatttccattacctaacaaagaaaccctggatcttttagctattgtctactattattcactaatccaagtcaatgcaattggtccgtgaaacaacccgatcttaactggcaaattctgtgtcatggagaaggcctttagtatcamcatagcaaaaactgaccaacaaaagaacgaggtaaaaatagtaattgagtgccccctcctggaatatctggccaaggactttccaaagagagctctgtgtctgatttctcaaacaccaggactcaaaagaggaggttgatgaacctcagtgctaggtctgggtgcaaaaaatgcaacagatggccccgccagagtccttagggtgatgatccttacgtctaatacaagtacgatttcctc

SEQ ID NO: 158702 - DNA, 486 bp, Homo sapiens
atttaatttacataattacaattaacccatttaaaaatgtatcgctcaatgttttagtatatacgcaggtatacgtaaccatatgattgtgaattttagaacatttccattacctaacaaagaaaccctggatcttttagctattgtctactattattcactaatccaagtcaatgcaattggtccgtgaaacaacccgatcttaactggcaaattctgtgtcatggagaaggcctttagtatcaacatagcaaaaactgaccaacaraagaacgaggtaaaaatagtaattgagtgccccctcctggaatatctggccaaggactttccaaagagagctctgtgtctgatttctcaaacaccaggactcaaaagaggaggttgatgaacctcagtgctaggtctgggtgcaaaaaatgcaacagatggccccgccagagtccttagggtgatgatccttacgtctaatacaagtacgatttcctc

SEQ ID NO: 158703 - DNA, 486 bp, Homo sapiens
atttaatttacataattacaattaacccatttaaaaatgtatcgctcaatgttttagtatatacgcaggtatacgtaaccatatgattgtgaattttagaacatttccattacctaacaaagaaaccctggatcttttagctattgtctactattattcactaatccaagtcaatgcaattggtccgtgaaacaacccgatcttaactggcaaattctgtgtcatggagaaggcctttagtatcaacatagcaaaaactgaccaacaaaagaacgaggtaaaaatagtaattgagtgccccctcctggaatatctggccaaggactttccaaagagagctctgtgtctgatttctcaaacaccaggactcaaaagaggaggttgatgaacctcagtgctaggtctgggtgcaaaaartgcaacagatggccccgccagagtccttagggtgatgatccttacgtctaatacaagtacgatttcctc

SEQ ID NO: 158704 - DNA, 486 bp, Homo sapiens
atttaatttacataattacaattaacccatttaaaaatgtatcgctcaatgttttagtatatacgcaggtatacgtaaccatatgattgtgaattttagaacatttccattacctaacaaagaaaccctggatcttttagctattgtctactattattcactaatccaagtcaatgcaattggtccgtgaaacaacccgatcttaactggcaaattctgtgtcatggagaaggcctttagtatcaacatagcaaaaactgaccaacaaaagaacgaggtaaaaatagtaattgagtgccccctcctggaatatctggccaaggactttccaaagagagctctgtgtctgatttctcaaacaccaggactcaaaagaggaggttgatgaacctcagtgctaggtctgggtgcaaaaaatgcaacagatggccccgccagagtccttagggtgatgatccttaygtctaatacaagtacgatttcctc

SEQ ID NO: 158705 - DNA, 517 bp, Homo sapiens
tatctatattaggtaagaatagcttgttgctgatgggactcctatttgaagactttccactttgcactggataacttgtatgtaaattactacgcatttctctgtattgtctatgtggtatctctatgctwggggaatagataatctaagaaactcaagtaaaggaaggactcttccttttaagcttaaaagacagaatttggagaaatttgaaattctcttacagagaattttttttttttttaaattcagctgccttaataaacctagtttttcaaaataaatgccacctgcaacattatgtattacattcattgaagtgattcatttgtggacaaatcagttgctgtgtaatgttttccataatgtctggcacagctggtttttaatttgtttataaaataaaactattccctttggtgtaagtgttttcatttggatacacagatttgtcatgtttgaaaacactattttcttcactttatgggcaaagaaaagtgtaataagagaccaaatg

SEQ ID NO: 158706 - DNA, 535 bp, Homo sapiens
tcaaatataatatatatatattttcctcaaacaagatcccaatgtaggcaggcaacatcagtccatggtgccctggatacatatgacactgatacagtgacccagttgctgtgtctttctgagaatgttggaaactacctcacaaacatgcagatatatttcagcctggaaaagtgggaaagaccatggaaccgttagtgagagcaatgtttggagctccaaagagaaacctctagatcttactgcayttataacttgaagtttattgtttaattcacatgaagtcctaaacagacatctctgtctagtagatagatctatttcaggagcttcttcaaggactcggcccacttccttgtgactttattattgttgacatgtgaattctaggcttgtcattcctgtcatcctctggcctgctgagaagacacgatgatgaagaagcaacttgggagctactaatggagcagcggaagtggcaccagatcatttctccacaaatcttactctctggaatgcagtgccatggcaacac

SEQ ID NO: 158707 - DNA, 554 bp, Homo sapiens
gatgaacatttagcagtctccaccacccattttcacatataaatttatcaaaatttggttaataaaagttgaatatgggtgatatgaatatcattaacctacagctaattttcatttagcaaagttttctgaaaaaagtgaaatgataatgtaaacattcttgtgtttttctttcaactrgtgttaggtgttttatctctcaatcgtaacaataagctaaaaggttttatgaatttctactttgtatttaacaagctatcattaatttagtaaaatgcttctgattcagtactctagaattttaaaggaatcattttctaaaacatcgcatgggtttaagtacttcgcttttgttgggaatatagcaggtgtcagtctaaataattttctatgtaactgattaacagctgtctctgtgtaatatttaagaagcagcatatgtgcttgctaaagagttcactcttggatagctgaatagtttgttctcaaagcaaattatatctctagaagaaagctggcatttatctagcattaaactattctttatcaagagc

SEQ ID NO: 158708 - DNA, 564 bp, Homo sapiens
cataatgatttaaatttcaattaactacttttcatccatttatccatttttgcatattggttttataatacaatacaatagcctgagagcagtggcttataactgtaatttcaacatttttggaggctgaggtgggaggattacttgagcctaagagtttaagaccagcctgggcaacacagaaaaaccttgcctctacaaaaacacaaaaatcagccaggtgttgcaaggctcacctatagtcccagctacttgggaggctgaggcagaagtatcccttgagcccaggartttgaggctgcagtgagctatgattatgccattgcacttcaacctgggtaacaaaacaagaccgtgactcaaaaaacaaaagaaaataaaacaaaaaacaatacaatgaaagcagcagaatgcaagcacatactagcatataaaattgaatgttctctcagacaactgaactaagcagtctaagcacatggacaacaaaggtagccttcctcagcataaacctaagcatgtccagcttgcattcccatcataaggttttctactggctattga

SEQ ID NO: 158709 - DNA, 525 bp, Homo sapiens
gaaattccgtgcttacaaagctgtatacggaatgttccttattttaactttgacatgttttcctgtcatatgtccctttttctctccagcatagctgcactggcctagctcatgcttagctgagcaaacactctccaaattcagattttaaatactgtggcttctacctggactgctgttyccccagatagcattgtgacttgttctttttcttttttaaatcttctatcagagatcttctctgaccacctgcccaaaacattacccctgatcccttactccagcagaagccctaaatcccaatttacctgatgatattctttcctcacaggaatcttcaattatggtaggtctacttatttgtttattgtctactcttgccatgggacataagctctatgagcgtaggttctgtgaacactgttagagcctgttcaatagtgtttattacactgcctggcatgtggttgcaactggataaatacttgctaactgagtaagtgaataaatgagtggggaagaatt

SEQ ID NO: 158710 - DNA, 541 bp, Homo sapiens
actaagaacaaaagtgaaattccgtgcttacaaagctgtatacggaatgttccttattttaactttgacatgttttcctgtcatatgtccctttttctctccagcatagctgcactggcctagctcatgcttagctgagcaaacactctccaaattcagattttaaatactgtggcttctacctggactgctgtttccccagatagcattgtgacttgttmtttttcttttttaaatcttctatcagagatcttctctgaccacctgcccaaaacattacccctgatcccttactccagcagaagccctaaatcccaatttacctgatgatattctttcctcacaggaatcttcaattatggtaggtctacttatttgtttattgtctactcttgccatgggacataagctctatgagcgtaggttctgtgaacactgttagagcctgttcaatagtgtttattacactgcctggcatgtggttgcaactggataaatacttgctaactgagtaagtgaataaatgagtggggaagaatta

SEQ ID NO: 158711 - DNA, 564 bp, Homo sapiens
acaaaagtgaaattccgtgcttacaaagctgtatacggaatgttccttattttaactttgacatgttttcctgtcatatgtccctttttctctccagcatagctgcactggcctagctcatgcttagctgagcaaacactctccaaattcagattttaaatactgtggcttctacctggactgctgtttccccagatagcattgtgacttgttcttttwcttttttaaatcttctatcagagatcttctctgaccacctgcccaaaacattacccctgatcccttactccagcagaagccctaaatcccaatttacctgatgatattctttcctcacaggaatcttcaattatggtaggtctacttatttgtttattgtctactcttgccatgggacataagctctatgagcgtaggttctgtgaacactgttagagcctgttcaatagtgtttattacactgcctggcatgtggttgcaactggataaatacttgctaactgagtaagtgaataaatgagtggggaagaattacattcagatgaacccagacagaaaagaaaa

SEQ ID NO: 158712 - DNA, 564 bp, Homo sapiens
acaaaagtgaaattccgtgcttacaaagctgtatacggaatgttccttattttaactttgacatgttttcctgtcatatgtccctttttctctccagcatagctgcactggcctagctcatgcttagctgagcaaacactctccaaattcagattttaaatactgtggcttctacctggactgctgtttccccagatagcattgtgacttgttctttttcttttttaaatcttctatcagagatcttctctgaccamctgcccaaaacattacccctgatcccttactccagcagaagccctaaatcccaatttacctgatgatattctttcctcacaggaatcttcaattatggtaggtctacttatttgtttattgtctactcttgccatgggacataagctctatgagcgtaggttctgtgaacactgttagagcctgttcaatagtgtttattacactgcctggcatgtggttgcaactggataaatacttgctaactgagtaagtgaataaatgagtggggaagaattacattcagatgaacccagacagaaaagaaaa

SEQ ID NO: 158713 - DNA, 263 bp, Homo sapiens
ccctaaatcccaatttacctgatgatattctttcctcacaggaatcttcaattatggtaggtctacttatttgtttattgtctactcttgccatgggacataagctctatgagcgtaggttctgtgaacactgttagagcctgttcaatagtgtttattacactrcctggcatgtggttgcaactggataaatacttgctaactgagtaagtgaataaatgagtggggaagaattacattcagatgaacccagacagaaaaga

SEQ ID NO: 158714 - DNA, 591 bp, Homo sapiens
acaaaagtgaaattccgtgcttacaaagctgtatacggaatgttccttattttaactttgacatgttttcctgtcatatgtccctttttctctccagcatagctgcactggcctagctcatgcttagctgagcaaacactctccaaattcagattttaaatactgtggcttctacctggactgctgtttccccagatagcattgtgacttgttctttttcttttttaaatcttctatcagagatcttctctgaccacctgcccaaaacattacccctgatcccttactccagcagaagccctaaatcccaatttacctgatgatattctttcctcacaggaatcttcaattatggtaggtctacttatttgtttattgtctactcttgccatgggacataagctctatgagcgtaggttctgtgaacactgttagagcctgttcaatagtgtttattacactgccyggcatgtggttgcaactggataaatacttgctaactgagtaagtgaataaatgagtggggaagaattacattcagatgaacccagacagaaaagaaaatatttctccataatttctagaaaagaa

SEQ ID NO: 158715 - DNA, 564 bp, Homo sapiens
acaaaagtgaaattccgtgcttacaaagctgtatacggaatgttccttattttaactttgacatgttttcctgtcatatgtccctttttctctccagcatagctgcactggcctagctcatgcttagctgagcaaacactctccaaattcagattttaaatactgtggcttctacctggactgctgtttccccagatagcattgtgacttgttctttttcttttttaaatcttctatcagagatcttctctgaccacctgcccaaaacattacccctgatcccttactccagcagaagccctaaatcccaatttacctgatgatattctttcctcacaggaatcttcaattatggtaggtctacttatttgtttattgtctactcttgccatgggacataagctctatgagcgtaggttctgtgaacactgttagagcctgttcaatagtgtttattacactgcctrgcatgtggttgcaactggataaatacttgctaactgagtaagtgaataaatgagtggggaagaattacattcagatgaacccagacagaaaagaaaa

SEQ ID NO: 158716 - DNA, 539 bp, Homo sapiens
ccaatttgcatcataggcttcaccagtctatgcacatatgtgttgtcacatcaacatgaatgcctggctctttgcagagtactttctccaaaactcctgtgtaatgagatgttactgtactgatgataatgactggaggtattaatcacccaagtccaaggctcaccattctttctgacatatatagaaaagttaccttcttcgtgtattcatcttttttaagatgatattttatatcaatrgcttgggccactagtaataagattatttttacgatagtatccagacctgagtgatagtttttttcagcagaatcactttatttagactgttagtgctagtaattggacaactaagaatgtgcaagccttcccagtcagagcctcatactgaagcttgatccactgttagctcatcctctgagcctattcctaagtctgtctccacactgaatgtctgccgattaggatcattttgctctcaggactcatattagtccggttggactgctagaacacaatacctcagactgggtggct

SEQ ID NO: 158717 - DNA, 541 bp, Homo sapiens
gcagtgaacaataaggtctctggcttttctttactgggaggctttttattaaggcatcaatctcataattttttttggtctgttgagttttggatttcttccttgttcaatcttggtaggttgtgtctaggaatttgcccattttttctagattttccaatatattgacatagagttgctcatagtagccactatttgtatttctgtgttatcagttgtaatgtgtcctttatcattccttattttatttgtttggaacttctctctatttttttagttggtttgactragtttgtcagttttatttaactttacaaaaatagctttttgttttattgatcctctgtattcctatttattgtttacttcattccaatttcatttatttcttcttggatctttattacttcttttattctactatttttgcatttggtttgcctttgcttttatacttctttaaaatgcatcattaggttgtctatttgaagttttgcctctttttgatgtacttggaggcacttatagctataaaattccc

SEQ ID NO: 158718 - DNA, 596 bp, Homo sapiens
atatttcttgtctaatggagttcaaaatcactatcatggttggtgactggctttcttttaggcagagatgtaggaacaggcttcttctatttaccactttccagaaatgttttcaaagttacatcctcatttgtatcaaggtagcataaggaggaaattgaagccaaaataaagagtggaaaagaagtatctactccttaactgctttgttctaaaaatgtttccttccatcaaatgcagttagtaagttttagtcatattattccatctaaataaaaatgyagggctagaaaatgcagttttgggccaggcatttaatttcctgacaatacattattgttaagagagtatgcatatttggttcccctttatggatacatatatttccagatactgaatgggatatatttgccccctccccaagagtaacaacacaaagtataacatgatttagactgtaaaaattgttggtctttgtgctggtatgcctgatgacaaaaggacaatattatattgaatatagaaagatgtaacaatatgtttcatcaatattcatttttcatccatcttttaatattcagatgttactttgttcc

SEQ ID NO: 158719 - DNA, 559 bp, Homo sapiens
tcaggggacaaagaggtcccctgtacccttcattcagtttcctataaaagtaacatttttcgtaggatagtgcaatgtcaaaaccaggaaactgacattactataaagtgtgtgtatagctctgtgccttttatcacacatatgtgctcaggcatcaaccaccacactcgagacacagaaccgctcygtccccacaaagctctcccttatgaaacagtcgcgcccacacccgccccaatatccctcaaccctggcagtgagaatttcatttcaatctctataacttggccaggcgtggtggctcatgcctgtaatcccaccactttgggaggccaaggcgggcagatcacctgaggtcaggagcttgagaccagcctggccaacatggcaaaaccccgtctctacgaaaaacacaaaaattagccaggcgtggtggtgcatgcctgtaatcccagctactccggagactgaggcaggagaaccgctcgaacccaggaggcggagattgaaatgagccgagatcatgccactgcactccagcctgggcaacaagagcgta

SEQ ID NO: 158720 - DNA, 559 bp, Homo sapiens
tcaggggacaaagaggtcccctgtacccttcattcagtttcctataaaagtaacatttttcgtaggatagtgcaatgtcaaaaccaggaaactgacattactataaagtgtgtgtatagctctgtgccttttatcacacatatgtgctcaggcatcaaccaccacactcgagacacagaaccgctccgtccccacaaagctctcccttatgaaacagtcgcrcccacacccgccccaatatccctcaaccctggcagtgagaatttcatttcaatctctataacttggccaggcgtggtggctcatgcctgtaatcccaccactttgggaggccaaggcgggcagatcacctgaggtcaggagcttgagaccagcctggccaacatggcaaaaccccgtctctacgaaaaacacaaaaattagccaggcgtggtggtgcatgcctgtaatcccagctactccggagactgaggcaggagaaccgctcgaacccaggaggcggagattgaaatgagccgagatcatgccactgcactccagcctgggcaacaagagcgta

SEQ ID NO: 158721 - DNA, 559 bp, Homo sapiens
tcaggggacaaagaggtcccctgtacccttcattcagtttcctataaaagtaacatttttcgtaggatagtgcaatgtcaaaaccaggaaactgacattactataaagtgtgtgtatagctctgtgccttttatcacacatatgtgctcaggcatcaaccaccacactcgagacacagaaccgctccgtccccacaaagctctcccttatgaaacagtcgcgcccacacccgccccaatatccctcaaccctggcagtgagaatttcatttcaatctctataacttggccaggcgtggtggctcatgcctgtaatcccaccactttgggaggccaaggcgggcagatcacctgaggtcaggagcttgagaccagcctggccaacatggcaaaaccccgtctctacgaaaaacacaaaaattagccaggcgtggtggtgcatgcctgtaatcccagctactccggagactgaggcaggagaaccgctcgaacccaggaggcggagattgaaatgagcygagatcatgccactgcactccagcctgggcaacaagagcgta

SEQ ID NO: 158722 - DNA, 597 bp, Homo sapiens
tggtacttgtgtttgcattttgaagttcttgtgttgtgtttttcagctccatctgatcatttatgttcctcttcagactggttattctggttaacagctcctgtaatgttttatcatggttcttagcttctttgcagtgagttagaccatcatcctttagcttggcaaagttcattgtcacccatcttctgaagcctgcttatgtcaattcttacatctcmgcctcagacccattctaagctcagctggagacttgttgcaatcttttggaggagaagaggcactctggctttttgagttttcagcatttttgtgtttattctttctcatcttcatgggtttaactacctttggtctttgaggctgctgacttttagatggggtttttgtggtgtctttctcattgatattgttgctttctgcttttgttttcttttagtagtcaggcccgtcttctgtagcgctgctgtggtttgcttggggtccactccagcccctattcacctgagtctctcccatccctgtagatatcacctgtggaggctgcagaccagcaaaaatggcagcctgctccttcctctgggagctctttcccag

SEQ ID NO: 158723 - DNA, 597 bp, Homo sapiens
tggtacttgtgtttgcattttgaagttcttgtgttgtgtttttcagctccatctgatcatttatgttcctcttcagactggttattctggttaacagctcctgtaatgttttatcatggttcttagcttctttgcagtgagttagaccatcatcctttagcttggcaaagttcattgtcacccatcttctgaagcctgcttatgtcaattcttacatctcagcctcagacccattctaagctcagctggagacttgttgcaatcttttggaggagaagaggcactctggctttttgagttttcagcatttttgtgtttattctttctcatcttcatgggtttaactacctttggtctttgaggctgctgacttttagatggggtttttgtggtgtctttctcattgatattgttgctttctgcttttgttttcttttagtagtcaggcccgtcttctgtagcrctgctgtggtttgcttggggtccactccagcccctattcacctgagtctctcccatccctgtagatatcacctgtggaggctgcagaccagcaaaaatggcagcctgctccttcctctgggagctctttcccag

SEQ ID NO: 158724 - DNA, 429 bp, Homo sapiens
  misc_feature (1)...(429): n = A,T,C or G
taaacatgtttgaaaaactttaatttcctaaaaatggattaaaggaaatggcaaaagattaaaattgatatagaaatatataatgttgtttaataaatattcacttcaattttactgattcatatcatctgngggataaaaaccagaccataataataactactattcttattgatataaagcatatttcaaagaacagtggtaacacgaataccttaaaattatttcaaatgattcagaatgataccatatgctttttggctatgatgtgacttctaacttttcttcttaattatgtcagctgttataatgaattcaatgacacctttttccagcctagattttgcaacaatatatgttttgcaacatatctataaaagagccttawgtatctttatctttattgggaatatactcccaataaacggg

SEQ ID NO: 158725 - DNA, 469 bp, Homo sapiens
attctaatggattaaagagtgcaataaaaatggcactttaaaggagaaaaaaatgtggatattgatgtaatctttagtattagagaaagagattttagaggcatagcactaacarcaaaaaaaaaaaaaaaaggaaaaaaaatagatctgtagataagaacagctttatacttcttaatttaaagcaccataactaggctgagcatggtgctcatgcctgtaatcccaacactttggtaggtgaggtcaacggatctcatgagcccaggaatttgagaccagcctgggcaacatggtgaaaccctatctctgaaataaaaaaataaaataaaataaaaataaaaataaagcactataaataaataaaaatataaattacaatgtgaggaagtacttgcaacatatatgacaggcaagaggtttattctttcaatatttaaaattcttttacaaatcaataagataagat

SEQ ID NO: 158726 - DNA, 469 bp, Homo sapiens
attctaatggattaaagagtgcaataaaaatggcactttaaaggagaaaaaaatgtggatattgatgtaatctttagtattagagaaagagattttagaggcatagcactaacaacaaaaaaaaaaaaaaaaggaaaaaaaatagatctgtagataagaacagctttatacttcttaatttaaagcaccataactaggctgagcatggtgctcatgcctgtaatcccaacactttggtaggtgaggtcaacggatctcatgagcccaggaatttgagaccagcctgggcaacatggtgaaaccctatctctgaaataaaaaaataaaataaaataaaaataaaaataaagmactataaataaataaaaatataaattacaatgtgaggaagtacttgcaacatatatgacaggcaagaggtttattctttcaatatttaaaattcttttacaaatcaataagataagat

SEQ ID NO: 158727 - DNA, 497 bp, Homo sapiens
cattttgacccatatgagtaatttgtctaattccacattacattagattaaaaatgtcaaatgtgtttttatcaatagaatattgtcttttactccctcattcagaatgaataaattcactataaaaagatatgtgcttaacaagtaggtgcacctctctgttcataatttaattcttataacccctctaagaaggaaagattattatccccatgtgttgatgagacatcaactcttaaagaaacactcaatgactcacaagctaagtttagtgtgtgaatctgaggttacctcacttatccaacaatcatttaattaaggtcattctataattattgtacacctttgttaataataggagragaaaaagtatacattgtaaaatggcaaattttatgatatgtgaattatatctccataaagttgatatttgaaaagtatattgaggggagatgggaaaagtgaattagaaatgaaagacatttagaagtgaatca

SEQ ID NO: 158728 - DNA, 434 bp, Homo sapiens
acaaagtaaagtttctaagtcaaggttaaaaacactaagattatcacacctgtaattccagtactttgggaggccgagatgggtggctcacttgaggtcaagagttcaagaccagcctgaccaacaagacaaaaccccgtctcgactaaaaacacaaaaattagccgggcatggtggcaagcacctgtagtcccagctactcaggaggctgaggcatgagaattgcttgaacccaggaggcagaatgagctgagatcacaccactgcactccagcmtggggacggagcgagactttgtctccaaaaaccaagcaaaacaaaaacaaaaagaaagatgctaagattagaatcaggagggcaaaggaaagtttgtagtccttggagaggtagctaattataagtctgaggtgtgtaaagtacaagatgatattcct

SEQ ID NO: 158729 - DNA, 407 bp, Homo sapiens
tggaggctgcagtgagccatatttggaccattgcattccagcctgggcaacaaggagagaccytgtctcaaaaaaaaaaaaaaaaaaaaagaaagaaagaaagaaagaaagaaagaaagaaaaaacatggggatttttggtttacaagattccccaaacaaagtatttactaatattcctgtccccttgttcgtagtagtgagacccccttcagagaaggggctcttgtcctgccctccctgttcttagctaattggaaaaatgttcatcatagccaccactactaccagtggagaccatggcattttagtttcctattgctgctgtaacaaattagcacaaacttagtggcttaagacaatataaatctattggctttcagttctggaggtcagaggtccaaaatc

SEQ ID NO: 158730 - DNA, 564 bp, Homo sapiens
taccattccctggtttttatttcaatgttgcataaatcacaaggtattgaactaccttaatactctctatcctctattagggtaatactcagttcattcaccgagttactcattcgatagtaatatctccatcktgtggaagccacagcacaatgaagattcaaggaaaacaaaggctcaaagcacatagtgatgtagtgtaaaaataaacagcaagataaaatactttcaggaatcactgtgtaagaaaatattacatatgacaggtacagataaaatagaactcctatggagagttgttaggagggagataacattttctcactgatgggatgaagaaaagtaaatgaatgactttcaacataggccttgaagaattggtgtgatttgaatgactgcgcagtaggtattagggtaaatgatataaagatatcttatgcacatagaatgcaccacaaatgtataagggcttaaaaattcagactagtaaaggaaattaaggtcagaaaggcaagttgaggctgatttaaagagtattaaaaactaattaaaggaattttaact

SEQ ID NO: 158731 - DNA, 510 bp, Homo sapiens
ggcaagttgaggctgatttaaagagtattaaaaactaattaaaggaattttaactttattctgtaagcaatctaaattcattgaagatttatgagcaggaggatatggtttggctgggtccccacccaaatctcaccttgaattgtgataatccccacatgtcaaagrcagggccatgtggagataattgaatcatactgtttcccccatactgttctcgtggtagtgaataagtttcacaagatctgatggttctataaatgggaattccctgcacaaactctcttgcctgccgctgtgtaagatactttccttatacttccaacagtcttgactttgctccaccatcaccttctgccatgattgtgaggcctccccagccacgtggaactgtgtcaattaagcctctttcctctataaattaaccagtctcaggtatgtctttattagcagtatgcgaacagactaatacacaggacattaaggtaattagaactttttaaaaagaaa

SEQ ID NO: 158732 - DNA, 634 bp, Homo sapiens
ttttgtagtattacttgtagagatcttttacttccatggttagatgtattcctaggtattttattatttttgtgtttttttgtawataagattgtatttttaatttggttcttagcttgaacattatttatgtatagaaatgctattgagttttgtacattggtttggtatcctgaaactttactcaaatcgtttatcaggtctaggagacttttggcagaaccttaggtttcctaggtaaataattatgttttcaatgaagagagataatttgacttcctcttttcatatttgagtgcattttacttgtttcttttgcctgattgcttttggctaggatttccatttctatgttgaatagaaatgatgagagtgccatccttgtcttgttccagttcttaggaagaatgatcccaatttttgtccacttggtatgatattggctgagggtttgtcataaatggctctcataattttgaagtatgttccgtcaatgcttagtttttgtggatttttattatgaatggatgctggattttatcaaattcttttcctgcatttattgagataattatatggtttttgtttttaattctgttaatgtggggaaaatgcattcctttttttttttttt

SEQ ID NO: 158733 - DNA, 534 bp, Homo sapiens
atggccacagggagatgaccttctccctggggtaaggggaaggaagagtgggaaggactttctattgtgatttgagtgtcagtttagccacagtagaatagaacatcaggtaaattggtaaggtttgtgaattcaatccatgtctctcaaacagcatatctggacacgtgcaggacctgggggatctcaccaccctgaaggtaaaggccttgggcatggctcagtgctatactggcttcaggtctgacctagttcagttgcagttgtagtggctacaggagtgcttacatcaccacaacccacttctcaggtggctcaccactgagtgagagagagagaccacatgtttgggagaaagtaagggataagaaaaagcatctctgcatggtaatccagagaattcttccagatcttattcaagaccaccaaggcagtacctctaggagtctgccagataacattattgatgctggggmtgaagtccttttaaatctttgaaagtcttcctacaaagaaaagacataaataagctca

SEQ ID NO: 158734 - DNA, 523 bp, Homo sapiens
ggtagttctctttttaggtttttgaggaaattccataytattttcaaaaatgcttgtactagttaacatccccaacagtgtacaaggactccatttacttcaggtactcaccaacacttgttatattttgtcttttttgtaatagtcattcaaaagagcttgataaaatatatcatagtgatttgtatttgcatttatttgatgattagagatgttgagcattttttaacatatcttttgaccattcatatgtcttctcttgagatacgtctggccaggttctttgctaattttataatcaggatatttgttttcttgctgttgaattatttagttctttatatattttagatttttgtcctttatcagagatatatggtttgctattatgttctcttaatctgtgggttgtctgttcactttgttcattgtttactttgaagaagctttttagtttcatgcaatcaattcttaaaatttatggaggcttttttttgttctttcctgtagaatgtttcatatt

SEQ ID NO: 158735 - DNA, 657 bp, Homo sapiens
acttgtaagtgggaacatatcatatttggttttctgttcctgcatttattctgttaggataatggcctccaggtgcatccatgttgctgcaaaaagcatgaatgatttcattctttttttctgactgtgtatcccattggctgagccagcacagagcttatgcctgtaaataaggatcaaatttatacctggctatattgcctgctcccagctattacctataagtatcatcttctggcttgtaggtcacactgcacagtccagtataaaacatgccagaagaattgccaaaacactctacctggcattccctacagtcacactctctggggaagggaaaaagggaaagaaagaaagaaagcaataatattatagagaaagaaagaacaaaaaaaattactttcatgaaaataattacaaaamaatacaagtatcagtgtctctacaagagagggaaccagcacaaaaattctggcaccatgaaaaatctaactgtactgacactaccaaaggatcacactagatatccagcaatgacctctagccaaaatggaaactcagaaatgacaaataatttaaagcatggacagcaaggaagctcagcaagatccaagacaatgttgaaaatcaacacaaggaaacttctaaagtaaccca

SEQ ID NO: 158736 - DNA, 657 bp, Homo sapiens
acttgtaagtgggaacatatcatatttggttttctgttcctgcatttattctgttaggataatggcctccaggtgcatccatgttgctgcaaaaagcatgaatgatttcattctttttttctgactgtgtatcccattggctgagccagcacagagcttatgcctgtaaataaggatcaaatttatacctggctatattgcctgctcccagctattacctataagtatcatcttctggcttgtaggtcacactgcacagtccagtataaaacatgccagaagaattgccaaaacactctacctggcattccctacagtcacactctctggggaagggaaaaagggaaagaaagaaagaaagcaataatattatagagaaagaaagaacaaaaaaaattactttcatgaaaataattacaaaacaatacaagtatcagtgtctctacaagagagggaaccagcacaaaaattctggcaccatgaaaaatctaactgtaytgacactaccaaaggatcacactagatatccagcaatgacctctagccaaaatggaaactcagaaatgacaaataatttaaagcatggacagcaaggaagctcagcaagatccaagacaatgttgaaaatcaacacaaggaaacttctaaagtaaccca

SEQ ID NO: 158737 - DNA, 285 bp, Homo sapiens
tacccaattctctatcagagccatgtcttttcattaatttataaaacttctcttcacaamgagagttgatttgttataatttagcaacacagaatacacatttttcatctttgaagtaagactacataaaataaggcctcatatatgtcttctcttatcttgatttttattaaattaggctaaaatattataattttttatttgtcttttactttctatattttccaaaaggattttttttaattaacaaattaacttcaggaaaaatttttaaataaagtgttc

SEQ ID NO: 158738 - DNA, 452 bp, Homo sapiens
ggccctgaaaaacaatagagaaagataatacaagaaaatgttgtacaaaatctwtaaagtagagctgctataagaaggcagctgactacatgatttctcaagaaaaaaacagaatgaataaattgatgttacatttaaggatctagcattcaatgctttattgcagttaatgatctgaaatagtggagtagaatactaactgaaagaattttgctgaaataaaaagaaaatctagaaaaagaagacaaacatgaaggaaatcttaggaatctaataggaaaatatgggaaacctaacaagtgtataagtgatgtaaataaaaataatatgtgaaaaatgaattaatcgaaaaaatatttttggcccggcacagtcgtcacgcctgtcatctcagcactttgagaggctgaggcggggggatcatgaggtcaagagatcgtgaccatcctggc

SEQ ID NO: 158739 - DNA, 452 bp, Homo sapiens
ggccctgaaaaacaatagagaaagataatacaagaaaatgttgtacaaaatctataaagtagagctgctataagaaggcagctgactacatgatttctcaagaaaaaaacagaatgaataaattgatgttacatttaaggatctagcattcaatgctttattgcagttaatgatctgaaatagtggagtagaatactaactgaaagaattttgctgaaataaaaagaaaatctagaaaaagaagacaaacatgaaggaaatcttaggaatctaataggaaaatatgggaaacctaacaagtgtataagtgatgtaaataaaaataatatrtgaaaaatgaattaatcgaaaaaatatttttggcccggcacagtcgtcacgcctgtcatctcagcactttgagaggctgaggcggggggatcatgaggtcaagagatcgtgaccatcctggc

SEQ ID NO: 158740 - DNA, 452 bp, Homo sapiens
ggccctgaaaaacaatagagaaagataatacaagaaaatgttgtacaaaatctataaagtagagctgctataagaaggcagctgactacatgatttctcaagaaaaaaacagaatgaataaattgatgttacatttaaggatctagcattcaatgctttattgcagttaatgatctgaaatagtggagtagaatactaactgaaagaattttgctgaaataaaaagaaaatctagaaaaagaagacaaacatgaaggaaatcttaggaatctaataggaaaatatgggaaacctaacaagtgtataagtgatgtaaataaaaataatatgtgaaaaatgaattaatcgaaaaaatatttttggcccggcacagtcgtcacgcctgtcatctcagcactttgagaggctgaggcgggkggatcatgaggtcaagagatcgtgaccatcctggc

SEQ ID NO: 158741 - DNA, 532 bp, Homo sapiens
ggagagcatggacacatttgttgtccatagggaactaacaataacttccagtgacatcarttcaagaaaaaaaaatagcagcagggagtgagaatgtcatctgtcaaccccgaaaatgattttggttaaaataatgacaacaacaacaaaactaaatatcaaatagcgtcaaaaatgatatcacatattccatttcttcatcagaaataaaaagaaaatatttttcttacctgagcaatttattgatgagagggcagagtaagttaaaaaattgttgctatacatttttcattaagtttttagataagacaaatgcacaaacaattgttgaatatctagcatcaaaagaagaaaacagagaacagaagtataacattttattttcttaatttcctattttaaaagatttcagttacctttatagtattaaaatgagaatatattaaatgccattgaatggtgcatttttaaatggttaatgtaatggttaatattaggtatcaatttgattggattggaggatgcctagata

SEQ ID NO: 158742 - DNA, 532 bp, Homo sapiens
ggagagcatggacacatttgttgtccatagggaactaacaataacttccagtgacatcagttcaagaaaaaaaaatagcagcagggagtgagaatgtcatctgtcaaccccgaaaatgattttggttaaaataatgacaacaacaacaaaactaaatatcaaatagcrtcaaaaatgatatcacatattccatttcttcatcagaaataaaaagaaaatatttttcttacctgagcaatttattgatgagagggcagagtaagttaaaaaattgttgctatacatttttcattaagtttttagataagacaaatgcacaaacaattgttgaatatctagcatcaaaagaagaaaacagagaacagaagtataacattttattttcttaatttcctattttaaaagatttcagttacctttatagtattaaaatgagaatatattaaatgccattgaatggtgcatttttaaatggttaatgtaatggttaatattaggtatcaatttgattggattggaggatgcctagata

SEQ ID NO: 158743 - DNA, 532 bp, Homo sapiens
ggagagcatggacacatttgttgtccatagggaactaacaataacttccagtgacatcagttcaagaaaaaaaaatagcagcagggagtgagaatgtcatctgtcaaccccgaaaatgattttggttaaaataatgacaacaacaacaaaactaaatatcaaatagcgtcaaaaatgatatcacatattccatttcttcatcagaaataaaaagaaaatatttttcttacctgagcaatttattgatgagagggcagagtaagttaaaaaattgttgctatacatttttcattaagtttttagataagacaaatgcacaaacaattgttgaatatctagcatcaaaagaagaaaacagagaacagaagtataacattttattttcttwatttcctattttaaaagatttcagttacctttatagtattaaaatgagaatatattaaatgccattgaatggtgcatttttaaatggttaatgtaatggttaatattaggtatcaatttgattggattggaggatgcctagata

SEQ ID NO: 158744 - DNA, 218 bp, Homo sapiens
ccttaaaaatctacttcatgattctacaaccattgttattattgtgattgttatttaacctgcaaaacagggatagtccatcttgcatcactactgtaagcagcgagtgagattattcacttaaaaacactgtgtaaagtggttgcataatagaygctcaattgattctggtaagtattacatttattatcatggatctgtttgctggtgggtttttt

SEQ ID NO: 158745 - DNA, 618 bp, Homo sapiens
atttaggcatatagctaaccaaaaacatgaaagatctctacaaggaaaactacaaaacaaaatcagagataatacaaataaatggaaaaacattccatgctcatggactggaagaatcaatattgtaaaaatggccaaactgcccaaagcaattgatgaatttgacattattcctatcaaattactgacgtccttcttcacagaatcatgtcttcatgtgctatttttagctgtgacagttactttgatttttcttgtttatgattacctttggagttttggtaaatacaagttargtactatgtagagggtatttctattaaaatttgtttgatgactttcttatggttaaacttgtttgtgttcttggaaggaagaccaaagatgtaaagaataacgtggttttttttggtaagtcacccatatcattggctaattaatgttattataattctctagtctatctattatgtgttcaactccatagtgtttctatgcacctttggacttaaatccaggtatattattactcaagtgtgtgagattagcttgatcttcttgaagtatagataaatgcctacagactagtttgatacagtctttaggcttttgtgatat

SEQ ID NO: 158746 - DNA, 618 bp, Homo sapiens
atttaggcatatagctaaccaaaaacatgaaagatctctacaaggaaaactacaaaacaaaatcagagataatacaaataaatggaaaaacattccatgctcatggactggaagaatcaatattgtaaaaatggccaaactgcccaaagcaattgatgaatttgacattattcctatcaaattactgacgtccttcttcacagaatcatgtcttcatgtgctatttttagctgtgacagttactttgatttttcttgtttatgattacctttggagttttggtaaatacaagttaggtactatgtagagggtatttctattaaaatttgtttgatgactttcttatggttaaacttgtttgtgttcttggaargaagaccaaagatgtaaagaataacgtggttttttttggtaagtcacccatatcattggctaattaatgttattataattctctagtctatctattatgtgttcaactccatagtgtttctatgcacctttggacttaaatccaggtatattattactcaagtgtgtgagattagcttgatcttcttgaagtatagataaatgcctacagactagtttgatacagtctttaggcttttgtgatat

SEQ ID NO: 158747 - DNA, 582 bp, Homo sapiens
aggacttgtctatcaaatatattatgtgcatataagccagctcctctggatgtgttaactggatatgtgaaacataagagcctttataatatgtaataaaatttagttgaaatatacttaacattatattccatttgccacatgaattaataatatgtaaggtagaaaatcaagtttaaaaaatttggttgaagttgttctttttttttttgagatggagtctcactctgtcgcccaggctggagggcagtggcgctatctcagctcactgcaacctccagctcctgggttcaaatgattctcctgcctcagcctcccgagtagctggggctacaggcatgaataaactgtaacacactctatcaaggccctgtatatatattttatatgacagtaatcacaatagctggattatcactttcgagacatccaaagtatatagtctttcatgagaaagagaggttttaagaatgagtgcataaactgcctactgttgacattagtgctgcattgaaacacttgaccrtggttcaaatgtagctaagaacagtacttctcaaagtcacctgaaaatgttgctaa

SEQ ID NO: 158748 - DNA, 546 bp, Homo sapiens
gttctgtagggattttgcaaacagttttcaagaataattcactttatgaagctcaatctatgttatttctaagttatttcctgataataataaagaattaagtagacaaaaagttagatacaaataatatagaaaataacactaataatttagatttttttgaagttttattttcccactttttttgttgttgaaatagtataaattcattttttaacctttgtttaaaggaagattttaattttttttgagtgaggatgacgtcttttcatattgtgatttctaaatttgtttttacataatttatgcaatcaaaatatattattcctakagaattaaataacagacaggtgtttatttggcatttcaaaagtaaaacattgtgagcaattattaagctattgttttggtttaagatgttatgtagaataataaaaaagaaaaataaatattatttggcaatatatgcataccatgtttatatttcatgcataatgagactaacttctgaatatttaaatcacaatgataatcaaataatgctca

SEQ ID NO: 158749 - DNA, 436 bp, Homo sapiens
ttatgtcaattctcactagagctatacaacactttggatataaaattctatacaaaaaaatttaatgtttccaataaaatctatattctagaataaataatattttatgttratataactgtaaatcagctttagcatgagatttgaacaatatttttatgagttacatgtatttgaaaaggttgacctttatccaaactatttttcttcaataccaatgaataattattaaaacataattataaattttttaaaattaagtccaattaattcagaatactaggtgataaaatgaccaatatttgcaagaaatttgaacccaatttatattgtatttttaacactattctaaaatagaataaacattttttgatactctttacaccctgaccattctgaggaaatataaaacctttgattccattttgacaattta

SEQ ID NO: 158750 - DNA, 436 bp, Homo sapiens
ttatgtcaattctcactagagctatacaacactttggatataaaattctatacaaaaaaatttaatgtttccaataaaatctatattctagaataaataatattttatgttgwtataactgtaaatcagctttagcatgagatttgaacaatatttttatgagttacatgtatttgaaaaggttgacctttatccaaactatttttcttcaataccaatgaataattattaaaacataattataaattttttaaaattaagtccaattaattcagaatactaggtgataaaatgaccaatatttgcaagaaatttgaacccaatttatattgtatttttaacactattctaaaatagaataaacattttttgatactctttacaccctgaccattctgaggaaatataaaacctttgattccattttgacaattta

SEQ ID NO: 158751 - DNA, 436 bp, Homo sapiens
ttatgtcaattctcactagagctatacaacactttggatataaaattctatacaaaaaaatttaatgtttccaataaaatctatattctagaataaataatattttatgttgatataactgtaaatcagctttagcatgagatttgaacaatatttttatgagttacatgtatttgaaaaggttgacctttatccaaactatttttcttcaataccratgaataattattaaaacataattataaattttttaaaattaagtccaattaattcagaatactaggtgataaaatgaccaatatttgcaagaaatttgaacccaatttatattgtatttttaacactattctaaaatagaataaacattttttgatactctttacaccctgaccattctgaggaaatataaaacctttgattccattttgacaattta

SEQ ID NO: 158752 - DNA, 575 bp, Homo sapiens
ttgtgaattaaatctctagtaagagaagacgagcttaaggcaaaaagtacaagaaataaaatataaaggaatctgaaaatgatggatgttttaaaatgtgccaaagtaatartgacataaaataatacctataaatgctaagtagtttgaatattttgactgttaaagctgtcaaattatggggtttaatgctagtgtggagaatacttttttctgaatattaaaatatcttacttacaaacggttgaaatgcattttatatcccaagaagtttagaaacttagcattaataatacttttttacaatgacttatggaaatataaatttataagacacattattccttaaaggaataagtagctgtattccattattgaataaatggagatctaacccattcatatttgattcttgtgagatcaaagtacataccgaattttaaaatatttattccatatattccaaaatatttacaaataagaacctctgctatatgccaaacaatatgtgaaatgctgaatatacaatggagaatagttgaggcagatattccaaatactgtggatctatatta

SEQ ID NO: 158753 - DNA, 575 bp, Homo sapiens
ttgtgaattaaatctctagtaagagaagacgagcttaaggcaaaaagtacaagaaataaaatataaaggaatctgaaaatgatggatgttttaaaatgtgccaaagtaatagtgacataaaataatacctataaatgctaagtagtttgaatattttgactgttaaagctgtcaaattatggggtttaatgctagtgtggagaatacttttttctgaatattaaaatatcttacttacaaacggttgaaatgcattttatatcccaagaagtttagaaacttagcattaataatacttttttacaatgacttatggaaatataaatttataagacacattattccttaaaggaataagtagctgtattccattattgaataaatggagatctaacccattcayatttgattcttgtgagatcaaagtacataccgaattttaaaatatttattccatatattccaaaatatttacaaataagaacctctgctatatgccaaacaatatgtgaaatgctgaatatacaatggagaatagttgaggcagatattccaaatactgtggatctatatta

SEQ ID NO: 158754 - DNA, 433 bp, Homo sapiens
ccagacattacatcggctggagccttgaacttggactccccagcctccagaactgtgagaaacaaatgtttgctgtttaaggcagctagtctatagtatttggcatggctgcttatattgactaagacagaagtggagagccatattaaaggtatagtggcatacagtgacattataaaaactgcttttcagaagcttactgcagccacagttcagagaataactagaagagaaacagaactcgagaatttccactgtgacaaatgaatattccaatgtgcacatatgtccaactcttatattacaaataaactcattttagtaagattatatatatttaaacaaagactagtaagtgcaaaagttgcccaraatttgcatgtgcagtctaattaataaaagtaaattattaagaaacttaagttgctaaaat

SEQ ID NO: 158755 - DNA, 554 bp, Homo sapiens
tgctttgctgagggagggcctctctacttgcagcctgaaatctaaattgtgtgaaagttcttctgctcagarcttttccagactcaaaaagccacatgctctgtatgtgctgatgctattagatgtagagaatgtcaagtggcagcttttacctatctacaactaggagttcagaatgttctaagcaccatccattaagctcgttctgccaaataaaatggtggagagaagctagtatattgcagtgaaaaagtagaatggtgtggtcaaagcagcggccattaacttgtgaactaacacataggcataactcagaacacaaactattagtcttcagactaaaaggctctgttgatgtaatctgttggctgtgtttcgaaaaaagtgcaaatgataagaagataataggttataaacttttaaaagtcttgagacagttattttgtcaacatgaaattgttcaatccctaaagctatttctaagaccccaatttccacgaactcaaaatgggctctaagtctgtgcagcctgacagaagagtatccttcccaac

SEQ ID NO: 158756 - DNA, 392 bp, Homo sapiens
gtcagaatcaaggctttatcagtggattgtctcaattcccaaactatctaggcaagaaaggaggtttagagtcagttgctctaatggtgacatgacatgcaacaatggcacgcatacaacctgaacctaacaatttcaccatttcttttgtttcaggaaaaattttgtccatatttaagctatatatgttttgtaaattgcttcagartaggtaaattgtctattgtgggaacagaatttggtgttgtcttttgcaatattggggaaaatctcaagctgacatggaaggcaacagcacttttatgtttaaccaaaatataaacataactctgtactgaaaaacataaatgttttccctgatactaaatatagagtagacatataaagaattc

SEQ ID NO: 158757 - DNA, 596 bp, Homo sapiens
acataatcattgtaaatataaatgtacccaacattggagtacctaaatatataaagtaatgttaaatgaactgtagagagaaataaactgcaatacaataatagttggggatctcaataccccactcccaacaatgaatatatcacccagacagaaaatcaacaaggaaacattgggcataaattacattttgtatcaaatagacccaacatacatattcagaatattccattcaaaattaacagattatacatttttttctcaagcagataaggaacattctccaagatagattgtaggttcagtcacaaagcaagtcttaaaaagtttgcagggtttgaaatcatatcaagtatctattctgatyacagatacatgaaactagaaattaacaataggaagaaatttggagaataaacgtgtggaaattaaacaagttatgctttaacaacccgtggatcacaggataaataaaaaaattaaaaaatgccttgagtcaaataaaaatagaaatacaagcttattcaatgcagcaaaagcaatcccaagagagaaatttatagcaacaaatgcctgtttcgaaaaagaagatctca

SEQ ID NO: 158758 - DNA, 635 bp, Homo sapiens
gagtatcacctgcgcctggggaggtcaaggctgcagtgagttgtgattgcaccactgcactccagcctgagtgacagagtggcacccatctcaaaaaaaattatactgaagaataaaaaaaaaggagcctgaatagccaaagcaatgttaagcaaaaagaacaaagccagagacatcacattgctcaacttgaaattatactataaggctatagtattgaaaatagcataatagtggtacaaaaacagacacacagaccagtggaacagtatagagaaggcagatgtaaacatgcacaactacaaccatctgatcattaacaaaatcaacaaaaataagcaayagggaaaagactctctattcaataaatggtgttgggataactggctagctgtatgtggaagaatgaaactggacccctacctcttaccatatatgaaaatgaactccagatggattacagagttaaatgtaagccctcaaattataaaaattttagagtaaatcctaggaaatacccttttcaacatatgatttggcaaagaatttatggtgaagtccccaaaagcaatggcaaaaaaaccctaaaattaacaagtgggacctaattaaaataaaaagcatctactcagcaa

SEQ ID NO: 158759 - DNA, 586 bp, Homo sapiens
atgtatgtataagttaaggccaagagcaaccattaggaaatccatacaaataaatcaaaataaaccttaagaaatgttcaggtaacccacagaaaataaaaaagaaccagataaatgaaaaacagagagagcaaaaagaaaacaaaaataaataaacaaaatacccaaattaagccatagcacatcaataactacwttaaatataaatggtctaaatgcatcaactaaaagatagagattggcacagtggatttacaaaaagcatgacccctctgtattccttgtataagaaactcacttcaaatatatgaaaatagtcatattgaaagtaaaaggaggaaaaaaatatataccatgcaataattaaacaaataaaaacaagggtggctatattaatgtcagacaaagtagatctaagagcaaggagtgagatattaaataataataaataattcaacacattaaaatgttatacaaattctaacatctatacatcaaaaaacagtggtaaaaagtgaggcaaaagctgataaaactgaaaggagaagaagactgacataaaattataattagagacttcaacagc

SEQ ID NO: 158760 - DNA, 540 bp, Homo sapiens
gtcctctctctaacatagatttgactgttccctactcactaatttargaattatttctgataaataaaaaaagagaagaaaacaactgaattttttaagaaaaacaaattaaagcaattagtaggttttaatcagtgcagctggactctttgtgcagttgttcatttggcaggagtgcaggtgatccattaagaaattatttactgcacatttaaacatgaggactactgtaataagaactacccagaaaatgcacaattggaaaaggcttgattaaaaatctgctaagaagagacgagatagacccaagaatttactgaagtataactcacaatataaacctcaagaactattaatataaaatatgaattataaatatggcatggatatatctgggtgagtcatggttacaagagtagagcataaaaatagaatagggggccgggcgtggtggctcatgcctgtaatcccagcactttggaagaccgaggcgggtggatcacaaggttaggagatctagaccatcctggctaacagtcc

SEQ ID NO: 158761 - DNA, 575 bp, Homo sapiens
aattgtttccccccaagtaataatttaacacagatatgaaaattattttatatgacctattactaatgcactagtatctacctttctttccaatgactaatttttctccaaaatatgtgatttatgtttccttaatttcattaaagatcagtgttttctcctctaggatggtaataygtaggtacttcgtactcagatgttaagcaactgaactgagaaagtcccaaaataaatgtctgtgcaaatgagccatatgcccctgggttaaaggacaatgacacagtcttaaccagtcatgcgctttctagctcataccctgataaatgaaagggcaaggagagttgtgtttaatagtatattcttcaatgaaatgtcactttttcctcaatgtgtcctctgggtgagctcattaaaatcatgtttgctgcaatgtcagcacaccaagttgctgactttcttgttgccttaccacatggtacaaaaatgaattctgccataggataagcttaggtcttaaaggctccatatcatggagtataatgtatattcttgttttgcaatccatagttctaaca

SEQ ID NO: 158762 - DNA, 649 bp, Homo sapiens
aaccaattggaaactaaatattggtctacacctcttaatttgttctataaaataaagaggaatttgtcagcagtcataaatatctcatgtagagagatyttgagatttagagagcatttttggtagaatactccttccctggattggcataaatgtaagtaaagttattattaaaattctgtcttaaacattagctactatatctgactcaactgcaaaggctttagttgcccagcaaccttttaaaaatcctcttgctaagattgttttagataacggcattgctttggactacctgttggctgaactggggcagggtgggtggggaggctggcagaagatggggagtgatggctaagatctcttgctgcacttggatacatgtgtctggtatgacagcagctccattttaagaaatcaacaaacaagctacttggttaaaacaagtagattcatcttctgacttattttaaaaatttgtctgattttaatttgttcagttcaggagagttcctattaggagtgcactttattcagtcttttgccattattctctgatagttttcatagtagttttcctggtgcactgtattttctcaagagtcttaatgcttgtatgcagctatccacactgcatcatatggtccca

SEQ ID NO: 158763 - DNA, 647 bp, Homo sapiens
ttattttcattgttatttaaaatataaattcattggtggatgtaacatctgctgcatgtgttactctaggtttcttaaattctcaataagtgactttgaataatatttgctgttaaaatcaacactatatatctcagaaaccatattatctgacttgtatacaatatcaatactttcattttgctattcaatagatttcttttagagccgcttgtaattttttctttaaaaatatataaatgtgaaatgctaacttttgccacaaggtggctcttcatagactctaactgtatcatctaagcagctctttttaaaaatttccataaagactatattatctcctaaacgttcttttaaagtgaatattattgatataaaacaagttttgggaatagaggaaaaatctaagataaatagttagattctttcaatgatttctggtgtgtccacacacacacacacacacacacacacacacacasagagagagagagagagagagagagagagagagagagagagactgccattataatgtatttatttagaagatatccaggctcttgagttactgtagcagaatgtggtacctcctaaggaaggcagttcctcaacaaaaggcaccctgaacaggtactttcatcact

SEQ ID NO: 158764 - DNA, 570 bp, Homo sapiens
acacatttaactctggcaattgaaatataaatgtcttattgcatgttttacatgcatgtcttcccatttttttctgtaaattatttaaaaatagttttatttaattatttctgttctctacatctcagaactcgtgcaaaggtgccaccagaaaagtgagaatggcaaatgtaggaaggagctaggacttagccaccaaaggtgagatagagtgtacaggaaataatggagtagtaactggagtggtattcacygactcataaaccagatctttggacataattatttaatcaataatccacttaataaggccagcacttagcccatagtttaacaccttttccaaaaaacatattgtgagaaaacttgtcatgtgccaaaatccatatagagatgctccttgacctctgatggaatggcatctcaataaactcataataaaccgaagataccattaagtcaaaagtgcatttaatacacctaatctaccgaacattgttttgcctaacctatctttaacatgctcagaaaactttcattagcctacagttgggcaaaagttatctaaca

SEQ ID NO: 158765 - DNA, 721 bp, Homo sapiens
gttttagtaatactgagtcatattctgatcaattatttttaacctgcatactttgctcttcatggctagattctagttgcatgaagacaagaacggatttatgtattatccagcatgaaatatgtcaggagccctagtaggaaaacactatgtccattatcacttaaagctcagtcactgcttgcctgtacaggcttgtagggggtgggggtcgggggggtaaaatacattattacccttcaggctttcggctattctgttgcctcttattctatctctgaattacccatgtcagtgaatcatctcataaaacattgctgaaaacttaccagaattccatctctaaaaatctgtcatatttaatagcatgccattcatttatttcagtaatggagatttatatcctgtctgtattcaaggtacaatattagaaatcagttgatacaaacagattctcacagtaatattcaatgtttcaaaaytctactctttctaaaagaaacatcctaaatgttaggggacagagttaatgaaaaaaataataagaaatcacattatgcaaagatggcttttactcaaagtcctcaagagtctttccatatttcatatgaattgcagtttaaacagataaatagacaggttctgccttaacttgaaaacctataattttctcttgtttagagaagttaacttaagcaaaaacattttccatcaccatttt

SEQ ID NO: 158766 - DNA, 539 bp, Homo sapiens
gcggtggggtgatcttggttcactatagcctctgcctcccaggctcaaagcagtcctcccacctcagcctccaaagtagctgggactacaggtgcaccgctccaccagctatttttttttttttttttwtttttctgtagagacagggctttatcatcttgcccaggctggtctcaaactcctaggctcaagcaatctatttgccttggcctcccaaagtgctgagattacgggcgtgagccaccacacctggcccatcccacatattttacgtgttatgtttttattatcactcaagacataagttacatttagtcttgaagtgtattttatctgacattaacataacattactccagactctttatgctgctaacatggtgttatgttttttcatctatttatttttgatctatccgttctttatttttaaagtacatgtctacaaaagccagcatatgcactgtagttgggatttgcattttaaaaaatccaatttgacagtttcattctgttaattggcatacgttgtccatgaa

SEQ ID NO: 158767 - DNA, 584 bp, Homo sapiens
agctgatgttggtgtcagcaaaaaccccagggatctttaacagccaaggctgtggctatctgcaccaataacaaaggcttttatagtctttttttcttccattgggaagtcatggctaaaggagtctcttcgcgttgggtctagcttgtggttgtgttcccaggaacactggcaacagtgtctaatgcacaacgtccttggagtggccacagacctgaggcctgaagcacaggtctgaagggacctaaaaggcctgaagagaccaagtttctaggtccagggtggtggtgacaccagtgtttgtgacagacacacctgctgtgacactggtaacaatgtgtgaagcacaagtgcttgtggagcatctgggaagccagaatcgaaagtgtgagcatgcgctgagttacagtgacttgaagccagggagatgaactagcccatagcagcaatgactctggcatctgaggtatggtgctcacagtccatctccagagccaatatatgcagtgcaggcacatgaggagctayggtggctccagggactagcttcttgtgatgatagctcaattgttagcagcgcagac

SEQ ID NO: 158768 - DNA, 502 bp, Homo sapiens
catgcctatctaattaatccctttaagtatcctgtgtctaaggtagtaaactaaactcacctccagactctttaaagcccaaagttcagaaataataatttttaaatgggactayaaaaacacatgtccccagaattttaataacaaaatttaattgcaacaatcacattggtttaaaaaaattatttaaaaatataggttcctttatatctataactatatatcaacattgtcttcaatgaacggaaaaattaacctttgaactcaaaatatttcttgttttacattcttgaatcaacctattcattggcgcaggtcttatttataggattagactattttatccaacaatccctgtggtcaaagtataacataataacttcccatttttaaattccaggcaaaactgcactgtttatcctattttagatagcctattatcttatggtacaaggcacagagttaaaaataaacttgctatcaacaatttgactgaggtatt

SEQ ID NO: 158769 - DNA, 502 bp, Homo sapiens
catgcctatctaattaatccctttaagtatcctgtgtctaaggtagtaaactaaactcacctccagactctttaaagcccaaagttcagaaataataatttttaaatgggactataaaaacacatgtccccagaattttaataacaaaatttaaytgcaacaatcacattggtttaaaaaaattatttaaaaatataggttcctttatatctataactatatatcaacattgtcttcaatgaacggaaaaattaacctttgaactcaaaatatttcttgttttacattcttgaatcaacctattcattggcgcaggtcttatttataggattagactattttatccaacaatccctgtggtcaaagtataacataataacttcccatttttaaattccaggcaaaactgcactgtttatcctattttagatagcctattatcttatggtacaaggcacagagttaaaaataaacttgctatcaacaatttgactgaggtatt

SEQ ID NO: 158770 - DNA, 580 bp, Homo sapiens
gtaagaagacaactgaaaaatttagaagaaatgttggaattaaaaaatcaccacctgataactattggaatgattattggtggtacaaaatgtcagtgaatgaatatactgtgagtagaagtttcatacaaattgaatactggatagtctcaaaataatttccacaaagcactttttaattacaaagaggcaattactttacagtggagaaacttggcttacttcaccaaatcaagtgatcaaaattagcacatcactaatgtgagaaatcaaaattgtatatcacttgaaaggatgacatgatattcttgacaaaaaatgcataatctgaatataattatgataaagcatcagataaaacaaaacatgtgagtatcttggaaaatcacaacattataaaaatcaaggaaagtcttagaatttttcgacttgaacaagacaagcaagacatgacccataaatgtaacatatgatcctttattgaattatttgacctcrggtcaaatcaacatgtatgaccatccaatgaatgctttataacaaatgatttttgttctaacttatttttacgtcaaagtcc

SEQ ID NO: 158771 - DNA, 605 bp, Homo sapiens
agtgagaacttaggaattcgatctgggctctatggagtgataaaattatgcaaaaaaaaatgaagtatgtcatttttgcacaaagctcaggatttctcaaaggaatattacataaaataatgaagtctcctttatctccaagacagtccagtcttagaacgcaatggaacatgccatttgaaataaaaaacaaattttstttttgttttgtttagttatgtttggtgctattttaagtatttaacattcataaagagagaattagcaattaatgagataaagttttaaaaaaatctagagatcaggacaaggtaaaaaaaaatcattcagtcttgcaaatctgttatttaataggtcatgttttaagaactgggaatacagatactgtgtgtattttaaatagaaaatttgaaatgtacaataagtcatttttaaatatagtcactctgctataaagtcaatctctaaaactcaatctttgtgtctaactgaaactgtaccctgtgaacaacatctccccattccctatcccttgcctccagcattaactagcattctactctctacttttaagggtttgccttttttcgattgctaaaaagtcc

SEQ ID NO: 158772 - DNA, 505 bp, Homo sapiens
tggtgtacactgtagtgtagaggagtgtcttagtttgggctgctatacaaaataccatagattgagtggcttacaaataacaaaaaaagtatttcttackgttctaggggttggaagtccaaagtcagagtgccaggatgttctggttttggggagggcccttttgcaggctgcagactgctgggtttttgtataagcacatggggaaagaagtgagagctctcttaggtcccttttataagaacactaagcctattcatgaggcctctactatcacaacctaattacctcctgaaggtcgcacatactaataccattacattgacagttaagatttcaatatacagattttgagggtacactttaaaaattcagtccgtaacattctgccccaggttccccaaattcatgtcttcacatgcaaaatgcagtcattccattccaacaaatccacaagtcttaactcattccagcctcaagtccagtctaaagtccaaggtcttat

SEQ ID NO: 158773 - DNA, 505 bp, Homo sapiens
tggtgtacactgtagtgtagaggagtgtcttagtttgggctgctatacaaaataccatagattgagtggcttacaaataacaaaaaaagtatttcttactgttctaggggttggaagtccaaagtcagagtgccaggatgttctggttttggggagggcccttttgcaggctgcagactgctgggtttttgtataagcacatggggaaagaagtgagagctctcttaggtcccttttataagaacactaagcctattcatgaggcctctactatcacaacctaattacctcctgaaggtcgcacatactaataccattacattgacagttaagatttcaatatacagattttgagggtacactttaaaaattcagtccgtaacattctgccccaggttccccaaattcatgtcttcacatrcaaaatgcagtcattccattccaacaaatccacaagtcttaactcattccagcctcaagtccagtctaaagtccaaggtcttat

SEQ ID NO: 158774 - DNA, 654 bp, Homo sapiens
aaacctttttctttttctacatttgactctacagattcagaaggaaccaagctgctgcttctacatgttgctgagaaatctgctgggttaaatgtccaatttcactgcacacaagttccaccttccgcaaaacacaagagcatgaatacaattcaaaraagtttgtttccacttttcaacatggattgcttttgctccattttccaataacatattcatttccatttgagactccaacagaatgacctttactgtccatattttatcaatattctgttcatgattatttaattattttctgagaagacagcgttttcttctatatttctttccgagccctcacgagaattggcttttaaattttttccacagtaatctagcattttgcataaaacctcatcaatctctgccaatcactgagcccaaaaccattttcactttgttttaggtatttataataacagcactcccacttctcatgatcaatttccatcttcagcagttcaggctgctttaataaagttccataacctgagtggcttttaaataacggaatgcacatctcacagttctggaggctggaagtccaacagcagagagccagcataattgggttctggtgagagagctctcttgggtttcagactgctgcct

SEQ ID NO: 158775 - DNA, 654 bp, Homo sapiens
aaacctttttctttttctacatttgactctacagattcagaaggaaccaagctgctgcttctacatgttgctgagaaatctgctgggttaaatgtccaatttcactgcacacaagttccaccttccgcaaaacacaagagcatgaatacaattcaaaaaagtttgtttccacttttcaacatggattgcttttgctccattttccaataacatwttcatttccatttgagactccaacagaatgacctttactgtccatattttatcaatattctgttcatgattatttaattattttctgagaagacagcgttttcttctatatttctttccgagccctcacgagaattggcttttaaattttttccacagtaatctagcattttgcataaaacctcatcaatctctgccaatcactgagcccaaaaccattttcactttgttttaggtatttataataacagcactcccacttctcatgatcaatttccatcttcagcagttcaggctgctttaataaagttccataacctgagtggcttttaaataacggaatgcacatctcacagttctggaggctggaagtccaacagcagagagccagcataattgggttctggtgagagagctctcttgggtttcagactgctgcct

SEQ ID NO: 158776 - DNA, 654 bp, Homo sapiens
aaacctttttctttttctacatttgactctacagattcagaaggaaccaagctgctgcttctacatgttgctgagaaatctgctgggttaaatgtccaatttcactgcacacaagttccaccttccgcaaaacacaagagcatgaatacaattcaaaaaagtttgtttccacttttcaacatggattgcttttgctccattttccaataacatattcatttccatttgagactccaacagaatgacctttactgtccatattttatcaatattctgttcatgattatttaattattttctgagaagacagcgttttcttctatatttctttccgagccctcacgagaattggcttttaaatttyttccacagtaatctagcattttgcataaaacctcatcaatctctgccaatcactgagcccaaaaccattttcactttgttttaggtatttataataacagcactcccacttctcatgatcaatttccatcttcagcagttcaggctgctttaataaagttccataacctgagtggcttttaaataacggaatgcacatctcacagttctggaggctggaagtccaacagcagagagccagcataattgggttctggtgagagagctctcttgggtttcagactgctgcct

SEQ ID NO: 158777 - DNA, 654 bp, Homo sapiens
aaacctttttctttttctacatttgactctacagattcagaaggaaccaagctgctgcttctacatgttgctgagaaatctgctgggttaaatgtccaatttcactgcacacaagttccaccttccgcaaaacacaagagcatgaatacaattcaaaaaagtttgtttccacttttcaacatggattgcttttgctccattttccaataacatattcatttccatttgagactccaacagaatgacctttactgtccatattttatcaatattctgttcatgattatttaattattttctgagaagacagcgttttcttctatatttctttccgagccctcacgagaattggcttttaaattttttccacagtaatctagcattttgcataaaacctcatcaatctctgccaatcactgagcccaaaaccattttcactttgttttaggtatttataataacagcactcccacttctcatgatcaatttccatcttcagcmgttcaggctgctttaataaagttccataacctgagtggcttttaaataacggaatgcacatctcacagttctggaggctggaagtccaacagcagagagccagcataattgggttctggtgagagagctctcttgggtttcagactgctgcct

SEQ ID NO: 158778 - DNA, 530 bp, Homo sapiens
attaaatcaagattctaatagacaataggttataaaatgctgcatwctgatgaaaaaaaattcaagccaaaaactactagcaaattctgctaataaacattttagataaaatatagttacatttttgttttgagctcatctgaatcaattgtgttagagttctgattactagtttttctcattgctatttcataataaaaaggctatgcaaatgaggttcattaattattaactacagttttaaatcatttacttatttacatctgcaacattcttctacagatttcaataaatttttgagtgtttttataaccagaatggtcttgaggggattcccatagaattatagataatttgataaagcaatataaacatcataaaattattcctattgtcatttaattttgaaatacataacataatacaaattgagcaacatatctagttaatgtcaaaatcatatgtctcaaaagcacactatactttaaattaccatgtaattatatatcaaattactcattaaaaatagc

SEQ ID NO: 158779 - DNA, 530 bp, Homo sapiens
attaaatcaagattctaatagacaataggttataaaatgctgcatactgatgaaaaaaaattcaagccaaaaactactagcaaattctgctaataaacattttagataaaatatagttacatttttgttttgagctcatctgaatcaattgtgttagagttctgattactagtttttctcattgctatttcataataaaaaggctatgcaaatgaggttcattaattattaactacagttttaaatcrtttacttatttacatctgcaacattcttctacagatttcaataaatttttgagtgtttttataaccagaatggtcttgaggggattcccatagaattatagataatttgataaagcaatataaacatcataaaattattcctattgtcatttaattttgaaatacataacataatacaaattgagcaacatatctagttaatgtcaaaatcatatgtctcaaaagcacactatactttaaattaccatgtaattatatatcaaattactcattaaaaatagc

SEQ ID NO: 158780 - DNA, 530 bp, Homo sapiens
attaaatcaagattctaatagacaataggttataaaatgctgcatactgatgaaaaaaaattcaagccaaaaactactagcaaattctgctaataaacattttagataaaatatagttacatttttgttttgagctcatctgaatcaattgtgttagagttctgattactagtttttctcattgctatttcataataaaaaggctatgcaaatgaggttcattaattattaactacagttttaaatcatttacttatttacatctgcaacattcttctacagatttcaataaatttttgagtgtttttataaccagaatggtcttgaggggattcccatagaattatagataatttgataaagcaatataaacatcataaaattattcctattgtcatttaattttgaaatacataacataatacaaattgagcaacatatctagttaatgtcaaaatcatatgtctcaaaagcacactatactttaaattacyatgtaattatatatcaaattactcattaaaaatagc

SEQ ID NO: 158781 - DNA, 565 bp, Homo sapiens
aagtacaacttgattgtaaaactagttttgtaactagataaatatccttattcatttaacttttatttgtatttataaataataattgggccaggagtggtggctcattcctgtaatcccagcactttgggaggctgaggcaggtggatcacttgagctaaagagttcaagaccagcctgggcaacatggcaaacccccctctctaaaaacaaactacataaattagatgagtatggtggtgcacatctgtagtcccagctacttgggaggctgaggcatgagaatcacttgagctcagaggaggtggagtttgcagtgagctatgattacaccacttcactccagccagggctacagagcaagatcctgcttaaaataaataaatgagtaataaaaataataattgtaccagagttaacattcctaatgcttatatattgtaggctttgaaytaaatttgttaagtaaattctcattcctgaaaactctaccctgaggtatgcattattattatccatcacattttatagaagatcaaacttctgtagcaaatgagcttgaatt

SEQ ID NO: 158782 - DNA, 556 bp, Homo sapiens
atcattgccataaatataagcactaaaaccatgaaagccatagaagaaaacatgattaaatccaaatgaccttagatttgtcaatgaattctttagctataagaccaacaaaattaagcaataaaagaaaaaaaacagatagttgtatttcatcaaaattaaaacactttgggcattaaaaaaaaaaaacatgtattgtttttctaggtttcctaagacaaaatgctacagactgggtagcttaaacaatataaattattttcttatagttttggaaacaggaagtccaaggtcaaggtgtctgcaggtttagtttctcctggggcctctctttttggctttcagatggtcactttctcattgtcttcacataggtattcccctatgagtaaatccatggctcttcttcctcttcttataaggacaccattcctatcaaagatcccacaggtataacctcatttaaccttaaattccctaacttcaaatacagtaacaytctgggttagggtttcaacatacacatatagagtaacacatttcacgttatcaagaa

SEQ ID NO: 158783 - DNA, 525 bp, Homo sapiens
agatttcttctaattaaccattttatggaaaatataaatgagaagtatctctattcacatatggctcctgaatcccaaaggaaaaccaagtgctaaaatacaataaatagtttgtgaaaagtaatctgtgcagactcatatttataaattcactaaaaaccatcacaggaacaaaattcatatttcattttaaaaaatcaatacttctcaaaatttagaaaaaagaggaactctttctaatctcagtggaaaaggagctctacacaaccacactcaatcagaaaatacattcaggaagtaaartgacttgtgctcctggaattagatgaaaatggattctggatcaatgttagaattgtgttgtcttcatgcaaaggactcttctataattttgcaaagctagtttctagcatgatttacctggagcttttttgtatattttgctagtgagaggccttatgtttagagagtattgttaccagtttatggtcatttacaaaattaagagaactttttttctggaat

SEQ ID NO: 158784 - DNA, 525 bp, Homo sapiens
agatttcttctaattaaccattttatggaaaatataaatgagaagtatctctattcacatatggctcctgaatcccaaaggaaaaccaagtgctaaaatacaataaatagtttgtgaaaagtaatctgtgcagactcatatttataaattcactaaaaaccatcacaggaacaaaattcatatttcattttaaaaaatcaatacttctcaaaatttagaaaaaagaggaactctttctaatctcagtggaaaaggagctctacacaaccacactcaatcagaaaatacattcaggaagtaaaatgacttgtgmtcctggaattagatgaaaatggattctggatcaatgttagaattgtgttgtcttcatgcaaaggactcttctataattttgcaaagctagtttctagcatgatttacctggagcttttttgtatattttgctagtgagaggccttatgtttagagagtattgttaccagtttatggtcatttacaaaattaagagaactttttttctggaat

SEQ ID NO: 158785 - DNA, 525 bp, Homo sapiens
agatttcttctaattaaccattttatggaaaatataaatgagaagtatctctattcacatatggctcctgaatcccaaaggaaaaccaagtgctaaaatacaataaatagtttgtgaaaagtaatctgtgcagactcatatttataaattcactaaaaaccatcacaggaacaaaattcatatttcattttaaaaaatcaatacttctcaaaatttagaaaaaagaggaactctttctaatctcagtggaaaaggagctctacacaaccacactcaatcagaaaatacattcaggaagtaaaatgacttgtgctcctggaattagatgaaaatggaytctggatcaatgttagaattgtgttgtcttcatgcaaaggactcttctataattttgcaaagctagtttctagcatgatttacctggagcttttttgtatattttgctagtgagaggccttatgtttagagagtattgttaccagtttatggtcatttacaaaattaagagaactttttttctggaat

SEQ ID NO: 158786 - DNA, 525 bp, Homo sapiens
agatttcttctaattaaccattttatggaaaatataaatgagaagtatctctattcacatatggctcctgaatcccaaaggaaaaccaagtgctaaaatacaataaatagtttgtgaaaagtaatctgtgcagactcatatttataaattcactaaaaaccatcacaggaacaaaattcatatttcattttaaaaaatcaatacttctcaaaatttagaaaaaagaggaactctttctaatctcagtggaaaaggagctctacacaaccacactcaatcagaaaatacattcaggaagtaaaatgacttgtgctcctggaattagatgaaaatggattctggatcaatgttagaattgtgttgtcttcatgcaaaggactcttctataatttygcaaagctagtttctagcatgatttacctggagcttttttgtatattttgctagtgagaggccttatgtttagagagtattgttaccagtttatggtcatttacaaaattaagagaactttttttctggaat

SEQ ID NO: 158787 - DNA, 278 bp, Homo sapiens
ctctgttttctttctctctttgtattccatctaccctaggcatcaatcactcaatcatttgtaggatttttctaatagattcaagaaatagcaccaataaaatttcaaaactaagmaattatttttcctaatactatatcctaagttaatatgtaatttgtcttccaaggtgaaaagataacttattcaataaaacatgacaagggtcacctgctttcctatctgtgatatacatgctcctacctcccaccaccctactaattacacaaaccaattac

SEQ ID NO: 158788 - DNA, 278 bp, Homo sapiens
ctctgttttctttctctctttgtattccatctaccctaggcatcaatcactcaatcatttgtaggatttttctaatagattcaagaaatagcaccaataaaatttcaaaactaagcaattatttttcctaatactatatcctaagttaatatgtaatttgtcttccaaggtgaaaagwtaacttattcaataaaacatgacaagggtcacctgctttcctatctgtgatatacatgctcctacctcccaccaccctactaattacacaaaccaattac

SEQ ID NO: 158789 - DNA, 278 bp, Homo sapiens
ctctgttttctttctctctttgtattccatctaccctaggcatcaatcactcaatcatttgtaggatttttctaatagattcaagaaatagcaccaataaaatttcaaaactaagcaattatttttcctaatactatatcctaagttaatatgtaatttgtcttccaaggtgaaaagataacttattcaataaaacatgacaagggtcacctgctttcctayctgtgatatacatgctcctacctcccaccaccctactaattacacaaaccaattac

SEQ ID NO: 158790 - DNA, 612 bp, Homo sapiens
acagatggcctcaacctaactcaaatgctaaagttgctcattacattggtgccgtattaacagcagtaattgtgaaaaaattgtgtgatgctctgtctttattgattttattgcaaaaaagggtgtgttattacatagaaaatcatatacatggcttcccagacagtatagtcccagttatcagggacaaatatrctcaagactagacagaaactattatccttgagccccctaaataccaaaactaatacttagaaagaaactttctaatatatttttaggagcagcatttatcacatctagtatgatcatgcctcttaatatggttgctttaaaattttttaaaaaaatttttagatattatctcattctatcaccgaggctggtctgaagtggtgcaatcatggctcactgaagccacaacctcctagacttaagcgatcctcccacctcagcctcctgagtagctgggactaaaggcacatgccaccatacccagctaattatttaaattttttatagagctggcatcttcctatgttgcccaggctagtcttgaactcctgggaacaagcgatcctctcgtctcggcctcccaaagagctgggatta

SEQ ID NO: 158791 - DNA, 612 bp, Homo sapiens
acagatggcctcaacctaactcaaatgctaaagttgctcattacattggtgccgtattaacagcagtaattgtgaaaaaattgtgtgatgctctgtctttattgattttattgcaaaaaagggtgtgttattacatagaaaatcatatacatggcttcccagacagtatagtcccagttatcagggacaaatatactcaagactagacagaaactattatccttgagccccctaaataccaaaactaatacttagaaagaaactttctaatatatttttaggagcagcatttatcacatctagtatgatcatgcctcttaatatggttgctttaaaatttttwaaaaaaatttttagatattatctcattctatcaccgaggctggtctgaagtggtgcaatcatggctcactgaagccacaacctcctagacttaagcgatcctcccacctcagcctcctgagtagctgggactaaaggcacatgccaccatacccagctaattatttaaattttttatagagctggcatcttcctatgttgcccaggctagtcttgaactcctgggaacaagcgatcctctcgtctcggcctcccaaagagctgggatta

SEQ ID NO: 158792 - DNA, 518 bp, Homo sapiens
tttttcaccttgaaaaagtcccattagcatttcttgaaaggcatatccagtgatgatgaccttcctcagctttatttgtctgggaaagactttttttctccttcatttcagaaggacatctttgtgagttaaagtattctttcttggcaaaataaccacattcttgttccctttcatcacttcaattagataatcccactgttttctggcctgcaaagtttctgctgataaatccactggttgccttatagaggatctcttatatgtgaataactgtttttctcttgctgctttcaatattatttctttgtctttgatttttgatagtttgactgtaatatgtcttggtatagcattctttggattgtacatgattgagacatttaaacctcctctggctaggtatttatatctttttgcagacatgaaatgctttaagtcaatatctccttaaatatacattccrtccattccatctattctctccttctttttaaaattctataatgtaaatggta

SEQ ID NO: 158793 - DNA, 602 bp, Homo sapiens
taagtaactaattgaaataggcttggttttaagagttccagtatataatagtcacaaattgaaacctaattgacagtatctcttggagttccagtaaagtcacaaattagtgaataagcatgccagtgtgcaagggtaatggaaggattgttagcctatctaaatattcaaaattactttaaaacttcagtatgttttctgatttttaagaattcagaagtgttctgtaatggattcagatgtttcatttgtagtataatgaaatgtttacagaaagataactttttcattaatatatttgtagaaaaaaagtacaggcctttttagcgactgacaaatataagttagtaaattagaaaatttatcaaagactgaagamatacaataccaacaaatgtcacagtgctaaatagttaaatgcagtgtgaacacgataaaaatagatactaatttacttctaaccataacatagtgataattaagaatgcagatttgaatcaaattatcttttctgtacttttttactttcttacatattaccagatcttacttacaatggcctaagattcaaaaaattacagatgatctgttagattatgagt

SEQ ID NO: 158794 - DNA, 511 bp, Homo sapiens
aactattcactccagaagtgaagaaataaacatggggtaggtttggggatcaactaagcccactaggcgataggctcaagccaataccccagaaatcatccagtcttcataagcctctctaatgtggtgaatcacaatgacattttgggcatcaagaaactaaggtcagtttagaattaatgtccagtcatccccaaaggtccarttagttcctgttcccagaaacacagtcatctgagtaaatggactgaggtcctattgtggaagaccaggaaaaagatttacagtgaggatgctggttccagagatttgacctcttcattcaatgagctctggggctatgaactggctcaagtccggaactggttaaggagctgtggctctctgttgcagtgactcgagtggtacctctgttagtcagaaaggaaatacttctgctatacaaatcaagaaaggcattagtaagctgctcacctatttcagtcctagagaaaaaataagttataaatac

SEQ ID NO: 158795 - DNA, 514 bp, Homo sapiens
cattagaggaatcactatatatggcagctgtagccttatgaaatatttattaaataataagacttgaaagttgaaattactccttgatccactggctacataatggatcttgtgttagcaggcatgaaaacattaatctccttgtacatctccatcagagctcttggttgacccaggtgcattgtcaatgagtagtaggtctcaacagcgggcttaaaaccttcagtaaaccatgctgtaaacaggtgtgctgtcatggaggttttgttattccacttayagagcacaggcagagtagagctagtataatttttaagggccataagattttcaaggtgtaaatgagcattggcctccacttcaaatcactggctgcattagcccctaacaagagagtcagcctgttctttgaagttagacattcacatctctctagctatgaaaatcctgggtggcatcttctcccagtagcaggctttttaatctacatttaaaaatctgttttttagtgtag

SEQ ID NO: 158796 - DNA, 550 bp, Homo sapiens
gttagactgacagcagaattttctataacaacaatgaactcaggtgtctatgaaatgagttcaattttgctgtgagaaagtaactgtcggccagaatcttatacccagaaagtctataaaaagttattaaaaacgaaggtgaaataaaaatgtcctcagtgaagcaaaaacgtagtgactttgctaccaacaaactatcactaaaagaaattccaaaatatatgcttcggtcacatggaacatggtctctcacagaaagtttcaagtatragaaggaaaaggttatatggataaattcaaacaaatattgatggtataaaacagcaagattaatgtctttgtagattcaaataaaaataataagttattattaaaatacatttataaggtataggttgatttccaggtggctggaatcaaccatgctaagattcatgtattgtttaagagatgggtaaagattttaattaaaccacatcttgattacttaacatgcaagttgatatttctaaaaaagtccctggaataatatctgttttattatgatcta

SEQ ID NO: 158797 - DNA, 550 bp, Homo sapiens
gttagactgacagcagaattttctataacaacaatgaactcaggtgtctatgaaatgagttcaattttgctgtgagaaagtaactgtcggccagaatcttatacccagaaagtctataaaaagttattaaaaacgaaggtgaaataaaaatgtcctcagtgaagcaaaaacgtagtgactttgctaccaacaaactatcactaaaagaaattccaaaatatatgcttcggtcacatggaacatggtctctcacagaaagtttcaagtataagaaggaaaaggttatatggataaattcaaacaaatattgatggtataaaacagcaagattaatgtctttgtagattcaaataaaaataataagttattattaaaatacatttataaggtataggttgatttccaggtggctggaatcaaccatgctaagattcatgtattgtttaagagatgggtaaagattttaattawaccacatcttgattacttaacatgcaagttgatatttctaaaaaagtccctggaataatatctgttttattatgatcta

SEQ ID NO: 158798 - DNA, 618 bp, Homo sapiens
ggtggctgacacctgtaatctgggcactttggaaggctgaggtgggaggattacttgagcccaggaatttgagaccaacctgggcaatatagtgagaccctggcactacaaaaaaaaaattacccggatttggtggttcacacctggtcccacctacttgggaggctgaggtgagaggatcgcttcagccttggaggctgaggcttcagtgagctgtgacagcgccactgcactccagcctgggcaacacagtgagacctgtctctaaaaatatatatatatatatatgtatatatatatatatatatatatakagagagagagagagagagagagagagagacagagagaacctatgatggacattaccaagtcaaattcctaaagtgacctcaacgagtaaaatgggatgaatgaaaatggccacccagtcctcttgttttctcattttgataggaagtgtttctactataagtcacagcatgcatgcatgaaaacatgtggcttgtaacactgcgtctcagtgcaggacaagagttgagagtgatgtggatgatgtgaactagaaaacgggtcagcagctactcatgtcttgttgatggttgtaatccagttgta

SEQ ID NO: 158799 - DNA, 375 bp, Homo sapiens
tctcattattgtggagatacggtgcagagaacaatacatgaataaatacaactggattctgctctactgagtacgttattatcatggctgaatattccaacacatgtttactttaactcccacatcatcctgtagagtatgggttatcttataaaattttttgataagacaactgaaatgcatggaaaagaaataattagtcactcaattagcaagtgccagagtcacactttacatcctcacttcaaaattcaaattctgtctcttgtactgtcctaactctcgtaagagcataagatcrtttttcagtagttccttgggtcagtgtagaacatcggttcattcaaaattggtgaacatctttttgggattgga

SEQ ID NO: 158800 - DNA, 375 bp, Homo sapiens
tctcattattgtggagatacggtgcagagaacaatacatgaataaatacaactggattctgctctactgagtacgttattatcatggctgaatattccaacacatgtttactttaactcccacatcatcctgtagagtatgggttatcttataaaattttttgataagacaactgaaatgcatggaaaagaaataattagtcactcaattagcaagtgccagagtcacactttacatcctcacttcaaaattcaaattctgtctcttgtactgtcctaactctcgtaagagcataagatcatttttcagtagttccttgggtcagtgyagaacatcggttcattcaaaattggtgaacatctttttgggattgga

SEQ ID NO: 158801 - DNA, 538 bp, Homo sapiens
tgtgagccttccaactttcttcttctttttcggtattgtgttaactattctaggtcttttgcctgtccatgcaaacttgagaatatatttgtcattgtctaaaaattgccttcctgggattctggttggaattatgccaaaactgtagaacaagttgagaagaattaacaatttgataatattaagtctccmacttatgaacatagaatatcttcacatttcttgaaatctttgatttctctcatcagagattttgtattccacctaaagatcctatatatatattttaaaacttatactttttaaaattttttggtgttatggaaaatgttactatttctaaaaaattttaattccaattgttttttggaaatgagcaattgagttttatatattagctgtttatcctgaaaccttgctatttgttcacttactagttccaaaaggttttcttcatcaattctttgagattttccatgtagaaaaaaatcacataatctgaaagtaatggcagatttacttttttctttccagtttc

SEQ ID NO: 158802 - DNA, 391 bp, Homo sapiens
tgatttgcattcatgcaaggcaggctcttcacaaggaggcatccaggaccttggcacacgccacttkccctgtgggggaaagagcttcgtacaaaaagacattttttcctgtgagcagggatgggtgaaacactgaggagggagaggtatgagtgcaagcaagaacatctgggaaacatcgagtccaatcaagggccagcccagcagtaaaagcaaccagagtgcagagggtgagtcgctctctgaccaggctgtaatccctgtctgaagaggggagttttgattttagcactagcaatggaaatatgctctgatctcactcagcctcccagccaggaacaagcgatgcccacctccaagcccagccctctctgatgcacagctccagcta

SEQ ID NO: 158803 - DNA, 596 bp, Homo sapiens
aggaatacaaggtgagtttaacaatccaaaataaatgtgacaaactaaaagtgaaaagtcccatgaacatctgagtaaaagtagaaaaagcccttcacaaaacccagcatccattttctcataaaagctttcagcaagctaggagtagaaggcttcttcctcaccctggtaatatgtatttgtgaaaaaaaaacatgcaacaagtaatatcacagttatggtgaaagatgaaatgctttcccattaaaatgagtagtaagatatggatgtgtggcacagctgattggaatataaaattgtgtgaccattttggaagataatttttctcttttttaaaaagttaaacctcacacctgtaatcccagcactttgggaggccgaggcaggtggatcacgaggccaggagatcragaccacggtaaaaccctatctctactaaaaatacaaaaaattagccaggcatggtggtgggcgcctgtggtcccagctactcgagaggctgaggcaggagaatggcgtgaacccaggaggccgagcttgcagtgagcccagatcactccactgcactccagcctggatgacagagtgagacactg

SEQ ID NO: 158804 - DNA, 591 bp, Homo sapiens
attctcccttcctctgcctttttgctctattcatgccctcaatggattgggtgaggcccatctacatttgctttactcagttcagagattcaaatgccaatcctctctggaaacaccctcacagacacacctagtataatgtttggccaaatgtctgggcatctcgcaacccagtaaagttggcacatgaaattaaccaccacagaaccttgctgctgaactatgcttattcttccatcctggtgacttttctttcctcaatcccagtttcagaagtgctctgttcttgttctctgagccctctctgcctgccatgcagatgcatttcaggtgggcrtctcctctgccaagcctgtggggtttcccttcctgcagggcaacccctgtcctcttggtccccctaatattttactgttttatggtacttttgcatttcaaccttatgttatcatgatccatgtgcagccttctctctcctccgaggccaggagctcgttgaggacttcatctctgcgttttctacaggactctgggagagggtaagaactcagcatctggaggttgaagacatgcgtagggaaaaagccgtat

SEQ ID NO: 158805 - DNA, 591 bp, Homo sapiens
attctcccttcctctgcctttttgctctattcatgccctcaatggattgggtgaggcccatctacatttgctttactcagttcagagattcaaatgccaatcctctctggaaacaccctcacagacacacctagtataatgtttggccaaatgtctgggcatctcgcaacccagtaaagttggcacatgaaattaaccaccacagaaccttgctgctgaactatgcttattcttccatcctggtgacttttctttcctcaatcccagtttcagaagtgctctgttcttgttctctgagccctctctgcctgccatgcagatgcatttcaggtgggcatctcctctgccaagcctgtggggtytcccttcctgcagggcaacccctgtcctcttggtccccctaatattttactgttttatggtacttttgcatttcaaccttatgttatcatgatccatgtgcagccttctctctcctccgaggccaggagctcgttgaggacttcatctctgcgttttctacaggactctgggagagggtaagaactcagcatctggaggttgaagacatgcgtagggaaaaagccgtat

SEQ ID NO: 158806 - DNA, 483 bp, Homo sapiens
catgtctttcattaattttccataatttctagcctttattacctcacacactgctttttttccttctctcttttttctgcttggtgttctcattaggcttaaccctttgtagagtgtaattaatgcctctgagtttgtctgttttggggcccaagcacctgtgctttgtacttctgtaccaaagtaaagttaacactaactgacagaacttttggctcctccacttgaagataaatttgctccagtaagccaaggatattccacytaaatgaatctcaggtgcacatcctcagaagtaaagcaggtagctatcacatcctagggcagtaaatgacgtctgtgtacagagcagcagaggttactttgtacacaataagagcctatagcaagagatagacaaaaaatgaaacaattctagaattccatgaggctggctgctcctggatggtgcagtgtgtaaaacaattattgtattctgtggtc

SEQ ID NO: 158807 - DNA, 649 bp, Homo sapiens
caattataaaaatttttaaggtgcaatatttagactggtaggctacatctcactggcaacactgaaagccagaaatctgtggaacaatatcttaggatgctaaaaataatgtaatgygcaatgtagaattttatacccattaaatatttttaatagtgagggtaaaacagagacatttcagaaaaataaaaactaagaaaatccatcactgtgagatctacactaaaagaaagcttggcagttggaaaagagaaagcaaacttgacattattcattgaagattacatgattgcatatagagaaaagcagaaaaatctacaggttaacaactagaattattaacagaatttaataagcatgctggttctaaatccttctttgaaaagtaattatatctccacagccagcaatttaaaaataaaataaaaagaaacaattcactatagtataagaaatatgaagtacataggagtaatctaacaaaataaaggcaagtcttctttacagagaactatatggcattactgagagaaaacagaccaaaacatgtggaaggatatgccatatttatgaatggaaagactctatactatatagatgttaatttcttcttattgatttatattcaactacagtacttgataagttg

SEQ ID NO: 158808 - DNA, 649 bp, Homo sapiens
caattataaaaatttttaaggtgcaatatttagactggtaggctacatctcactggcaacactgaaagccagaaatctgtggaacaatatcttaggatgctaaaaataatgtaatgcgcaatgtagaattttatacccattaaatatttttaatagtgagggtaaaacagagacatttcagaaaaataaaaactaagaaaatccatcactgtgagatctacactaaaagaaagcttggcagttggaaaagagaaagcaaacttgacattattcattgaagattacatgattgcatatagagaaaagcagaaaaatctacaggttaacaactagaattattaacagaatttaataagcatgctggttctaaatccttctttgaaaagtaattatatctccacagccagcaatttaaaaataaaataaaaagaaacaattcactatagtataagaaatatgaagtacataggagtaatctaacaaaataaaggcaagtcttctttacagagaactatatggcattactgagagaaaayagaccaaaacatgtggaaggatatgccatatttatgaatggaaagactctatactatatagatgttaatttcttcttattgatttatattcaactacagtacttgataagttg

SEQ ID NO: 158809 - DNA, 405 bp, Homo sapiens
actgggccatagaacatacatatctaaagtttagtgaatattgtcaaaccattttccaaagtaattgtaccaaatcacacttccatttatatatgaaatttttatctttccctaatgtacagattaaaagacaactgttactgcatttccctgattatgagagagactgaccatctttcatatcctcattggtcctttcaggtttctttccttgcaaactgtcagcccagagccactgctcatatttccttccacatgttttggtctattttctctcagtaatgccatatagttctctgtaaagaagacttgcctttattttgttagattactcctatgtacttcatatttcttayactattgtaaattgtttcttttaatcatggcattataggaatgttacat

SEQ ID NO: 158810 - DNA, 596 bp, Homo sapiens
ctagtgaaccacaaatcagacaaaaattacatatatgaatgtacacacactctcacaagtgtgattctctattccagatccctgtggttgtcagggagcggactctcrggctgcagagccatctctgtgtcacaggccatgtggatgatcccatggggtgcagagatttgcgtctccctcactcatgacacactggtccctgcaacatgtcgcacctcaacttctggacaccctgaagcccttcacgacgtgtgttctgcacaaggaaactgctgatgaaagtaaaaattccacatccaaacggccactcaaaccaagcgtaggcacgcggtaccttacaagagctgtgagatatccttctctctgctttaagtgtctctgaatccaaagagaacatttaaggagactacagactgattccctgtgtccttcaagttaccttcattctgttgtaaaacctatggcctctttatccactgacagaaaccctaaggacaacccaggtatttctagaaagtctgtggttcctaagtgaggatgaaaggaagaggttgtgaaaggtgagggccagcctgcggctgttgttcagagaccct

SEQ ID NO: 158811 - DNA, 596 bp, Homo sapiens
ctagtgaaccacaaatcagacaaaaattacatatatgaatgtacacacactctcacaagtgtgattctctattccagatccctgtggttgtcagggagcggactctcgggctgcagagccatctctgtgtcacaggccatgtggatgatcccatggggtgcagagatttgcgtctccctcactsatgacacactggtccctgcaacatgtcgcacctcaacttctggacaccctgaagcccttcacgacgtgtgttctgcacaaggaaactgctgatgaaagtaaaaattccacatccaaacggccactcaaaccaagcgtaggcacgcggtaccttacaagagctgtgagatatccttctctctgctttaagtgtctctgaatccaaagagaacatttaaggagactacagactgattccctgtgtccttcaagttaccttcattctgttgtaaaacctatggcctctttatccactgacagaaaccctaaggacaacccaggtatttctagaaagtctgtggttcctaagtgaggatgaaaggaagaggttgtgaaaggtgagggccagcctgcggctgttgttcagagaccct

SEQ ID NO: 158812 - DNA, 596 bp, Homo sapiens
ctagtgaaccacaaatcagacaaaaattacatatatgaatgtacacacactctcacaagtgtgattctctattccagatccctgtggttgtcagggagcggactctcgggctgcagagccatctctgtgtcacaggccatgtggatgatcccatggggtgcagagatttgcgtctccctcactcatgacacactggtccctgcaacatgtcgcacctcaacttctggacaccctgaagcccttcacgacrtgtgttctgcacaaggaaactgctgatgaaagtaaaaattccacatccaaacggccactcaaaccaagcgtaggcacgcggtaccttacaagagctgtgagatatccttctctctgctttaagtgtctctgaatccaaagagaacatttaaggagactacagactgattccctgtgtccttcaagttaccttcattctgttgtaaaacctatggcctctttatccactgacagaaaccctaaggacaacccaggtatttctagaaagtctgtggttcctaagtgaggatgaaaggaagaggttgtgaaaggtgagggccagcctgcggctgttgttcagagaccct

SEQ ID NO: 158813 - DNA, 635 bp, Homo sapiens
tgggttctctactctgtttcactggtccatgtgttgtttttatgctcaccatattgttctgattatcatagctctgtaatgcaacttgaaatcagtaagtgtgatgtatgatgcctccaacttttttttcctgtcaagattattttatctattcagagtcttytgtggctccataaaaattttagcactgtccttttatatttgtaaaaaaatgctattaagattttgatagggattgcactgaatctgtatattgctatggctttatggtcattttaacaatattaatttttctaaattataaacatgatctatcttttcatttatttgtaacttcaatttatttcatcaatgtttcatagttttcagtgtgaattttttttaatttggttaaatttatttctaagtattttattcttttttgatgctattataaatggaattgtttcctttattttttctcagatatatttttatcagtgtaattaaatgcaactgatttttttatattggttttgtatcctgctaccttactggacttatttactagttctaacagtttgtgtatgtgtgtgcatgtgtgtgtgtgtgtgtgtgtgtgtgtatggagtctttaaagttttctagctatagaa

SEQ ID NO: 158814 - DNA, 635 bp, Homo sapiens
tgggttctctactctgtttcactggtccatgtgttgtttttatgctcaccatattgttctgattatcatagctctgtaatgcaacttgaaatcagtaagtgtgatgtatgatgcctccaacttttttttcctgtcaagattattttatctattcagagtcttctgtggctccataaaaattttagcactgtccttttatatttgtaaaaaaatgctattaagattttgatagggattgcactgaatctgtatattgctatggctttatggtcattttaacaatattaatttttctaaattataaacatgatctatcttttcatttatttgtaacttcaatttatttcatcaatgtttcatagttttcagtgtraattttttttaatttggttaaatttatttctaagtattttattcttttttgatgctattataaatggaattgtttcctttattttttctcagatatatttttatcagtgtaattaaatgcaactgatttttttatattggttttgtatcctgctaccttactggacttatttactagttctaacagtttgtgtatgtgtgtgcatgtgtgtgtgtgtgtgtgtgtgtgtgtatggagtctttaaagttttctagctatagaa

SEQ ID NO: 158815 - DNA, 471 bp, Homo sapiens
tcagtctacacaaactctttcagaaaatgaaaaaaactcatccctactcattttgtgaggccagcatgactatgataccaaarttagacaaaaacatcacagaaatgaaattacagaactatatcagttgttaatataaatgtgaaagtcttcaacaaaatagtagcaaattgaatccagtaataaatgaaaaagataatacatgatgattatatggggtttgttataggaattcaagtttgcttcaaaaattggcaataaatttaatccaccaaattaactgaaaatgaaaagaatcatttgattatctcagtaggtggagaaaaagcaactgtcaaaattcaaaactcattcataatacataataaacactttcagcaaactaccgggtaaaggacattaatgaaatgtccactgctggtattataaccaaggacaccatcaaaagcatgtgacctctgcagtcacaca

SEQ ID NO: 158816 - DNA, 319 bp, Homo sapiens
gtggaactggaaatcattatgttacctgaataagccaggcacaaaaagacaaatatcacatgttctcactcayatgtgggggctaagaacgttgatctcatggaggtagagagcaaaatgataggaacttgaggctgggaggggtgggctgaggggcataaaaagaggtgggttaatgggcacaaacatacaattagatagaaggaataagtgctagtactcaattgcacagtagagcacctacagttaataataatgtattatatatttcaaaatagctaaaggagaagacttgaaatgttcccacaacacaaaattc

SEQ ID NO: 158817 - DNA, 580 bp, Homo sapiens
ctctataacttttatctatcatttgaaaatttcagaatatacaaagtaaaaactaataaaggagaaaataatagaaatacaagaagaaagtgaggactttagtgaaagggttgaggataaatgttttcttctttccttgagaagtgattgtgaaaccatactgcctgggtgccatcagcaaatagtttgtccccgtgattggagacagcctaatgatagaactgtcagggctaaaagggagctgtgagcgcagggaaagaggaagaccagagggagaacttttcaaatgagtcaagcaagagcctttrtcccacaattctggaacatagatgacatccaacaaatcaattttgtattgcttaagctagtttgaggcttttgtgtgaagcattttattagatacatcagtttttctgaggcaagttcacatttttaacatggtctacaagttctgcatgatctgcctcatgccagctcctccagggtcacctcgccccacttcctccttgctgttgacattggagctgcccttgccttcttttagatcctcataagcatcttgctcctttccacaatacaa

SEQ ID NO: 158818 - DNA, 661 bp, Homo sapiens
agtcactagtttacctgtataacaaacctgcacatgtacccctcatctaaactaaaagttaaaatattcaaaaaaagagatatagggtgaagtcagctatgcccaaactacagggagaggaaccggaagtgtttcctccataaaacattaggacaagagggactggagctcatcaaacaaaataggtaagttccttcacacctatgaaagagagcagagggaatgctgtgccaaagactcaaaatatgtgaattgaggaaaacaaacatattaatcttcccaaaattaatatttaattaggaaaaacaagatatctatactaaattttcttaaaccttgctccataactttaaaattcacttgggaagaataaacatactctctaaaataatcaagcaaaattttttaagactaataatttggctttgstttacagatgttaaaataatgtatgaattaacaacaatgaaaacattgcagtgttgacataggaatagacagacatataaaagagaatgaaaagtattcagatggaaccaaagaaactgaacaaagtttataatttagtgaataacattagacaatgttaattttttaaattttgtcaaatgaactatggttgaattagatgttaacactaacagaaactggataagggata

SEQ ID NO: 158819 - DNA, 474 bp, Homo sapiens
cttagtggtttgaagcagacaataaaaaattgtcccattggctgggtgtggtgcctcatgcctgtaatcccaacactttgggaggctgaggcaggtggatcacctgaggtcaggagttcgagaccagcctgaccaacatggtaaaaccccatcgctactaaaaatacaaaattagctgggcgtggtggcgcatgcctgtaatcccagctactcgggaggctgaggcaggagaactgcttgaacggraggcagaggttgcagtgagccaagatcatgccattgcactccagcctgggcaacaagagtgaaactctgtctcaaaaaacaaaaacaaacaaacaaaaaaaatggtgtcccattatagagatgttcatagaagggagcacctaactagtggaagaaggaggagaaaccaattaagagagcttctcggaggaagtgacatttgagctgagtcttgaggaacaattataa

SEQ ID NO: 158820 - DNA, 392 bp, Homo sapiens
actgaggcagtttgcaaaagttttatgttgctaaatattcattaacgcaatgtaggtaattaaattttaacttttattttgagtttagggatacaagtataggtttgctacataactaagcttctgacatggggtttgttgcacagattatttcatcacccaggtattaatcctagtacccattagttatttttcctcatcctcttcctcctcccaccctccaccctccgaaaggccccagtgtgtgttgtttccctctgtgtatccatgtgttctcatcatttarctcctacttagaagtgagaacatgtggtatttggttttctgttcctgtgttcttttgctaaggataatgacctccatctccattcatgtccctgcaaaggacatga

SEQ ID NO: 158821 - DNA, 280 bp, Homo sapiens
gtcagggtggtgacttcacacaccataatggcactagcagcaagtccatctacggggagaaatttgatgatgagaacttcatcctaaagcatacaggtcctggcatcttgtccatggcaaatgctggacccaacacaaayagttcccagtttttcatctgcactgccaagactgagtggttggatggcaagcatgtggtctttggcaaggcgaaagaaggcatgaatattgtggaggccatagagcactttgggtccaggaatggcaagaccagcaagaa

SEQ ID NO: 158822 - DNA, 280 bp, Homo sapiens
gtcagggtggtgacttcacacaccataatggcactagcagcaagtccatctacggggagaaatttgatgatgagaacttcatcctaaagcatacaggtcctggcatcttgtccatggcaaatgctggacccaacacaaacrgttcccagtttttcatctgcactgccaagactgagtggttggatggcaagcatgtggtctttggcaaggcgaaagaaggcatgaatattgtggaggccatagagcactttgggtccaggaatggcaagaccagcaagaa

SEQ ID NO: 158823 - DNA, 280 bp, Homo sapiens
gtcagggtggtgacttcacacaccataatggcactagcagcaagtccatctacggggagaaatttgatgatgagaacttcatcctaaagcatacaggtcctggcatcttgtccatggcaaatgctggacccaacacaaacagttcccagtttttcatctgcactgccaagactgagtggttggatggcaagcatgtggtctttggcaaggygaaagaaggcatgaatattgtggaggccatagagcactttgggtccaggaatggcaagaccagcaagaa

SEQ ID NO: 158824 - DNA, 516 bp, Homo sapiens
ggaaaccagaaggactattacagggttaaaatcagctgtttatgcttcctataattcttgaacatccacaagtatgagatggctgcagagtcaccagaggtacgtgagccctttagtctgataaacatgccaagagtaycataagaattcacaggtaggatgttttttcagttaatgataataaaaaataagagaacaggtttgcactttgaagaatgtggatttgcaaaggtaagggggaaaacatttagataaatgacaataagcactgaggcaaagaaatattggttatgtttgaggaaggctaagtattaaaaaaaaggtaggtgaagaggagtagtaagaatttcattctttaaaatgcaacagatgtttatgctgctttggttgtatttttagaaaaaaaaaatttttttttaatgcaacagatgtttaaatgtctacctctgtgccaagcactgtggtaggtactagggacacagcagtgaacaagacatactggtttctgtccccaca

SEQ ID NO: 158825 - DNA, 554 bp, Homo sapiens
aagcttatttacatttaatttaaggaacaagctaaaagagtctcaactcaatatatttaggttcgggtacttgattaagtaactgaatattcagagactgccccttctatacaagaaagttactccttaatatgaaccacctccactgactataatgacacctgctcgcccgtgttagcaccaaatgactgcctttactgcattagaattttgaaattcagccacttaaaaattatagaaagaggcawtgaaaaatggctcacactattcttgttcttcagtgatgttaaatgctttcccttacccctccttttggaagctgaaggaccttccttgcaaaaacagaaccttcactggattcttactgtagtattaaccaaagaaagagactaagatacttctaaataataataaaggtccagattaaacatattccctttaaaagaacaattagaagcaaggtatatgactcagaagaattaacttcatctaatctggaattatagtgcagacttccaagaactataaaagtgatactccactgtgaaagcaag

SEQ ID NO: 158826 - DNA, 363 bp, Homo sapiens
acaccaacactgtcagattcttctccccaccctccaaacacatgaacatgaggaactgaggaactgaggcataagcctcagttccttctaacagaaggcacacaggcctccttgttgaaaggctcccaaatgcagcagttattgccttgtgtttttccaattacagttgctggtgtggtcccttacccggtgacagtggggtgtgccaggtaatcacaacrcttgtactttggacaggtgacattccttcatacagcctggctgaatcaagtttgccaggtacacacacacacacacacacacacacacacgaaaaaaaagcccacaaaaaagccaatctcagtgtttcagagcagtgtaatg

SEQ ID NO: 158827 - DNA, 608 bp, Homo sapiens
ttggactgcctgatctagctctaaatttctataaaayacccatggaaatcaatgccagcaaactcgagatttgacctaaatacatatcacatacttctttaatagctaatcatgcatttttggttagcaataaccaaaatcctaagagatctcttaaggatgtttacattaaagcatatcatttaagaattttcctgtgactgtggttttgcgtgcacgcatgtgtgtgcacgcgcgcgcacacacacacacacacacacacacacatcaggccagctttggctggacagagtccaaatcccacatgatataatttatctgagtttaggctctttcactcaactctgatattgaaaaaaattaataataaagctttttgcctcttgaccagaaggcctgtgtttttcagagcaatattggaaatgaaaaatcacaggatgtcagccaccttgtttctcagttgggatgatatcaccagtaaacttttatgtgaagcaatcagcaaacatctcctgtttccctctagcggaagtctgggattcaggatggtgtttcagctgctgtgttaggacacattccagagtagaatgcaggtcaaatgctgtgca

SEQ ID NO: 158828 - DNA, 612 bp, Homo sapiens
gcaggtcagctttagtttccttgtaataaaaaattgaggatgttggactgcctgatctagctctaaatttctataaaacacccatggaaatcaatgccagcaaactcgagatttgacctaaatacatatcacatacttctttaatagctaatcatgcatttttggttagcaataaccaaaatcctaagagatctcttaaggatgtttacattaaagcatatcatttaagaattttcctgtgactgtggttttgcgtgcacgcatgtgtgtgcacgcgcrcgcacacacacacacacacacacacacacatcaggccagctttggctggacagagtccaaatcccacatgatataatttatctgagtttaggctctttcactcaactctgatattgaaaaaaattaataataaagctttttgcctcttgaccagaaggcctgtgtttttcagagcaatattggaaatgaaaaatcacaggatgtcagccaccttgtttctcagttgggatgatatcaccagtaaacttttatgtgaagcaatcagcaaacatctcctgtttccctctagcggaagtctgggattcaggatggtgtttcagctgctgtgttagg

SEQ ID NO: 158829 - DNA, 612 bp, Homo sapiens
gcaggtcagctttagtttccttgtaataaaaaattgaggatgttggactgcctgatctagctctaaatttctataaaacacccatggaaatcaatgccagcaaactcgagatttgacctaaatacatatcacatacttctttaatagctaatcatgcatttttggttagcaataaccaaaatcctaagagatctcttaaggatgtttacattaaagcatatcatttaagaattttcctgtgactgtggttttgcgtgcacgcatgtgtgtgcacgcgcgcrcacacacacacacacacacacacacacatcaggccagctttggctggacagagtccaaatcccacatgatataatttatctgagtttaggctctttcactcaactctgatattgaaaaaaattaataataaagctttttgcctcttgaccagaaggcctgtgtttttcagagcaatattggaaatgaaaaatcacaggatgtcagccaccttgtttctcagttgggatgatatcaccagtaaacttttatgtgaagcaatcagcaaacatctcctgtttccctctagcggaagtctgggattcaggatggtgtttcagctgctgtgttagg

SEQ ID NO: 158830 - DNA, 642 bp, Homo sapiens
tctttctggctttgtttagcaagtcagtacaaggaagagctgagctcaggcaaaaatgtgctggttcaagagcagaaatgaaaagaaatagaatgagtccagaaatgtggagtcttctgttttgaacttcaaaagagtaagtgaaaacatggaataaaggctttgagcaaccaaagcccgttaagacttctctttaaacaggcagtttcatcaccacagcaaagatcactttaagggtgctttcttcacagccaartctattttttttttcagatggcttcaagatggctgctattaagttgaaggagagaggtatagtggttaggatgcaaagaaattaatcagattaaagaattgtgaccatgtgtgtatataggcacatgggaatgatggaaacaaatattgcagaagcttactcagtatttgaaggaattatattgccaaagagttcattaacccaggctacaaaagttttggttgttcaaggcttaaagcagtccttgagttcccaaacacacacggccagaaagcaggctccaagatctgcacagtcttccaaaaagggtgctttctccatcccctccttcaattgtggccgtgagggaaagtgggcaaggaagaacctccccggggcatagccag

SEQ ID NO: 158831 - DNA, 642 bp, Homo sapiens
tctttctggctttgtttagcaagtcagtacaaggaagagctgagctcaggcaaaaatgtgctggttcaagagcagaaatgaaaagaaatagaatgagtccagaaatgtggagtcttctgttttgaacttcaaaagagtaagtgaaaacatggaataaaggctttgagcaaccaaagcccgttaagacttctctttaaacaggcagtttcatcaccacagcaaagatcactttaagggtgctttcttcacagccaaayctattttttttttcagatggcttcaagatggctgctattaagttgaaggagagaggtatagtggttaggatgcaaagaaattaatcagattaaagaattgtgaccatgtgtgtatataggcacatgggaatgatggaaacaaatattgcagaagcttactcagtatttgaaggaattatattgccaaagagttcattaacccaggctacaaaagttttggttgttcaaggcttaaagcagtccttgagttcccaaacacacacggccagaaagcaggctccaagatctgcacagtcttccaaaaagggtgctttctccatcccctccttcaattgtggccgtgagggaaagtgggcaaggaagaacctccccggggcatagccag

SEQ ID NO: 158832 - DNA, 642 bp, Homo sapiens
tctttctggctttgtttagcaagtcagtacaaggaagagctgagctcaggcaaaaatgtgctggttcaagagcagaaatgaaaagaaatagaatgagtccagaaatgtggagtcttctgttttgaacttcaaaagagtaagtgaaaacatggaataaaggctttgagcaaccaaagcccgttaagacttctctttaaacaggcagtttcatcaccacagcaaagatcactttaagggtgctttcttcacagccaaatctattttttttttcagatggcttcaagatggctgctattaagttgaaggagagaggtatagtggwtaggatgcaaagaaattaatcagattaaagaattgtgaccatgtgtgtatataggcacatgggaatgatggaaacaaatattgcagaagcttactcagtatttgaaggaattatattgccaaagagttcattaacccaggctacaaaagttttggttgttcaaggcttaaagcagtccttgagttcccaaacacacacggccagaaagcaggctccaagatctgcacagtcttccaaaaagggtgctttctccatcccctccttcaattgtggccgtgagggaaagtgggcaaggaagaacctccccggggcatagccag

SEQ ID NO: 158833 - DNA, 580 bp, Homo sapiens
tcaattctatttttctgctggactgaaccagtgccaagactggaccatgtaggatcctgggtttatttcagttacataagcaaacgttgctgtgatttggaatagtcaaagtcatgaatgtttctcaacttccattttgtcagctgcttgagtttctattctgagaggtgctaactgtgaacattgttattcacttgtgttccctaaatcacttttaattagttttaatttgaaccaagaatgttctactgttgaaactatgtcaagaatgatcaaaaatgaaattaataaagaattcrcgtcaaaaaaaatttgcactaatattacagtattttataatgtctatctcagcagagtcacagataatttagaatttttaattttgtttttaagtgattttcctcaaagctataatagccttggtaaagagtttagttaaacattatttttcacctctcacgcattttgtgtaatgaaatttttctatcatcttccagtggaattaattgcattggtgcaaaaaatgcaatcaaatcgatgactgaatttagcctttgaaacctcacgtctagctgggata

SEQ ID NO: 158834 - DNA, 623 bp, Homo sapiens
aatattacagtattttataatgtctatctcagcagagtcacagataatttagaatttttaattttgtttttaagtgattttcctcaaagctataatagccttggtaaagagtttagttaaacattatttttcacctctcacgcattttgtgtaatgaaatttttctatcatcttccagtggaattaattgcattggtgcaaaaaatgcaatcaaatcgatgactgaatttagcctttgaaacctcacgtctagctgggatagttactatattcattacatactgaaaaatgataagcagtaagcttttctgctaaaaaactgccaaagataagtttttcaaggctctcaaaatatcctaaagctgacaatacaagaaatgttaaaatattgttggaatttttaacggaatcttccttctcttcttttcctgtttaagacaatagtagttagttgtccactaatcgttaatacaygattttctaacaaagacttgcatatccttttggctaaaaagtggccaaatatcagagagctagaagtttgggagacagcctttagtcttttccaaagcatgtaagcccttttgaatcattttgggtaaatggcgaagattaaacagaat

SEQ ID NO: 158835 - DNA, 603 bp, Homo sapiens
tttctgtgaaaataaatatgaatgcaaaattcacatgaatgcttaaaatatcagacctcaaagatgagtgctgtctatctgtggcccctttgagcaatccctgtgcccctggaggatgcattcatccgctgctgttacagcgccaccagcagtcacttttgaggagtgcagctccaagggatgacggtataaggggaagaattcagccaaagtgagatgtcctccagcaaaatcagagacagtgcccttcagagggctcgtgtcctgctggaattgggaaattccataaggctgcagatattcagcctcctaactgaactctatgcaatgcctttatcccctcctcccgatctgtgcaaaatatcaaaggaataaaacctgttttctttcttagtggttgcaccaattttgtgcagtctggttcttttctgtttttctgtaaaattgttttcagaagtacttaaagttgttgtggtgaaagttaactttatgatgcttgtttttcgtttcaaaaacaataaaggcagctttggctcrtgctgagaacctgagccaagatagcaggagataggattccagggccctttcagcttccttgtgatg

SEQ ID NO: 158836 - DNA, 575 bp, Homo sapiens
ctacacaagaccagccctggccgggcgcggtgcctcacacctgtaatcctagcactttgggaggccaaggcaggtggataacctgaggtcaggagttcgagaccggcctggctaacatggtgaaaccctgtctctactaaaaatacaaaaattagccgggtgtggtggcaggcgcctgtaattccagctacttkcggaggctgaggcaggagaatcgcttgaacccaagaggtggaggttgcagtgagccgagatggcgccattgcattccagcctgggtaacaagagcgaaactccatctcaaaacacacacacgcacgcacacacacaccaccaccaccaccaacaaaccagccttttccaggaacacccacctgttgctgcgggggaggatggttctcaaggcttcctcccacaaaggttaacaccaggacaacattttccttcatttccaccaattccatcataataacttccaaataataagacattcaaatacattatcttcaatttagctcaatctgaactttcatattggggccctttgcaacccatgcattttaaagaagtctatt

SEQ ID NO: 158837 - DNA, 277 bp, Homo sapiens
agcacatgccaaaatccaatccagcacaatccagaaatgtcactgtgtgaccatacaaactctgcacaagacacagggtggggcatttgcacaggacagagggtacatgcattagtgacaaagaggaaaaagaaactagtctctttcagggtgcaaacccctcaccagcatttcagatgggaakctcccagggcacaccagcccacccaccaggttataacaatgcccctttctcctttggacacaggacacctcaggccacaccccaggagtgcag

SEQ ID NO: 158838 - DNA, 547 bp, Homo sapiens
tgaactctcaacataaatatctccctcttcatccttctttcctgcaaaatatgatttagggtctattaatagatgtggcataagatatttaaattcaacgctgatttttctgaaaggcaaaagaaacagcagagtctgaaaataagacccatacaaagtgctccacgtyattaatacttttaaacagaggaagtaaactattatgcaatcgctgaaaagatctgatgggttatataccttatgctatgctgtaatcatttacccaagaagttccaagaatatacaaactactattgtgaacttgggcctcatactaatttaccaaatgaagataaaaaacatttaaactatctaaaaagtatctgtatttaatgttaaaattcaaggtatgttttctttaggcttatatttaaataagcttgtatttccaactcttgctgaatgacagaagtaaacataatgttaccattttgctgtaaatgatggagagaggtttgataaccttaacttacaaagagtggatgcaaatcaacaagacacagacaaa

SEQ ID NO: 158839 - DNA, 547 bp, Homo sapiens
tgaactctcaacataaatatctccctcttcatccttctttcctgcaaaatatgatttagggtctattaatagatgtggcataagatatttaaattcaacgctgatttttctgaaaggcaaaagaaacagcagagtctgaaaataagacccatacaaagtgctccacgtcattaatacttttaaacagaggaagtaaactattatgcaatcgctgaaaagatctgatgggttatataccttatgctatgctgtaatcatttacccaagaagttccaagaatatacaaactactattgtgaacttgggcctcatactaatttaccaaatgaagataaaaaacatttaaactatctaaaaagtatctgtatttaatgttaaaattcaaggtatgttttctttaggcttatatttaaataagcttgtatttccaactcttgctgaatgacagaagtaaacataatgttaccattttgctgtaaatgatgragagaggtttgataaccttaacttacaaagagtggatgcaaatcaacaagacacagacaaa

SEQ ID NO: 158840 - DNA, 594 bp, Homo sapiens
tctgagtatcatccctggaacaaaactggaaatgaaaatgtttatgtcaaattgcaagactcctaatatttttatgcttcctgtgggtaataagctctttctcagagagtgctatttgtgtctamtgtatttaagcaatcaccatatcttttaactattaacaacctgggaaaaatagaaattgtcttaagctcatggggtgttgtataatacaggaaaaataaatgtttgctgatacgtttagatgacatacttagaacacctccaatagtttatttataaaggcaatgcaaatctacattcaatgtttacagcccaagtttaatacaaaagacaaagctttattcatcttatgttccgcttccaaagtcaggtgttaagttttctgccccatatccttggactgtccctttcttcacaactatattaaacttaagtaaaaaatacctcacatatgtaaaaacttaaatttctctcccataccttctcttaaaagagcaagagacaatctattttctactgaaaaactcctatgtggctatcaataaccaccaatgccaagcctcctcaaatttacgtaaagacaaaaactag

SEQ ID NO: 158841 - DNA, 594 bp, Homo sapiens
tctgagtatcatccctggaacaaaactggaaatgaaaatgtttatgtcaaattgcaagactcctaatatttttatgcttcctgtgggtaataagctctttctcagagagtgctatttgtgtctaatgtatttaagcaatcaccatatcttttaactattaacaacctgggaaaaatagaaattgtcttaagctcatggggtgttgtataatacaggaaaaataaatgtttgctgatacgtttagatgacatacttagaacacctccaatagtttatttataaaggcaatgcaaatctacattcaatgtttacagcccaagtttaatacaaaagacaaagctttattcatcttatgttccgcttccaaagtcaggtgttaagttttctgccccatatccttggactgtccctttcttcacaactatattaaacttaagtaaaaaatacctcacayatgtaaaaacttaaatttctctcccataccttctcttaaaagagcaagagacaatctattttctactgaaaaactcctatgtggctatcaataaccaccaatgccaagcctcctcaaatttacgtaaagacaaaaactag

SEQ ID NO: 158842 - DNA, 578 bp, Homo sapiens
caagtgatccagttccatctggcgtaacaaaggtcatcccaaattctacttttctccacggcaaacctttaacaaggtggtcgaaattaattcagataccacatccttttctttttggaccatgtaagatctcatctgactagaatgtctgtgagccagaatatactgtctttcttggagttgagctgaaaacaaaccattctaagagaatttaagcagaattttgagcaaagaattgttgcaatattcagttctaatcctagtcattttgttactgctttggcctcccaaagtgctgggattacaggtgtgagccaccgcatccagcctgaattcacttttacataccttttgttctaagttggtattcatgtttagaaaatactacacttacacattgtttatttccttcactgggaaaaaaacataagcatctcaactcgcatgggctatataatatatatatctcctytaaatgtgatgttcagtaatgactttagaagtagtttttagagcgcttattttgtctaatattctcagagtatttataaagctgtaaaaataagatgtaaaagctt

SEQ ID NO: 158843 - DNA, 590 bp, Homo sapiens
tagtccctttcaacacataggagactgtagcttcctttaaatttgcttcatgcactggtctacaaaaggaactttgttgctagagaatttgttaatcaagatatcttatatctgtcgtcccagctactcagggaggctgaggcaggaggactgcttgagcccagaaggtcaaggctgcagggagccctgttctcccacagttagtattaatgttctttgaagttacagaatttgtatttgtttttttgccttttttttttttttttttcataatgcttarcttgatgctttgtaggcagagtattttcgaaggtttggatcctaagtagaacctttctgtaggccctttctattgagggtcactaatctacagaggaaacttcagtgatggatatataaaaagcaacttttaacttttttttttaactcatctactttataaattaagagcaaaagttataaaattatgtttatttttttaagagatgaggtctcgccatgtggcccaggcaggtctcaaactcctgggctcaagcagtctgcccgccttggcctcccaaagttgctaggattactggcgtgagccacca

SEQ ID NO: 158844 - DNA, 346 bp, Homo sapiens
ctgtgagattgggatacaggcgtcaccgaggttaatgtgtttccagagaacaacccctgaccttaacttgaccctgtcttggctgcttcargggcgcaggccttagctgtgctggccttctcatttggcacctgagactgaggtaacaggagaagaaatacagagtgatcaagccttaaagcattactgctgacagcagggttcctactcttctgaaactctgtgcaataacggactttgctgcttaatcacagaacattttgggtctgtgattttgttttccttggccttacacataactaggttctataacttaaaatgcacacggatctcaccattagtaatt

SEQ ID NO: 158845 - DNA, 369 bp, Homo sapiens
gaaacacatttaccagtttcttataaagaatattaaaggatacagataaagagatgcatagtgcaagatacggggggaaagtaacatgcttccatgtcctcccagggcactcaccctctgggaacatccatgtattctccatatgccttcatgtattggagagsatccaggtagctgaatacagctacctggatgctctccaaatccaatccttttgggattttatgaaagcttcattacataggcatgactgattaattgaacattcagcccctctcacatcccaggaggtgaggggtggggctggaagtcccaaccctctaatcacaccctgatcactatgatgatgagccccaccctgaagccatc

SEQ ID NO: 158846 - DNA, 369 bp, Homo sapiens
gaaacacatttaccagtttcttataaagaatattaaaggatacagataaagagatgcatagtgcaagatacggggggaaagtaacatgcttccatgtcctcccagggcactcaccctctgggaacatccatgtattctccatatgccttcatgtattggagagcatccaggyagctgaatacagctacctggatgctctccaaatccaatccttttgggattttatgaaagcttcattacataggcatgactgattaattgaacattcagcccctctcacatcccaggaggtgaggggtggggctggaagtcccaaccctctaatcacaccctgatcactatgatgatgagccccaccctgaagccatc

SEQ ID NO: 158847 - DNA, 578 bp, Homo sapiens
cacgtttacctatgtaacaaacctgcacattccgcacgtgtacctctgaacttaaaatagttgaaaaaaaagtacacaacagactgcatgcttccrtttctgcctataatttgaaaggtgatatatgcatgcatacgtttgagtatatgcagagagtatttctggaagaaatgtaataaacagtgactttgtctctttgaaaagagcctggggatatgggtctgaggtgggatttttttttccaggatgtactttgcttataaattttaaaaaaactagttaaaggttttctaggattactcttacctctgagagaggtggtgtagagcaggggacttagggagtctaaggagaaaagaaacagataatccctttgtccttctttcttccaagaaaactcagggcttgtgtatccctggactcctgtggttttggcacctcaggtggactattgtccagtaagctcttctgggctgacctggaactgaactaccatttgtaaactttctacaggggaaacgcaacagtgttgcagagaacatactaaaccaaacggcctccactcattctttctcaat

SEQ ID NO: 158848 - DNA, 578 bp, Homo sapiens
cacgtttacctatgtaacaaacctgcacattccgcacgtgtacctctgaacttaaaatagttgaaaaaaaagtacacaacagactgcatgcttccatttctgcctataatttgaaaggtgatatatgcatgcatacgtttgagtatatgcagagagtatttctggaagaaatgtaataaacagtgactttgtctctttgaaaagagcctggggatatgggtctgaggtgggatttttttttccaggatgtactttgcttataaattttaaaaaaactagttaaaggttttctaggattactcttacctctgagagaggtggtgtagagcaggggacttagggagtctaaggagaaaagaaacagataatccctttgtccttctttcttccaagaaaactcagggcttgtgtatccctggactcctgtggttttggcacctcaggtggactattgtccagtaagctcttctgggctgacctggaactgaactaccatttgtaaactttctacaggggaarcgcaacagtgttgcagagaacatactaaaccaaacggcctccactcattctttctcaat

SEQ ID NO: 158849 - DNA, 572 bp, Homo sapiens
gccaaatgtcccctaggagcaaaaccatcctggttgacaatcaccaatttagagtgattttggatttgctattcgctgtccagaaactggtttctatattgacataattcttcaaatcctggaagcctggaggtgtggcccagctaaagcttctgaaaacttacgcagtgtctttgcgaagaattagaaaaggtaccggatgaattagaaaagggctagatgaggaaggttaggctgagtttcattctctatttctcctctccttttattcctgctgtgtatatgaggctctctaagtcaagggtcttgatgtgttgatagagaacagattcttggagccagtacccaggtagaaggatgaaatgcagacttgatggctttaccattaaatcagctgtagtacagtcacttccaaatagtgtatcagcaaaacatttctcattcatatggatgagsagattgtccttcctaagaatgcactcatttaacaaatgtttattgaggacctactatgtactgggaggaaaaatgcttccctctacctcttcatccctttctttctgcctaaagta

SEQ ID NO: 158850 - DNA, 510 bp, Homo sapiens
atttacagatatttatgtgtgcaccacattatgggtggtgagaagtaggaattcaaagagacaaaatcatactttctctcctcgaaattcttataaagctaccaagaagacaagacatagacacaytaaatataaataaaatacaaaaggatgtaccctgacatgcaaatatgtgttcacagaaacaaagttcttcttaccaaattcctgttgtctaaagcagtttttcctaaagcgcgttcttcagaataccagtttctcagggtgccaatgtgaggaaaagctttggtggtcagatgagttcagggctgggttaggctgatttctttaccagagggcttcttgaagacttaaagaaatctgtattgagatataatttgtatggcataaagttcacccactttaagtaaacaactcgttggcttttactatagagttgtgtagccatcatcacaatgtcactgcagaatgtttccatcaccacccaaaacacctcatgctgtttgcagc

SEQ ID NO: 158851 - DNA, 510 bp, Homo sapiens
atttacagatatttatgtgtgcaccacattatgggtggtgagaagtaggaattcaaagagacaaaatcatactttctctcctcgaaattcttataaagctaccaagaagacaagacatagacacattaaatataaataaaatacaaaaggatgtaccctgacatgcaaatatgtgttcacagaaacaaagttcttcttaccaaattcctgttgtctaaagcagtttttcctaaagcgcgttcttcagaataccagtttctcagggtgccaatgtgaggaaaagctttggtggtcagatgagttcagggctgggttaggctgatttctttaccagagggcttcttgaagacttaaagaaatctgtattgagatataatttgtatggcataaagttcacccactttaagtaaacaactcgttggcttttactatagagttgtgtagccatcaycacaatgtcactgcagaatgtttccatcaccacccaaaacacctcatgctgtttgcagc

SEQ ID NO: 158852 - DNA, 600 bp, Homo sapiens
ctataggtctctgtaataaccagggactaaatggacagcacctmcgtcttgctgacccatatgatcaattgtctccacaggaagaagaacaaggtaacttacccttgctaatgctctgagctgcctttcccactggaatgttcccaggtgttcaggtacagctcccaaaaaactgggctttctggaaagcaggggagggagaggtcctggggaaaggccaagtcagtgaacactttctcttcagtgagggcagcagctactcagtgcatgtctctgccctgcaccatcgatgccactttcctctttgactctttagcagtatgtggggacatcatccttacccagacgccagcctccttgcctcacttccaggagagagaatctgcatctcctgccaagccaccgcccatgtacgtgaagaaatactttgaatctggataaaacttggaaacagatttgaacccctctacctcacatgtctgcctctgcccaggcatcccagcctggttgtgcagcaagggaagtggaatcaactacatcgacatgagaagactagaacctggggagtccagggagcattactcacgcatcactaagagt

SEQ ID NO: 158853 - DNA, 599 bp, Homo sapiens
tataggtctctgtaataaccagggactaaatggacagcacctacgtcttgctgacccatatgatcaattgtctccacaggaagaagaacaaggtaacttaccmttgctaatgctctgagctgcctttcccactggaatgttcccaggtgttcaggtacagctcccaaaaaactgggctttctggaaagcaggggagggagaggtcctggggaaaggccaagtcagtgaacactttctcttcagtgagggcagcagctactcagtgcatgtctctgccctgcaccatcgatgccactttcctctttgactctttagcagtatgtggggacatcatccttacccagacgccagcctccttgcctcacttccaggagagagaatctgcatctcctgccaagccaccgcccatgtacgtgaagaaatactttgaatctggataaaacttggaaacagatttgaacccctctacctcacatgtctgcctctgcccaggcatcccagcctggttgtgcagcaagggaagtggaatcaactacatcgacatgagaagactagaacctggggagtccagggagcattactcacgcatcactaagagt

SEQ ID NO: 158854 - DNA, 599 bp, Homo sapiens
tataggtctctgtaataaccagggactaaatggacagcacctacgtcttgctgacccatatgatcaattgtctccacaggaagaagaacaaggtaacttacccttgctaatgctctgagctgcctttcccacyggaatgttcccaggtgttcaggtacagctcccaaaaaactgggctttctggaaagcaggggagggagaggtcctggggaaaggccaagtcagtgaacactttctcttcagtgagggcagcagctactcagtgcatgtctctgccctgcaccatcgatgccactttcctctttgactctttagcagtatgtggggacatcatccttacccagacgccagcctccttgcctcacttccaggagagagaatctgcatctcctgccaagccaccgcccatgtacgtgaagaaatactttgaatctggataaaacttggaaacagatttgaacccctctacctcacatgtctgcctctgcccaggcatcccagcctggttgtgcagcaagggaagtggaatcaactacatcgacatgagaagactagaacctggggagtccagggagcattactcacgcatcactaagagt

SEQ ID NO: 158855 - DNA, 575 bp, Homo sapiens
cacctacgtcttgctgacccatatgatcaattgtctccacaggaagaagaacaaggtaacttacccttgctaatgctctgagctgcctttcccactggaatgttcccaggtgttyaggtacagctcccaaaaaactgggctttctggaaagcaggggagggagaggtcctggggaaaggccaagtcagtgaacactttctcttcagtgagggcagcagctactcagtgcatgtctctgccctgcaccatcgatgccactttcctctttgactctttagcagtatgtggggacatcatccttacccagacgccagcctccttgcctcacttccaggagagagaatctgcatctcctgccaagccaccgcccatgtacgtgaagaaatactttgaatctggataaaacttggaaacagatttgaacccctctacctcacatgtctgcctctgcccaggcatcccagcctggttgtgcagcaagggaagtggaatcaactacatcgacatgagaagactagaacctggggagtccagggagcattactcacgcatcactaagagtgagcagaccacag

SEQ ID NO: 158856 - DNA, 394 bp, Homo sapiens
gcaggagaatacttcttatgtgtaaaagctcttggataaatcctttaaactctcatastctctgggtatgtgattagctcttgtgttctctggagatgacaaaagtaggggactatttgttcatttgttttcacattaggagaagaaatcagattgataggacacattttgagagggaagagccggctcagagagatgaggatggtagaaaagaaacaaagtgttcagggcaatgcgagatgtgctcctgccctcaaatctgaaagaaagacatttaaattttaaagacttggaggaagttttgctatgtggacaaaactgcagaaaggcctgagtttataattgtggtaatcatggcaaggttcagaggtagcaaggcgcttgctgagaattc

SEQ ID NO: 158857 - DNA, 394 bp, Homo sapiens
gcaggagaatacttcttatgtgtaaaagctcttggataaatcctttaaactctcatagtctctgggtatgtgattagctcttgtgttctctggagatgacaaaagtaggggrctatttgttcatttgttttcacattaggagaagaaatcagattgataggacacattttgagagggaagagccggctcagagagatgaggatggtagaaaagaaacaaagtgttcagggcaatgcgagatgtgctcctgccctcaaatctgaaagaaagacatttaaattttaaagacttggaggaagttttgctatgtggacaaaactgcagaaaggcctgagtttataattgtggtaatcatggcaaggttcagaggtagcaaggcgcttgctgagaattc

SEQ ID NO: 158858 - DNA, 394 bp, Homo sapiens
gcaggagaatacttcttatgtgtaaaagctcttggataaatcctttaaactctcatagtctctgggtatgtgattagctcttgtgttctctggagatgacaaaagtaggggactatttgttcatttgttttcacattaggagaagaaatcagattgataggacacattttgagagggaagagccggctcagrgagatgaggatggtagaaaagaaacaaagtgttcagggcaatgcgagatgtgctcctgccctcaaatctgaaagaaagacatttaaattttaaagacttggaggaagttttgctatgtggacaaaactgcagaaaggcctgagtttataattgtggtaatcatggcaaggttcagaggtagcaaggcgcttgctgagaattc

SEQ ID NO: 158859 - DNA, 394 bp, Homo sapiens
gcaggagaatacttcttatgtgtaaaagctcttggataaatcctttaaactctcatagtctctgggtatgtgattagctcttgtgttctctggagatgacaaaagtaggggactatttgttcatttgttttcacattaggagaagaaatcagattgataggacacattttgagagggaagagccggctcagagagatgaggatggtagaaaagaarcaaagtgttcagggcaatgcgagatgtgctcctgccctcaaatctgaaagaaagacatttaaattttaaagacttggaggaagttttgctatgtggacaaaactgcagaaaggcctgagtttataattgtggtaatcatggcaaggttcagaggtagcaaggcgcttgctgagaattc

SEQ ID NO: 158860 - DNA, 544 bp, Homo sapiens
tgacagagcttacagtaaattttaagccccaattaaactgaatccaaaagccaaggcttttctattaaatagcctgctctttcattaatgtggtgagtaataagcgctaacaaatgttgtactttcttcacaagaaaattacatatttgttttgaagacagagaaatracatgctaattaatgcttacagttacatgttttaaaaagtcctgtcactctcacaggaccgccctacatttggcctgtgcactggccaaccggaaatggtacatctcctggtgtccagaagatgtgagcttaacctctgcgaccgtgaagacaggacacctctgatcaaggtatatagtagctgactctttgagcatgagatggatttggttgaagtacataggataaaatgaatttatctcattggaataccaccatataactagtaggaaatcctacggagtgtttattttgatttttcagtatttgcatgtttctcggtctaatactgacaggctgtacaactgaggcaggaggcttgtgcaactcttctgct

SEQ ID NO: 158861 - DNA, 544 bp, Homo sapiens
tgacagagcttacagtaaattttaagccccaattaaactgaatccaaaagccaaggcttttctattaaatagcctgctctttcattaatgtggtgagtaataagcgctaacaaatgttgtactttcttcacaagaaaattacatatttgttttgaagacagagaaatgacatgctaattaatgcttacagttacatgttttaaaaagtcctgtcactctcacaggaccgccctacatttggcctgtgcactggccaaccggaaatggtacatctcctggtgtccagaagatgtgagcttaacctctgcgaccgtgaagacaggacacctctgatcaaggtayatagtagctgactctttgagcatgagatggatttggttgaagtacataggataaaatgaatttatctcattggaataccaccatataactagtaggaaatcctacggagtgtttattttgatttttcagtatttgcatgtttctcggtctaatactgacaggctgtacaactgaggcaggaggcttgtgcaactcttctgct

SEQ ID NO: 158862 - DNA, 557 bp, Homo sapiens
atctggcatgaaagtcagataattcttgcaaggaatctgcacttttcagaaggcagattcagattttctctttaagtatgaatttgctaggttaagtggcagatcataatatttctggaaagtgataacttttttatttgggactaagaatrgctgcccacctcatctcctgtccaaagcctcctgctctgccctgacagagaagagacaatgaaggttaattttattgctatggacttggctgcagtgcaggagcttccagtttttcagttgttatgaaaggtcgctaacgagacatagacatgaccttcctcccctttatactttttgagtttatggaaattgtgatcatcctagtttagccatttacttgtgcagatctcctaacaccctttgattccaacatttttccagacagaagtttctttctaatcttgacctgtgttttctagtgagaatctctttcttatctgaacataagaatttgtaaactgcttttcactggaatattctcttttttctacagtggaaatttccttccattgtgaagtaaccaa

SEQ ID NO: 158863 - DNA, 557 bp, Homo sapiens
atctggcatgaaagtcagataattcttgcaaggaatctgcacttttcagaaggcagattcagattttctctttaagtatgaatttgctaggttaagtggcagatcataatatttctggaaagtgataacttttttatttgggactaagaatggctgcccacctcatctcctgtccaaagcctcctgctctgccctgacagagaagagacaatgaaggttaattttattgctatggacttggctgcagtgsaggagcttccagtttttcagttgttatgaaaggtcgctaacgagacatagacatgaccttcctcccctttatactttttgagtttatggaaattgtgatcatcctagtttagccatttacttgtgcagatctcctaacaccctttgattccaacatttttccagacagaagtttctttctaatcttgacctgtgttttctagtgagaatctctttcttatctgaacataagaatttgtaaactgcttttcactggaatattctcttttttctacagtggaaatttccttccattgtgaagtaaccaa

SEQ ID NO: 158864 - DNA, 338 bp, Homo sapiens
atgattagcctatttgaatagctaataccaacaaaacatatatctctgatgcccaatagtaacaaagaggggtaatgagtcactgtgggtyatcacaattctagcaatctatcctgcttccagtagttcctggagcagccaaaatctaatcttcttctatgcaaatattccaaatgcatctgaagtgagtcccatcaggtttctgcagcagaaaccccaaaattacataaataacatcttcttttccctccttcttgcctcaatccctcttccttgagtaaaataattaccacatcagaggtctccttagttctctttctacattgtttatggtttat

SEQ ID NO: 158865 - DNA, 338 bp, Homo sapiens
atgattagcctatttgaatagctaataccaacaaaacatatatctctgatgcccaatagtaacaaagaggggtaatgagtcactgtgggttatcacaattctagcamtctatcctgcttccagtagttcctggagcagccaaaatctaatcttcttctatgcaaatattccaaatgcatctgaagtgagtcccatcaggtttctgcagcagaaaccccaaaattacataaataacatcttcttttccctccttcttgcctcaatccctcttccttgagtaaaataattaccacatcagaggtctccttagttctctttctacattgtttatggtttat

SEQ ID NO: 158866 - DNA, 338 bp, Homo sapiens
atgattagcctatttgaatagctaataccaacaaaacatatatctctgatgcccaatagtaacaaagaggggtaatgagtcactgtgggttatcacaattctagcaatctatcctgcttccagtagttcctggagcagccaaaatytaatcttcttctatgcaaatattccaaatgcatctgaagtgagtcccatcaggtttctgcagcagaaaccccaaaattacataaataacatcttcttttccctccttcttgcctcaatccctcttccttgagtaaaataattaccacatcagaggtctccttagttctctttctacattgtttatggtttat

SEQ ID NO: 158867 - DNA, 536 bp, Homo sapiens
  misc_feature (1)...(536): n = A,T,C or G
tgtgtgtgtatctttntctcttctgaaaactgtaaatagaataattctcattacaaatgaaaatatttctgttccatatttatttcctgtctcatggcactctgctcttcttggatctagtaaggatctcagcgtgtcttatttgtacctgcaaaaaattacaccattcttcatttttcatgtcaattactgacatgttttcaagtcttcacaagttatttctgaagatgttggtgcattgaggagaggcagtgtcattggagttaaagaagtttttaaataggttatgttcaataacatttcagaacccatttctctggaaggcatagacatagtggttttatgtgtagttaaacataaaatagctccacaaagtcttacgtatgtgaaagtgttcatatcctggaagattctaatttactactcagtrctgtctgctggagaggaaaataggtaagataggctgctgagcctatgataataactcataatatgatgggaaagcatagagacaaaataagagacgatagatactc

SEQ ID NO: 158868 - DNA, 536 bp, Homo sapiens
  misc_feature (1)...(536): n = A,T,C or G
tgtgtgtgtatctttntctcttctgaaaactgtaaatagaataattctcattacaaatgaaaatatttctgttccatatttatttcctgtctcatggcactctgctcttcttggatctagtaaggatctcagcgtgtcttatttgtacctgcaaaaaattacaccattcttcatttttcatgtcaattactgacatgttttcaagtcttcacaagttatttctgaagatgttggtgcattgaggagaggcagtgtcattggagttaaagaagtttttaaataggttatgttcaataacatttcagaacccatttctctggaaggcatagacatagtggttttatgtgtagttaaacataaaatagctccacaaagtcttacgtatgtgaaagtgttcatatcctggaagattctaatttactactcagtgctgtctgctggagaggaaaataggtaagataggctgctgagcctatgataataactcataatatgatgkgaaagcatagagacaaaataagagacgatagatactc

SEQ ID NO: 158869 - DNA, 564 bp, Homo sapiens
actcagttatctgcatgttaaataatatttcttggtataattaagatatggcttccattttagaaaacatttcagttacctatttctgctgccacttctcccaacctatgaaatatccaatgcagactcacccttaaacccataacaaatagtgacaggcattataatggcacagccagacaataatttgtccttataaattatctaccctaaagactaaactgaaaatccarttgatatctgacacaacttttgttactgaactgcagtaaacctgataacctaaaacaaggtagaaaaggcacggtctcttctccattatctatttctgattcaaagactaatctgtgtcactggaaaatgggagtcttggatcttcagcatgtaagctacttaaagagggcccattgattcttttcaccctagaacactacagggagccccctgaaacactgcaaatgtttgaaagctgagtgtacaaaagtcaaagtacaaatgtatatgttgttagattgttattgggaatattcttcacagaagattaaaacattaaaaattttaaaa

SEQ ID NO: 158870 - DNA, 564 bp, Homo sapiens
actcagttatctgcatgttaaataatatttcttggtataattaagatatggcttccattttagaaaacatttcagttacctatttctgctgccacttctcccaacctatgaaatatccaatgcagactcacccttaaacccataacaaatagtgacaggcattataatggcacagccagacaataatttgtccttataaattatctaccctaaagactaaactgaaaatccagttgatatctgacacaacttttgttactgaactgcagtaaacctgataacctaaaacaaggtagaaaaggcacggtctcttctccattatctatttctgattcaaagactaatctgtgtcactggaaaatgggagtcttrgatcttcagcatgtaagctacttaaagagggcccattgattcttttcaccctagaacactacagggagccccctgaaacactgcaaatgtttgaaagctgagtgtacaaaagtcaaagtacaaatgtatatgttgttagattgttattgggaatattcttcacagaagattaaaacattaaaaattttaaaa

SEQ ID NO: 158871 - DNA, 564 bp, Homo sapiens
actcagttatctgcatgttaaataatatttcttggtataattaagatatggcttccattttagaaaacatttcagttacctatttctgctgccacttctcccaacctatgaaatatccaatgcagactcacccttaaacccataacaaatagtgacaggcattataatggcacagccagacaataatttgtccttataaattatctaccctaaagactaaactgaaaatccagttgatatctgacacaacttttgttactgaactgcagtaaacctgataacctaaaacaaggtagaaaaggcacggtctcttctccattatctatttctgattcaaagactaatctgtgtcactggaaaatgggagtcttggatcttcagcatgtaagctacttaaagagggcccattgattcttttcaccctagaacactacagggarccccctgaaacactgcaaatgtttgaaagctgagtgtacaaaagtcaaagtacaaatgtatatgttgttagattgttattgggaatattcttcacagaagattaaaacattaaaaattttaaaa

SEQ ID NO: 158872 - DNA, 603 bp, Homo sapiens
agatctctcaagctgcttgcatcagtatctcaagtttataaaatattttcggattctatttcacaggaagccattcatcggaattatctgagtctcaagtttgttagttagatttaacagagctaaccctcatcyatgacttatcagcagttatatgtaaaagtaaggctttgtgcttgctttggcagcacaaatactaaaattggaacaatacggagaaaattagcatggtgaagcatttcatattttgcagtcacgggaaggtcatttgactgtttgctggctagctaagtcatagtttgaatcaaaacaaaatgggtggccccttatattagaattgtgatttttcactacaaaaacatttgtgtaaggtgatctataaactgagaatggagataagtaacacatggggtgttgtgtaaatattttgttagtatgtatcttggaaatgagaaaatgtcaacttgcatctacttcatggaacttaaaaaaaatgaaagtagggttttgtcttccatgtcagttggagataacatcactgatggagatgaaccatcattctagcaaacatctgctcattcagttagagtctgtagagaagta

SEQ ID NO: 158873 - DNA, 447 bp, Homo sapiens
tgtttaagagcaaatacctgttggctatagagccaggaccttccagtaagagccaggaaggtgactttccattatgtcaagctgatgtgagatagtttgctgagctatactgccttcacttcatgagtacttcacctgtttttattatttaattagaaaggtactaagaagtttgtagagcttacaaaagagaagtgtataggataattaacatcctgatattgttcaagatactctaataatttagtatatttggtaaatgtttttgataatagtattaaaatattaatttcatttatttttatgcatagcatttttgatctaatttatgaatacgaaagaaagagatatgaagakcttcctataaatagcaatccaggtaagatttctgatagtgaattactcttgatggtactaccatagataaaaaagaataaagatgttttg

SEQ ID NO: 158874 - DNA, 560 bp, Homo sapiens
cctgtaattctggcactacctacttggggattgtgtcagatcccacatkttgagggctcagtaccacaaggctattcccccacagcagttacaagtctgggcctccagaacttctaatcaacttccagttggacttcaagttgggtttcccaggaccccctctttggtttgattaatttactagagtggctcagagaactcatggaaacacatttaccagtttcttataaagaatattaaaggatacagataaagagatgcatagtgcaagatacggggggaaagtaacatgcttccatgtcctcccagggcactcaccctctgggaacatccatgtattctccatatgccttcatgtattggagagcatccaggtagctgaatacagctacctggatgctctccaaatccaatccttttgggattttatgaaagcttcattacataggcatgactgattaattgaacattcagcccctctcacatcccaggaggtgaggggtggggctggaagtcccaaccctctaatcacaccctgatcactatgatgatgagcccca

SEQ ID NO: 158875 - DNA, 446 bp, Homo sapiens
gcgtggttaaaagagcctgaacctgcctctgacccatgggctgccaggctcagatgagttcacataggaatcacagcttagccattacctagtcatccttcattccatcacccgctgctcaaggactggggcgctgtcacacgtgcataccgcacagcttctcaaaggccaacctatcacagtgtcatacagaaagcaggcttgcaacacataagtgttgaattaataaaggtcccrtgaggagaaagtggagcccacaggatagcaagtccaattaagaaaatccagggggcactggacttggaagtgcagaggggcccagcagagaagcttatgaatcaggtcgagaagagagggctgttgtcccctgcttgaaggttgagaaatttagagtggattcagcctagattcaacttctggctgtgagactttggtccatttactga

SEQ ID NO: 158876 - DNA, 531 bp, Homo sapiens
taactatcccatgggaacgtaagaagatgctggagtcttcctttgtagaccataccagtcgactcttagctctcaattcaagcttattaatcatattcttaaaatccttgctctcctaacttatttttccattttaagtaatttcttaaaagccaagaaattatctgccacgactacttatttctggcaaatctctttttatcaatgtcaattcagagtgctttgctgttgtttttatttggttttagctttaaagtccaaggcagatcacttctatggtctgattgaatagctttcttcctttgttagatatttttctttaggaacagaaattataagtacattgaaaccattatgtctcatcaatagctattatatttttcctaatattcttcatttctttaccatttcactttaacttagaagagcttttacagattgactgattcaaytttttgaagtttgattgactttgactttttctaatcccgttttaaattctgtttgttacagacttatttttctcttccc

SEQ ID NO: 158877 - DNA, 546 bp, Homo sapiens
cgactgtaagtcaagagaaaacagtccattaaaaaagagacgttaaccttctacctttcccacatatcccaaattccaaaatgattgtaacaatacgtgttgaagcaaacatttctttttctgtgggtaggaaataaaaagtgaattttaaaactgttcagagttggaggacagcaagttcaatgcatttgcacatgtgccctgcagtcagagaaaatcaaaaaagaagacawatctgaacagaaaaattaaagcaagaaaatgagaccttgaagctcagccctcaagcctgtctatgccttcaaacctcctggtcaaatctaaagaaaaccaaagtcttttcctgagtattacctaccacacttaccctaccacacttaccaaaaaaaaaaaaaaaaaaaaaaaagatgtaaaatggtggttaaggcataatttatagtaataaagacaaatgtatctcaaggaaaacagaaagcataaaagaaaagaaagacagaaacccccaaaacaatgggccactgtggcgagggcttgagtagtgaccct

SEQ ID NO: 158878 - DNA, 361 bp, Homo sapiens
gaactgaaatacttcctattttctgaaaatggaaaccatgtcatataactttttgcctcatttttctctctgtttttttgggatgctcagaaacaaatgcaatgcctattctcaatgtattgtccattctgaggaataygttttcttcttctgtttctgggttcttgctttctaatttgtttgctatactgttaacctttggggctataggccctacatcacagccaagctttttcgaaaatagtgtatttttaaaagtagccatttacagtagcttctagatttatgtaattagtggtgagaagcagtgaagataatgtgccatttctgctcttcttacagggactcctacagggaattc

SEQ ID NO: 158879 - DNA, 581 bp, Homo sapiens
cacggtgcaatcacagcctttaggtgtcattcccaggagggtaggatgagtaactgacaagaaacgtgagaagcttcattttcttagtagagagcagcaggcaaagctatggctctcaatgctaattttctgggtggccacaacagaccagttcccgtgggtcccagcctrtcaggagaatggcttccagagttgaccaacccacagacatccatgggaaatgcatggaaacctgtcaaattaatgaaattgatagatgacacaaaactgggaagaaagaccaatgtactatgtgactgtattcgtttccttggatgttgtaacaaagtaccacaaaggggtagctcaaagcaacggaaatttacgctcccacagttccaggtgacagaagtctgaaatcaaggtgtctgcagggccacctccctctgaaggctctaggggaggatcctttcctgcctcttcctggtgtctgggggctgccaggaatccttggcattccttgtctggcagctccatcactccaatttctgcctctgtcatcacgtggtatcaacacctcctgagtgtctctgtctctgtgt

SEQ ID NO: 158880 - DNA, 482 bp, Homo sapiens
ttattgtttataaaataattgcaatgatagagtttaaacgttaaaatatatctgccatgagaattacaaattatagacttattataagaataaagttttatgtaattgtgggagagactggggaaaaaaaaatctaagggagatttgggagatcagggaaaagtcacaaatcagtcctactaaaataacgatttatgcaaaaaagtcaggagttgcaggggattctgggaagccggtaatgtagagctgccaaataaaatggaaacatcagagaagtamagggaaaatatttggggaaattgttcacattgcataaatcctgcttttaaaggtcttcagcagaacatctgactgtgggcttcagtttcttttcagccacagggctggcagtgagaagagctgaacacagagtaacacaaaatggaaccaactctttttgactgtcacagcattcaatttaatcaccttcaaagagtaatggt

SEQ ID NO: 158881 - DNA, 483 bp, Homo sapiens
gttttacatttgaaaacacatccatattaatgcaaataattctattaaataccatagattactaagattatataacatctttaccaagatcattaaatttaaactattatttgtttatacaatttctacatctaattcttctcatttgcracactctccatctgcagttcataacaaataagtaatatctgcctcttcacgttcctttcatagaacatcatataaatatttggtctacatggcagtcaataagttttatggatcctgcatatgttatagaaagttttttaaaaaatagttttcttataattcccaaaaaaaggttcttgctgtcagttcaaatggaataaatgctaagtaactaattcactaatggaaagaccaactcaaggtcaactattttctgtgctctacctagaaatgttactgtgagtagaagaaaacttctaaataatgactggaggttatttgtcataaataatt

SEQ ID NO: 158882 - DNA, 483 bp, Homo sapiens
gttttacatttgaaaacacatccatattaatgcaaataattctattaaataccatagattactaagattatataacatctttaccaagatcattaaatttaaactattatttgtttatacaatttctacatctaattcttctcatttgcaacactctccatctgcagttcataacaaataagtaatatctgcctcttcacgttcctttcatagaacatcatataaatatttggtctacatggcagtcaataagttttatggatcctgcatatgttatagaaagttttttaaaaaatagttttcttataattccmaaaaaaaggttcttgctgtcagttcaaatggaataaatgctaagtaactaattcactaatggaaagaccaactcaaggtcaactattttctgtgctctacctagaaatgttactgtgagtagaagaaaacttctaaataatgactggaggttatttgtcataaataatt

SEQ ID NO: 158883 - DNA, 483 bp, Homo sapiens
gttttacatttgaaaacacatccatattaatgcaaataattctattaaataccatagattactaagattatataacatctttaccaagatcattaaatttaaactattatttgtttatacaatttctacatctaattcttctcatttgcaacactctccatctgcagttcataacaaataagtaatatctgcctcttcacgttcctttcatagaacatcatataaatatttggtctacatggcagtcaataagttttatggatcctgcatatgttatagaaagttttttaaaaaatagttttcttataattcccaaaaaaaggttcttgctgtcagttcaaatggaataaatgctaagtaactaattcactaatggaaagaccaactcaaggtcaactattttctgtgctctacctagaaatgttactgtgagtagaagaaaamttctaaataatgactggaggttatttgtcataaataatt

SEQ ID NO: 158884 - DNA, 600 bp, Homo sapiens
aactcttgttggctgagaatataatgcatgcaacataaaaagaataaaaatgaactcctctaaaatattttcagaaaagttgtttgaattgaatgatatgatgttaaaaatgatgatccgctctccactggagattagagtgcaagtctgtgtggtgcacaggatatatttaaatgaatgtttgaataagtwtttctgcaaaacctcctctataattatcaagatgcattaagtttgtgctactcccaaacaatttttcgtcctctaaaatgctctagcctttatgagttattaaagatacatatgtaatcagactataaataaaataggttaggatacaatcatgcagcttttcttccacctcgtgtaacattttatcactatggtatgtgtcaagacagaaactgcctgaggaaaaatgacaaatacttcacttcatgattaatctttttgccattataaatgtcttttttaaattaatgttttattttgtatctagaggttgtatttataagaaaccttttgtatttaatcagatcaatttctcattgctctccaaaaatactcaatgcctattcacttattatattttcttctaag

SEQ ID NO: 158885 - DNA, 534 bp, Homo sapiens
ttttatttttattatttcattctttctacttcctctggtttaagtttgctcttctattaccatcttcttaagacggaaatctatatctttggggtctacctttttgtcaatgtatacaattagcatcataaatttctctctgagcaatgcctcagctcctcagctgcatccctgcaagtggaataatgcccttgtattatgagggttaattttactaggccttgaattggtgtgggctattttgtygaagtaataaatgtgcttaaatggtagtcattcctggtcaagagatgaatatactgattagtgtttttttgtaaccatgtgtccaaggtgagctttggggtgctttataactgcttgtcagcattgtttattgataacagtgagactgattatttgtgcctgatcttaggtaaaaccttggaggggtctaccattgaggtgtctatgcagcatgaaaatgcctacatgatcagaaggaaataggttttacactctattttgggctccctggattcaagggtgttccat

SEQ ID NO: 158886 - DNA, 534 bp, Homo sapiens
ttttatttttattatttcattctttctacttcctctggtttaagtttgctcttctattaccatcttcttaagacggaaatctatatctttggggtctacctttttgtcaatgtatacaattagcatcataaatttctctctgagcaatgcctcagctcctcagctgcatccctgcaagtggaataatgcccttgtattatgagggttaattttactaggccttgaattggtgtgggctattttgttgaagtaataaatgtgcttaaatggtagtcattcctggtcaagagatgaatatactgattagtgtttttttgtaaccatgtgtccaaggtgagstttggggtgctttataactgcttgtcagcattgtttattgataacagtgagactgattatttgtgcctgatcttaggtaaaaccttggaggggtctaccattgaggtgtctatgcagcatgaaaatgcctacatgatcagaaggaaataggttttacactctattttgggctccctggattcaagggtgttccat

SEQ ID NO: 158887 - DNA, 360 bp, Homo sapiens
gcttgtctgactgcaaattatccaaaaagccaaaatagatcagctttcaatggccataatgacaaattttttcatgagcacaccaggtttggggcactctgattaatcaaatcagcagaaygtgaggagtaaattcattccatttgtttcttattatatttaattaaggctattatcaatggattccaagaaccagggtaaggctacatgcagtattgactccctcaagctcctggatctagccagctgaacaaatccttaagccatcaaggtctatcttaaaaaatcaggtggctttctccttaagtttctctactgacctttccacttagcctgagatatcaaagtataacagaatac

SEQ ID NO: 158888 - DNA, 562 bp, Homo sapiens
tgtaaaggtatatttgtggtttttaagcatgaatgagaattagtctttgtccttgggtgccaatgggatagaaaagaatgtcttggcaaagtctaatayagtatattaaatgtaatcagtctgtgtagtagatttggttacatcacaatgcctggaacagccagggttataagagcaataactgaaatcaacaataatcaatccactataaacctccagctccagctcctgataacttttttttttttttttgagatggagtttcactcttgttgcccaggctggggtgcaatgatgtaatctaggctcaccacaacctccacctcccaggttcaagcgattctcctgcctcagccttccgagtagctgggattataggcatgcaccaccacgcccagctaattttgtattttttagtagagacggggtttctccatgttgctcaggcaggtcgcgaactcccgacatcaggtgatctgcccgccttggcctcccaaagtgctgggattaaaggcgtgagccaccacacctggtcctgataaccttttacactggccatgat

SEQ ID NO: 158889 - DNA, 478 bp, Homo sapiens
cccaactttattgttttaaagcagtggggaactcttatctacctcttgccatagcaaagttgarcgaaacagcctgagagaaccttcccctatgtagtttgtcttagctctatgctacttaacagcggcacccaatcccctgaaacttcaagccacaatcttttccacacctagagattgacgaatactatccttttggtcacctttcactcagtttttccttctactgaagaatccaaagtgtttactctctacctttttgctgtttctctttctgctccacattaatttagatgtggaaattagtccttctatggtttatcagaagtcaccctaacttgtatgcttttgttagtacatccaggaaagtgagagacttagttagaggttcatggggcaataacacatgtgactcgaatatatgttatttctgtttgtcctttggcatttatgtaaattgaggctatttaaaaattcc

SEQ ID NO: 158890 - DNA, 520 bp, Homo sapiens
gattcaggtctatcggttgaaaaattcttagctatttaacctctctctctctttcctgtatttttgggaactattagtttattattgctacataataaattacagtagcccctgcatccataatttaaatgacctgcaatcaactgtggtctgaaaatattaaggtattttgggagacacagaaagagagagagagagaatcttcacataacttttattacagtattgctataattgttctattttattaatagttattrttaatctcttactgtgactaatttattaattaaactttattataggtatgtatgtataggaaaaaaaggagtagatatagggttcagttctattcatgatttcagacattcagggatcttggaatgtatttcccatggataaggggggattattgtaccacaattttagtggttttgaataacactcatttattagctttcagttctaaggtcagcaatccagacatgccatgcatgactgggtcctctgctccaagtct

SEQ ID NO: 158891 - DNA, 520 bp, Homo sapiens
gattcaggtctatcggttgaaaaattcttagctatttaacctctctctctctttcctgtatttttgggaactattagtttattattgctacataataaattacagtagcccctgcatccataatttaaatgacctgcaatcaactgtggtctgaaaatattaaggtattttgggagacacagaaagagagagagagagaatcttcacataacttttattacagtattgctataattgttctattttattaatagttattgttaatctcttactgtgactaatttattaattaaactttattataggtatgtatgtataggaaaaaaaggagtagatatagggttcagttctattcatgrtttcagacattcagggatcttggaatgtatttcccatggataaggggggattattgtaccacaattttagtggttttgaataacactcatttattagctttcagttctaaggtcagcaatccagacatgccatgcatgactgggtcctctgctccaagtct

SEQ ID NO: 158892 - DNA, 520 bp, Homo sapiens
gattcaggtctatcggttgaaaaattcttagctatttaacctctctctctctttcctgtatttttgggaactattagtttattattgctacataataaattacagtagcccctgcatccataatttaaatgacctgcaatcaactgtggtctgaaaatattaaggtattttgggagacacagaaagagagagagagagaatcttcacataacttttattacagtattgctataattgttctattttattaatagttattgttaatctcttactgtgactaatttattaattaaactttattataggtatgtatgtataggaaaaaaaggagtagatatagggttcagttctattcatgatttcagacattcagggatcttggaatgtatttcccatggataaggggggattattgtaccacaattttagtggttttgartaacactcatttattagctttcagttctaaggtcagcaatccagacatgccatgcatgactgggtcctctgctccaagtct

SEQ ID NO: 158893 - DNA, 565 bp, Homo sapiens
tataaattaaattcttagagaccttcaaagagccttagacccccaccaattaatagtggaagacttcaacacctcaccgaaagtgttagaaaggttgtcaaggcagaaaattaacaaagatgttcaggacctgaactcaatgctagaccaaatagacctgagaggcatcaacagacctcttcaccaaaaaaacaacagaatatacattcttctcattgccacatggcacatactctaaaatcaaccacaaaatcagatatataacaatcctcagaaaatgtaaaagaactgaaatcataccaaccactctcttggacsccagcacaataaaaatagaaatcaagactaattaaattgctcagaaccatacaattaagtggaaattaaatgacccaccctgaatgacttttgggtaagtaatgaaattaagacagaatgagaacagagatacaaaacaccagaatctctgggatatagctaaggcagtatgaagagggaaatgtatagcaccacatgctcacatcaaaaagttagaaaaaccccaatttaaaaactaacatcacaa

SEQ ID NO: 158894 - DNA, 226 bp, Homo sapiens
gaaaacattaaggagggagaaactcattttgcctgggaatataaggtgagatttgacaaagagtttttttataatagagaagagagacaatgacattttaaatagatagattagcatctaccaaaatacaggactataaaattacctaatgtgtccaggaaagaccaagtggctggaatgtggaggasagagggataaaattctaagaaaatgggataggaaaatt

SEQ ID NO: 158895 - DNA, 471 bp, Homo sapiens
caagaaccagttaaatactaccaataagaaacacattttaggccaggcacagtggctcatacctgcaattccagcactttgggaggctgaggcgggtggattgcttaaggtcaggagtttgagaccagcctggccaacatggtgaaaccttgtctctactaaaaatacaaaaattagccagggtggtggcacatgcccgtaatcccaggtactcaggagtctgaggcaggaaaattgcatgaacccyggaggctgaggttgcaatgagccaatatggcaccactgcactccagctggatgacagagccagactccattacaaaacaacaacaacaacaacaacacattttacatataaaggttaatagactaaaagtaaaagaaagtgggaaatcatgcttacactaaaaatggcctagaaatttgatagttagatgaaatggacaaatttcttataaaaaaatcacaaag

SEQ ID NO: 158896 - DNA, 471 bp, Homo sapiens
caagaaccagttaaatactaccaataagaaacacattttaggccaggcacagtggctcatacctgcaattccagcactttgggaggctgaggcgggtggattgcttaaggtcaggagtttgagaccagcctggccaacatggtgaaaccttgtctctactaaaaatacaaaaattagccagggtggtggcacatgcccgtaatcccaggtactcaggagtctgaggcaggaaaattgcatgaaccctggaggctgaggttgcaatgagccaayatggcaccactgcactccagctggatgacagagccagactccattacaaaacaacaacaacaacaacaacacattttacatataaaggttaatagactaaaagtaaaagaaagtgggaaatcatgcttacactaaaaatggcctagaaatttgatagttagatgaaatggacaaatttcttataaaaaaatcacaaag

SEQ ID NO: 158897 - DNA, 445 bp, Homo sapiens
aagaaccagttaaatactaccaataagaaacacattttaggccaggcacagtggctcatacctgcaattccagcactttgggaggctgaggcgggtggattgcttaaggtcaggagtttgagaccagcctggccaacatggtgaaaccttgtctctactaaaaatacaaaaattagccagggtggtggcacatgcccgtaatcccaggtactcaggagtctgaggcaggaaaattgcatgaaccctggaggctgaggttgcaatgagccaatatggcaccactgcactccagctggatgacagagccagactccattacaaaacaacaacaacaacaamaacacattttacatataaaggttaatagactaaaagtaaaagaaagtgggaaatcatgcttacactaaaaatggcctagaaatttgatagttagatgaaatggaca

SEQ ID NO: 158898 - DNA, 615 bp, Homo sapiens
agatctgctgtattcttgcaaatttcatcaaattatacccataaaattggtgagctttgtgtgtaaattacacctaaataaaacagatttttaaaaatctgtttgaatttagtaaaaaggcaaactaggcaccatatatttcaaaaggtcttaatgcattatctcaatatctacactattgatgccttgccatttgctggctttgtgacatcgggcaaattattccacttctcttaatttccttttctgtaaaatggagaaaatagcagctgtggtatagraccgtggtgtgacaattaagtgagttaattcattaatatgcgtggcagaatgtctggcacataagaaggactccattcagttattcatacactcttaaattcatgatctactacatggaaattgttttaccaaggccttggtatacagtggaggataaaatagataacatccttgcacttatggagctctatatcctagcttgggggaaaactattcatagtaaaaatgaaagtacctgaagataactgtatctgctaggcaagcaatcaaaacaggtgcacatggtagagagagaccagatggtttctttagttggagtggtaaggaaaggtc

SEQ ID NO: 158899 - DNA, 615 bp, Homo sapiens
agatctgctgtattcttgcaaatttcatcaaattatacccataaaattggtgagctttgtgtgtaaattacacctaaataaaacagatttttaaaaatctgtttgaatttagtaaaaaggcaaactaggcaccatatatttcaaaaggtcttaatgcattatctcaatatctacactattgatgccttgccatttgctggctttgtgacatcgggcaaattattccacttctcttaatttccttttctgtaaaatggagaaaatagcagctgtggtataggaccgtggtgtgacaattaagtgagttaattcattaatatgcgtggcagaatgtctggcacataagaaggactccattcagttattcatacactcttaaattcatgatctactacatggaaattgttttaccaaggccttggtatacagtggaggataaaatagataacatccttgcacttatggagctctatatcctagcttgggggaaaactattcatagtaaaaatgaaagtacctgaagataactgtrtctgctaggcaagcaatcaaaacaggtgcacatggtagagagagaccagatggtttctttagttggagtggtaaggaaaggtc

SEQ ID NO: 158900 - DNA, 524 bp, Homo sapiens
tattaccttgtggtttgccccttatatgtcaattttgttgagagtttttattacaaattgatgctggattttgtcaaatgcattttctgcatctattgaggtaattgtataatttttgtttttaattctatttatgtgatgcatcacatttattgacttgagcatgttaaaccatccctgcattcttgatatgaaacccacttgatcatgatgtgtyatctttttgatatgctattgaattcggttagctagcatttttttgaggatttctgcatctatgttcatcagggatattggtctgtagttttcttttttgttatgtcctttcctggttttagtattatggtgatactggcttcacagaatgatttagggagaattgcctctttctctctcttttggaataatttcaataggattggtatcaattcttctttgaatgtctgacagaatttagctgtgaattaatctggtcctagacatttttttgtgggcaatttttctatcactgtttcaatctcact

SEQ ID NO: 158901 - DNA, 588 bp, Homo sapiens
gatattatttcaatttttctgaatgttttaaaacttgttttgtaacctaacatatgatctatacttgagaaagatccatatactgaataaaagaatgtgtattcagcagctcttggatgaaatgttgtgtaaatatctgttagatccatatggtctatagtgcagattaagtctgacatttctttcttgatattctgtttggaggatctgtccaatgctgaatgtagggtgttgaagtctccagctattatggtatcagggtctatctctctccatagctctaataatacttgctttatatatctgggtgctccartttttggtacatatatatttaaaattgttgtatcttctttctgaattgatcactttattgttatatagtgaccttctttgtctcttcttagagcttttgtcttgaaatctgttttgtctaggtataatgactcctactctttttcagtttccattggcatgggatatgtcttaccatccttttattttcagtctatgtgtttctttatagatgaagtgtgtttcttgtagacaacagatctacgagtcttgtttttttatacaatcagccag

SEQ ID NO: 158902 - DNA, 588 bp, Homo sapiens
gatattatttcaatttttctgaatgttttaaaacttgttttgtaacctaacatatgatctatacttgagaaagatccatatactgaataaaagaatgtgtattcagcagctcttggatgaaatgttgtgtaaatatctgttagatccatatggtctatagtgcagattaagtctgacatttctttcttgatattctgtttggaggatctgtccaatgctgaatgtagggtgttgaagtctccagctattatggtatcagggtctatctctctccatagctctaataatacttgctttatatatctgggtgctccaattttkggtacatatatatttaaaattgttgtatcttctttctgaattgatcactttattgttatatagtgaccttctttgtctcttcttagagcttttgtcttgaaatctgttttgtctaggtataatgactcctactctttttcagtttccattggcatgggatatgtcttaccatccttttattttcagtctatgtgtttctttatagatgaagtgtgtttcttgtagacaacagatctacgagtcttgtttttttatacaatcagccag

SEQ ID NO: 158903 - DNA, 422 bp, Homo sapiens
ttcaatttttccctcaactaagttttccaaacatttagatttctctttttccccagcccagagcctggtagccccgctgggtggttagacctagaagagtaataaacaatcactgcagtctggctcttaggaagcttaatccctagggaaggtggagagtaccacatcaagggatcacaccatgggataaaagaatctgaacagcaggccatgagtttcagacctttccaattttgagtagtttttcacagcatagacacrattgcagtgttgggtgcagtagggaaagtccacacttataccccaacaggcaggcgtctctgatcatgaaggctcttggagagggggttcttgtttcccctggcactccagagcagacacagctggggcttcccccataggaatttagtgtggaggcacct

SEQ ID NO: 158904 - DNA, 651 bp, Homo sapiens
tttgttgcagctatgcccactatgtgtgattaagaggcattaggatagaaatcagggaacttttctctttgctatttcatttcatttatacgctataaataaataaataaataaataaataaataaataattgtcaaagcacttctttcctgtcttcgattcaggcaaatcagctttgcttatccaatccatgctgccgctattgcgcagaacctgtttgttctggtcattcccatctaaatcctcttcatttcctttacttcattcaacatttcttttgttggattccatgttgtggtttrtgagattcatggctcagctcatttatattattcagatagtgtgaataagagaattcaattttcgtcagggatcccctcattactgtagctggcctttaaaacctcttttatcgtttttagtggaacttggccagtggcaatacgatctcacaggtttggaactattttttttaacatcacctgcctccttcatgggaaacacagcattgatcccaaaggactcacagctaggatgtattcttgaatatttggaacagtttaaactaaataggcttaagaagagaaaactggtgtttctatgtaatactgtttagtctcagtattatttggaaaaacaagagaaatgacc

SEQ ID NO: 158905 - DNA, 550 bp, Homo sapiens
aaaactggtgtttctatgtaatactgtttagtctcagtattatttggaaaaacaagagaaatgacctactggaactacagcctttaatactattcttaaacttgattcgttttgtaagtgggagagaaaatgggataaaataccatatgttcaagcatttttgttgctcaatcaggataaaacctggcagcagacatgtgcatgtttgatgaaaggaaaggaagaaaaaaaactagacatattagatgatcccttggtgcaatcacccgccgttcaatgtgcatttttcagtggagcagaacctccttctgtcagctttgaaggttcagatgtgttggtcctttctccctctagtccacctgaaagttctattgagaaacttttatcccctcctcacttgtctaattccgctctatacccaccactccctgagaaacctagccttgtgagtactacttatagtagagcctcwtatcaacctccaggaggagatctttgtccacttagagaggtggtaaatgaggaaaaaggcactgtaagaatacatgtc

SEQ ID NO: 158906 - DNA, 550 bp, Homo sapiens
tttagtaaatgaaactaataaactggctttaggacaacatctggaggttttaaccccacaccaagtacaagggtccaagtttaagtcatccacatattggataagagtgccttatttaactgtaacattcttaattctctatccaatgcatttccaaacagaagctaaaggacaccagtggatgacagggggatgcttactgaaatatcargctttgctgctagacactcctgatgtaactcttaaagtatgccagactttgaatccagctgccttttagcctgaacacacaggtaccctagatcattcttgtatacaagtcatggagcaagtttactgcagccagccaggtttaaaggatgagcctctagataatcctgaggtagaatggtttacgatagaagtagctttgttcaccagggaaacaggaaagctgggcatgctgttgtcagttaacacaaggtatttgaatctcaggccttaccagcttcaaccttggtttaaaaggctgaattaatagctcttagtagagccctggaatagggaaagg

SEQ ID NO: 158907 - DNA, 645 bp, Homo sapiens
gttcactcacttttggctgaaagtatcattgctgctgtggagatttttgtctgagactatgtagaggtttccctcaggcagcacagctggtcctctggatctgaggtcatctgaatctggggctactataaacatgccagtgtatttgcattttcagttatttttctcaatgtcttgataaataacagatatacatttgcaaactcatttttcagtcgttgaaaattttacaattaaagatatttgaagacatactaacttcacagaatcagtatttggtatctctgttttaagtacttyctcctaagtttttcacataaaagccaataaaagtattgagatgtcgtttaaatagcaacatgtacaacattctaaacagaagcaaaactactaattgtttcatacctagagggatatggattgtttttgaaaactcacattgtttccagtgattaacaatcctatttataaataaattattagctaattttaagtgatatgttttgaatgatgagtcgtcattcatatatattatctgtgtgtgcattacatgtttaagagaatagtgttttcacaaagaatttacaatcattgcatttttcatagggactattcctggaccatcaatctttaaaatgtcaggag

SEQ ID NO: 158908 - DNA, 542 bp, Homo sapiens
aacttctgtcattttatgatttcttttccatatgtgttatagcttttttgtctctcatttcctgcattattattctsttttgtgtttagcttttttttgtagtgaaacatttaaattcctttatttatctatttatctatgtatcatctatctatctattgctgtttcctttgtgtttaccatggaaatagcacttaaaatcctaaagttacaacactctaatttgaagttataccagcttaacatcaataatatacaaaaactttgctcctttaatgaattcatctcctacctttgtggttgttggtgtcacaaaattacatctttatacattgtgtactccaaaacataaactaataattctttctaaatttattagtctctaaaattatgtagaaaacaaaatgtaaagttacaaatcaaagttacaataataataatttttagattaatagttgtttttaaaaatgtatgtctgttaaatctagtagaaaacaaaaggaggaggtttaaactgttgttacaataacactagatttaaa

SEQ ID NO: 158909 - DNA, 577 bp, Homo sapiens
aaaacacaaaaaattagccgggcgtagtggcaggcacctgttgtcccagctactcgggaggctgaggcaggagaatggcgtgaacctggaaggcggagcttgcaatgagctgagatggcrccactgcactccaagcctggagacagagcgagactccatctcaaaaaaagacggaaaaaaagaagtgagacatcattcagagtaagtcttaattacttcaaagacccagatattcaacttacttctgtctccttattgtgtattcatctaggtctattttagctagtgactattttcttcatatttacttctctttctcaatggccctttgtacttttatttttgctatgtcagtatatcaaagttgtgttgtttgagtttcccactcttcctcttattcatactttcccccaaaagaggaactgactagattagttagtcactcttcaacaaggtgtccttactggacattgttctcaaattaggacatttcccaggtttaggggtaatctaaaaattgctttattaagctcaagtgctgatgccaaaaactgtaacagttttggctaaaacattt

SEQ ID NO: 158910 - DNA, 577 bp, Homo sapiens
aaaacacaaaaaattagccgggcgtagtggcaggcacctgttgtcccagctactcgggaggctgaggcaggagaatggcgtgaacctggaaggcggagcttgcaatgagctgagatggcaccactgcactccaagcctggagacagagcgagactccatctcaaaaaaagacggaaaaaaagaagtgagacatcattcagagtaagtcttaattacttcaaagacccagatattcaacttacttctgtctccttattgtgtattcatctaggtctattttagctagtgactattttcwtcatatttacttctctttctcaatggccctttgtacttttatttttgctatgtcagtatatcaaagttgtgttgtttgagtttcccactcttcctcttattcatactttcccccaaaagaggaactgactagattagttagtcactcttcaacaaggtgtccttactggacattgttctcaaattaggacatttcccaggtttaggggtaatctaaaaattgctttattaagctcaagtgctgatgccaaaaactgtaacagttttggctaaaacattt

SEQ ID NO: 158911 - DNA, 393 bp, Homo sapiens
atttctttatgaatgctgaattgtttagctactgagaaagtgtattcgttttcttacttttatgtttaaccttaygataaattgcatcagtggaattaacagcgtctgttccttttaatctgaaagagcttaaacacattccagattcagaaatctggaataggagctgcgatctgtgttttataccatgtagataattcaaggcacgctaaagtttgcaaacaacaaatctcgtaatcccgtgcaatcctttaattttataaattaagaaattaatgtttatttttactggacacttgttatgtgccagaagttgtattaaaccattacatgtattcaattatcataaccactcaaaaaaatagacattattgtttctcgtttacagatagt

SEQ ID NO: 158912 - DNA, 393 bp, Homo sapiens
atttctttatgaatgctgaattgtttagctactgagaaagtgtattcgttttcttacttttatgtttaaccttatgataaattgcatcagtggaattaacagcgtctgttccttttaatctgaaagagcttaaacacattccagattcagaaatctggaataggagctgcgatctgtgttttataccatgtagataattcaaggcacgctaaagtttgcaaacaacaaatctcrtaatcccgtgcaatcctttaattttataaattaagaaattaatgtttatttttactggacacttgttatgtgccagaagttgtattaaaccattacatgtattcaattatcataaccactcaaaaaaatagacattattgtttctcgtttacagatagt

SEQ ID NO: 158913 - DNA, 549 bp, Homo sapiens
acatgcacaggggtgtttaatgtagtgtagtttgtgatggtagagagttgaaggcaagacaagtatttaatattatgggaatgaataaatatggcagaatcacactatgtaaaatyagatagcactgagaatttgaactagttgagtttgcagactatgatcatacctaacagggatgtttagggccagaaaaagaaaatttaaataaattagaaatatgtaaacataaaatagcactaaatatattttcagtgagatacgcataaccaaggaaatacagaaactaatttgaaagttaatattttactatctttttaattactctgtgtagtatattagataataataaaccatcacatcttagccttctaaataagttccacaagtttaccaaaatgcaaaatttaaataacttaattatttgtataggtagatttccaggagtaaaatataaaacattttctgcagtcctactggtttttcttgagtattgcttaaattttctttgtttgtgttttagttgaataaaaaagacttgcttaaaaaaat

SEQ ID NO: 158914 - DNA, 549 bp, Homo sapiens
acatgcacaggggtgtttaatgtagtgtagtttgtgatggtagagagttgaaggcaagacaagtatttaatattatgggaatgaataaatatggcagaatcacactatgtaaaatcagatagcactgagaatttgaactagttgagtttgcagactatgatcayacctaacagggatgtttagggccagaaaaagaaaatttaaataaattagaaatatgtaaacataaaatagcactaaatatattttcagtgagatacgcataaccaaggaaatacagaaactaatttgaaagttaatattttactatctttttaattactctgtgtagtatattagataataataaaccatcacatcttagccttctaaataagttccacaagtttaccaaaatgcaaaatttaaataacttaattatttgtataggtagatttccaggagtaaaatataaaacattttctgcagtcctactggtttttcttgagtattgcttaaattttctttgtttgtgttttagttgaataaaaaagacttgcttaaaaaaat

SEQ ID NO: 158915 - DNA, 549 bp, Homo sapiens
acatgcacaggggtgtttaatgtagtgtagtttgtgatggtagagagttgaaggcaagacaagtatttaatattatgggaatgaataaatatggcagaatcacactatgtaaaatcagatagcactgagaatttgaactagttgagtttgcagactatgatcatacctaacagggatgtttagggccagaaaaagaaaatttaaataaattagaaatatrtaaacataaaatagcactaaatatattttcagtgagatacgcataaccaaggaaatacagaaactaatttgaaagttaatattttactatctttttaattactctgtgtagtatattagataataataaaccatcacatcttagccttctaaataagttccacaagtttaccaaaatgcaaaatttaaataacttaattatttgtataggtagatttccaggagtaaaatataaaacattttctgcagtcctactggtttttcttgagtattgcttaaattttctttgtttgtgttttagttgaataaaaaagacttgcttaaaaaaat

SEQ ID NO: 158916 - DNA, 549 bp, Homo sapiens
acatgcacaggggtgtttaatgtagtgtagtttgtgatggtagagagttgaaggcaagacaagtatttaatattatgggaatgaataaatatggcagaatcacactatgtaaaatcagatagcactgagaatttgaactagttgagtttgcagactatgatcatacctaacagggatgtttagggccagaaaaagaaaatttaaataaattagaaatatgtaaacataaaatagcactaaatatattttcagtgagatacgcataaccaaggaaatacagaaactaatttgaaagttaatattttactatctttttaattactctgtgtagtatattagataataataaaccatcacatcttagccttctaaataagttccacaagtttaccaaaatgcaaaatttaaataacttaattatttrtataggtagatttccaggagtaaaatataaaacattttctgcagtcctactggtttttcttgagtattgcttaaattttctttgtttgtgttttagttgaataaaaaagacttgcttaaaaaaat

SEQ ID NO: 158917 - DNA, 463 bp, Homo sapiens
aagggctaatcaactggctgggggttacatagttagtaagtgatagcttgaactctgctttgttgtgkcaaatgccacaacctcttactctctgcctccagcatcctgcctccatcattttggctgtagacatcccctgcaaattaccctgtatctacacacacacacagacacacacagacacatatgcacacaccatctaacctgtcaaacaagtccagtggttatcagttatcacaggcaatcttaaagggagtgaattcgtaagaaagcaatcagcagtctgaatgggggttgcttggtgtagcggcccctccctcagccctggtggcagtgggcgatgaaaatgggtgcttaggtgtgactgcaagtgcatgagcctgaggtcttttacaactagctgcgtgagacaccttttctggcaccatctgtttactgacactgctcagccttgcgggcccag

SEQ ID NO: 158918 - DNA, 463 bp, Homo sapiens
aagggctaatcaactggctgggggttacatagttagtaagtgatagcttgaactctgctttgttgtggcaaatgccacaacctcttactctctgcctccagcatcctgcctccatcattttggctgtagacatcccctgcaaattaccctgtatctacacacacacacagacacacacagacacatatgcacacaccatctaacctgtcaaacaagtccagtggttatcagttatcacaggcaatcttaaagggagtgaattcgtaagaaarcaatcagcagtctgaatgggggttgcttggtgtagcggcccctccctcagccctggtggcagtgggcgatgaaaatgggtgcttaggtgtgactgcaagtgcatgagcctgaggtcttttacaactagctgcgtgagacaccttttctggcaccatctgtttactgacactgctcagccttgcgggcccag

SEQ ID NO: 158919 - DNA, 372 bp, Homo sapiens
gaagtatcacaaagtaaaaaaaaaaaaaaaawttacaaatcactaaaacaaaaacatataagccaagagtgcagcaaatgaatgttttaaggttctgtattgtccaggaagagtaaaggcattactaattaggtgtatactttgatatgtcgatcatgtaaattttaacacccactaaataaaaaagggaatgatgcattacttccaagagaataaatagcaaaagataataacataaaaactattccaaaagaaatttaaaaaggagaaagtacacacaacaataggacaaagagaaaggataaaagaagagattaaaatgaactagtaaaaacattaaaatgtaaatggattaaattatccaagtaaaaa

SEQ ID NO: 158920 - DNA, 528 bp, Homo sapiens
ttcctacttgtgtctaatcataggtgtaaaatctcgttgttacaatgaattgctattgaatctacctgtccatgtggtttgatcagtctgatgaaacctagctcgcatgggcgcatgatatcctatgattagtcattccatctttaccagggaccagaagcattataaaagcaagatctggagaaagtgaagtatcacaaagtaaaaaaaaaaaaaaaaattacaaatcactaaaacaawaacatataagccaagagtgcagcaaatgaatgttttaaggttctgtattgtccaggaagagtaaaggcattactaattaggtgtatactttgatatgtcgatcatgtaaattttaacacccactaaataaaaaagggaatgatgcattacttccaagagaataaatagcaaaagataataacataaaaactattccaaaagaaatttaaaaaggagaaagtacacacaacaataggacaaagagaaaggataaaagaagagattaaaatgaactagtaaaaacattaa

SEQ ID NO: 158921 - DNA, 528 bp, Homo sapiens
ttcctacttgtgtctaatcataggtgtaaaatctcgttgttacaatgaattgctattgaatctacctgtccatgtggtttgatcagtctgatgaaacctagctcgcatgggcgcatgatatcctatgattagtcattccatctttaccagggaccagaagcattataaaagcaagatctggagaaagtgaagtatcacaaagtaaaaaaaaaaaaaaaaattacaaatcactaaaacaaaaacatataagccaagagtgcagcaaatgaatgttttaagrttctgtattgtccaggaagagtaaaggcattactaattaggtgtatactttgatatgtcgatcatgtaaattttaacacccactaaataaaaaagggaatgatgcattacttccaagagaataaatagcaaaagataataacataaaaactattccaaaagaaatttaaaaaggagaaagtacacacaacaataggacaaagagaaaggataaaagaagagattaaaatgaactagtaaaaacattaa

SEQ ID NO: 158922 - DNA, 530 bp, Homo sapiens
tagaacatatgacttaattgtcacttggagagttcatgtatgtttcatagcttgatttcacattaaacttaattttactaattttctatttgtgcagcattttccacctctgtgaaggagccttttttgctggcccccaaactttggggcggtgggaacccaagggcaaccttttctttccaatatcatgtatcacacataagtggggggcattttggtccacttgctcattaattctgcatatgtgttcttgtttctctctcttctctccttgttgtgctctctctttcaaatagagaatcaaaaggatgcaggtgaaccaattgtatatgcattataaattatcaggactgttgagttayattcagtttttgtttttgtttttcaatggctccttaaggtttgtactcccagagagccatgtggagttgcaataatacttaaggagttaatttgtgctgtctaaatacatctcatgcccatttgatgttgacctttatagagcagaatttctgaaaaggcataagctt

SEQ ID NO: 158923 - DNA, 476 bp, Homo sapiens
taatttatcctgcagggtatatgtcccattttaaaaaaagcacacggttgtcaaatacatttaggaaaatccgggttaaacagagttacacaaaattctaggtcagtggggtaggtattgtttcctaaacatacttggccataaaggttttttttaaaaaggtgcatctaaaaggcctagaccaggcaatggcaaactatggacctgttttgttaacaaagtttcattggaacacagctacactcgttcatttacatactgtctatgactgctttcatgstacaatgacagagttgagttgtgacagagattatgtggctccaaaagcctaagtatatagtatatggccttttatagaaaaagtttgctgacctccctgcctagaaccccaccgaacacactttgggaaacactgaatcctagagataacaccattggagtaagacataccacacaaatatcacagccgagtttat

SEQ ID NO: 158924 - DNA, 476 bp, Homo sapiens
taatttatcctgcagggtatatgtcccattttaaaaaaagcacacggttgtcaaatacatttaggaaaatccgggttaaacagagttacacaaaattctaggtcagtggggtaggtattgtttcctaaacatacttggccataaaggttttttttaaaaaggtgcatctaaaaggcctagaccaggcaatggcaaactatggacctgttttgttaacaaagtttcattggaacacagctacactcgttcatttacatactgtctatgactgctttcatgctacaatgacagagttgagttgtgacagagattatgtggctccaaaagcmtaagtatatagtatatggccttttatagaaaaagtttgctgacctccctgcctagaaccccaccgaacacactttgggaaacactgaatcctagagataacaccattggagtaagacataccacacaaatatcacagccgagtttat

SEQ ID NO: 158925 - DNA, 538 bp, Homo sapiens
caaaaactaactctgggtaatctaagcaaaggagagtttattaggatgatgctgggggcctcaaagacggggaaaggaatgctggaatcaagtgagctatggaagagtagaaagcaggactgacacagtggttcttactgtatgttagagtaacacgggaaaccttaaaaatgccagtgtcaggctgggtccagtggctcatgcctgtaatgccagcattttgcaaggctgaggtgggaggatcccttgagcccaggagttagagaccagcctgggcaacataatgagaccttgtgtctgaagaaaattaaaacaaaattaraagatatggtggcatgcttctgcagtcccagcctctcaggaggctgcagtaggaggatcgcttgagcttgagatgtcaatgctgcagtgaacagagattgcgccactgcactccaccttaggctgaatgagaccctgtctcaatagttagatagatagatagatagatagatagatagatagatagatagatagatagatagagctttgaggatgc

SEQ ID NO: 158926 - DNA, 538 bp, Homo sapiens
caaaaactaactctgggtaatctaagcaaaggagagtttattaggatgatgctgggggcctcaaagacggggaaaggaatgctggaatcaagtgagctatggaagagtagaaagcaggactgacacagtggttcttactgtatgttagagtaacacgggaaaccttaaaaatgccagtgtcaggctgggtccagtggctcatgcctgtaatgccagcattttgcaaggctgaggtgggaggatcccttgagcccaggagttagagaccagcctgggcaacataatgagaccttgtgtctgaagaaaattaaaacaaaattaamagatatggtggcatgcttctgcagtcccagcctctcaggaggctgcagtaggaggatcgcttgagcttgagatgtcaatgctgcagtgaacagagattgcgccactgcactccaccttaggctgaatgagaccctgtctcaatagttagatagatagatagatagatagatagatagatagatagatagatagatagatagagctttgaggatgc

SEQ ID NO: 158927 - DNA, 515 bp, Homo sapiens
gcatgtgcactatttcccctaagatattcttttggacctgtatcctcccttcaccacccatatctggaggcccagctgactgctgcctgcccacttcagaccacgggcaggtacccsacagtttccaggttgccatagggagcaatggcagaggcagggtagtggagtggccagtggggcgggcactggctttggagccagtcagttctgtgtttgattgtttaacacttattagctgtatggccttgggaagcttgcttaaccagtaggagcctcaacttccttcttctaagttggaaataggaagaccgtcttgtgtgggtggtagtgaggatgaacgaagttgatgaaatatctagtccaggggttggcattcaatgtgttgtttccctttccaaacttgcctaagatctcttccttctcatgtctcaacccaacatagttccttccagatatttgtgggtacttatccaccaaggtctttgccagcctatttggtacctctctgtgaattc

SEQ ID NO: 158928 - DNA, 534 bp, Homo sapiens
agaattcgatttctccgcacatctaagttctgagactataaaagttttctgggcatgtgcactatttcccctaagatattcttttggacctgtatcctcccttcaccacccatatctggaggcccagctgactgctgcctgcccacttcagaccacgggcaggtacccgacagtttccaggttgccatagggagcaatggcagaggcagggtagtggagtggccagtggggcgggcactggctttggagccagtcagttctgtgtttgattgtttaacacttattagctgtatggccttgggaagcttgcttaaccagtaggagcctcaacttccttcttctaagttggaaataggaagaccgtcttgtgtgggtggtagtgaggatgaacgaagttgatgaaatrtctagtccaggggttggcattcaatgtgttgtttccctttccaaacttgcctaagatctcttccttctcatgtctcaacccaacatagttccttccagatatttgtgggtacttatccaccaaggtct

SEQ ID NO: 158929 - DNA, 443 bp, Homo sapiens
agattaaaaaaaaaacaaaaaaaaaacagcccaaaacctgaggtgccgaaaagctaaaacagatatcaatcaatcacatcactagatgctggatgtagagtccaagtttctggacctaccatctaatgctctttctacgcacccttgcatttgtttatttccttctgactcggccagtttcaaaagagaagaataaaagatagcaaggagcaaatagcagcgaagataacgggataaatccaccaagaaatagcsggggaaaggtaaagagaaatcccacctgccccccatctgatctgtttcactgcagttcttcttatgctccaccttaaaatgtaaagaaacggatgctaagagcaagggctgctgatgccaagaataactccggaggagacacaatacaccaccccagtctccagtgaaatgaactgtttaatcaaaac

SEQ ID NO: 158930 - DNA, 462 bp, Homo sapiens
tcatcacttgaacctaatggaatttgcgtttttttttttttttgacatgactctaagaattcagtcagtgtgacaaatcccatatcctccattgtctatgctatgtttcaaaaaaaggtaaggtgttctcaaatctggtaaactaatttattactttgaaaaaacaaaacaaacctcttaacaactagaaagtaygtgtaagcgtgtatgtatgtatgtgtgttttatcagaatgaaattattttcctgttaccaattaatgatccatacaagttttagtttaaactaacttttcctgattatttttgaatgaatcactgaaatacttatgtaggtaaattgaaattccttagtctttgatcttcttaagcttaattgcaatcttcatggcaaatttgcgtattcttggtaaatgcatttatttcatttatgatttaaatttgtgcttattaaaataacagc

SEQ ID NO: 158931 - DNA, 571 bp, Homo sapiens
tttaaagcctgtctttgggttcccattgctctcaaaatgaagaccaaagtcattaacgaggttcataagttcctgcagtatttttttttatcttttttcaacaccaacatactttcatttgccctggcgtcctttgcactctggtcacgtggcttttattcaatatttggacttccaccaaagggatttccaccattttgatcatacattctgaaatgctatctccactcactctcagattcccaacactgtctttctaactttttcattttgatctccagtgaataccacttccctccatccctgaagtttcttttatacccctggaatctttttatacagagtatgtggcttcctgcacttatgtaaaccactacttggaatggcataatctaattgcmtactcatatctgatcattttgagttaaggtccacttccttgtttctttttcctgctactagtctttatcttgatgaaatatgattggatgcaggctacagagaattcttcagacaagtgcccttgcagagtgcagtgaagcactctggctttgtgggagaaaaagctata

SEQ ID NO: 158932 - DNA, 365 bp, Homo sapiens
taaaaatgatggagtgagaatagcagttgcaatgtgatggattttcccggtttgcagtttgagtgtttctggttatgacacggggtgttatagtggcctctctgagaagcccacacagtagcaggcatgaaagttgcccatatatgatttgttatggtaatttttttgaggtttataccaagtggtccaatttcagtttgcagaaattggaaacagatccgttttaatttttagtgaaaaaagaagwatttgggatctactccagtttatgggtaaacaataaaacctcaaagacaatcaacaggttagaattatgtgaggtgaagagggttgtgtactaggaagtgggccctcaccagatatca

SEQ ID NO: 158933 - DNA, 558 bp, Homo sapiens
gaattctttatctgttatttcaaagatttcattttgtttgagatccattgctagagagttactgcttcactttgggggtgttgtaacactgttttttcctatacttttggagttttttctcttgttcttttacatctggataagctgtctctccttcatattttttgattttgctttactttggaaaggactttttcccttcttgaggaggtgtctacaatgtatgatgttgtatarggtccttttactttgtttctgggagttttcagtggtaaagagtctggaaaaactccttagttattgaagcctttctatggtggctttctcaaatgtttgttgtagtagcaatgtgttaggcatgtgagtaggctcaggaagcttatcacattttccagagctatgcatttgtgtcagcagatttcctcttgttttgtggggttcaacctccatgccagtgggtggtgctgtagtgttagaactggctgcagccaatcgggatgggtatacactaatacttgatccttgtttactatgggaagctctgtgttacccaagaca

SEQ ID NO: 158934 - DNA, 428 bp, Homo sapiens
gtcctggtgaggagtggaaaagtcgtcattgtacaagttctttgcaggggaaggaagaggcagcttaggccactagtctgggacaaagggtrttttgattgcttggaaatatgtcctctggcgaggagtggaactctccatgaggccatcggtgcgggctgggggaaagaaggcagggtggcaggagtggagaccatgggtatttgaaccacttcctcatgtaacatacttgtgccttcaggacttgtttgagcccgataatatatataccacttccatttgatgatggaatgctgttgtgcatgacccactttatggctagatgggtcagaaagcacccagttcacgacaggcagttcaggtcacatggtgacttgatgacccacagtcaaatatacagtttccaccaaagcccagtaacaggccaa

SEQ ID NO: 158935 - DNA, 595 bp, Homo sapiens
cagggtggcaggagtggagaccatgggtatttgaaccacttcctcatgtaacatacttgtgccttcaggacttgtttgagcccgataatatatataccacttccatttgatgatggaatgctgttgtgcatgacccactttatggctagatsggtcagaaagcacccagttcacgacaggcagttcaggtcacatggtgacttgatgacccacagtcaaatatacagtttccaccaaagcccagtaacaggccaagagctgtctctcaaaaaagagagtagttatctgcagaagatggcagggtcttgctccaaaatcctagaggcctccactgtgtttcacctataggggcctgccaaaggctccaaacagcatccctatcttccactgacacctcaagcaccattggatatgctgggtcatatgacccaagtgtcagagcagcttgcacagcagcctggacctgttgcagagcattctcctgtttctgaccccactcaaactggcagcctcttgggtcacaccatcaatgggctggagtaacacacccaaatgaagaatgtgttgcctccaaaatccagataggcacactagg

SEQ ID NO: 158936 - DNA, 568 bp, Homo sapiens
tattaaaaagggacaatttggacacagagacagaacacatagaggcaacacgatgtgaagaggcacagggagaaaattgccatctacaagtctgcaccatatccttccctcacagccttcagaaggaaacaagtctgtggacaccttgatgctggacttagaggcctccagaactgtgagacagtaaaattatactcttcaagccaattcaagccaatctctctgatgatttctgctcaggtctctttgtccggaataagtttgtataatcrccccaagatgctaataaaggtgtggtggtgatgggagacaagaaaagatagcccattcttatttttgccttttaaaatttcagtactgggacatttcttccttgaaaaaataaacttttttgttgacccatacaaaatggaatgatagcagtgcccaccgtaacagagacttcatttatttcaccacttgtacacattttcacttcatgtagacatctgattgttctatgagagattctatgattgttctatgagacccagctatatttatgaagatgaatattatttaaacagat

SEQ ID NO: 158937 - DNA, 607 bp, Homo sapiens
taaatcattaggttttcatagtagctgaccatatttcagtagagaatgtttacctcatgggacatgttcattttaaaatgttcaattttagtttcaagtgctgtaactcactgaaatggccctggttccaaaggggtatttaattaattctttattgagtctgtgcaaaaataatggctaatataaaaatattagacccgtcacttgtcatctgcccattttgtttgcattccttagaaacttggctcttgttcagtttcttggtgacattgacattcttttagttaacatcctatctgttgtctgttacatgtccaactaatatctcagcaagaatttatggaaatttgttatagaacaaaagatgtggtataaaaagaaattaaagttgatagtgtttagagggcatataaaagagctgtaagtacaaattgtgacaaatcactaatttgcccaagcttgttactttaaaacaatgtgccaggcaataggtaacttagagacagaaagagacagaacctactgggtcgggatgattcaatcaaagaaacagatctagtaggrgaagcagtacctacaggggttaaggagggattttttttttttt

SEQ ID NO: 158938 - DNA, 604 bp, Homo sapiens
aactgaattcaacagtgtatcagaaaggtaatccaccatgatcaagtcagtttcctactagggatgcagrgatggtttaacatccacaagtcaataaatgtgacacaccaagtaaacagaattaaaaacaaaaatcatgtgatcctctcaatggatgcagaaaaagcatttggcaaaatccagcatctttttataattaaaaccttcagcaaaattgggttagaagggacatatcttaacgtaataaaagccatctatgacaaacccacagccaacattataccaaatggggaaaagttaaaatcactccccaagaactggaggaagacaaggatgcccactttcaccaacttctactcaacatagtactgaaagtcttagccagagcaatcagacaagagaaagaaataaagggcatccaaataggtaaagaagtcaaactgggaggcagagcttgcagtgagctgagatcgagccactggactccagcctgggagacagagccagactccatctcaaaaaaaaaaaaaaaaagaagtcaaactgttgctgttagctgatgatgtgattgtatacctagaaaaccctaaagactcattgaaaa

SEQ ID NO: 158939 - DNA, 576 bp, Homo sapiens
gtgattgtatacctagaaaaccctaaagactcattgaaaaagctcctagatctgatcaatgaattcagtaaagtttctgagtacaaaataaatgtacacatgtcagtagcgctgctatacacttaacggcgaccaagctgagaatcaaatgaaaaactcaaccccttttacaacagctgcaaaaaataaaataaaatgcttaagaatatacctaaccaaggaggcaaaatatctctacaagaaaaaacacaaaacactgctgaaagaaataatagatgacacaaacaaatggaaayagattccatgcttatggatgggtagaatcaatattgtgaaaatgaccatacttccaaaagtaatttacaagttcaatgcaattcacatgaaaacaccatcatcattcttcacagaacaagaaaacaaaattctaaaatttatgagacaaaaaagagcccatatagccaaaacaaaaatgaaccaaaagaacaagtctggaggcatcacattaccgaaattcaaactatactctaaggccataatcacccaaatagcatgctactggtataaaaacagaca

SEQ ID NO: 158940 - DNA, 615 bp, Homo sapiens
gaaaccatagaattctagaagataacattgaaaaattcttctaggcattggcttaggtgaagagttcatgaccaagaacccaaaagcaaaagcaacaaaaacaaaaataaatagatgggacttaattaaactaaaaagcttctgcacagcaaaagaaataatcagyggagtaaacagacaaaccatagagtgggagaaaacttttgcaagctatgcatccaagaaaggactaaaatccaggatcttataggaactaaaacaagtcagtgataaataataataataatcattatcatcatactcctcatcaaaaagtagtctaaggacataaatagaaaattctcaaaagaagatatacaaatggccaacaaacatatgaaaaaatgctcaacatcacaaaatgcaaatcaaaaccacaatatgataccaacttactcctgcaagaatggccataattaaagaatcaaaacatagtatatgttgccgtgaatgtgctgaaaagggaacacttttacactgctcttgggaatgtaaattagcaccatcactataggtatcagtatggagaatccttaaagaagtaaaaataggagtgccgtttcacctagcaattcc

SEQ ID NO: 158941 - DNA, 584 bp, Homo sapiens
ctggggactttgggggaagggtgggagtgggatgaaggataaaacactacacactgggttcaatgtaaactgcttgggtgatgggtgcatcaaaatctcagaaatcaccactaaaaactgatcagtttaaccaaacaccacctgttcccccaaaaactgaaacagtaataataatgataaataaaaatttaaaaaaacaaaaattaaaataagagctctttttcaaacatatacacctacacaagaaaataatgtacaattcataggattgtgttgcttaaatattttatcaaatatttattttatttttagtgttgaatggcatatcaaataaatcattccatgatattaccaataatatatgattataaaatgatcaagtggctgggcacggtggcttatgcctgtaatcccagcactttgggaggccaaggtgggcggatcacctgaggtgaggagttcaagaccagcctgcccaacatggtgaaacctcgtctctactaaaaatacaaaarctgagccaggcgtgttggcaggtgcaagtaattccagctactgaggaggctcaggcagtagaattgctt

SEQ ID NO: 158942 - DNA, 595 bp, Homo sapiens
ttatctgactaagcaaacaacctatgcatcccacagtgctgttcaaaggtgagggagatatagaaggaaaagtggagagaagaggcaatgaaaacaatgatcagtaccagtggctgtacaggagactggaacttacttcactaattcttcagtgtgaaggctttagaacagattacaactggtccgcatccttgaagtttctctcatgaatttgacttaatggagctcgttagggggatatctgagcaaagatgcaccccataggacacctcttatatttactgtgaagtcctctcagctcacctctactccagctgtacaatcagcttcacagagctgaacctgacagcatcttgcttcagctctgccaagaatctcttagcatttttctcaggcttttctgaaagggatctgcctggtacaggtgaggcttaaaaaaaacctygtaatgtagaaaagctaacatctcttggggatacccttgaccacgggaggattaaagccagtgaaggaaagcccatgttttccctccctcatgcaactttaaggtggccaacgattgagccccagctgtttaaagttatgaccaactttg

SEQ ID NO: 158943 - DNA, 610 bp, Homo sapiens
tctacccttttctaaacaagaggttaagttcagctatcttgggattactccccctttgggtattggctttgtattagaagaaagggcttagaaatagtttgtattttaggtttctgggtactggctatgattccactcaatatcattgtaaaatgctgggcactcttattaagcagttgcatagaacttwtgagtggttgctcgtggaggttggggtgcatattttataattggaagactgatataatgaatttgtggggtatccagagaagtggacaatggcagcaatagttataccccaatagcccttctcctggttaccttaatgctaataaattattcttaggatagcccttggccacacaaaataaaggctgaaattttctgagttccaaacttgtgatggtaaatattgagtgtcaacttgattggattgaaggatgctaaacgttgttcctgggtgtgtctgtgagggtgttggcaaaggagattaacatttgagtcagtggacaagggagaggcagacccaccctcaatctgggtgggcaccatctaatcagccttcagcataaaagtaggaatggaaagagcagactgggtgagtcttctg

SEQ ID NO: 158944 - DNA, 610 bp, Homo sapiens
tctacccttttctaaacaagaggttaagttcagctatcttgggattactccccctttgggtattggctttgtattagaagaaagggcttagaaatagtttgtattttaggtttctgggtactggctatgattccactcaatatcattgtaaaatgctgggcactcttattaagcagttgcatagaacttttgagtggttgctcgtggaggttggggtgcatattttataattggaagactgatataatgaatttgtggggtatccagagaagtggacaatggcagcaatagttataccccaatagcccttctcctggttaccttaatgctaataaattattcttaggatagcccttggccacacaaaataaaggctgaaattttctgagttccaaacttgtgatggtaaatattgagtgtcaacttgattggattgaaggatgcwaaacgttgttcctgggtgtgtctgtgagggtgttggcaaaggagattaacatttgagtcagtggacaagggagaggcagacccaccctcaatctgggtgggcaccatctaatcagccttcagcataaaagtaggaatggaaagagcagactgggtgagtcttctg

SEQ ID NO: 158945 - DNA, 588 bp, Homo sapiens
gtttcagtgcctttcttcacttaaccctaattctcataaaccctcacagactttcaaaccatgagttaggaattacttggttaacaatactctatctggttttcccagaattttgagaagaagtaacactcaggcattcctttaaagataacaactttatacgtgacaaaattcattttccccttcattcatttaattccacaaaatgtttacccacttacccattatacgaatccagtttcaaataggatttgaggaaggattacttcaaagagtgttctctgagatattttaaaatggtaattgacgatatgagtatttgcctarctagagcagttctttagctgtggagaacatcctgttctttggaagttatttcactatatagcaaatgcttaagaaaataggaaaaaaaaaaacactcagaaaattactaaccttgtatgacttcaagtcaaccttgaaattttgtggtgggagaaatacaaagaaacagaattttgtttgcctccttcaaaatttgaaatgtttattgcatttgttagaaattaacattgaggcaaaagagacctcccttgagtttctgtc

SEQ ID NO: 158946 - DNA, 588 bp, Homo sapiens
gtttcagtgcctttcttcacttaaccctaattctcataaaccctcacagactttcaaaccatgagttaggaattacttggttaacaatactctatctggttttcccagaattttgagaagaagtaacactcaggcattcctttaaagataacaactttatacgtgacaaaattcattttccccttcattcatttaattccacaaaatgtttacccacttacccattatacgaatccagtttcaaataggatttgaggaaggattacttcaaagagtgttctctgagatattttaaaatggtaattgacgatatgagtatttgcctaactagagcagttctttagctgtggagaacatcctgttctttggaagttatttcactatatagcaaatgcttaagaaaataggaaaaaaaaaamcactcagaaaattactaaccttgtatgacttcaagtcaaccttgaaattttgtggtgggagaaatacaaagaaacagaattttgtttgcctccttcaaaatttgaaatgtttattgcatttgttagaaattaacattgaggcaaaagagacctcccttgagtttctgtc

SEQ ID NO: 158947 - DNA, 390 bp, Homo sapiens
aatttgcatctgtatagttggccagatggctgataggtggagcacagatagctcccagtaggaagtactagtgcagttgttaaactttcattgatggaaggaagtacatgaatgactgcagcatgatttcagagttcatggaagataataactataaggctcataaaatggattgatttttgctaggcactcaatattttagaaaatgaaaacaaaagctgaatgygattaattcattaatttacagctaagtgtgagagtcagaaggcattttagcagcacataaagagatcctcatttcctatagccacaaggcagaaatagttgaggatcaagcccacaattttattataaaaatagcagatctaaaaagaaggttgtatccaggtg

SEQ ID NO: 158948 - DNA, 480 bp, Homo sapiens
cactgctacctccgcctcccaggtttaaatgttcaagcgattctcctgcctcagcctcctgagtagctgagattacaygcatgcaccaccacgttcagctaatttttgtatttttggtagagacagggtttcagcatgttggccaggctggtcttgagctcctgacctcaagtgatccacctgcctacgcctcccaaagtgctgggattgtaggtgtgagtcaggattccccatcctgagacaatgaccctgatggcatggagcccaaaggcatcatcgagagtaactagaatgagatggttgacagctttgatgacatgaaactgtaggagtttcttctccgtggcatctatgcctatggttttgagaaaccctctgccatccagcagcgagccattctacctgtgtcaagggttatgatgtgatcactcaagcccaacctgggactggggaaatggccacacttgtcatatcgattct

SEQ ID NO: 158949 - DNA, 480 bp, Homo sapiens
cactgctacctccgcctcccaggtttaaatgttcaagcgattctcctgcctcagcctcctgagtagctgagattacacgcatgcaccaccacrttcagctaatttttgtatttttggtagagacagggtttcagcatgttggccaggctggtcttgagctcctgacctcaagtgatccacctgcctacgcctcccaaagtgctgggattgtaggtgtgagtcaggattccccatcctgagacaatgaccctgatggcatggagcccaaaggcatcatcgagagtaactagaatgagatggttgacagctttgatgacatgaaactgtaggagtttcttctccgtggcatctatgcctatggttttgagaaaccctctgccatccagcagcgagccattctacctgtgtcaagggttatgatgtgatcactcaagcccaacctgggactggggaaatggccacacttgtcatatcgattct

SEQ ID NO: 158950 - DNA, 480 bp, Homo sapiens
cactgctacctccgcctcccaggtttaaatgttcaagcgattctcctgcctcagcctcctgagtagctgagattacacgcatgcaccaccacgttcagctaatttttgtatttttggtagagacagggtttcagcatgttggccaggctggtcttgagctcctgamctcaagtgatccacctgcctacgcctcccaaagtgctgggattgtaggtgtgagtcaggattccccatcctgagacaatgaccctgatggcatggagcccaaaggcatcatcgagagtaactagaatgagatggttgacagctttgatgacatgaaactgtaggagtttcttctccgtggcatctatgcctatggttttgagaaaccctctgccatccagcagcgagccattctacctgtgtcaagggttatgatgtgatcactcaagcccaacctgggactggggaaatggccacacttgtcatatcgattct

SEQ ID NO: 158951 - DNA, 479 bp, Homo sapiens
ggcacaaagaatcttggagggtgagattaatctacacagcgggtcgcccagaccatttcattcttccttgttgcacccagcatctctcttttggtrtgggggaaattttttacagccatctgacagaggaggaaaaaggttgagtttgtttcccaagggcctcacctttgtaagcgggttcaaactgaaaatcagttattgttatacaatagtcccactcatagatgttgcaaaacgactggtgattatacatttatcccaataggcagatcttagggtggtataagttgtcatccactttacatggaaatagaaagtccatggtaggagtatgtacagacacatttacagaagctaatggtttgattggtttgatagagcttgaaggaaaaagattggaagaactgggacacgcagatgaacttacagtaatgggaacaaagtataaagatctatgtatgacattttaatacccacca

SEQ ID NO: 158952 - DNA, 479 bp, Homo sapiens
ggcacaaagaatcttggagggtgagattaatctacacagcgggtcgcccagaccatttcattcttccttgttgcacccagcatctctcttttggtatgggggarattttttacagccatctgacagaggaggaaaaaggttgagtttgtttcccaagggcctcacctttgtaagcgggttcaaactgaaaatcagttattgttatacaatagtcccactcatagatgttgcaaaacgactggtgattatacatttatcccaataggcagatcttagggtggtataagttgtcatccactttacatggaaatagaaagtccatggtaggagtatgtacagacacatttacagaagctaatggtttgattggtttgatagagcttgaaggaaaaagattggaagaactgggacacgcagatgaacttacagtaatgggaacaaagtataaagatctatgtatgacattttaatacccacca

SEQ ID NO: 158953 - DNA, 370 bp, Homo sapiens
taagtgtaaacagttggcttgtttcagaaatacaagtgagattttccgttagctctttcactttatgagttgtggtttaatatgattaccgcactgtaaacatctgagcttacamgacagggatggagttggcacattacgtgaaaatgctgccatcctacagcatttttgttaaaccttttttgatgaaaatatttttcttggagagaggagataggtatgctttagtgagctgcagtaataaggaaaaaactttaagtatctttttatatattaacaacttagaatgttccaagtgaaatgtacattttttcatttatgtctaagtttatatgacagcagaatttcagtacttagatatatatttttt

SEQ ID NO: 158954 - DNA, 497 bp, Homo sapiens
tcagtaagaaaactcattgttctttgaagacaacttattttatccttggattgctctgtgcattaaaaatgtttttcgttatttgggccaaacattgttgtcctctaatttgtatgcactgatcctagttctatctgctagggggcttagggctcacgtagggcagatttaattcctgttgcacccaggttatggtactttgttatggcagccattaggaaactcatacaccaactaaccccataataccactaattttgactaaatattctaatgtagcaaatactttgttacccagagccaygccttctataggcactcgactacaggtatctacaaatgatattttggataaatgtttgccactgcatgccgtgaactactagtccccctttaccaatggaaacaaggtcattatgcctttaatatgctcaaaacagagaatcatagccagaatattcagaactaattaaggagagaacttatccttaagattc

SEQ ID NO: 158955 - DNA, 562 bp, Homo sapiens
atttacctgggaatgtgtactgtgtttggtgctttgaagataaatgttatttacaaaacacctagctaataaaaccttgcttcagaatgctgtgtttgacatcaaagatctttatactgaactttatggttgacaaggtttaatttcatttaagtatgggataggagagtcttactggataagtctgtatatagatataagtgacaggtatccaaatcacctgttctgactgtgtttatagctrcatttccacctgtactgtataatgtgacccagattttttaccctttaatgcacccatatggctcttatttgtaactgtgcatctgttaagccatctgaaatactgagtttgcatgtctgtgaaaattcattgctgctaccagtcttccttctttcctttcttggtcgtttgaagactcaagagaagtagttaatatcagtctattctttcaaaccacaaactttggaaacagatgcactagtgtgaaaaagtttgttgacataactgcaagatggcctctttgtgaaaagaccagttccctatgtcttgttcagaatt

SEQ ID NO: 158956 - DNA, 566 bp, Homo sapiens
gaattcaacacagttgttcctaagcacttactatttacctgggaatgtgtactgtgtttggtgctttgaagataaatgttatttacaaaacacctagctaataaaaccttgcttcagaatgctgtgtttgacatcaaagatctttatactgaactttatggttgacaaggtttaatttcatttaagtatgggataggagagtcttactggataagtctgtatatagatataagtgacaggtatccaaatcacctgttctgactgtgtttatagctgcatttccacctgtactgtataatgtgacccagattttttaccctttaatgcacccatatggctcttatttgtaactgtgcatctgttaagccatctgaaatactgagtttgcatgtctgtgaaaattcattgctgctaccagtcttccttctttcctttcttggtcgtttgaagactcaagagaagtagttaatatcagtctattctttcaaaccacaaactttggaaacagatgcactagtgtgaaaamgtttgttgacataactgcaagatggcctctttgtgaaaag

SEQ ID NO: 158957 - DNA, 569 bp, Homo sapiens
aaatttttcagttcatttcaaaatatgttaatacaaacgtgtcataaacctttttctatggtcccaaaaatgttcccatctttcggtattcaagactcatcaaggtctcgggttgcccagacaatgaataattttatttcttgggatatttatgagataatctgcatgaagtataacaagcaatataaatatggtccacaatccaaggtcaaattagatttctgttctgaattcactggtttataactagtggcttagcatgatttcctgagatacttttaacagcaaagcccattaaaagaagtatataaataacgcatttttcttatactccatatttatactattcttacacaccaaaactacaggaaacattcagacaaagcgtgattactgaattcagagtcattcatattctgactatcattctgtgtggtaattttaatacctgtaatccataaggatatattttgaagtayaggaataaaccaaatatttttcgcccataatttaaaatccagacaaaactttcagatgtgaaacataaaggagacattatgccttacctc

SEQ ID NO: 158958 - DNA, 621 bp, Homo sapiens
ataaggataccctattctcataaaacgtcccaccctacaggaaacagaaccctaacatcagaagcaaagcaaccacataccccactgtcaactttattttcaaatgatgcctctgctcttttaataatatcgccagtgattttcaacaagttaatcattgtaaagatattgggaaaattaaataggcatatggaatgttctcatcttccctaaaataacaatacaaacaaagcataaaattaactctttaattttttttccaatccctgtggtgtaagtgacaggctcttttatatgcaaagttatcaaaggtcaaacgtctaagcagtaacacttcagagggtttctgatagctcactatctcgcttccaaagcaaaagcattgctgagaactggcatggaaacttttctcttttcttttattgcctttttgttgtcacagaagttttttaaaagggaaattcctctcaytctcaagagggattcatccgaaatacacataaccaatgcatatgtagtactctggatttcattcattagagcaaaaatgggatccttatgaggcttctggaaccatgggtacgacgagattggaaacttccattgagaaactaaatatga

SEQ ID NO: 158959 - DNA, 367 bp, Homo sapiens
ttgcctcaaatatccctgaaagctggatagcatagagagtcagcattaagtcaggtgaaaagttccttccattgtgtgaatctgttttcacttaatttttgtttatgtccactattctcattttgtctcaatataacataattttgtctgtgattgattaccagtccttttcaaatttatgtgtactgtgatttaattaactttacccttaagcaatgtgttttgagacatattaatgaggtgggagtcttttcagagtattcataacttatacatccttctttcattttttggcttggcatcaggctttgaaattctacaaggcraaggtctgaattctgagcctacctgactccagggaagatct

SEQ ID NO: 158960 - DNA, 579 bp, Homo sapiens
aacagaaactgtacccgttaaatgataactcctcatttcttccttctgcaagccttggaccttctaatctatattttgtctctatggatttacctgttctaaatatttaccataagtagaagcatacaatatttgtccttttgtgactgttttatttcactgagcacagtgttttcaatgttcatccatgtggtagtgtgtgtcartacttcattccttttcatggctggataatattccactgaatgtgcatactacgttttgtccatccactcatctgttgatggacatttggttgtttctccctcagcttttgagtggaggtcacatgcttcctggataatcctcagccaatgacggagcacaatgatacaaaggcttgccatttcccgggcagcgtggaacccttccacaggcaatctctgtggcaaaagctccctgctgggctggctgacactttctcagtgcagtatgcatggaaatctgaggctcttcatccaatcctcctatcccctcctatccctgcaaggatgtcagacctgcactgtggtctgaaggcccagccttcccactcctgtc

SEQ ID NO: 158961 - DNA, 579 bp, Homo sapiens
aacagaaactgtacccgttaaatgataactcctcatttcttccttctgcaagccttggaccttctaatctatattttgtctctatggatttacctgttctaaatatttaccataagtagaagcatacaatatttgtccttttgtgactgttttatttcactgagcacagtgttttcaatgttcatccatgtggtagtgtgtgtcaatacttcatkccttttcatggctggataatattccactgaatgtgcatactacgttttgtccatccactcatctgttgatggacatttggttgtttctccctcagcttttgagtggaggtcacatgcttcctggataatcctcagccaatgacggagcacaatgatacaaaggcttgccatttcccgggcagcgtggaacccttccacaggcaatctctgtggcaaaagctccctgctgggctggctgacactttctcagtgcagtatgcatggaaatctgaggctcttcatccaatcctcctatcccctcctatccctgcaaggatgtcagacctgcactgtggtctgaaggcccagccttcccactcctgtc

SEQ ID NO: 158962 - DNA, 579 bp, Homo sapiens
aacagaaactgtacccgttaaatgataactcctcatttcttccttctgcaagccttggaccttctaatctatattttgtctctatggatttacctgttctaaatatttaccataagtagaagcatacaatatttgtccttttgtgactgttttatttcactgagcacagtgttttcaatgttcatccatgtggtagtgtgtgtcaatacttcattccttttcatggctggataatattccactgaatgtgcatactacgttttgtccatccactcatctgttgatggacatttggttgtttctccctcagcttttgagtggaggtcacatgcttcctggataatcctcagccaatgacggagcacaatgatacaaaggcttgccatttcccgggcagcgtggaacscttccacaggcaatctctgtggcaaaagctccctgctgggctggctgacactttctcagtgcagtatgcatggaaatctgaggctcttcatccaatcctcctatcccctcctatccctgcaaggatgtcagacctgcactgtggtctgaaggcccagccttcccactcctgtc

SEQ ID NO: 158963 - DNA, 570 bp, Homo sapiens
cttcattgacactatactctgatcccaaaagctagtgaccaaattgaagtggcaaaactatttcaatgccacccttaaactatgcttccctgactgcctgcyttctacattggaccagtttacctgatttaaattttgtactgtagtctcttggtggaaaagacccatgctgtcattgaaaccagcaaccgtattctattattttgccccaatgctctatgttacccattcaacttaaaaatcccccacagtatgcctagtaaatacctaaattccatttgaatgctagagagctggtatcccaactcttgaattaagctatggatggtttatttagaggcagatttgaggttatttctcattctcccttcacaggcagtggttcaatgtcaatgtcaatttttaaggcttggttacagatcaactaacctacaagaggaattatgtagtttcattgtgttcctttctcaaattggtatttgtcactccatttcctgtatgatgtggatggtaacccccaaataacactaagtggaaacacttgttttgttgcagccttcctagcagtgt

SEQ ID NO: 158964 - DNA, 359 bp, Homo sapiens
tgaagtgtcaggatttatatttcatacataaagtcttaacgctaacaaggatgatcctgccaacattgtgttgyaagagtttcatgctgattctaagtctaagccttgttcatgatgagagatatttaccatacagtcatgcataatcttgttccagtcttcacctgtgacaattcggaacagtacggtaatagcttttccagccgaagaaaaatttgcatgcctaatttaagaaaaaaaaattaacagaatgtgagttatagaagggtttgtcatgaaatagcatggtttgccaacaccaaaacaagtggaggttgtagcaaatttggttgctaagttaccttttccaaaggttatac

SEQ ID NO: 158965 - DNA, 572 bp, Homo sapiens
gcagtcactaaaatcttaaggtaacaccaattaatgttgacacatatttaaacacaagtgggattatattaatcgaaaaatagctttttgaaaaatgaattaatgttctgggcatcagcatatactttctgccagaaagtagctttgagtatctatgtacttataaacaatgtaaaagacatattgatgtcatttctaaaaaaaaattttagtagctcagtaggcctttctttcaagtatttaaacataaatgataagtataaacattgaccaaaaggtgaaaataacttactgttatttttaacagttttatatcttttgtgatatgtaaaggagaaattgcaatctaaaggataaatggtaaaagggtaaactttttcattatagttcattacactattaagagcacatttattaaaaatccrgaaataataaaaagtataccaatcttagaatgcctatgaaaacatatgcttttaatgctactttctagaagatgcgctgaaatgaagtatcaaggaggaaaactaagcaaccgacttgagtgttttataagactatatgttatatta

SEQ ID NO: 158966 - DNA, 564 bp, Homo sapiens
aaacaaaatgacaagtgaataatatcatctaatattttctctcaaatagagttacatatagttttattgtttagtatagccatttaaaaaaaacttatgaggagatgtttctttttgtatctgagttgatattattcagaggactcrcaagaatataaaacatgtttggaaaaaatcattaatattatattgttttaaactttcaatgtatagagattcaaaatattgagaaatcattaaaataatatcaattttaatacatgtcagaggccaaaagaatatagacatgatagaatattttctctcagcttccaaaaccatgcaattgcactgtgctgtcaaagagaggctacccatttttagaagattaattgggtttgggctctatctgtgtgatattgaacaatgtaaatcctctgcataccaatttccttaactgtgaaatgtacattctatacacactggtttatttcagaattaaataatatatgtaatgaccccagtccagtgcctgaggtataattgttgtccactgtaaaaagaacttgcattattttacaaagg

SEQ ID NO: 158967 - DNA, 564 bp, Homo sapiens
aaacaaaatgacaagtgaataatatcatctaatattttctctcaaatagagttacatatagttttattgtttagtatagccatttaaaaaaaacttatgaggagatgtttctttttgtatctgagttgatattattcagaggactcgcaagaatataaaacatgtttggaaaaaatcattaatattatattgttttaaactttcaatgtatagagattcaaaatattgagaaatcattaaaataatatcaattttaatacatgtyagaggccaaaagaatatagacatgatagaatattttctctcagcttccaaaaccatgcaattgcactgtgctgtcaaagagaggctacccatttttagaagattaattgggtttgggctctatctgtgtgatattgaacaatgtaaatcctctgcataccaatttccttaactgtgaaatgtacattctatacacactggtttatttcagaattaaataatatatgtaatgaccccagtccagtgcctgaggtataattgttgtccactgtaaaaagaacttgcattattttacaaagg

SEQ ID NO: 158968 - DNA, 549 bp, Homo sapiens
actaaagtaatcctctcaaataaatgagggtgcacttgtgcaattggtcatattaacatcctattaaatgaaaaagataatgtaaacataaatattaaaaaggttggcttcgcatttttattcaaaataataaactaaatttagttgtgtttcagatgtgttatacatagttattctaccagctgggtctaagcacttgtggaaaaaaatctatccaaaaaccatgttttaaagacctcaatatacgaatttgaaatagatacttcctcatcctgaatattttctattactcttaattaaatagtaccttaataatatgaccccagaagttgcatattcagaaaaatttagagaaaagagataatgtagaaaattgtaatttttgtactgatcttgcattcatattaaaaaaaagsatttcctgctacatatcacaaatacataaaagaaacataccaaaaaaaagcaaaaaccaaaaacccctttaaagagccagacagttgttatcaaagtcatatattaaatctcatgcacattataagaagtcac

SEQ ID NO: 158969 - DNA, 537 bp, Homo sapiens
aatgtgagatatgtctattaagttttatttcagaatcaatattagatagtgaaggaagtatatattggcttgggygaaagtatcaccatggcaaattacagattagataaaattaaggcaaaagacactgttttaaagaataccaaatataatcagtatgaacatgtcttgactaatacaataaaaatgtatttttaatgtctgaattatgtttcttgaaatattatataaatggtgacaaaccagataaactaagtgttaaataattataacaaatatttactggaataccacacaggtattatcaataatgttgtgaacattgacaacatggtcaattatgtacattatgttttcacaaaactaaagctataaagtttacggttaaggggccgggcatggtagctcatgcctgtaatcacagcactttgggaggccaaggtgggcagatcacttgaagtcaggagtttgagagcagcctggccaacatggtgaaaccccatctctgctaacagcacaaaatgagctaggcatggc

SEQ ID NO: 158970 - DNA, 539 bp, Homo sapiens
cttatggcagccctagaaaaaaacatacagttttcctcctatatctacctgtcagtaatgagaaggttcaaaaggacactaggctattggcttattaaaaagaaaacaaacacacaaaaaaacaactctttcttgtacttatgatattttaagaagattatgcagaacacttaatttctccctattttccttatacaagcagtatctgagagaaatactgtggttaatgagatgtgtaaataaagaacagcagtagaaaggggctcctgaagcatttgatagaggtgcttctctatgcacctgcttagtaagctttttaagcacaagtctatttgttacacaactggataatgacctaatttgaacgaattaacaatttcacaccttctaagcataaggtgaatactaagtaaaatcrctaatctaatatcctcacacaggtcacttttattacctataatggaacaatgagataaagttgcactttcaaattcaaatactcgattacttgcactaatggaggggataagaaccataga

SEQ ID NO: 158971 - DNA, 604 bp, Homo sapiens
tagaagagctaatctgatctctacctctttaatgaaaatgcagagccccagttgggggcacaaggggaatctctgcttcccatgggccctcagccccaaaccttggggagtgggtggycccaagggattgcaatcttggctcttggaagtgcccagtacctagaccaggagcaggtgagaggccccaaagtcgctcaccatcccagggcaggccaaggcacttagggcccatgctgcacccgactcctctgcacacaggggtagagagtgacaggaggccatggacctccccaccaacacccctaggcagagaaagacagggctctggagcagagtgcaaagggaagctgcgcagggccaggtaccccaggaggctgggtgcatgcgactgcgagcaagtcccagagaggcagtgggaatacctggtgcacccctcccatcggacttcacttacaaaatgcaaattccagccaggcacagtggctcacgcttgtaatcccagcaatttcagcggccgtgacaggcagatcatttgaggtcaggagtttgagaccagtttggccaatatggtgaaaccccatctctactaaaaatacaaaaatta

SEQ ID NO: 158972 - DNA, 604 bp, Homo sapiens
tagaagagctaatctgatctctacctctttaatgaaaatgcagagccccagttgggggcacaaggggaatctctgcttcccatgggccctcagccccaaaccttggggagtgggtggtcccaagggattgcaatcttggctcttggaagtgcccagtacctagaccaggagcaggtgagaggccccaaagtcgctcaccatcccagggcaggccaaggcacttagggcccatgctgcacccgactcctctgcacacaggggtagagagtgacaggaggccatggacctccccaccaacacccctaggcagagaaagacagggctctggagcagagtgcaaagggaagctgcgcagggccaggtaccccaggaggctgggtgcatgcgactgcragcaagtcccagagaggcagtgggaatacctggtgcacccctcccatcggacttcacttacaaaatgcaaattccagccaggcacagtggctcacgcttgtaatcccagcaatttcagcggccgtgacaggcagatcatttgaggtcaggagtttgagaccagtttggccaatatggtgaaaccccatctctactaaaaatacaaaaatta

SEQ ID NO: 158973 - DNA, 529 bp, Homo sapiens
caccttctcattccctctctccttgttttttcagacattttgccaacattgtttataaattagcaaattctttaaaggaaaagtggtgcagactgtcagcctcatcagtgtgggttttttttttttctctccagcatcttakttccctaagtcctggctgccttggtagcttccccaatgcctttaactagatgctttttcttgtagttttcattgtatcatatcttattcagctttctagccataattggtgggattggtctgttacaagttagttcatcataatcagagtcaggaatcttgttaactgagcctttcttcattcattcattcaatcattcattcatattatatgtttactatgtgtgtttactcccattatagatataaagatgataaaacagagtctttggttactaagagctaccatctacttcagacccataaacaaataccaacagtacaatgggaaaaccgtaagagaattaagtacgtagtgtgcagtggaagcacagaggaaaaagtgatt

SEQ ID NO: 158974 - DNA, 529 bp, Homo sapiens
caccttctcattccctctctccttgttttttcagacattttgccaacattgtttataaattagcaaattctttaaaggaaaagtggtgcagactgtcagcctcatcagtgtgggttttttttttttctctccagcatcttagttccctaagtcctggctgccttggtagcttccccaatgcctttaactagatgctttttcttgtagttttcattgtatcatatcttattcagctttctagccataattggtgggattggtctgttacaagttagttcatcataatcagagtcaggaatcttgttaactgagyctttcttcattcattcattcaatcattcattcatattatatgtttactatgtgtgtttactcccattatagatataaagatgataaaacagagtctttggttactaagagctaccatctacttcagacccataaacaaataccaacagtacaatgggaaaaccgtaagagaattaagtacgtagtgtgcagtggaagcacagaggaaaaagtgatt

SEQ ID NO: 158975 - DNA, 503 bp, Homo sapiens
ctgcagttctatccatagagtcgcagaatcacagcatttccaagttggaaatgatatttgagatcacacaggccawctcctccattgtacagatgatgacactgaggcctggagctttgatgacagttcaaggtcactcttctctcacggtagggcaagaattaaaatacctctgctgccttgtagtctaaattactttctacttcccaaagattcaggaatctgtgacctaatgtcactgctatttttgtactaaagataatacatgccagagacaaatgtctgaaaattccatatttgggtcaacagttttcatccaattgtcccattctcctctgcctacttaataatggtttttctatttgcttccatgacccattcacccttggatattttttactgccttttattctcattccatcataaaagtatctcccatccatttctcaatgtgtcttctgtcttaatgtgtctgacagcatctattcctggccatcctgtga

SEQ ID NO: 158976 - DNA, 588 bp, Homo sapiens
aattttctggaacagtactaatctaaaatattttcttgagaaacaggtgtgaagtacaaattagtacatttctgttttttaagttggtgatgcatatcaagagatttaaaatgtttttatcctattatgcagtatttcttcttcttgatcacacagtggaaatttccaaaactgtgaacaaagatgtatrtataacaatgtttaccacggtatttttaataatagtaaaaaaaagatggcaactacatgtttgatgatatgtgtagtgggtaaaaataattatatattctatctttgctgtatatgcagagatagaatattatgcagccattaaaaagaaactccacaaagaatatttaatgatgtgataaaatccttgtaacatagctttaattgaaaagttcaggatgaaaaattatatatacagtgtgatagtcaagtggataaaaattatcctgtattaatccagcatataaacagaaccaaagacaaaaaccacatgattatctcaatagatgcagaaaaggcctttgacaaaattcaacagctcttcatgctaaaaactctcgataaattaggtattgatgg

SEQ ID NO: 158977 - DNA, 588 bp, Homo sapiens
aattttctggaacagtactaatctaaaatattttcttgagaaacaggtgtgaagtacaaattagtacatttctgttttttaagttggtgatgcatatcaagagatttaaaatgtttttatcctattatgcagtatttcttcttcttgatcacacagtggaaatttccaaaactgtgaacaaagatgtatatataacaatgtttaccacggtatttttaataatagtaaaaaaaagatggcaactacatgtttgatgatatgtgtagtgggtaaaaataattatatattctatctttgctgtatatgcagagatagaatattatgcagccattaaaaagaaactccacaaagaatatttaatgatgtgataaaatccttgtaacatagctttaattgaaaagttcaggatgaaaaattatatatacagtgtgatagtcaagtggataaaaattatcctgtattaatccagcatataaacagaaccaaagacaaaaaccacatgattatctcaatagatgcagaaaaggcctttgacaaaattcaacagctcttcatgctaaaaactctcrataaattaggtattgatgg

SEQ ID NO: 158978 - DNA, 510 bp, Homo sapiens
tcatgaaatttaagcaaagtctcaggaaccgttccagattagaagaggctaacaagacagggcaatggagtacacgattttgaatttacttttccgataaaggcattgttggaccactggcaaaatctaataaggttttaaaattaaataataatattgcattgatgttaatttcctgattttgataatcacactgtgcattataagataatcccttattttatgaaacaagggtatttaagagtaaagaggcatcatatccgtaactttctccaaaatggctcagagaaaagcttatacacaaatataaatatatacatataatatgcatagatattatatatgtgcacatatgataaatacatgaagagagaaatagtrcacgcacacaagtgtagtaaaatgttaacattttggtaatctaggtaaggttattcatgacttttttgcatgattattgcatcttttctgtaacttttaaattatgtacaaactttcaaacatttaaaa

SEQ ID NO: 158979 - DNA, 612 bp, Homo sapiens
agtcaaatttatcaattttgtctcttaaggttagagctttttctgtcatgtttaagaaatcattgtctaccccaaagttatgaagttattctgttttcttctaaagctttctgtttcagatttcacattagagaatatgatccaccttgaattaagttttggatttgttgtgagttagagtttattttctttcccatatggatatacagttgttgaagtaccatttaataaaaacactatcatttccccattgaattgtagtaacacctttgttataaactaaatgatgtatatgtagagggtatttctggactctgttttgttacattggcctatttgcctctccttgcaccaataccaccttgtcttaattactgccgctttatagttagtctcgaaawctgatagtaaagttttcaactttattcttctgaaagattattcttggctattttaggttctttgcatttccatataatttaagatttatcctgttgatgtcgaccaaatattttatgtgggtttttataggttgggtttgcattgaatctacttatcaaattgggggaaattgacatcttatcaattttgagtcttttgattcatgcacat

SEQ ID NO: 158980 - DNA, 231 bp, Homo sapiens
ttgaatagaatggaatgcagggaaatggaacggagtggaatcgagtggwatggaatcgaatggagtgaaatggaatggaatggacttgaaaggaatagactggagcaaaatgaaatcgaacggtaggaatcatacagaacagaaagaaatggaacggaatggaatgcactcgaatggaaaggagtccaatggaagggaatcgaatggaatgaaatagaaagaatggaattg

SEQ ID NO: 158981 - DNA, 231 bp, Homo sapiens
ttgaatagaatggaatgcagggaaatggaacggagtggaatcgagtggaatggaatcgaatggagtgaaatggaatggaatggacttgaaaggaatagactggarcaaaatgaaatcgaacggtaggaatcatacagaacagaaagaaatggaacggaatggaatgcactcgaatggaaaggagtccaatggaagggaatcgaatggaatgaaatagaaagaatggaattg

SEQ ID NO: 158982 - DNA, 604 bp, Homo sapiens
ccttcttcctttttgaggttcaatttggataatttcattaagttcattcttcttgacatatgttgttttctgtctactgttaaaatcctcaagtaagttctttactttttagtcaacttatgaattaactaaattttatttaagtttgcatttattaagcttttaagtttgctttcctagaattctgggtttcttcttaaaaaaaaaatcctcatcaggatacatacaataagctgcacccatttagagtgcacactttgatgaattttgacagctgtagactcctgtgaaatcactaccacattcaagatacagaatatatccattacaccccaaaatatttcccatgccccctttgcagttcatttctccttctgatcctggccccagccaatcactgatttgctggactcactataaattagtttgcattttctacaatttatataaatgaaaccacacagtatgtattctttgwgtcttgtttttatcagccagcatgatgattctgaggttcatccatgttattacctatgtcagtagttcactcctttttattactaagtagtgttactttgtatagatatactacgacttgtttatc

SEQ ID NO: 158983 - DNA, 587 bp, Homo sapiens
ttgaaaagaaagaagtaaaaagtttttttcatagacacgacatctgtacagaaaatcctaaagctactagagctaattagggactttaacaagatattcaatatatatcataccctttccttcatccttcaggatacaaagccatacaaaaatcaawtgtacttctataatactagcaacaaataattggaaatttaaaatgttttgagatttagaaaaaaagccaaaatgcccaatgaggaatgggtaatcaaaccacagcttaccaacaaaatataattctagactaccaatttaaaacaaataggaaaaaaagtgggtggactaatcctccagatcaccgtttctgaaagcttttttttttttaactcatcacgttttccttttaaataaagatgaaaatctcatcttcttttcccatcttaactcacctaaacataagaatgtatctgtttatcactttacttggttaataggaaaggagtggaggaaaagaaagagtaactaaacatttaatacttttggaacccatcaaaatttcataacccattatgaggtaatattaagtaaaaatggcagaaaacagc

SEQ ID NO: 158984 - DNA, 655 bp, Homo sapiens
tggcttcaaattcttaacattccatgcgctcaaaaccatatgtttaaacaccgtgccaagtaacaggatactgtatcttacatatgatcattatttaaaaatcctacatgcctgttctgtaaattatacaatactatatgcttgaaaaagtcattaatgtcaaaaaacagatatgtttcctgatgttataaaacttatcttctaaaattaaaatactgatatatggaatagtatagcagaatagtaaaggatgatttgaacaaagaaacatattcccagagcataatgcaatggaaagagcagtgtgctacgtggaagacccacagccttcctgcttccatggactcaasttttacccagttcacatctgtaaaatgatgacagggccttctaagaactataattacataatattaaactttgctaaaacatacagaagcagcaggaatatacaatgatgaatatatacactgatgaaagttaatttatgtgttttgctcagtttgaagtttatcttcatccttgttgcaatagataatttgtgaaaggtaataaatagtagtttgactttcacttcagctcttgctgaagtcaccaatggtctctttgtcaatacattcaataaacgtatttaattctgagccctcagccatgt

SEQ ID NO: 158985 - DNA, 655 bp, Homo sapiens
tggcttcaaattcttaacattccatgcgctcaaaaccatatgtttaaacaccgtgccaagtaacaggatactgtatcttacatatgatcattatttaaaaatcctacatgcctgttctgtaaattatacaatactatatgcttgaaaaagtcattaatgtcaaaaaacagatatgtttcctgatgttataaaacttatcttctaaaattaaaatactgatatatggaatagtatagcagaatagtaaaggatgatttgaacaaagaaacatattcccagagcataatgcaatggaaagagcagtgtgctacgtggaagacccacagccttcctgcttccatggactcaacttttacccagttcacatctgtaaaatgatgacagggccttctaagaactataattacataatattaaactttgctaaaacatacagaagcagcaggaatatacaatgatgaatatatacactgatgaaagttaatttatgtgttttgctcagtttgaagtttatcttcatccttgttgcaatagataatttgtgaaaggtaataaatagtagtttgactttsacttcagctcttgctgaagtcaccaatggtctctttgtcaatacattcaataaacgtatttaattctgagccctcagccatgt

SEQ ID NO: 158986 - DNA, 455 bp, Homo sapiens
tactacgtgaccttggataaacaacttctcaatgcttggttccttgtgtataaaacagggataataatacttgccttggggttattgtgaggatcaaatgattcgttatgtgtgagacagttagaacagtatttgacatataataagccctaaatgtattctgtgtttataattattggagattatagttcctatggttttatattttttaatgatttcttatgtaatagtttcataagtaatatttaaaattctacagagttagaacctctgataatgtttaactgtaacctttctttatagtttaaaaaayattactgccattagatttggaactaggccattggtaaccttagaggagatatcattagggcaaaggaggagaggatatagaagtttaaatgcagtgggttggatcatgaaagagatggcaagtatgtccatgtagtgagttg

SEQ ID NO: 158987 - DNA, 615 bp, Homo sapiens
acactggatccggaatatataaagaactacttcaacttaataagaagatgacaattcaaattttaaaatgagaaaaatatttaaatcagcattttatccaaaaagataggtgaatggctaacaagcacatgaaaaatgtttaacattattagtaataagaaaattaaaaccacaatggcataacaacactcaccagaatggctataataaaaaaaaaagatctgttggtaagaatgtggagaactttgtctcctaagcactattagattaagggagagttcccttgccttgtaagtcttcactctaactccccagcctcccatacatagccccagtattcagcaagtgtcatttaagagagtggatgctgtggttgcaccacctagatcctgccttgggtctgaaacactcattcctccagatgccattgtcagctgagggccacmagctgcatcgctctctaggaattgccctcgactgaaggtgaatgcttcacccaagattatgccatcatccccaagggaagcctacaggcaatgactggttgattcaagggcccaaaggccagattcctagcctcaattgagaacatctctaaatagccatcccatcctc

SEQ ID NO: 158988 - DNA, 527 bp, Homo sapiens
gaattgctgggtcatagtgtagatgatgcacatttaacttttaaagaaactgccagtttccgaaagtgtatgagggattccatatccttgccaacatttggtgttgtcagatagttttcaatgtagccatgggtatgttcaygatatcactgattctttcttttcttttcttttctttttttttttaacattttcatggattcttaatctggtatctatagaacactcttggggtatgtttgtgaaattatatgcaaaaatttatggttgcttaccttttgagtgtatgtggatagagtctataattttcagcttcttaatgcagtccctcatcccttcaagtgtttacatttatacaaagggcagtctctaaatgtgtgatttctggtcggtccgatagcataggccataataaaatatcaggaatcaactatttatgctctgacatcttatagattttgttttactgtaaaatgcagttaagtaacacaaattctcactagctcttgatgtctaaaaatactatt

SEQ ID NO: 158989 - DNA, 413 bp, Homo sapiens
cttggtttcacaaatatgtctggcagttggctcaatgtcagtcaggatgacaggaatgacttgaccaagtgtctcacatmgtccaacagaatggatgaggcttattcactcattcacactgttgtgctcaccagagttcccaagagaagcaagattaaagtggtgtccaagcactttttaagtctctgccatgttgtttgctatgataccattagccaaagcaagtcatgcaacttcatgtgggaggggcctttccatagggacagatgcaggaaggggaaatttatgtccattttgggagaaaatctacctaaatatattagagtatcacattgcgtttctagaatattacatatacagcggcataagtccatttcttttaacaacttgcttttgtcactcaaaactctcct

SEQ ID NO: 158990 - DNA, 560 bp, Homo sapiens
gcatttgatccaaagcctaaatgataccagaatttggtttctctctccttcctcttctctgctcttcctttcctgtgttgttgcctttcagggaatcctcttctccatagtcccaagatagctaccagtaacttctgggactaacrgtttctaggtctaaatctagatgtgaagaaccagtgatagtgctctaaattttcagcagaatcttgttctctctcattggctctaagtgagtcttatgttcactattaaatcaatttgttcaagaaaatgcattgagtggattgttttcagcctgaaatacttcctccattctgagtcataagtgggaccaactcttctggaagtaccctggatgaaaggtaaaaagagattttgtcgagggaaagttgaagggccattgcaaggaggaagaaaattctgggtgacaaaaacagatgtccagagttctggttccaggtaagatggtgtaaacacatgccaacccttctctcccactagatacaataaaacctagataaactgcatggcacaggtatccaaggtctctgaaaagt

SEQ ID NO: 158991 - DNA, 419 bp, Homo sapiens
aggtataatacattattatttactatattgcattattatttactatatgttgcatagtgtgcaatatatctcaaagaaaacaaacttatttctcctatctaatcagtatttgaagtgatgtatgttaattagcttgatgtaattattccatattgtattcataagtcataacttcactttgtgccccataaacatgtacaacaataatttatgaatttacagttagaaaaagaacactttttaaaagatttccttggatgacatttgacagttgttttgtactcataagatgttatcgtttttttgccctatatctttactcaccatcattrtcatactgattagagagaaaaatgtgtttttttggtcagtggaaggtgatttattagcaaatttagaagcatgtagcagcacgacag

SEQ ID NO: 158992 - DNA, 608 bp, Homo sapiens
ttaatgctttggttagttgaagtgaatttcactacatagattccatgattggtttccaccaatgactacatttatttgggagatggtagaaatctagaggattataatgctatagcattacagcatgtggcggagcaaaccacatggaagaaatgcgctagtaagagaaataagttcttgccaaagggaggccagactgtcagacctttttagtttttttttttttccttaagaaacccaccaggaaaccttgttattttcttggttcaaaatccaagaattagataaaggtatacatcaactttgtaggctatgctctgggaatctcatgggtcaagrgaaggagtaagagtgtttctgaatgtcacaatccattttattatgggcaaacttttatcagacatggctgtaagatcccccttcggaaacagcaggtatctacaacaaataagattttttaaaccatgcagacataagtctaatgttcagaagtcagtttgggaaatggcagaataagcagggctttttaaaaaaaagattaggtcagttttgaatgtttatctatttttttgaacctattgtaaggctgcactgtccaatatagtagc

SEQ ID NO: 158993 - DNA, 635 bp, Homo sapiens
agattattaactttccttgtaatttcctattaaggtacctctttgaataaagtctagatgggctacttaggattcatatattctctttatccacatgacactgacgctgaaaacttggtatatatttgtaacaaatgaaccaaaatcttcccttttcagctttatcattgtcatgacaagtccttttcagagacagctgtattgaggtggtaaatcacgtggctgagtttgawtcccagctccatcactcccggttgtatggaacataaaagttacttaatgttgtgtacttcacttcatctcaaagatgagtttgatttccaaacctccatcatcataataaatagtgatattatttttcagttgggttccaagtctaaaattcatttttctttctgacttaaacttgtaaattttaaatgcaatttatgtacagtgaaacacagatcttaagtatacagtctgatgaattttgacaaatgcatacactatcaagatataggagatttcttaaaacccactatcaagatataggagatttctatctcaccagtacgttcctttcaccttttcccaaccagtccccaaaacatccacatgaggcaatcactattttgattttatgactatagctt

SEQ ID NO: 158994 - DNA, 594 bp, Homo sapiens
tcatcagctttaggtgtttctacctattaggagagtatatttccctggttctggatgcagccaattattatattaaagagacagcttagcaatggcctgaccataacatgagggtcacctgacattcctggggtggaggggatctcctgcctggctcacgtctgactagctgcctactgttacatttcccaccttaaaagtccaaggccccaattctttggagaaaatggatgaaggtgagtcatatgtaagtgcttcctgctgtgagtgaggttgtggtggtgggtttgtggatctgggccacttgcgagctatcagggcagtgttggctctgtgttttggtgaaaacagtatctagacatgtccaagrgagatagttgaaggattttgcctttgttgtgtcctactgatgggcagtctaggagtcttcttatcgagggaaccccaccccgaatatttcaatgtagattctttctattttccataagtgttggccagtctgagaaataaagagaaagagtacaaagagaggacttttacagctgggccgctgggggtgacatcacatatcggtaggaccatgatgcccaccag

SEQ ID NO: 158995 - DNA, 615 bp, Homo sapiens
gacaaatgcatggacttagctataaatgaacctttatagaaaagatcactggttgcaattaacaagggatgataaccaaacttactcttatctgttacagagatggtcattctttaatacgtgtcttaaaaaaaacccagcaaagataagcctttaaaccttatctgtgctattaaactgcagatatttttttttctctaggtactttagagactatttcctgtccttctcattatttaatcagcttaatacaggtgacttccaaattaactgtggtctaaaattctaagattagaaactttgtgtcatgtactttataataaaatagaaactaatggcaaaattaaaatacatatatttggggaaataattctcaggaacattaaataatgtaaaaataactatgaataaggcaaatgtaactataatatctctgaggaatgaataaaaggaaacaaatggcttyactaaacaaagtaccaatgatttgtcatagacatggtagatacatggtacatattttccagtataaactttatttcatacaatggaaatataattaaaagtaaaacataagtgatttgatgatgctttacttttgcatttataaagctt

SEQ ID NO: 158996 - DNA, 615 bp, Homo sapiens
gacaaatgcatggacttagctataaatgaacctttatagaaaagatcactggttgcaattaacaagggatgataaccaaacttactcttatctgttacagagatggtcattctttaatacgtgtcttaaaaaaaacccagcaaagataagcctttaaaccttatctgtgctattaaactgcagatatttttttttctctaggtactttagagactatttcctgtccttctcattatttaatcagcttaatacaggtgacttccaaattaactgtggtctaaaattctaagattagaaactttgtgtcatgtactttataataaaatagaaactaatggcaaaattaaaatacatatatttggggaaataattctcaggaacattaaataatgtaaaaataactatgaataaggcaaatgtaactataatatctctgaggaatgaataaaaggaaacaaatggctttactaaacaaagtaccaatgatttgtcatagacatggtagatacatggtacatattttccagtataaactttatttcatacaatggaaatataattaaaagtaaaacataagtgatttratgatgctttacttttgcatttataaagctt

SEQ ID NO: 158997 - DNA, 524 bp, Homo sapiens
gacatttttaaagagtaaaggaaatatctgataccaaaatatgtcatgtcaaattacattcataattgattggaagatgtttttatttatgcaaattagatatgtctttcatttcaagaccttcgaatcaccattgtgagtactgccattcagaaagaaagaggctaatgatgacagtgaccactccagacagcctgacgctgccatcccgcaggctgtagcagggaggtacagctggggctgcatgttgtgtgcagctggcagaagcaagggagaagtgggagccccgccctttcttagttcgggcaggaactccccaattgytgctgcagcaacacggctgcacacctgggcctcccactccatggagaaggcaggaaccaccctcattccctgaacagctgcagctgcccaaactgaaactgaggctacagactcaggcatcactgcatacttgggggcccgggaatgcccccctgcccctgcaggcttggaagtgcctgcccccactgcctggcttctcc

SEQ ID NO: 158998 - DNA, 600 bp, Homo sapiens
ttggtgataaacacttaggttgatgtcataactcagctattgtgaatagcactgtgataaacacgggtttgcagatgtatgtttaacatactgatttcagacctctcaggtaaatacccagaaatgggattgctgaatcacatatggtaattctatttttagttttttgagaarctttcatagagtttttcgtaatacttgtactagtttgcattcccacttccaatgtacaagggtcccctttttaccacatccttaccaacttgttatattttgtttttgttttgttttgataagagacattctaacacatgtaaagtaatatatcactgtggttttaatttgcttctctttaatgattagtgatgttgagcattatttaatgtatctgttaatcatttgtatatcttcttttgaaatatgtctatttagatagtttgtccatttcttcattggattatttgttttttcttctgtagagttaagttccttatgtattttggatattaattccttatcaaatgtatggcttgcaaatattttcttccagtctgtaggttatctcttgatataatttgaatatttgtcctctccaaatct

SEQ ID NO: 158999 - DNA, 588 bp, Homo sapiens
gaagtaacaagacctgtcctgcagattttcataaacatgtggtccctgtctaattcatctcttgcctaggacaaaagaattatgtaatccaattttaattattggtttttggtgtgtatttaaattctgtcaattctcattttccctcctaactttttttccatcggctaagaggaaccttatgaagaacacaagcaagcaagaccaatcatatgacactgctgtgggcaataagcctcatcaactcaatgatttatgacagaaatgtcctacctttttagctgggcaagctctgagttcatggctttttyacttcttcattataaactaatccagctatttgagttcattttctctcagctaattttttttcagtggattggataatttctaattcaaacttttgtcttaatattgctgatcccatctgtgcacctctctagaatcttatattggctttctctccctacaccccactccatttcatactatccagtgcacatttcgcagcattcccaaaagtctacttctccaggttaaactacagtcagtcttggttccatacagttctgatgtgagtcacaaggc

SEQ ID NO: 159000 - DNA, 594 bp, Homo sapiens
aaggtggccaactgttcaaactgtattcaaataaggcaaacactaagctactgagctgtaaacagttcaactgtctgtacctctttatttattttattttatttttgagatggagtctcatgcttgttacycaggctagagtgcagtggcgtgatctccatcttggctcactgcaacctctgcctcccgggttcaagtgattctcctgtctcagcctcccaaatagctggtatcacaggcgcccaccaccaggcccagctaatttcattgtttttaatttttagtagagatggggtttcaccatgttggcttgactggtttcgaactcctgacttcaggtgattctcctgcctaggcctcccaaagtgctgggattataggctgggccaccacacccagccctcacttctgttttctatacttcactttccttttcctgtccataaatcttcaacccagcggtagcactgtagtctttatgaatctgctgtgattctggggtctgcctgattcaggaattgttatttactcagttaatctctgttaaatttgtgtaaagtttttcttttaaaacaaggtagatttttaaacaat

SEQ ID NO: 159001 - DNA, 594 bp, Homo sapiens
aaggtggccaactgttcaaactgtattcaaataaggcaaacactaagctactgagctgtaaacagttcaactgtctgtacctctttatttattttattttatttttgagatggagtctcatgcttgttacccaggctagagtgcagtggcgtgatctccatcttggctcactgcaacctctgcctcccgggttcaagtgattctcctgtctcagcctcccaaatagctggtatcacaggcgcccaccaccaggcccagctaatttcattgtttttaatttttagtagagatggggtttcaccatgttggcttgactggtttcgaactcctgacttcaggtgattctcctgcctaggcctcccaaagtgctgggattatagsctgggccaccacacccagccctcacttctgttttctatacttcactttccttttcctgtccataaatcttcaacccagcggtagcactgtagtctttatgaatctgctgtgattctggggtctgcctgattcaggaattgttatttactcagttaatctctgttaaatttgtgtaaagtttttcttttaaaacaaggtagatttttaaacaat

SEQ ID NO: 159002 - DNA, 594 bp, Homo sapiens
aaggtggccaactgttcaaactgtattcaaataaggcaaacactaagctactgagctgtaaacagttcaactgtctgtacctctttatttattttattttatttttgagatggagtctcatgcttgttacccaggctagagtgcagtggcgtgatctccatcttggctcactgcaacctctgcctcccgggttcaagtgattctcctgtctcagcctcccaaatagctggtatcacaggcgcccaccaccaggcccagctaatttcattgtttttaatttttagtagagatggggtttcaccatgttggcttgactggtttcgaactcctgacttcaggtgattctcctgcctaggcctcccaaagtgctgggattataggctgggccaccacacccagccctcacttctgttttctatacttcactttccttttcctgtccataaatcttcaacccagcggtagcactgtagtctttatgaatctgctgtgattctggggtctgcctgattcaggaattgttatttactcagttaatctctgttaartttgtgtaaagtttttcttttaaaacaaggtagatttttaaacaat

SEQ ID NO: 159003 - DNA, 607 bp, Homo sapiens
tctatctatctatctatatgatatatatataatgtaacaaattgttttatgttttttccccaaaaaatccattcttctcacccttaatattgcattccatggcttaaacctaaaaaaaaaaaaggataaatatctgtaggttttctttcttaatcaccacatgtggtcaacgttgtagcctaaataacatgtacatctatctaatatatccttcattatggcctccagcatgcctcacctatgttattgcggtatcctgcaaattggtctgcccacttcagtcttttttctccaatccgttttattttccctaaaataaaatgtagcattttttcagatcttcacaaaactgtcggaattgagaaccagacatacattttaaaaatctgcaaaaataaattctgaaagktctttttgtttagggcaagcagtcgtggaataagcatgtaaactagttagcttctcaagtatacacagtggcttctctgtttgacgttacaagagtaccaagtgtctgtttttctagagctagtagttggtgagttttggctagtgttgagtcgaatcacagttttagaaggatatctgagaaaatgtctcttctgct

SEQ ID NO: 159004 - DNA, 604 bp, Homo sapiens
ttctaagcatgaacttgatttgagtcagaaacacgaggttaaaaaaatgaaggctaaaaaatttaaagtatcaaacatacaaacacatacatgttcctatttattttacattattttattgatattgctatttatccttttttattactgatattcataatgttctttttaaattgtaatgataatgaaatattactatttccaacaatatcactttctctatatttggtgtttacttctcatttgataaatattcatgaaaaagaaaaagtagtggttaatattggctggaaaaatattttagacacatgctccatyaggtcccccaaacagctgtgctactacaccttcatccaaaagcacttgtcaagttctgggcctttgcagagcaaaaggtgccaactcttggagcctgtgccaaactgtgcggaagttgcctgatgctgattcagatccagttggaattatgattaaaatctaaattcagtacatttttattttggaaataaaaccacacactcctttcatctttttcttcataatattgcttttgaaaggatattaactatatagaaaaatcacaaaatgattgtccttactgaga

SEQ ID NO: 159005 - DNA, 510 bp, Homo sapiens
tttttttaaatattactgtacataaaacaatatcataggaatatgtaaaaaagtcagtatattttgtattacagagtaaatgttgaataaatgataattattgttcattattttaaaggttaccattgaatttcactaaaaataaatattttattagtcaaattggttgcagcaggatactaacttttgatagtaaatacaggaacactggcgtaaaacctgatccagttcactttaaccatcttaaaattcaaaaataaagtgataataagagatcccctgtatgctacatggaaattgaaaattatacataaatatcagtctaaaatatttgatgattctctagctttatttcccgtaagcttatactccttttggttttccatttgctagtgttacgataatcagtgacctgrtgttttgcaatgcataaaattgcattattaagtggacatttggaagataattctagagtcaatatttttaataattagatataagttgtttagt

SEQ ID NO: 159006 - DNA, 539 bp, Homo sapiens
ataaaattgcattattaagtggacatttggaagataattctagagtcaatatttttaataattagatataagttgtttagtactccttttaggtattcagttgatggaatttaatactgattgatgataagcataggactcatacgttgaccctttttctgaattaatattggcaagataaaaaacattatcttctttcaataaatgtaataatttataaaatatttataaataattttataaataactrcgtatgtacaatatgcaaagatatttgtttgcaaagagatgtagtaatctctttgcaaaaagatatattaatgtctttgtaaacaaatatctttttatatctctggtattttataataaatatatacatgtaaagttatttaattaagaaaaaggaaaggtgcaaaaatcttacagcatctctttttaaattattatggccaattttaaaataatttttagtaaattcatgtttagacaacatatgagattaaaggaaaattataattacaaattgaataaatttataa

SEQ ID NO: 159007 - DNA, 527 bp, Homo sapiens
ttgaagtcagtttcatcaaatatgtgataatttttacacttggtattcagaagcatgttattgatttaatccatgtaaagttatctgcaaatgtaggagaagctttactatgaaatgattttcagataaaattctttctcacatggctaaactcctaaaatttttgagtagaatttttttagtcattttacttaacagaaaatattgtttcatcccccagaaaattkcaagtgatgtactgaggagatgccacaataagataaaactttactgtaacttgataagtaaggaacagagtatccattcacttaaattgcaggatgactttactttcaggttattgaaaataattggggaaaactttctaagctagccagtcatgagtggcggcgttcagctattacattcaaattaggcctgcagtttatgcaccctgatggtccactgaatggagttttattgccattggtggtttcaaggataatagataccaggtcaaacttcctctagtcaacttggtgataccc

SEQ ID NO: 159008 - DNA, 500 bp, Homo sapiens
tctttctgttgctcaggctggagtgcagtaacgtgatcttggctgactgcagccttgacctcctgggctcaagcaatcctcctgcctatacctcccaaatagatgataccacaggtgggtgccaccacactcagctaatttttgtatttttagtagagacagggtttcatcatgctgcccaggcaggtcttgaactcctgacctcaagtgatctgcctgcctctgcctcccacagtgctgggattacaggtgtgagccactgagtctggcatggtttaatccatttgatacaaatttatcctctcgttgtttaagatagtcaccaatgatctcctctttgactactttattgaataatcattaaattaatagagcatacaaattatattcaggtcatttaattttccttttttatttttcttactagagtataaaaacagttaccagaataccattaagtactaagttacttttattrgtgatgagaccaaaaggaaaaa

SEQ ID NO: 159009 - DNA, 528 bp, Homo sapiens
attttaaaatcttcatttttacccagaattaacagatagtgtgaactagagcgtgtgtctattttctcatctaagaaacgaacaactacattaaatattactagtctctttctgctttatrtgttctatgtgtgtctaagcctacttctgaataagaaaaaaaaagattcaaaacaatgacgtattggtgaatgcaatatattttcatagaagcccagcctagagaagtatgaaatgatgaaataaagaggggaatggatttttaactatctctttaaattagcagtaagactctagatataacaatggttttagaaatcagaatataatattgcagaatgcacttctgactggaaggcacatgacagcaacagttgtgaataaaattcctacacagtctactacattacaaaagaataacagaaaatactgctagaattgcaaaatctgtctgctctagttagaattacaacctaatttaaatgagtccagtgaacctacagaagaaagaatccattttcatcaaag

SEQ ID NO: 159010 - DNA, 528 bp, Homo sapiens
attttaaaatcttcatttttacccagaattaacagatagtgtgaactagagcgtgtgtctattttctcatctaagaaacgaacaactacattaaatattactagtctctttctgctttatgtgttctatgtgtgtctaagcctacttctgaataagaaaaaaaaagattcaaaacaatgacgtattggtgaatgcaatatattttcatagaagcccagcstagagaagtatgaaatgatgaaataaagaggggaatggatttttaactatctctttaaattagcagtaagactctagatataacaatggttttagaaatcagaatataatattgcagaatgcacttctgactggaaggcacatgacagcaacagttgtgaataaaattcctacacagtctactacattacaaaagaataacagaaaatactgctagaattgcaaaatctgtctgctctagttagaattacaacctaatttaaatgagtccagtgaacctacagaagaaagaatccattttcatcaaag

SEQ ID NO: 159011 - DNA, 592 bp, Homo sapiens
atctatgtgttacagaaatttcagcccacagactttacttatggagatactagttctaagccattccccctgaggtagtcaaacatgcaagttatgtagtacagcaaaaatacagctagtaaagggaatgagcacaacctatgggttctagccaaataggagccatttttgttagtttgtttatttcctagtaatcctttaaaatttattcaatagaaagtgcattaaccttcctgtggctaaacatttgttcactttccatgagatttctgataaatcataggtaacagaaaattttgcattagccttaaatagcaaacataatattttcttttttttaatggccaaagcagtttaccagcttttggcatttgagatgaggggcacaagggagatagacgtggaaagacagactttcttccctgtccttgtttttaactgctattactcatttattgaaacacagtaaggataaatggtattaggaaagggatatctttcctcaaccagcattcttgcaagctggggaaatgtttaaatctcaccctttctcttattcaaacttgkatgatctcttcacaatagtccaatt

SEQ ID NO: 159012 - DNA, 598 bp, Homo sapiens
aacactaatcccattcctgagagtgaagccctcatcatctgatcaccccctaaaacctcacctctgaataccccaggtgttaggatttccacatataaattttgaggggatacattcagaccatggcactaatatatcccaactggktaatattgtgtctagtatatcataaataggtaatgcataatggttgaataaatatataacaatctttctggactatacagtttggtgttttaggtttgcatctgtcaaagatgctgaaggaggagaagaaaaagagagagataaaagaaagagagagattacaccagacagcctctaaactccctttgataaccaaggtctcatgagtccaagaaataatcaaataaaagccactgaatattgcctaggcttacctctgctttctattaagctacaagcaaaataaaaaggaaaccagcatcatacttcttattaatggaatttcatgagcacatttcatctcaatttatatttcatggcatccaggtgctaagtgcagtttcaagcatactctactctcccataaattatacagtaaatcatcacttggtaatgggcactttatttttca

SEQ ID NO: 159013 - DNA, 623 bp, Homo sapiens
cctgggtgcaccaccctccagggacctctacgtgttcagctatctggaggctctctgaattctgtccttttgggccttttatggagacttcattggataggcttgattgacagccatgtggaaatgtgattggacaagaagagtataatctaatactaataactgagcagggatccccagcaagtcctgcctgttcaaattctttttggcctctctgtgcagtgttccttccccagggtacgaggctgaacctctttggaagcagaggtcttatgatctacaatcagacaaggtgggtcagaaaatttctttatgaccagaggtgggggaagattagagtgtatttttagtttctaaatcctgccttgaggagaaaaagaagcaggtgaaaaaacggcaggagaaaggtcagtgagagagagcttctgctttctgacacctaaagtgccccagcattataacaaaagactgtaataagggctatgggagtgataaactgggaactgtggatgaaaacacacacacacacacacacacacacayacacacatatacaatctcataatatcacaccatatttttactatgttctcacatggctgaagggggcaaatgagctctct

SEQ ID NO: 159014 - DNA, 577 bp, Homo sapiens
gtgaaccacaaagaaaaaagtagttgctgaatgttttttggtttctgctttacttttcatttggttgtgctagaatggtgaagtctgcctccctagtataaaatgtacatttctactgacatttaaaaaatggctctgagggtttcagacagaagtctctctagatgtgcaagaagtttcaattattctgtttgggaacattgtcattttttttttttttttgagatgctttttggtgtcgggaggcctcagctaagacacgtgggagagttaatgaacagaattgataatgacagrtaggaaaattgattgtcagacaagaaatggtaggaacataagcagggagatctgtctagggagatggaggatggggctgtcagtgatgggaaatagagatgggttgtggtaggggaaatactatagctactgacagaagacagtgccaacctgagactgggcaatggagctcaaaggcatatgaccatttaggacttaagaagagaggctaatttctcattgcattgtttctgggctacttcttacctcccaaactcaaatggattcaaggctggtaaag

SEQ ID NO: 159015 - DNA, 548 bp, Homo sapiens
tagtgagaaatggaatggctggctgctatttagaatgtgaagttagacacgtgccctttgaggaagtggcatttaaactgagacctcagtgactaaaggcgggcagccgttttgggatcttgggtaagaacttttcaggttcagggattggctcatgcaaatgcccttacatagtaatgggcttgactgtgagacagagacaaggcaagtgtggttaaaaagttgtgagaggagggtgtgatggggttgagagcagacatggtgtcagggaattagataacacagtatcttgaaggccatgataaggagttttacttttatttcacrtgcaatgggaagcagttggaggtttgaagcaggagagtgactctcctttcagttgttgttgttgttgttaactctactctgcttgttatgacaagagtggatggaagagggccaggagaggcagggatggtacttaggaggcctttgttatgatccaacatagggtaatagcaagtttggaatatggaggtagtagcagagatgaatgaaggatgaaactg

SEQ ID NO: 159016 - DNA, 563 bp, Homo sapiens
aagcttgaataagtgacctcrttgtgatgaagtggaagatgactctgaaataatataattcaatctccgcatttttcagatgaggaaactgaggaacagatgaggagactttcctgaggttgcccagcaggcggaacctggacttgaaccagggagtcccacctcccagtctttacaagttcctttactttgtgctctgggctaattaatgttttaggcagggccatttttgcttcctgggtctcagttcccacttgtaagagggaccggagcaagattctgttctggcattgcttcacagagccacaatcaggcaactcccacatgtccatcctgctcctcaaagcagcaggtcctccctcctctcctgctcagcccaccaccctcgtgtctgagccctgtggcagcacaagaaggcagaacctgacccagcttatagtggtgaccttcaacttcatccagaaatcagtggctctgaaggagtgttccctgtgataaataacaacacacaaaactaaaccatgttagtgaaaatggctattgtgcagtggagtgtgtaaacg

SEQ ID NO: 159017 - DNA, 527 bp, Homo sapiens
aataagaaataaagtgcctcattatgattctacaaaattagaaaaagccaaatgtgagatgttaacagtttttagagtctgaatcccagagatgtcaaagtgatctcttggactcctggccgtgctgaccatgaccctgacagtgactatgaccatggccctccatttgcatgggatgtgcctgcccagggctgcccaagccccactgctaatagaagtgctaggttgttttgttccccaagatgccctttgtggaattagcaagaatcmatttaactagttggctcatttgtttgttttcaagaatctgtaaccaactcttttctgaagagactgtgctccacttacacactccttgttgatagcacagacatttactaagaccccctatgtgcagaactatgtggtgagctgtgttttgagggatgcaaagagaaacggtcctttatgtttgtttttagtgtaaactgaattttctggtttacactctttctgttgcatgctcctcctggctacactttcactcc

SEQ ID NO: 159018 - DNA, 528 bp, Homo sapiens
acgaatgcttaaacaaaaagtgaaaatttcgaacgttcacccagaactagtatttgctaaaaacacatagtttgatattttgaacatgaccaaaaaggagattgtgattattctttttattcaagtatttgctaaaaatgaaccccaaaacccmataaaaagaaggctaaatctcctttatctccaataacttggattcaggaaacctgtgttctaattgtataatttaccccctgtggacttcatttttcttgtttgtaaattaatgataatacttggtctttctgcttcaaataggatgatggatattgtgtcaactgtgaatattaaagaatgatcataagtggtcaaatttttggtaaaatcaaagctccattttaaaatgtctacagaaaaagatgagctgagttccccattccttatcacactgtttaggagcttggatactcctgatcaaccttctatttccaagttgtatccccctaaacagacagtaaggtctacgctgctaagaatcaagcctgttat

SEQ ID NO: 159019 - DNA, 602 bp, Homo sapiens
taattttttgtatttttgatggagacagggtttcaccatattggccatcctcgtcttgagctcctgacctcaggtgatccacccacctcccaaagtgctgggattaaagtgaaccaccactccyggcttatacagtgattttttttctttcttttatttttgaaacagagtgtcactctgccactcaggctgagtgcagaggtgtgatcacagctcaccacagcctaggcctcctgggttcaagcaatcctcctgccccagcctcccaagtagctgggactatagatgccaccacacccagctgattttttttattttttttgtacagagagggtcctgctctgttgcccaggctggtctcaaacttctggcgtccagcaatcccccaactccagcctcctaaagtgcccagattacaggcatgagtcacctcacccaattgattttttacttttatcaaatttattctgatgtattataacatttgagtgtcacagagcttcaataggcagggtggatgttattatccctgagtgttaggtgaatgcactgtttcaaagagaataactttctccaggaaaaacaacgagttaatattataa

SEQ ID NO: 159020 - DNA, 602 bp, Homo sapiens
taattttttgtatttttgatggagacagggtttcaccatattggccatcctcgtcttgagctcctgacctcaggtgatccacccacctcccaaagtgctgggattaaagtgaaccaccactcccggcttatacagtgattttttttctttcttttatttttgaaacagagtgtcactctgccactcaggctgagtgcagaggtgtgatcacagctcaccacagcctaggcctcctgggttcaagcaatcctcctgccccagcctcccaagtagctgggactatagatgccaccacacccagctrattttttttattttttttgtacagagagggtcctgctctgttgcccaggctggtctcaaacttctggcgtccagcaatcccccaactccagcctcctaaagtgcccagattacaggcatgagtcacctcacccaattgattttttacttttatcaaatttattctgatgtattataacatttgagtgtcacagagcttcaataggcagggtggatgttattatccctgagtgttaggtgaatgcactgtttcaaagagaataactttctccaggaaaaacaacgagttaatattataa

SEQ ID NO: 159021 - DNA, 567 bp, Homo sapiens
aagagtttgaggatagactcaatagaacttggaatgaaggaatgaagaatgtgcatgtcagttcaagtcctctagaaagtggatggataagacagagttagaagtgcaacagattcattagcrgtaatgtctatgaaagacaaaacagagggaacagaaaggggtaggaaaagtctttagaccatgaggtaggtctgatatctgtgaaaggagaggagaaaggaaggttgattagataggaagagcctcagattttggtgaagctctgagatttgaccaacttattggagagctctgatccaaggaatgtcaggcaaggaatccttcattggacaaaaatggtgaggctcattcattgagtaggtgctacaggaaagagaatgacctcagctcaaatgttgtgatggatgaaaaggtgctacaggtgtaggctgtcagctaactgcactccttgccgcagacttctcttgagggaagatctggaagggtctcttccatggctgccacaggggtgagaagagataggaatcaaagatcaatccaaagctcctggatagatggctggat

SEQ ID NO: 159022 - DNA, 447 bp, Homo sapiens
acagtccaggctggtaataaactctgtcctccccagtgcacagacaggattgaagtgaggctcaagtgagattaagtcctaggagaasctttgtagcctgaacaatgtatgtcaccgtgagggatagtggtccagagggttactctgagcaagttttattagactatggggcctaccatcgtctaattaaaaactctggaaatgctagaaactgctctggaaatgccagcaacccctatggaaatgtgaatttttccttttggcaagtgatgtttgtacttgccaatcaattgcctggttcaatcctagatttattaaagtaatgcaacagccacaaaaatctctggcaagtcaacaacaacaaaaaaagggcttaaaaaaaagctgacctaaaagacccagcacatcccactgcccatgttgtcttcaagccaaccagaaagtgat

SEQ ID NO: 159023 - DNA, 525 bp, Homo sapiens
tactaaaaaaatcataatagaaaaataaacaaagatgcatattataatttatgaacaatgatgtttatcacagcactacttatgagcaaaagttagaaaacatcacaaatccttattgataggaaaatgattaaatacacaaaatatttaaaaagttttatgttattaattacaaataataattttagagtaatgatacaggaayatgttcacattataatgtgaaaaaagtaaaatataaaaatctgtacttacagactaatcttgatgttgtaataaaataaaacatatattttatagttacatgcaaaacaaaagacctgaaaggcatatgtagtttacagataattataatattcatctttatttttatttattttccatatttttacaattaacatttgttacttctccaataaaaggaaaaaacaactaatatattacctcctctttaccctaatcctgacagtcattttatttgttgtgccatttttatgcttatacaaacttttaatattttaacat

SEQ ID NO: 159024 - DNA, 565 bp, Homo sapiens
atggaaggcaatggacatgttcagcttagtgacctcagtcaaaagaaagctcgcggagcacttactagctgtgttcaaattcctggaggaccatggagtgaagatgagattagactcgcatcatgcaccttcaaraggctgcataaccaacagatgaaaattatagagaacaacattttagctgacaatcagaatgattttctaacagctgagctctctgaagatgacatgagctgccattacatgagctcagttctgagaggcagtgtgaactgtccttggcagaggagttgtggttgagttattgagacagccaagtgtaaagggatccctggagaacctctgacctgcctgcacactgggaggactgtgcatttgggtggagcctcgggaagctcatgccggttgcagtaggcaggagcctggcccctcctcttcctgggtggaagctgggattcaatctgatgtgagagcatgtttacaggaacctatctcgtgttgctgagtttttttccttttcgcccaataaattccatttttctcacccttcaaagagtctgcgagc

SEQ ID NO: 159025 - DNA, 368 bp, Homo sapiens
gcatcctgtacagcctttggaactcttaagtaatgaaacttctttctttataaattatctagtctcagatatttctttatagcaatgtgagaatggactaatatagggaaggaaagtataaaagaatgaggaagtaaataaaggaaaagtggagagaaacagtaggattccctctccattctttatcagaatcagatgataattacagcttcacttgaagttaatttcattaaattgtgaaattgaacagtttgcagacactcacataacatttatatcagtagttctsaaacattaataagtgaagaagtcccttttagcccaggaatctgtactttaaacaaactctccagataaccctggagcga

SEQ ID NO: 159026 - DNA, 487 bp, Homo sapiens
tcaccttttgacatatgactcttctgaagggctctgtttctgcaatggggcaaaaggagcaatgatgggctcagtccttgttcctatctgccaggttttagaaaagcacccacttttcagttgaacagacctagggatgaatccctaattgttgtgtgagcttggaggtgtcttcagttttgagcaagggggcagaattgtgaactgggaaagggtaagatcctatagaggcaggtatacagggctccattgactgtgtcaytttgggtgaaatagttttcaccttagggcctccatttgtattaatctaacatgagaattgtaacaccttgctgtagtcagggttgtagtgaggagtaactgagatgacatgtgtaaactagtataacacggttcacagagagaacattggacaagtgtgggctcttctctaggtgccaggttgagagtcaagctctccaactccacatcacttcgagtcacaggg

SEQ ID NO: 159027 - DNA, 597 bp, Homo sapiens
taagatgttgctctcctactgttgtaaagaagaaattgttccatgggaactattttattatgaataagagcatattcttaaccttttattctttgctgatagcaacatttatgtgtccgatagttatatattgtcttgtgtttttaaaaagaacttgcctaacagtttgggtttctactgagggtgtagcctgttgtacccactgaagcaaatggctttgatcagtccttccctggtggctgggctgcatatgtataaacagaggattattgagtgttgggaatgaattctttgccagacacatattttaatgagattcttagaattgcttcaagctctgttttactaattctattcctagttccttagaaaggaaaagacaattaaggaaagagggcttgggccttgctgacttttcacactccttggaataaagttttggtttccatacagttcttctgagaagagtgaactgaccccagaagggctccatcatatgttttataagtaaaactaaatgrgcattttcacataattcaagtaattaacgtccatgagacaagtctgtatgtgacacagaagggatacagaggagca

SEQ ID NO: 159028 - DNA, 502 bp, Homo sapiens
aagtgacatgtaaaatgccaccaggcaaggtttgatcctgaggagagaagtcaatggtttgcaaagggtgcatgaacttgctttacaaggagaccaactgatccgagggcaactcttgcttatcccctcctcatttttcttcaaggaaacataaatgatatttgctgagccaagcctgtgcaaagtgctttgcataggtcatgtcacttgagaccaaagagtaaacccaagcaggtgaatgcaaagattttgtagcaggcagagaaaactgctgattaaaattctattaraccgcaagtctcctgtaaatttcactagcattcccaggtctcttgcaaaagtgcagaacagctactagaaatatgacaacaaaggcaattaacctcataaaacaatgcagatgaaaaaacaatgggaggaaaatgattaaggttaaaataagagagggaaaccaacatattaagagaaagaataagattttaaatgaggtcataatagaaac

SEQ ID NO: 159029 - DNA, 587 bp, Homo sapiens
tctaatactatcaattagtttagcttgtttggagaacatatattatatatgttcttttgtggctggcttcttccaacattattttggggatagtattcatttacgctattgcatatggcaatagctttttttttattattatactttaagttttagggtacatgtgcacagtgtacacgttagttacatatgtatacatgtgccatgctggtgtgctgcacctattaactcgtcatctagcattaggtatatctcctaatgctatccctcccccctcccccctgcatatggcaatagcttggtccttctcattgccatatagcatttcattgtatgaatattccactactgttttatccaccctactgctgacagctgtttcacttgtttaaagtttttagttattctacatttagttatgtgttatacctttttatttaaattaggtcttttatagctattgttagacttgctcttatatatttggggttttttaataycagtgtaagtgatattgttttctcaatttcatatcttaattgtttataactagtatgtacaaataagattcattttaaaatactggc

SEQ ID NO: 159030 - DNA, 375 bp, Homo sapiens
ttcatttttcctctttttttttttttaaagcyttaaccaagtatcaggtttgattccaatgtgaagtgaggataaactctgaattatgaaccactggcctaccattccccagtgtagaatgttcagtttcttttcaaaatgtttaaattatataagtttaaaacaactgatgagccagggttaataattattgtttaatcctattggcatttggtcccttcaaagatatttttcaaacccatatgctacacatacattatgagtgccttgactcatgtaacctcatttgggggacacatagttttaaagcaaatgacctatattattttcacaaaaatccacttggattaagaaattgtcattgaataagaaaaa

SEQ ID NO: 159031 - DNA, 375 bp, Homo sapiens
ttcatttttcctctttttttttttttaaagccttaaccaagtatcaggtttgattccaatgtgaagtgaggataaactctgaattatgaaccactggcctaccattccccagtgtagaatgttcagtttcttttcaaaatgtttaaattatataagtttaaaacaactgatgagccagggttaataattattgtttaatcctattggcatttrgtcccttcaaagatatttttcaaacccatatgctacacatacattatgagtgccttgactcatgtaacctcatttgggggacacatagttttaaagcaaatgacctatattattttcacaaaaatccacttggattaagaaattgtcattgaataagaaaaa

SEQ ID NO: 159032 - DNA, 375 bp, Homo sapiens
ttcatttttcctctttttttttttttaaagccttaaccaagtatcaggtttgattccaatgtgaagtgaggataaactctgaattatgaaccactggcctaccattccccagtgtagaatgttcagtttcttttcaaaatgtttaaattatataagtttaaaacaactgatgagccagggttaataattattgtttaatcctattggcatttggtcccttcaaagatatttttcaaacccatatgctacacatacattatgagtgccttgactcatgtaacytcatttgggggacacatagttttaaagcaaatgacctatattattttcacaaaaatccacttggattaagaaattgtcattgaataagaaaaa

SEQ ID NO: 159033 - DNA, 375 bp, Homo sapiens
ttcatttttcctctttttttttttttaaagccttaaccaagtatcaggtttgattccaatgtgaagtgaggataaactctgaattatgaaccactggcctaccattccccagtgtagaatgttcagtttcttttcaaaatgtttaaattatataagtttaaaacaactgatgagccagggttaataattattgtttaatcctattggcatttggtcccttcaaagatatttttcaaacccatatgctacacatacattatgagtgccttgactcatgtaacctcatttgggggacacatagttttaaagcaaatgacytatattattttcacaaaaatccacttggattaagaaattgtcattgaataagaaaaa

SEQ ID NO: 159034 - DNA, 585 bp, Homo sapiens
gtactccaagagtgaggggtcaggaagtcaggagcaagcagcaaaggagcctgagaaggacagctagtkaagtaggaagagaatgaagagcatggcctcctggagatcaagtgaagcagctgtgtccataatgagagcgtggccatcacatcaattgctactgagagatcaataggatgaagctagagaattgaccactggacttagtcaaggtcattagtgacctcatctagagcagtttgggggatggcaggagtgaaagtctaactagcatgtgctgtggaagaacaggaggagagaaaaccctcaggttactatatttgcacagtgggctatttaaccaatcattcatcttgtcaaaactctgctttagatttgtacacccaagttcatagctgcattatcccaataacaaaaaggtagaagcaacccaaatgtccatagatgaatgaatgataaacaaaatgccatgtaaacatacaatggaatattattcagccataaaaggacggaaattttaatgcctgctacaacatggatagacctcaaggacattatgttaagtgaaataagccagacaaatac

SEQ ID NO: 159035 - DNA, 378 bp, Homo sapiens
ggatatcttcaaaactcatactagccaatctcaggaaaaagarttactcctcaggtggtagtttaaatcatgtccacaaattcttcaacattctctttataaagtgaagcctaaatgtcttctccttcactgtagactggactcagtaactcacttctaacaaatagaataaggtggaagtgacatgtttgacttctgaggcctaggtttaaaagaaattatggcttctttcttgctcatattcttggatcacttgttttggtagatggcagctgccacatcatgaggatatcaagacatcctatggtgaggcctgtgtgacaggaaactgaggcctcctgccaaaagccctgcgaatgagccatcaaaaaagtggat

SEQ ID NO: 159036 - DNA, 568 bp, Homo sapiens
cctgtcctctccacttactaggtgcatgaccttgggcaagttactggattttctctaatactcagtttcctcatggatgtcacagctatttcatcgmgtagagaggttgggataaatatatggactgacacacagcatacaatcatcattgaaatgtatccttatgactgtttttgctctttaatgattattagtgttcccgacagcacattaaagaaggcagtctggcagaatgccttccctgcctctttgttctgtgctctgacattggctagcattaatacactgtcactgggtctaattgaataattttcatttagcaaaaatccactattggccaggtaggacacacagagaatccctgccttcacggagcttatgttctagtgcatgcattctcaatgagggtgacgtcatgcctagaggatttggggaacggcaagtttcccagggttgttggagtggaaagaatgctgaggagaatgctgagagatgagatccaagaggtaagggctgcagagggggcagaatgtattagcccatatataaagatatatataaaaatatc

SEQ ID NO: 159037 - DNA, 544 bp, Homo sapiens
tactattgtaattgttttggggcacctcaaactgtgcccatataggatggtgaacttgatcaataaatgtgtgtgttctgactgctccactgaatggttgtttcctcatctctttcctgctcctcagggttccctatttcctgagaccctaaatattgaaattaggccagttagtcctatgatggcctctaagtgttcaagtgaaaggaggagtcacacatctctcactttaaatcaaaagctagaagtgattaaagttagggaggaaggcatgttgaaagagaagcctcttgtgccagttaggttgtaaatgcaaaggaaaagttcttgaaggaaatgcaaagtgctactccagtgaacatccagatgataagaaagtgaaagtcttattgctggtatggagaaagttttaatggcctgaatagaagatcaaaccagccataacattcccttaagccaaagcctaatccagagcaagaccctaattytgttcaattatatgagggctgagagaggtgaggaagctgcagaaaaaaggtttgaa

SEQ ID NO: 159038 - DNA, 413 bp, Homo sapiens
ctgggcaattgggcaatctatattaaaggacatatcacagcaaattgcagacagagtgaactttcaaagcctcaggcctcattgtttcattcataatttttaaaaatcttaaaatctttcaaaagactaaaagcgaagcccaaattcctcaatatggcatacaaggcaccccagctctggcccctggtcccctcctcagcctcacctctcaccactcccctcctcctgccccagccattccccagcctcgctttgtactcgccttttccagcctatctgcctgtatttcagttctaccaatggcctcgtatctcttccaaccaaaacgtttgtttttctcctgartgaaaccaccatgcccaaaaatggcctccatttggttgacttctacacatccttaagagggcggctct

SEQ ID NO: 159039 - DNA, 588 bp, Homo sapiens
ttcctttcttgcttagcccctccttacatctgtttctttggaacaagattgtttcccttttatttgccagattttttattacattactttaagcttgtagacctagctgaagttaaaagctaaaagcaggcttacataacttgcttgtaatatgattgtctagatttatatatgaagcctatatttaacatgtaagaatttgaaattaatttataatataacatggaagcagttagtcaattatgtgtgtgtgtgtgtttgtgtgtgcawccaatacctcagagtcatgaagctatgtctcagttactcaattatcccagtgaaaggatgtgtgagtccattttcatagtgctgtgaagaaaagcttaagaattgtcttggtaatttacaaagacaaagaggtttaatggactcagttccacatggctggggaagcttcacaatcatggcagaaggcaaaggaggagcaaaggcgtgtcttacatggtggcaggtagagagtatgggcaggggaactgccctttataaaaccatcagatctgatgagacttattcactatcatgagaacagcatgggaaaaacctgcc

SEQ ID NO: 159040 - DNA, 595 bp, Homo sapiens
agatgtactaaaaatagattttaccctagcatctttctttgcaacatttttcttatctaagaattatgttgaagaatatagttaaatcatttattacatagtttgtgtactttaggtaatggaatctaaagcaggttcataaatcaaaagtagacagtataacttggaaattttaagagtacatataagtgctgagatttttatgtatgtgtgtgtgggaaccaaatatcactaaacgtttttcaaaatggaacactttttgttttcttgtttttattgtttgactagaagatttactcatttttataagttcaagagagaaaaaaatccattcaattcccttagaattggaaatgaagacttctttaaggtcacagcctgaaaaaatatagtgtaccataactccattccaaatagatctgaaccacaagctttatacatgagactgagaaaataaatatgttwaaattaagatagaaagcaacaaatgtcaattgttattctttcatctctagaaggaaagcataatcaaatctcaaattggacctttcgaaggtggtatatttcaagcactgtttatttcaacttgttatag

SEQ ID NO: 159041 - DNA, 381 bp, Homo sapiens
tctcaaacttgagtatgcatatgaatcaactgaggagtttgttaaaatataggttctgatttcatagttttctgatgaagcctgagtttctcatttctaacaagctcccagatgatgctgatattgctggaccacagaccgcacactgagtagctagcatctagagcagtgagtcctatatgtgacagcccatcagagtcacctgagggaggtttcacaccaaaagagaagcctgtgtctaaacctagttctgaattaggttcactcaagtgggcctctgacatgtgtggttaataagctycatcagtgaggatgagtcccagccagggtggtgaaccactgacttagacaaattattttctctgctgagagtgcacatag

SEQ ID NO: 159042 - DNA, 491 bp, Homo sapiens
cagcccatcagagtcacctgagggaggtttcacaccaaaagagaagcctgtgtctaaacctagttctgaattaggttcactcaagtgggcctctgacatgtgtggttaataagctccatcagtgaggrtgagtcccagccagggtggtgaaccactgacttagacaaattattttctctgctgagagtgcacataggtataggtgcatgttggagacatatgtgcatgaagatttggggtagaagtgttttgtaagatcaagagagaaaaggaaggggttttcattctgagcaggtgcccctcctcccttcaaagcttcttttctataaagtgaagcagcgctgaattttgaggcaaaatagtttgacatatagctacagacacatcatttagagtcaaacctggagaccttacaatgtccagtagggttccacatgacctggattcccattgcctctctgcaatctatccccttcctaaccctactgcag

SEQ ID NO: 159043 - DNA, 585 bp, Homo sapiens
gccatccatacagcatcttgcatgtatgcaagtcctgctttttggggagagtttcagattcttagtaaggctataagcaacagagaaggccatgcaaggtaggtttcttgggttcgcttttttagatgtcgtctgagcatttcattcattttctygacttttcctgaggattgtggcctccaggtgcagcgtaagtgatattgtatgcctaaggcctgggatactccctgggttactgcagccttgaaagcggggccattgtcactctgtaggcctcggggaagtctgaatctgggaattatttcatgaattagtgcctttattacctcttgggccttttctatcctacaagggaaggcctctgcccaaccagtgaaagcatctacccaggctagtagatactgaaatccttgggatttgggcatgcgagtaaaatctagttgccagtcttctcctgggtaatggcctgttctttgttctcctgaaggagcttggcgataaggcagggattatttctttggcactctttacaggccctgactatctgcttgatagctttgaaaaggcctggtccagtaaataatg

SEQ ID NO: 159044 - DNA, 490 bp, Homo sapiens
tccttcccaggatatatctagggatggggaattaaagggaagggacttgactaataccatgtcactagggtggaacaattcctttccttcctctcaggaacaggttccctgtaatgttttaagaacttgttgatatttggctaaggaggtgatgtctgcaactaagttggtcagctctctgtcaagcacaaggtcattggttaggaagggccatccatacagcatcttgcatgtatgcaagtcctgctttttggggagagtttcagattcttagtaaggctataagcaacagagaaggccatgcaaggtaggtttcttgggttcgcttttttagatgtcgtctgagcatttcattcattttctcgacttttcctgaggattgtggcctccaggtgcagygtaagtgatattgtatgcctaaggcctgggatactccctgggttactgcagccttgaaagcggggccattgtcactctgtaggcctcgggg

SEQ ID NO: 159045 - DNA, 585 bp, Homo sapiens
gccatccatacagcatcttgcatgtatgcaagtcctgctttttggggagagtttcagattcttagtaaggctataagcaacagagaaggccatgcaaggtaggtttcttgggttcgcttttttagatgtcgtctgagcatttcattcattttctcgacttttcctgaggattgtggcctccaggtgcagcgtaagtgatattgtatgcctaaggcctggratactccctgggttactgcagccttgaaagcggggccattgtcactctgtaggcctcggggaagtctgaatctgggaattatttcatgaattagtgcctttattacctcttgggccttttctatcctacaagggaaggcctctgcccaaccagtgaaagcatctacccaggctagtagatactgaaatccttgggatttgggcatgcgagtaaaatctagttgccagtcttctcctgggtaatggcctgttctttgttctcctgaaggagcttggcgataaggcagggattatttctttggcactctttacaggccctgactatctgcttgatagctttgaaaaggcctggtccagtaaataatg

SEQ ID NO: 159046 - DNA, 369 bp, Homo sapiens
aattactattttccacactccattatgtcatgtttattcttaccagtctttcctatgwcattgctttatctatgactattttgggaatctacttgagaaatacaggaataaagtgtttggtgaagagattttaggcctatttagagtaagcctctttaaaagtgttcccaattaaattctgattggtggatttctgtgttactttatttacttttgtaacttttcagtattttgtaaatttacataatgtttctgaattactttcacaattagaaagaaatttcaaaaatagaccaaatgcaaatcgtaaatggtatgaatattgtcataataatcaaggatgtctacaccaattgccttattcatgtg

SEQ ID NO: 159047 - DNA, 591 bp, Homo sapiens
ttcaacagtagtcatccctggatgacggcatgacagatcctttcgaatgtgtttatacattcttttattttacacatttgcttcaaaaacgatgtatcactataataatagaagtattatttttaaaaaagattagaaattatgcctacatattaaaattataaattggttacttttattggtatttaggcatatcttaaataaattttatttttttcttctctaactcttcttaaaattaaacaaattttctatgcagcaattttttagagaaagtccttacgtttattaatatatattctcaattaaaatatattactctccaatattttggataattgaggcatcattaggatgtttattcatttgttaaagttgtttttcaagagtctactaagtgctataagttttagttgctgtggatacagcaaaagcttagtagacataaatccctacctatctttattgagcttacattcaactgacaaaataaaaatgtatacttctggtctatttttgtgtaggtttaccaatctgaactcataagycaattcagccttttcatttgtgataattttgttatgataaata

SEQ ID NO: 159048 - DNA, 587 bp, Homo sapiens
atcagatgcagttttttaatggcctcttttcccacagtgtagcacgtttaacttttggattgmtacatcaacactgacaatccctgtggtacagatgtgtaagtttagactttcctaagtcttatgcttggtgaatcatgcaagggtagggagactatgtgttactttcaactttctagccaggtgcatctctcaaccaatgaattctgggattttcaataatcaatttaatgagatcaaacatagcctgctaagagcaaccataggtgaaaacttttctagttacttcccagcaagtaaactactctgagcatatttatagaaggctctggtttatgtccacagcacctcagatgtctcctaagaaggagaaaatgagttacaggccctgtgtgtgatcaccagattgtgagagggctctaatgatccctattttaggtattcacatttgtgtgtagtttcctgtcacatgttaattggattggtgtttgaccaacagaatataacagaagccattatatatgacttcagagatgggatcataaaagacactgtggcttggagcttttctctaataagaggagctg

SEQ ID NO: 159049 - DNA, 587 bp, Homo sapiens
atcagatgcagttttttaatggcctcttttcccacagtgtagcacgtttaacttttggattgctacatcaacactgacaatccctgtggtacagatgtgtaagtttagactttcctaagtcttatgcttggtgaatcatgcaagggtagggagactatgtgttactttcaactttctagccaggtgcatctctcaaccaatgaattctgggattttcaataatcaatttaatgagatcaaacatagcctgctaagagcaaccataggtgaaaacttttctagttacttcccagcaagtaaactactctgagcatatttatagaaggctctggtttatrtccacagcacctcagatgtctcctaagaaggagaaaatgagttacaggccctgtgtgtgatcaccagattgtgagagggctctaatgatccctattttaggtattcacatttgtgtgtagtttcctgtcacatgttaattggattggtgtttgaccaacagaatataacagaagccattatatatgacttcagagatgggatcataaaagacactgtggcttggagcttttctctaataagaggagctg

SEQ ID NO: 159050 - DNA, 244 bp, Homo sapiens
tttatggagtttggagtttgtgctaagtgccaaatggagccatttagagaatgttaagccagcgagtgaaactatctgatatatatttttaaaggtttcttttcttatactggtrtgaaacataaactagaatatctttatcttattctaaaatacagcataaacacagttgaccccatgttccatctgagacagcaactgtgggatcatcatctgtgacatattccctctgtttcaacaggtg

SEQ ID NO: 159051 - DNA, 508 bp, Homo sapiens
aacattatttattcctacattcaatatttattagagggtgcaatcctcagtctatcattacttcttaatttattagcaggaatattcctataatgagtaacttgaaaaacttttaagaattgcaattttggagcttcakttttccttgcacacttagtgaatgtaatggtatttagtgaaattagtgtccactaaataataatttattaattgatttgttcgtgtgttaagtgcttaacataataaccaggtatagctttatttctactctgcttgataaatgtatcaatattacagtcctcatatgttgcttatttataacagctattatttgtctttagagaaatgcaatcccacttggccatcgttattctcagttatgactacaaaacagaaaatgaagaaataatgtttctatttggttgatgcaattgaaaggctataatgaaacattctgataattaggattttccatgagtacccttattttcaaatcattttgtaagat

SEQ ID NO: 159052 - DNA, 508 bp, Homo sapiens
aacattatttattcctacattcaatatttattagagggtgcaatcctcagtctatcattacttcttaatttattagcaggaatattcctataatgagtaacttgaaaaacttttaagaattgcaattttggagcttcatttttccttgcacacttagtgaatgtaatggtatttagtgaaattagtgtccactaaataataatttattaattgatttgttcgtgtgttaagtgcttaacataataaccaggtatagctttatttctactctgcttgataaatrtatcaatattacagtcctcatatgttgcttatttataacagctattatttgtctttagagaaatgcaatcccacttggccatcgttattctcagttatgactacaaaacagaaaatgaagaaataatgtttctatttggttgatgcaattgaaaggctataatgaaacattctgataattaggattttccatgagtacccttattttcaaatcattttgtaagat

SEQ ID NO: 159053 - DNA, 508 bp, Homo sapiens
aacattatttattcctacattcaatatttattagagggtgcaatcctcagtctatcattacttcttaatttattagcaggaatattcctataatgagtaacttgaaaaacttttaagaattgcaattttggagcttcatttttccttgcacacttagtgaatgtaatggtatttagtgaaattagtgtccactaaataataatttattaattgatttgttcgtgtgttaagtgcttaacataataaccaggtatagctttatttctactctgcttgataaatgtatcaatattamagtcctcatatgttgcttatttataacagctattatttgtctttagagaaatgcaatcccacttggccatcgttattctcagttatgactacaaaacagaaaatgaagaaataatgtttctatttggttgatgcaattgaaaggctataatgaaacattctgataattaggattttccatgagtacccttattttcaaatcattttgtaagat

SEQ ID NO: 159054 - DNA, 508 bp, Homo sapiens
aacattatttattcctacattcaatatttattagagggtgcaatcctcagtctatcattacttcttaatttattagcaggaatattcctataatgagtaacttgaaaaacttttaagaattgcaattttggagcttcatttttccttgcacacttagtgaatgtaatggtatttagtgaaattagtgtccactaaataataatttattaattgatttgttcgtgtgttaagtgcttaacataataaccaggtatagctttatttctactctgcttgataaatgtatcaatattacagtyctcatatgttgcttatttataacagctattatttgtctttagagaaatgcaatcccacttggccatcgttattctcagttatgactacaaaacagaaaatgaagaaataatgtttctatttggttgatgcaattgaaaggctataatgaaacattctgataattaggattttccatgagtacccttattttcaaatcattttgtaagat

SEQ ID NO: 159055 - DNA, 607 bp, Homo sapiens
catgcccagctaatgtttttttttcttttgtagagactggttttcactatgttggccaggcgatccttcttgttttatactagtcactgtgggccaaaattttaaagactaacacttatgttatgttcttaaatctactacataataatttcctttgaagaaatacaatagcttaaattaatgcccttttgattgcactgaaaactccatatgttaatccaaatgcatcccactcrtgcatcccagtcctatttgctgaggatgactttaccagagttcagcaaatatttattgaggactaatgtgtaccaggctgtgttctagaagtggagggaatgaataatcaataattatgaagatgaataatgtgagattcaggtcctctaagggctcacattttgttttggtaagactagcaggcatttcgcagattgtgattggttcaattatacgttcagcaagagaactgaaacccagaaagttaagaacagcagcctggataagtaagacttgtgaagagccttgaaaatatactttcggtgcctcaaaaggaagggaatgtgtattccagaaagagaaagtcatgttggcaaaagcatggaggcag

SEQ ID NO: 159056 - DNA, 607 bp, Homo sapiens
catgcccagctaatgtttttttttcttttgtagagactggttttcactatgttggccaggcgatccttcttgttttatactagtcactgtgggccaaaattttaaagactaacacttatgttatgttcttaaatctactacataataatttcctttgaagaaatacaatagcttaaattaatgcccttttgattgcactgaaaactccatatgttaatccaaatgcatcccactcgtgcatcccagtcctatttgctgaggatgactttaccagagttcagcaaatatttattgaggmctaatgtgtaccaggctgtgttctagaagtggagggaatgaataatcaataattatgaagatgaataatgtgagattcaggtcctctaagggctcacattttgttttggtaagactagcaggcatttcgcagattgtgattggttcaattatacgttcagcaagagaactgaaacccagaaagttaagaacagcagcctggataagtaagacttgtgaagagccttgaaaatatactttcggtgcctcaaaaggaagggaatgtgtattccagaaagagaaagtcatgttggcaaaagcatggaggcag

SEQ ID NO: 159057 - DNA, 587 bp, Homo sapiens
gtgtggttaagaggttttaaagcaccatcaaatagcaaacctgtgtttaagaaacacatagcctgtttcatgtaattttaattggaaggagttactggcttgctcagttggtatatttttcccttcarttatctatgtgggagagatatgatgtttccttactggctaaaaaacttgtatcaagctaaagggtgtttcagcagagatggaagtggttgttataataaaatggacttaaagtagacagtctgtcaggcatatgacactcgctcaaagccagtagaagccatccatcagtgaattttctggttaagacccactcaaagctatatctgacaacttctcattcagatatatgaaaactgtagtattgcatttctttgtttattggcatcagtgagccagtttcactcaaagcagtatttcttgtgatgtaggtttgtcagttagcttgcaaataaatacagaatagctatttttgctgtcatcttaccattcctggcataccattcaaagctcatttttctgaataaccagtaagtgagctcatcaaaatgcataaagtcttttgcttcactatattaata

SEQ ID NO: 159058 - DNA, 669 bp, Homo sapiens
gtaatattgaagaatgaagagggaaagcaatccaaagttaccaattaaacctttggttacactaatctttcagaaaaatttatgtttgctgtacttgaaaatgttattaaattacatgcaatgagccaactacctaaatattctaattaagtgatctttttaaaatttgccttactttgcatcccagacatcacagacaccacattagcagtaatatgcctagtagctgcaatggaaactccccaagcttagcagccagaccagtcatttttctgggaccagtctcccgaaagcatacctaggaatgcctacatgcacgacctgtgtttccctgggctccttcagtttgtgtgtccaggagaatttcatgttctctgaggggattctagtaggcaatgctacaagagagtgctttatcttatgagtaataaaagcttttggtttcatttgctttagttattacttggtggtttttttaaaaagccactgtgggctccttcagtccaagttgggcactaarccctacctatactaccttagaattgtcttccagatatttacacaagcctcacatcatctcctcatcaaaccacttcctgatttttccaaacaccattaaccattatacccacttagaattctatgagttttccagtttttgttgctatt

SEQ ID NO: 159059 - DNA, 669 bp, Homo sapiens
gtaatattgaagaatgaagagggaaagcaatccaaagttaccaattaaacctttggttacactaatctttcagaaaaatttatgtttgctgtacttgaaaatgttattaaattacatgcaatgagccaactacctaaatattctaattaagtgatctttttaaaatttgccttactttgcatcccagacatcacagacaccacattagcagtaatatgcctagtagctgcaatggaaactccccaagcttagcagccagaccagtcatttttctgggaccagtctcccgaaagcatacctaggaatgcctacatgcacgacctgtgtttccctgggctccttcagtttgtgtgtccaggagaatttcatgttctctgaggggattctagtaggcaatgctacaagagagtgctttatcttatgagtaataaaagcttttggtttcatttgctttagttattacttggtggtttttttaaaaagccactgtgggctccttcagtccaagttgggcactaagccctacctatactaccttagaattgtcttccagatatttacacaarcctcacatcatctcctcatcaaaccacttcctgatttttccaaacaccattaaccattatacccacttagaattctatgagttttccagtttttgttgctatt

SEQ ID NO: 159060 - DNA, 583 bp, Homo sapiens
  misc_feature (1)...(583): n = A,T,C or G
aactacattttgatctatgaattttttttatgagaagatatctattatattcagagaggtctttgattatcactatactatatagtactatctaactcaaaaacatttttctctttanaaagaataaggactgggaaattagctacaatttccagccagggatttaaaggctaatttcaaggcacttcaacaggttgagttaacacagcagataagttcttctctataaatttcctactgacatgtttcgtgatacaacaagcctcatctgaaaascaggtaactttttcttcttttatctgagcagaagcatgattgcattttttaaaagtaccctgtctatggaaaaccaatttagtttcattaatgaaaaggaagcacaatgtgattgagaatgtaatacggaattatagttcattaattcttcaagtatgtaattttccaggctcctgatcccccattgatttctgcacacccccacaggtcccactaaatgtgagcaaaaggaaatttaatcgtgttgctatgtcatgtgtggcgatgctggtgctccacaattaggcagaaacattgtgagagggat

SEQ ID NO: 159061 - DNA, 614 bp, Homo sapiens
agaaatcatagcaaaacgtgcatagctcaaaaaagaaaaaaaggactctttctttctttctctctctctctcctttgaaagaaattctattattccatggcccatcattacattttatttataaacaatatttttaagactaaattattcaaatgttatttatttgtttatttttagacaaggcctcactctgttgcccaggctggatgacagtagtatgatcacagctcattatagccttgacctcctgtgtccaagcgattcttctgcctcagtcttttgggtagctgggackacatgtgtgcactaccatgcccagttaattaaaaaaaaatttttttttctgtagtgatgggatctccctatgttgcagagactggtctcaaactcctgggctcaagctttcctcccaccttggtctcccaaagcactgggattacaatgtgagctactgtgcctggtctgctctttttgataataataattttgattttcttaaaaaaatgtgatgagcagaaactcagctaattaggcaaattaggacacatactaggaatttattttagctttcatattcactcattttaacatattttctggacaacaggtgtttc

SEQ ID NO: 159062 - DNA, 429 bp, Homo sapiens
catgtacacgtatgtttatttcacccacttttttaaagaaaagatagagtaagtaaattgccaaaggtgacatagctattaaattgacaagcctgaagttacacacagtaccatgtaaatgtaaagtccctaataaaacactgcaatatagctccaaaatggcagttctcacacccatgagcttttactgttactcctctccctcctgcctgactgcctttttttgcattattttcttctgttgctgcttatctcctaaatgtggaagttttacaagattatacaygtaatcatctcttttctttcttattaccatctcctttctggatctcagtcactttcaattcttcaaaaagagttattctatctcgacacctctcctaagcttaactcccactcccaaggggctatattgtattttcacttgga

SEQ ID NO: 159063 - DNA, 229 bp, Homo sapiens
ttgctgccacatgtgctattctcggcccagaaagccccttcccactttctttgcttaactcttctactcacctcccactcagatcacacaaaactccttcagaaaattttctttgagactctctcagtctcatttagatgagccctgtagaacctgtgtttcattttgttataacatttgaaagccagaatgtgaagtggttargtgaaaggactttggagtcaggctg

SEQ ID NO: 159064 - DNA, 521 bp, Homo sapiens
ggcaaaatgaaaaggatttgcagttatcaaaatatagctggctcaagtagcctccagggcctctaggacagattgatcaagttgacggtgactcactaatgctcctgcttctctgtcttctaacttggtctctgcattctccatcctccacgcgcaatccaaaataataaactaaatgaaaatgattactttgaaagtgagacgtgaccattatggaaagttccagatcagtgaaaaacagaataatggaatcataatgtgaaactcttgagaaacataattttctaaaagagaagmtgacaaatatatatatatgtgtgtgtatatatatatatatatatatatatatatatatatatttctgaacaagtgaatgttggggaaagtacactactgatgttaattatagatttattttggggataggaaagtcctcttttttaaaatatttactctctgtcactacttcaggactttcatgactcagcatatttgcctaaactgtttccttagactgctgt

SEQ ID NO: 159065 - DNA, 521 bp, Homo sapiens
ggcaaaatgaaaaggatttgcagttatcaaaatatagctggctcaagtagcctccagggcctctaggacagattgatcaagttgacggtgactcactaatgctcctgcttctctgtcttctaacttggtctctgcattctccatcctccacgcgcaatccaaaataataaactaaatgaaaatgattactttgaaagtgagacgtgaccattatggaaagttccagatcagtgaaaaacagaataatggaatcataatgtgaaactcttgagaaacataattttctaaaagagaagatgacaaatatatatatatgtgtgtrtatatatatatatatatatatatatatatatatatatttctgaacaagtgaatgttggggaaagtacactactgatgttaattatagatttattttggggataggaaagtcctcttttttaaaatatttactctctgtcactacttcaggactttcatgactcagcatatttgcctaaactgtttccttagactgctgt

SEQ ID NO: 159066 - DNA, 363 bp, Homo sapiens
acatctgttgctcagtggatccacagtgccttcaggaactgtgaagttaactgtctcatgggagatttctgttaaaagaatgttctttcattaaaagaccaaaaagaagttaaaacttaaattgggtgatttgtgggcagctaaatgcagctttgttaatagctgagtgaactttcaattatgaaatytgtggagcttgacaaaatcacaaaaggaaaattactggggcaaaattagacctcaagtctgcctctactgtgtctcacatcaccatgtagaagaatgggcgtacagtatataccgtgacatcctgaaccctggatagaaagcctgagcccattggatctgtgaaagcctctagct

SEQ ID NO: 159067 - DNA, 388 bp, Homo sapiens
cctttttctttataaaacgtagtctcataagctggtgagatggcctctagtcttacccagtcctaccggcttgacacatagctgctcacctgttcttcccaaagtgcagcttccacatcactctcctattaataacctttcagtggctcttgattgttcacagaaaaaaaagacattctttcacctaaatccgtcttacraaattgtattttcctctgtgtaatcaaatgatgaatgtgaacgtgtgttgtaaactctgaaggattattttggagatgggcatggaatgtgcacatattagatacctcttacgagccagttactgcttctcctgtgaggcctcgtatgttaacagcaaactatgaagagggaaagtattattcctagt

SEQ ID NO: 159068 - DNA, 452 bp, Homo sapiens
aggcaagggcaacgatattcacagtggcattgttcatagtagtraaaaattagaaataggctcaatgcccatgaattaatgatcacctaaataaactatgatatatgcatatgacagagtactatgctgcaattagaagaattcggtggatacgtatgcttcaacatggtaatttctccaaaacgcactgttctgcaatctttcaaaaattagttagcatcatgtgtagtatgatccaattaggcttgtgccatactgcacagaacaatgtttaaaggatacatatgaaaattagctatgattacttttaggcaaagaaatggactcaaggaagtagacagaattcaagtgagacctctgctttttacattagatacatttttattatttttacaacaagaatgcattcacttcttacataacatgtacaaaacttacataattacttgtaa

SEQ ID NO: 159069 - DNA, 555 bp, Homo sapiens
ttgctctgggcccatccgtcatgctaaacacagaattagctgggtcttttccttactaatgactggytcgttaatctgattttctggatttccattttacaggtttaattgggctcctggccagtgaaaatgattcctttggacaaatgcattggccattaaacacatctatctcttctgacttgttcccgctcttgctgtgaccaagcctaacctgacagatcctttattttttcatttatccttgtttctggatgatggcttgccctggaggaaagacagaaatctgcccccaaaaattagaaccaaagggccttgagtcatttcctagctcccgttggggatttagaagttgagcctatttctgtcacaggagaaaacttaaactgtttctagaatttataagtagacataggtaatcttagaagagagtcagaagcaaatatttttgagtttatattctatattgggtgctttactttcatgatattatttaatatccacaacaataattattattactatcattattgttaatagcattaccagtaccat

SEQ ID NO: 159070 - DNA, 555 bp, Homo sapiens
ttgctctgggcccatccgtcatgctaaacacagaattagctgggtcttttccttactaatgactggttcgttaatctgattttctggatttccattttacaggtttaattgggctcctggccagtgaaaatgattcctttggasaaatgcattggccattaaacacatctatctcttctgacttgttcccgctcttgctgtgaccaagcctaacctgacagatcctttattttttcatttatccttgtttctggatgatggcttgccctggaggaaagacagaaatctgcccccaaaaattagaaccaaagggccttgagtcatttcctagctcccgttggggatttagaagttgagcctatttctgtcacaggagaaaacttaaactgtttctagaatttataagtagacataggtaatcttagaagagagtcagaagcaaatatttttgagtttatattctatattgggtgctttactttcatgatattatttaatatccacaacaataattattattactatcattattgttaatagcattaccagtaccat

SEQ ID NO: 159071 - DNA, 555 bp, Homo sapiens
ttgctctgggcccatccgtcatgctaaacacagaattagctgggtcttttccttactaatgactggttcgttaatctgattttctggatttccattttacaggtttaattgggctcctggccagtgaaaatgattcctttggacaaatgcattggccattaaacacatctatctcttctgacttgttcccgctcttgctgtgaccaagcctaacctgacagatcctttattttttcatttatccttgtttctggatgatggcttgccctggaggaaagacagaaatctgcccccaaaaattagaaccaaagggccttgagtcatttcctagctcccgttggggatttagaagttgagcctatttctgtcacaggagaaaacttaaactgtttctagaatttataagtagacataggtaatcttagaagagagtcagaagcaaatatttttgagtttmtattctatattgggtgctttactttcatgatattatttaatatccacaacaataattattattactatcattattgttaatagcattaccagtaccat

SEQ ID NO: 159072 - DNA, 583 bp, Homo sapiens
tctagcaatttcttaaatgcttttgagcattgtttatgaacagtgtctggtcaaacagctttatctcctcaccaagacaaggcaaaatgaggactgacacgttctccgtcttgtgactatcacatgcccttcatttagaacagtatcaggagcatattaagtgctcaatacaagattattaaatgaatggatgaatgaatgaatcagtcagtcaatcaatacctctgtcacagagagaaccagtcacagtactgggtacatagtagaatcctcatcacatccagctgatggggtaacatctgtctctgctgctctgaactccaagaagtccttattctgtctgaccatgagggggtttcagaattcttaaaggattctgcatcagattattaaaggctgcttgcagaaattcataatgattatttactcyattagctggtcatagagttataggcagagtgattaaaattttttaaagctgaaactctgaaatcatagagatatactctaattagagcggtaatgggaagagaactggactaaatcatctacttttcagtcaacagcccaacttccctcatta

SEQ ID NO: 159073 - DNA, 578 bp, Homo sapiens
cttgggtgataggaatgtgaagtcagagctgagaatcatttattagagcccaagatacaatctcagactgtaacaggtgctccttttcacagatcactaatgcagctcagagcataaattccagagccagaccctgggttagagtcttggctccatcactcagtcactgggggattctaggcaatttgcttaacttttctatgcctcaaattttttcatcggcacaatggggaggtaataatggcacccttgtcattgtttttatgagaactaattgattaaatgtatgtaaaacatttggaagaaagagargcacatgttaacactttgcagtatgtaacacttagtatgatagtgctcaaaatatcgtaagtgcaactaatatttatagaacacctttaacgtaccaagaattttactattaatttagatatatgacctcaatctttaaacaaactttgagatagtaatataatctttttttcttttttttcagatgaggaaatggagattttgaaatttccagttgtgtaactattgacacagagtgagaaagagagatggagcctggattcaag

SEQ ID NO: 159074 - DNA, 577 bp, Homo sapiens
attgatatatacagagatttagttagagaggatagggatccttgcaygatcaaattaattgcggaagcattgtgaagagaagacttaagaggggcaatgctagaggcagggagaaaggcttaaaaggtcccagcaacagttcagataataactcaggagggcctgaaccaaggaagccggttctccatgaggttcccaggagacagactggtgagatagtaaggaggtaaaatctacagcgggagaagggagtaggacaaatatataatgcctcagataacgtgatttatgaaactcctcttttcctttatagcactcattacaattataattaaatagtctcttatgtaattatttggttgatgtctgtctctttcattagaagatcccaaagagcataaactatgttctctgatgtatcactttatctctaatactcaccagagtatctggcacatggtagacatccaacaaaagactattgaagaaacaaatggagtatataagtaaacatagttgaaagatgggatataagaactataaagtgcagactagaagcttagtttacaaccttggt

SEQ ID NO: 159075 - DNA, 561 bp, Homo sapiens
atctttcccactggcagattctccctcagaacagagactgactctatttggtcactgtgctctgcacatggcacatacctagtaagtattttcaactaaaaacagagaagctaccaatgtgggctacacccatgatctatttattctttttgaattgtttattaattcattccaaccataayataattgtcaaatgtatttttcctggatctgaataattactattgttcaaagctctcattattttgaaatgtaatctcacttctgatctaagcacagatttctttccttcatatttacaaatccatgtattgagcagatatttattgactctttccacgtacaagatacttaaaaacatcaaaagttagaggaagaactccaaatttgaaattcagaagtcctgggtttgagtctgaactctgttatctctggctagaaggctcagggacaagccctgtaacctcacttgtgaaaggatagattcttaatgggaggaaagtggaaaccacgccaagaaatggtcctctggccagggcctgctgaaaagccctgccaaca

SEQ ID NO: 159076 - DNA, 561 bp, Homo sapiens
atctttcccactggcagattctccctcagaacagagactgactctatttggtcactgtgctctgcacatggcacatacctagtaagtattttcaactaaaaacagagaagctaccaatgtgggctacacccatgatctatttattctttttgaattgtttattaattcattccaaccataacataattgtcaaatgtatttttcctggatctgaataattactattrttcaaagctctcattattttgaaatgtaatctcacttctgatctaagcacagatttctttccttcatatttacaaatccatgtattgagcagatatttattgactctttccacgtacaagatacttaaaaacatcaaaagttagaggaagaactccaaatttgaaattcagaagtcctgggtttgagtctgaactctgttatctctggctagaaggctcagggacaagccctgtaacctcacttgtgaaaggatagattcttaatgggaggaaagtggaaaccacgccaagaaatggtcctctggccagggcctgctgaaaagccctgccaaca

SEQ ID NO: 159077 - DNA, 561 bp, Homo sapiens
atctttcccactggcagattctccctcagaacagagactgactctatttggtcactgtgctctgcacatggcacatacctagtaagtattttcaactaaaaacagagaagctaccaatgtgggctacacccatgatctatttattctttttgaattgtttattaattcattccaaccataacataattgtcaaatgtatttttcctggatctgaataattactattgttcaaagctctcattattttgaaatgtaatctcacttctgatctaagcacagatttctttccttcatatttacaaatccatgtattgagcagatatttattgactctttccacgtacaagatacttaaaaacatcaaaagttagaggaagaactccaaatttgaaattcagaagtcctgggtttgagtctgaactctgttatctcyggctagaaggctcagggacaagccctgtaacctcacttgtgaaaggatagattcttaatgggaggaaagtggaaaccacgccaagaaatggtcctctggccagggcctgctgaaaagccctgccaaca

SEQ ID NO: 159078 - DNA, 627 bp, Homo sapiens
atcaatagtttttaaacttcagcatgcatcagaatcacctggaaagcttgtgaaaacacagattactaaggcccatctgcagagtctctgattcaatagatctgagttggggatcaagaattttctaataaatttccaggtgatgccaatgctgctggtctgggaacacactttgaacacctcataactagacttttaacaacaatttgcatagacctctgtgctcctcacctgccctgaccccctgcctctcagatgtagatatgttcctgaattctgtgtttacaatgatgagaaaggtggggttttttttttaatttgaggtgaaattcacatactctaataattttaaastgtacaattcggtgtcttttagtacattcacagtgtgtgatccagccagaccctctatttagttctaaaacattttcatcacccccaaaggagtccttatacctgatgacaaagcttttatactcccaaaatatatcatctggtcacctatcatatgcttaataaccacctctctataggtcaccctgaaccttaccctgaaccaaacacattcatgggaaagcagaccagcatccgagaaggcaagtcccattcctgaatgctggccagaga

SEQ ID NO: 159079 - DNA, 485 bp, Homo sapiens
ttttcatcacccccaaaggagtccttatacctgatgacaaagcttttatactcccaaaatatatcatctggtcacctatcatatgcttaataaccacctctctataggtcaccctgaaccttaccctgaaccaaacacattcatgggaaagcagaccagcatccgagaaggcaagtcccattcctgaatgctggccagagatcatcaattaaaaggggcttctccttggaagatccagctgcctcaacagggaacaaaatgatagcacactccacctcctatcagaagtccagggcaaggctgggagcattggggtttccaagtcaccaacggccaaaagagaatagagtggtccctytgacagcgtgatcagccccgcagccttgagaactcatcctcccatgtctattagagccctgcacaatcacagactctcttaaaagctcacacacaacccaggaaagtttgtgcttgagtaaataatg

SEQ ID NO: 159080 - DNA, 561 bp, Homo sapiens
caatgccattattgggtatatgcccaaaggaaaataaattgttctgttgtaaagacacatgcacacatgtgttcatcacagctttgttcacagtagtaaagacatggaatcaacctaaatgcccatcaatggtagactagattaaaaaaaaatggcacatatacacagtggaatactatgcagccataaaaaagaacaagattatgtcctttgcagcaacatggatggagctggaggccattatcctaagcaaactaacacggaaatagaaaaccatatacctcacgttctcacttgtaagtgggagttaaactttgagtacatatggacacaaagaagggaatggtagaccccgaggcctacttaaargtggagggtgggaggaggaagaggagcagaaaactatctattaggtactatacttattacctgggtgacaaaataatctgtacaccaaatacccatgacatacaatatgcctatataacaaacctgtgcatgtaccctgaacctaaaataaaagttaaaaaaaaaaacaaaactaatggatcagtactcttc

SEQ ID NO: 159081 - DNA, 550 bp, Homo sapiens
taatggcttcgagacttatctttgtgttctggctttcatgatttagatggaggggaagaagttcttaggatgctcacctgagctttcaaaatggaagtcctttgcactttctctttcctatttgtgtgtgtgtgtgtgtgtgtgtgtgtatttgagtgggtaaaaaagcaaagataagggcagaaatacaaaaggacagatacgaacttgaattatcattatcatcctagtgtccaaaattcaggagcatttgaagactcccaaataatgtaataagagctaatactttcagtgttatagataaggacgccagagcttcaggygaaagaaaaggaaggcactgcccatgaaacctctaaagagaaatgttcaaacttgctatcaaaacattgccccctctctgtgctcaaaaatggttctgttccttgtggactgtggattggtagggttttgtaaaaaaaaaaaaaaaaaaaaaaaaaagagaaagaaagaaagaaaagagaaagaaaatggagctgagaggaggttaaagaagatattgcaagagatc

SEQ ID NO: 159082 - DNA, 550 bp, Homo sapiens
taatggcttcgagacttatctttgtgttctggctttcatgatttagatggaggggaagaagttcttaggatgctcacctgagctttcaaaatggaagtcctttgcactttctctttcctatttgtgtgtgtgtgtgtgtgtgtgtgtgtatttgagtgggtaaaaaagcaaagataagggcagaaatacaaaaggacagatacgaacttgaattatcattatcatcctagtgtccaaaattcaggagcatttgaagactcccaaataatgtaataagagctaatactttcagtgttatagataaggacgccagagcttcaggtgaaagaaaaggaaggcactgcccatgaaacctctaaagagaaatsttcaaacttgctatcaaaacattgccccctctctgtgctcaaaaatggttctgttccttgtggactgtggattggtagggttttgtaaaaaaaaaaaaaaaaaaaaaaaaaagagaaagaaagaaagaaaagagaaagaaaatggagctgagaggaggttaaagaagatattgcaagagatc

SEQ ID NO: 159083 - DNA, 550 bp, Homo sapiens
taatggcttcgagacttatctttgtgttctggctttcatgatttagatggaggggaagaagttcttaggatgctcacctgagctttcaaaatggaagtcctttgcactttctctttcctatttgtgtgtgtgtgtgtgtgtgtgtgtgtatttgagtgggtaaaaaagcaaagataagggcagaaatacaaaaggacagatacgaacttgaattatcattatcatcctagtgtccaaaattcaggagcatttgaagactcccaaataatgtaataagagctaatactttcagtgttatagataaggacgccagagcttcaggtgaaagaaaaggaaggcactgcccatgaaacctctaaagagaaatgttcaaacttgctatcaaaacattgscccctctctgtgctcaaaaatggttctgttccttgtggactgtggattggtagggttttgtaaaaaaaaaaaaaaaaaaaaaaaaaagagaaagaaagaaagaaaagagaaagaaaatggagctgagaggaggttaaagaagatattgcaagagatc

SEQ ID NO: 159084 - DNA, 494 bp, Homo sapiens
ttgctaggcttctaaaatctgtgtttccagagtcagaataagtaaaatacaaagaaaagacaattgcatgaacttttacaaatgggtagtaattttacatcaaatactcctttgcgtggttgacaacaccatgccttcgaaaatcaggggctataaaagagcttgctttcctgcaggaaacagggaagcagagtacaagatgttcttccccacccactgctgaatccacgtaataattaagggtctggccaaatttagatcattccttgaacgttaatcatgtttaaaaatctcattatggataccggccaccattccactatgtcttacatttgtcaatcagcgagtactggttcagyacctttgtgaccagactgtattaagtaccatgggtcatggagctgtcacctcatggagttcaccatctctttgggaaagcaaacaacatacaagatgtacaaatgacaatataaggccagtaataatgccatggt

SEQ ID NO: 159085 - DNA, 349 bp, Homo sapiens
tttttacatcagtgctgcggtgtcataggaacaggcttccataagacagtctttgatttatcatttctgtctgggactsaatggatgaattcaattctggggtacagcattatcaatcccacttccttgtgcataatttttaaaagcaataaagctgtgtttgatatccatttgtcttgccctttgttgctgtcctaatcggttccagcattgaccaggtaaataaggaactttgtttattgaccccctcaaaacccaacaaactagattgcaaactctctgaaggtaaaaactaagtcataactctcctgccttcctcatgggcttgaacacaaagcaggggtgcgat

SEQ ID NO: 159086 - DNA, 349 bp, Homo sapiens
tttttacatcagtgctgcggtgtcataggaacaggcttccataagacagtctttgatttatcatttctgtctgggactgaatggatgaattcaattctggggtacagcattatcaatcccacttccttgtgcataatttttaaaagcaataaagctgtgtttgatatccatttgtcttgycctttgttgctgtcctaatcggttccagcattgaccaggtaaataaggaactttgtttattgaccccctcaaaacccaacaaactagattgcaaactctctgaaggtaaaaactaagtcataactctcctgccttcctcatgggcttgaacacaaagcaggggtgcgat

SEQ ID NO: 159087 - DNA, 433 bp, Homo sapiens
  misc_feature (1)...(433): n = A,T,C or G
agaaatgtaagcttcccaaaggtatttactccccttagtcatctctactagtctccacacctctgtaaaacaatctggaacatttccaaaactgggaccttgttgtttaagggaattatttcagcacttgtcagttactctctaggaaatcagsgtatttctacgattttgttttctaccgaatgacattcactccttcttttaaaatgtacattcatttgccccatgcctttatgctatcatctctctgcctaacagaacaggtgcattccctccattctgttttctcagngtattagtccattctcacactgctacaaagatactatgagactgggtgattcatgaagaaaagaggtttgattgactcacagttccgcatggctgggaaagtctcaggaaacttacaatcacagtggaaagcaaatgggaa

SEQ ID NO: 159088 - DNA, 219 bp, Homo sapiens
tttgctcagcacttcttcctgcccccgctgtgaagaaggtgcctttcttccccttctccttctgtcatgattgtaagtttcctgaggccttcccagcccttccaaagtggaattgtgagtcaattaaacctcttttytttataaattatccagtcatgggcagttctttatagcagtgtgagaacagactaatatagtaaattggtactacagagagtg

SEQ ID NO: 159089 - DNA, 477 bp, Homo sapiens
atgcacactcacctcttgtgtgcaccaatctctctccaggcttcctggaagggcaacccactgtcacttaaaacaacagcagtgagcattggtggaacaatggattttgattagaaaaacactaatgccatatctatttgctaattgtagactcttaacaatttctgtcaaatgtaggattctttttaaaatttcagagaagtaatcacagccttctgaaatccggtgcgagccctatccattcaggcttttgtttgcataatgtgggaagttttgtgggggtgtgggcctgtgagagggatgtaatagagtcgttctctttccaagggcccttgagaaggcaagtgttgagcttacrcttttaattgtgaaggaccaaagataaccaactgaaaagtttttgatcaagatatttacatcttcattgtaagcactggaattgagagggtaaatcacaaaatacatgcagaagccatg

SEQ ID NO: 159090 - DNA, 544 bp, Homo sapiens
ccaacccccacctctccaggatacaatcccacccacctcgtgtgacattctaggacctccacacccttctcaaatctgccccacctcccctcccactcctgtcctagagccccaacgatctagttctctctcacaaaactataatgttgctgggcacggtggctcatgcctgtaatcccagaaatttaggaggctgaggagggtggatcacgaggtcaggagttcaaggccagcctggccaagatggtgaaaccccctctctactaaaattacaaaaattagctgggtgtggtggtgggcacctgtaatcccagctactcaggaggctgaggcaggagaattgcttgaacccgggaggtggagcttgcagtgggctgagatcrcaccactgaacgctagcctgggtgacagagcaagactccatctaaaaaacaaacaaacaaaaaaaaacccataatattctggaccctgtgctcccactttcccaatctagaaagcttagtttgcctctacttctgattccttcccatcatttacagaccct

SEQ ID NO: 159091 - DNA, 562 bp, Homo sapiens
attggattaccctagcttgtctctggtccctactctgcccacatggatggtgggttttcactatgaccgtgtaaacagcaggcttcataactgtgtttctttgtcattttagattgagggaaggggaaggcaaggaaagtctctgctctctggcactgtttgactttctcagtatccttccaaggaagcatccctggatccaaagactagatgcaccccaggtcatctggcctactcccctgcctctgatagtagatgcacaatccagatagcttcagaagcatacagctgtctcttcccttcctgccttctaggcctcctgaacagggtaatcttgaccttgaagaagagacctcatcataccctgctctcttgcccatggtccagctcagtccctgccccatgctgagggagtggcacttccttggggagaggctcagtacatacacattgccgtactccatctcggtgatggtgatggtcttgacatgccagrcaagttctctcttggggataaaccggtcttccctggcaaggtggcccacacagagggaggcaatgt

SEQ ID NO: 159092 - DNA, 569 bp, Homo sapiens
ggacagcatttctgtatctgctgtgtgtggtacagaggggagcccattgccctgaagggtgagtcccaggcagcattcaacataaattgactgaagagcccttgggcctaaaaggaccatctgcagtagcctggtagtactctcgtgggcctgtggtggtgatggccgtggggtgaagctcctctgcctgtgaaaagcagaaggaagaacaaaaagttcttcctcatgatttgagtgccagcttagccaccatacaatggaacaccaggtagacttmtaagcctttttactccagtccctggctctctgacggcacctctggacctacctggggcctaagggaacttgccacccttaagagagagactcaagcttggctggcttgtcatctgctaattgtagagcctcagggccttgagagaaaataggcagtagccaggaagtggttacagtgcactttgggcaagacctagtactctgctggcttcgggtctcacccagcacagtcccagtggtagtggctgcaggtgtgcctgtgtcaccccacccccaactccagaacagaggaa

SEQ ID NO: 159093 - DNA, 515 bp, Homo sapiens
gctgagcactgttcccagcagcccctgctgccctaccagagcacttttactgacaacccctgccatagcatgttcactcatgacccccaccctgccccactggagtgcatttgactgcagtccccaacagagcactgttgccagcagtctgggagtacyttggccgactccagcacagctagtgcttgacctcaaggggccaaaagaaaaaaccataggctcagttccagcccccttgtgttaaaaactacacaggccagaaatgcaaagctgagctttgggtctctaaaggcatccagaaatgaagccttttcgctatacctgacttgccccacattcaaacactcaaggactataaagatcacaaaaatagaaggcaccatccaaaggataacaacttcaaaggataaaggtacatcagccctcacagaggagaaagaactagtgtgagaactccagaaactctaaaagccagagtttccttttccctccaaatgatcacagtagcttcccag

SEQ ID NO: 159094 - DNA, 515 bp, Homo sapiens
gctgagcactgttcccagcagcccctgctgccctaccagagcacttttactgacaacccctgccatagcatgttcactcatgacccccaccctgccccactggagtgcatttgactgcagtccccaacagagcactgttgccagcagtctgggagtaccttggccgactccagcacagctagtgcttgacctcaaggggccaaaagaaaaaaccataggctcagttccagcccccttgtgttaaaaactacacaggccagaaatgcaaagctgagctttgggtctctaaaggcatccagaaatgaagccttttcgctatacctgacttgccccacattcaaacactcaaggactataaagatcacaaaaatagaaggcaccatccaaaggataacaacttcaaaggataaaggtacatcagccctcacagaggagaaagaactagtgtgagaactccagaaactctaaaagccagagtktccttttccctccaaatgatcacagtagcttcccag

SEQ ID NO: 159095 - DNA, 444 bp, Homo sapiens
ggtgagagcaggggcgggcgacactccccggagcggtgcccctgcgcccagggcgcagcgactgcgccctgccctgcgggygtgggcgagttggccgcgtgtgtgcctcgctgtttgacgcgaagacgagccaatcagggcgggcggcccgagctgccatgtgacgggcaaggcggcccctttccccagcgcggccagagggaggagagaaccggggctcgccgcgagccttcgagagcagcggccgcggaggaggcggcggcggcgggcgggagcaacggcggcggcggcacaggctcggggccagccgggcgcgcatccccgggcgccctgcgcggtggagagcttggcgggctgcgggtgccgcaggacaggagtggacaaagcaagatggcagggatcttagcctggttctggaacgagaggttttggctcccgcacaat

SEQ ID NO: 159096 - DNA, 444 bp, Homo sapiens
ggtgagagcaggggcgggcgacactccccggagcggtgcccctgcgcccagggcgcagcgactgcgccctgccctgcgggtgtgggcgagttggccgcgtgtgtgcctcgctgtttgacgcgaagacgagccaatcagggcgggcggcccgagctgccatgtgacgggcaaggcggcccctttccccagcgcggccagagggaggagagaaccggggctcgccgcgagccttcgagagcagcggccgcggaggaggcggcggcggcgggcgggagcarcggcggcggcggcacaggctcggggccagccgggcgcgcatccccgggcgccctgcgcggtggagagcttggcgggctgcgggtgccgcaggacaggagtggacaaagcaagatggcagggatcttagcctggttctggaacgagaggttttggctcccgcacaat

SEQ ID NO: 159097 - DNA, 569 bp, Homo sapiens
agctgaggaatgagcaggaatctgttcaagatctggttagctgctgcctggctgtattaccagacaagcaaagaccagaaacctactcttcattttcttcatctgcaaaataggatttgtgcaaataacagagcctaccccaytgggcttgtgctgcaggcacactggccttctttcagttcttggaagcatcctctcctaccacagggctcttgcaaaagagccgttccctccccgtggaacatggggcccttcctccatcctttactctggtgaatgcccttttttcctggatcaattaagttgacacttcctcagtgatgaggccaaatgtccctttcatgccactatgttcactctcagggcactgatcacagttccaaatttatattgatttgtgagattatttaattaacagcattcttctataatagaccatgtgttccatgagagcagacacatctgttttctctcaccagtttatctccagcacacagcactcaatagatatttgtggaataaatgaatgaacataaataaatgagtaatagttgtgcaaataaaggaga

SEQ ID NO: 159098 - DNA, 498 bp, Homo sapiens
gaaaagagatttgtcagggcctggcttgaccagctgctgcaggggcctgggaggagttggctctgcaaggaagggccttactggggagagtcagctgggtgggctccattgagcagcagactctgggaaggggtctcctgtggcaggcagaatcctgkgtccagtgggccacattacagattggagggcgttgttgagaacagcaatttacatcagagaggaccagcagagctcatccccacagaagcactgctatgggaaattggaaacaggctgctgggaagctaatggacctggcagcacagggcatactgtcttccagcagctgagtctcgggtgcaaatgccacatccaggagcatctggtaaggaaaaggcagggccagtcctaaaggtactggcaccaggcaagtcaatcaggtgcaagaacgggaagatactcatttgcagaactgggtgaaaaatgagaatcaaggctcagaagtgaccctttattgag

SEQ ID NO: 159099 - DNA, 498 bp, Homo sapiens
gaaaagagatttgtcagggcctggcttgaccagctgctgcaggggcctgggaggagttggctctgcaaggaagggccttactggggagagtcagctgggtgggctccattgagcagcagactctgggaaggggtctcctgtggcaggcagaatcctgtgtccagtgggccacattacagattggagggcgttgttgagaacagcaatttacatcagagaggaccagcagagctcatccccacagaagcactgctatgggaaattggaaacaggctgctgggaagctaatggacctggcagcacagggcatactgtcttccagcagctgagtctcgggtgcaaatgccacatccaggagcatctggtaaggaaaaggcaggsccagtcctaaaggtactggcaccaggcaagtcaatcaggtgcaagaacgggaagatactcatttgcagaactgggtgaaaaatgagaatcaaggctcagaagtgaccctttattgag

SEQ ID NO: 159100 - DNA, 547 bp, Homo sapiens
ttggaacataagaaaggaagaaggaacatgataagcaaaaatgttagcaaatacaattgactttccttttcctcttgagttttctaaattattttggccgattaaagcaaaaattrtatcactgtctgatgtggctctgaatgtatgcagagaaaatatataagacatctatattaagaaaagagagataaattaaaagaaggtattttttctatactttatgcaaactggtaggatgacattaagtacattgtgataagttatgtgtgtatatgtatacatatctatatacatctagtaatacttagagcaaccactaagaaaagctacacaaaatgatacacaaaaaactaaatataatcaaaatataactctaaaactgcttaagtagcccataggtaggcaggaacaaaataaaactaagaaatgcaaaacagaaaacaaaaaaattaaaaaggcagatgtaaagcctaaaatatcaaccacttcatgaaatacaaatgggtctaaatatatcaattaaaagacagatactggcatagtggat

SEQ ID NO: 159101 - DNA, 547 bp, Homo sapiens
ttggaacataagaaaggaagaaggaacatgataagcaaaaatgttagcaaatacaattgactttccttttcctcttgagttttctaaattattttggccgattaaagcaaaaattatatcactgtctgatgtggctctgaatgtatgcagagaaaatatataagacatctatattaagaaaagagagataaattaaaagaaggtattttttctatactttatgcaaactggtaggatgacattaagtacattgtgataagttatgtgtgtatatgtatacatatctatatacatctagtaatacttagagcaaccactaagaaaagctayacaaaatgatacacaaaaaactaaatataatcaaaatataactctaaaactgcttaagtagcccataggtaggcaggaacaaaataaaactaagaaatgcaaaacagaaaacaaaaaaattaaaaaggcagatgtaaagcctaaaatatcaaccacttcatgaaatacaaatgggtctaaatatatcaattaaaagacagatactggcatagtggat

SEQ ID NO: 159102 - DNA, 566 bp, Homo sapiens
ccaccccgccccttctttctcttctgctctcaccatgtgatgtgcctgccccgtcactgccttccaccacgattggaagctttccaaggcctccccagaagcagatgccaccatacttcctgcacagcctgcagaactgtgagccaattcaacctctcttcttatacattactcagtctcaggtgtttcatttgttttctttttttcttttttgagaaggagtcttgctctgttgcccaagctggaatgcagtggcttgatctcagctcactgcaacctccacctcccgggttcaagtgactttcatgcctcagcctcccaagtagctgggattacaggtatgtgccaccacacacggctagtattggtattttttgtagacacagggtttcaccataytggtcagactggtctcaaactcctggcctcaagtgatcctcttgcctcagccttcagatgtttatggcagtgcaaggatggcttactgcagctgtattaacatgaaagagtggagtcttaaactgcaagtgactaagttactttgacttggtactattacatttatg

SEQ ID NO: 159103 - DNA, 543 bp, Homo sapiens
ttgacaagtgctctttccacttcagagttctgtctgtctttaccagatgaggatatactgawattatatatagaaagtatcatattcagaaaactgctttctggttgcagaatcaagtaacattatatatcccgtgtgttaaaaagaggcagcagagtttaattcaggacaatcctatatatgtggaatgtctgccagttctagatggtaatgttgtcaattgaaaaaaaattacagaagagaagattcactcttttttcccctttcttttttttttttctacttcaattacactatgggttttcccagtagtttcttcaaatctgaggtaaagcttggcagattgggattgatgtcttctttattattagtctagatgaatggaagctcctggtaaattatggggatttttgaataaaatggacaacgtttagccttccaaaattagtcagaaagaatgttagtcttgaagataaacccaaagactttcccatggtagagtaacagaagctatgagaaatgtctaggtggaatatgttcaag

SEQ ID NO: 159104 - DNA, 587 bp, Homo sapiens
gaggtagaagtttcctgtaactacactcactgtatttctacgagtgtaggccgaaagaacattcactttttctattctgccagctgaattgcccaattgtttaaagggaaacttgaagtcatgtaaagaacgtggcttaatgaacctcatatactgtacaatttaatttttgattgtaggttcaggactttttcctgatctccattttttttaatactcccttattaggtgttttaagaagggattattactcaacagatgttagtatccttactctcaaatagtagactacttattctttgtttatatttttgttgttcrtatagatgtttttatgataagagcactaatatttttaacaaatccttctaattggcctctgcaaattctagactaaagtctcagttcaatttcataatggtaacaggagtacgaggcacccttgtgttgttacttcctttttatctgtactttgctcaggtagctgcactagtaaactgaatagaaactccaattgcatttggctggtgcagctgtggcatcactgtgctagctatcatgaagctttctgcatgtctcaggcatct

SEQ ID NO: 159105 - DNA, 470 bp, Homo sapiens
ggaacaaaatctctgtcctcctagagctatgttttagtgaggggtaaggagggatggagraagatatgctttaaagaaaaagtagaggcaagagtcagataagaggcactgggaatatggtgttggcaagtggaacagactacaattttaagaggtcggtcagggtaagtctcattgagaaggtgacatttgacaaaagttttaaggaagtgagggaattagtcatatgggtatctggagaaagcatactccagacagaggacttagctactatgtgcttctggtagtcctgtggctggtgcagagtgagcaaagaagagtgtagaagatcagattcaagaaccaacgaggccccagctcacggaggtcttgatggtcactctaagattttggcttttactctaagaacaaagaggagccattacagggctctgaacagagcagtgactgatatagttccaatgaattcg

SEQ ID NO: 159106 - DNA, 241 bp, Homo sapiens
tgggacattgcaggacccaagtcaatgcttttaataaatattggttggattaagcaaatgaagcaatactatgattgcttttcttggaaagattaattgaattgatgaaattgcaatcagaacttgtcatgccaggaagagtayataaattttttatgtttaaagctctgtgtgtgtatacatgcacatgtgctcaagtacgtatgttttctacttttattggaaggtcactttcatgcat

SEQ ID NO: 159107 - DNA, 371 bp, Homo sapiens
gctgattatatagatcaccatagcagatataggagacataaaaaattagaaatattgtaagaattaccaaaatgtgacacagagacacaaagtgagcacatgctgttggaaaattgtgccaatggacttgctagacacaatggtgtcacaaacttttaatttgtttaagaaacccacattatttgtgaagcagaataaagtgaagtgcaagaaaaagatatatgcctgtgttatcagagtaagtctaaaagacagttaataatctttatcattctgttaaatatataatactctagccagcatggcttgcttcaccagctttmtataaataactggcctaatctctttcctttccagcttaatcactgtag

SEQ ID NO: 159108 - DNA, 487 bp, Homo sapiens
acacacacacacacacacacacacacacacacactggtgcccccaamacaatcctctttagcctctgccctccggaggtgaagcccgatgtctctgcacaggcagcagtgatcacaggggccagcacgacctgacagattcatatgggaagccaccagaagcagcaggagtagacacatggctaaatttgtgaaaaaccaggaaatgctaacggaaatagagggagatgaagaggaagaactgcagaaaaattaaggattgaatttagggattctgtagtgatgaaaccggttccagtcagctagacttaacaattcataggcccagggcaaaagtaaaaatggaggcccatacttcatatgtccaaatattataaaaatagaactcaagccaaaatgctgtcaaataaaatatgttctatcctactatctcaataaatatgcattcataacaacaaaattttaaaaagtatgtgaagctatatcta

SEQ ID NO: 159109 - DNA, 487 bp, Homo sapiens
acacacacacacacacacacacacacacacacactggtgcccccaaaacaatcctctttagcctctgccctccggaggtgaagcccgatgtctctgcacaggcagcagtgatcacaggggccagcacgacctgacagattcatatgggaagccaccagaagcagcaggagtagacacatggctaaatttgtgaaaaaccaggaaatgctaacggaaatagagggagatgaagaggaagaactgcagaaaaattaaggattgaatttagggattctgtagtgatgaaacyggttccagtcagctagacttaacaattcataggcccagggcaaaagtaaaaatggaggcccatacttcatatgtccaaatattataaaaatagaactcaagccaaaatgctgtcaaataaaatatgttctatcctactatctcaataaatatgcattcataacaacaaaattttaaaaagtatgtgaagctatatcta

SEQ ID NO: 159110 - DNA, 429 bp, Homo sapiens
gaattcttaaacttggaaccagaaaatgtcactaatagttgctctctgggaacaaagttatgaagttctggcattttggtgaaccacccaagcatgtagaaaaagctagtctaaaataggatagataaacccaactctcagagagaaccagaaatgggagaaggcttggtagcattccrgtccctggttccacttgtccttgaggctcgaccacattcttgcccttcctgctactctgtaagcattttgataaatttcccttgcctctaaacactttatattttcacaaactttatgagtttgtccaactgtctttttttctgaacacttttgctagcatcagttgttacacagtttagtagattccacttcagattacgctgaatttgagttttctcgactttgaaaatattcttgactgcagtttta

SEQ ID NO: 159111 - DNA, 429 bp, Homo sapiens
gaattcttaaacttggaaccagaaaatgtcactaatagttgctctctgggaacaaagttatgaagttctggcattttggtgaaccacccaagcatgtagaaaaagctagtctaaaataggatagataaacccaactctcagagagaaccagaaatgggagaaggcttggtagcattccagtccctggttccacttgtccttgaggctcgaccacattcttgcccttcctgctactctgtaagcattttgataaatttccctygcctctaaacactttatattttcacaaactttatgagtttgtccaactgtctttttttctgaacacttttgctagcatcagttgttacacagtttagtagattccacttcagattacgctgaatttgagttttctcgactttgaaaatattcttgactgcagtttta

SEQ ID NO: 159112 - DNA, 536 bp, Homo sapiens
ccacacctctgctggcatgagtcaagagagactccctgaagtaaatgtaattcaggaaatatccagaaatctgggtggtccagatatgaccctccttcgacttccatgttcccatcaacggataggaagacagtacccctgggctctgtgtgttcctagctagatccctgacctttctctacctgtctctttctgcctcacctttgttatcttccgtgagagcatcatcagtagtctcgggytcatttgaaacacataggcagaatatttgacctggaggagctttgactttctaaactttctgctgttattaggtagtatgggaatcagcatatccaatagacatctttcaggcattcctatgactattcaacaatatagattgagtatctataatccatatggcctattttgcactgaacataatgctgggtatatgagtaagttctctgctcacatgttgtccacaatgtggtcaagggagataggcatggaaacaaatgaaatcaatacagtgactttattgctgagctaga

SEQ ID NO: 159113 - DNA, 608 bp, Homo sapiens
atttattaatgaccatttggtcagtttaaaactatgttgaaggaagaaatcttgacttgcattagcattttagggctgaaaagactgtttgaggtcctatagtcttggagcatcctaatgtccagtttaggagggagatgaaattattttagtttcctttacaatacacagcatgtgcacttccagtgccagggaacttactatttcccaagggagtctattttctcattaaaattttagacagactttcttatattgaatccaaactcatctgcctctaagcgctaggtccttgttataaccactgggactcagcagttatgaatataattcattctccacatgacaactcttcaaatatttgaagacatctgtcatgcaagccactttccctccctccttgccctgtcctstctgcttaaggctaaacaacccagaaagatctgtcacttgtgaaacagaggcaagaacccaccccagtctggttaagtttagcaacctatcatttataaatacatgttcttcccttttgggatcactaaaaatatatttcttttcttcagtcttttggaactgatttcacagagattaccaagagcttctcacca

SEQ ID NO: 159114 - DNA, 543 bp, Homo sapiens
acatatcatgggcctggaggattccattgtcacaatatgtgtcaccaccttccagaatggagaactggttattgcatgtatgtggttacctataatacctcccctacaattttattttacctgcrctgcttaacatcccaaaagagaaatctggccttgtgttagaaaattctacagttctaaatcacaggatctgagagtgagaccaagttgtatcatgtactctctatgtgtcctcaagcaaataatttaacttactttagcccttagtttttcctcttgaaaatcggagaaataacatttcacagggttatgatgaaaattaaataagaaaatatagaaatagattttttgtatattatttccatagaggtgctttgtgaaattatttagtagaagatataagcacaattgcaatgctaatcagattttaccttcataaatatgaggcagagaggaaaggcagggtttgctttcttgaggttcacttctacccaggtcctcaggccagtgttatatcactgagatttgtatttctaatga

SEQ ID NO: 159115 - DNA, 534 bp, Homo sapiens
gtaaagggattgctgggtcaagtggtatttctcttttaagttctttgagaaatctccaagctgctttccacgatgactgaactaatttacattcccaccagcagtgtatgtgttcccttttctccgcaaacttgcaggcatctgttatttttttgaccttttaataacagcaattatgactggtgtaagatggtatctcattgtgatttgcatttctgtaactactagtgacattgagcatctttttatatgcttgttggctgcttgtaagtcttctcttgaaaagtatctgttcatgtgcttygcccactttttaatgagttgttggttttttgcttgttaatttgtttaagctccttatagattctatacattagatatttgttgaatgcacagtttgcaaatattttctcccattctgtagattgtctatttactctgttggttgttgcttttgttgtgcagaagctctgtagttcaattaggtccaatttgtcaatttgtgtttttgttgtaataaaatctttaccagag

SEQ ID NO: 159116 - DNA, 499 bp, Homo sapiens
tgaggggcataattatccacataaatcttatatgaggaacacagaccagtacaaaagcagctgtatcttttggttatcttggaggcaatatataaccacataaggtaaaattggatgctgcttgctttctctaaaagctgtgaggatgtctttctgttccagaaattgcttaatgcaagtaaatgaaaatatactgaatacatgagtaaattcataaacagaaatacaaatgaaatttctaaagtaggtcctggtgagccccaattttatgaattattagaagacaatgcacccagaaactaagacactagcttgaagacttttttcatttcttttcttttyttttttttttttttttgttgctgatgttgttgttgttgttgtcgttgttttgaaacagtgtctcactcttgcgccttggctggagtgaagtggctcgatctaggctcattgaaggctccatctcccaagcttaagcgatcctccccacctcagcctc

SEQ ID NO: 159117 - DNA, 398 bp, Homo sapiens
gtgcctgacacatagtaggacctcaaaatgtattaattaaatgaatgaatgaatgtaagtggctgttggtggaagatgcccagccagtaaaataacaacaggttaagtaaaaaaaaaaaaaaattgtatttcttgttggcaaaacactgagcccagattcagggatgtggtagaaggacaggtttctccatcccttrttatatgggacttgctgctggcagtgctagagattctttcacaaaaggcttttctttttcccatagcatttcttctatttctcatgttttgtattgaggattcagactgctacatgtttggttcagggcagattttactggtcgaaatgtaaacttttaaaataagtgtctaagttggggagggaagggcaatggactcag

SEQ ID NO: 159118 - DNA, 650 bp, Homo sapiens
agttcagtcctgttgattagtatgtttccctgtcctagagtgcatgaactttcaaagccaggacacaatcttgttcacttttcatgccatcatcttgacactcaatacatgttcaaagagtaaattaaagaaaaaagagatgctcaagtcaatttataagtaatcctcacaaatgcttgcataccatcagtgaacaattatttttttatctccatgctataatcttgcacaagtttcattagaattaaatgcactatctgaagtctatgtttattaaatgaggattacagtagttggttatctttgtgaggggttttgagggttgtggaacaggataacattttgaggtacaaaaaataatgaagaggatatattccaatttctttccttccccaaggcttttcattacagctgttataaaccctggtagaattgattggtttccttttcagcttcctgttttgtccctcaatgttcacaaaagtcccatctgataaatgtattgtttaacctctcattgtttgaaagaacacctctttgctccycacagattacagacctattggcttaagcagtccatctaaatgcatgccagtttctttcttgataaattagaggcctataacctcaaaccagtttatctgcaagag

SEQ ID NO: 159119 - DNA, 650 bp, Homo sapiens
agttcagtcctgttgattagtatgtttccctgtcctagagtgcatgaactttcaaagccaggacacaatcttgttcacttttcatgccatcatcttgacactcaatacatgttcaaagagtaaattaaagaaaaaagagatgctcaagtcaatttataagtaatcctcacaaatgcttgcataccatcagtgaacaattatttttttatctccatgctataatcttgcacaagtttcattagaattaaatgcactatctgaagtctatgtttattaaatgaggattacagtagttggttatctttgtgaggggttttgagggttgtggaacaggataacattttgaggtacaaaaaataatgaagaggatatattccaatttctttccttccccaaggcttttcattacagctgttataaaccctggtagaattgattggtttccttttcagcttcctgttttgtccctcaatgttcacaaaagtcccatctgataaatgtattgtttaacctctcattgtttgaaagaacacctctttgctccccacagattayagacctattggcttaagcagtccatctaaatgcatgccagtttctttcttgataaattagaggcctataacctcaaaccagtttatctgcaagag

SEQ ID NO: 159120 - DNA, 592 bp, Homo sapiens
gatacgttttgtagctctatctgcttaaaaggtctaaaagcaattacacctcagcagaaaacctcagcatgtaatgtccagatcttagcttctaaatttcattccttggttggaaaaattactgatttcaggactgccatagaaaaggtacaggtggggctacaacatctttttatgacagaaagtaaggatccastcaaaaactaaaatacctatgtcataaggacacacaaggcagcttgaagggacatcctctgtccaaatctcagacatcaatacaaggtcagtaataaattataacccattgaataaaataggagtccctgaggccatactgatgatagaatgagaaagggaggggggcataaaaggggagggaaggaaagacagagaagccaacaaaggctcttccttatagcaccatgtaaactgataaatgaaggagtgctggagttattttttttaaaaaatcaacattttgtgatgatactagcaaaaattggttcagaaaaaaagtaatccaaaaaaaaaggatgctaaattggggaaattcaataaggagcggaagcatttctgtggtctcaaagtgtct

SEQ ID NO: 159121 - DNA, 592 bp, Homo sapiens
gatacgttttgtagctctatctgcttaaaaggtctaaaagcaattacacctcagcagaaaacctcagcatgtaatgtccagatcttagcttctaaatttcattccttggttggaaaaattactgatttcaggactgccatagaaaaggtacaggtggggctacaacatctttttatgacagaaagtaaggatccactcaaaaactaaaatacctatgtcataaggacacacaaggcagcttgaagggacatcctctgtccaaatctcagacatcaatacaaggtcagtaataaattataacccattgaataaaataggagtccctgaggccatactgatgatagaatgagaaagggaggggggcataaaaggggagggaaggaaagacagagaagccaacaaaggctcttccttatagcaccatgtaaactgataaatgaaggagtgctggagttatttttttwaaaaaatcaacattttgtgatgatactagcaaaaattggttcagaaaaaaagtaatccaaaaaaaaaggatgctaaattggggaaattcaataaggagcggaagcatttctgtggtctcaaagtgtct

SEQ ID NO: 159122 - DNA, 563 bp, Homo sapiens
acctgcaaaattcagacaaaataaaagttgaaggaaatacaagagacaatctgaggacttgtccaagtcagacacatattactgtatttcctaatgtgtaggtgtcattaagttgtgttattagacatgaagtggtggagtgctcaaggaggcggaacctggacctttctctcacaacctactgatgtgcagagtctgaaggcagctggggagataaattttcatgaggacatcccaaccccttctgagctttcaagtgattgacacctatcagaggacccaagaggactggactgaaggaccagcagcaggaaagggcaaagctcctgacattgaaccacacacggtggtggtagaaaagccgggcgaggaacgtggtgcacctcagaggctcaccaaacggagagagggtgtctggcccatggtggtgggtagatcccaatccctgtcctggccccaagatgcaacctttgtgagaaggcttctaggctaagacrgtaccaaggtagatactttcagccctcacacatgcaggaaccaccacagttagggcaggggaattc

SEQ ID NO: 159123 - DNA, 638 bp, Homo sapiens
ggctaattagaaacaggtacaggactcagtgttcacctacatttcaagtataagatagacctgtggggaaaaagttaatctgtacmttacaggcaaagtaattacattttactttgctaatagaagctgttaactggagttgtatgtatattaacagacagtagctgtagttgtatagtttagaagtggaaagttgcattttgaaatgtaataattctattctgggtcactgttaggcacaacatcccattgagctgtgatgatacagtatttaaaatattttaactttattcttattactcagcaatcagtgggaacttggcaaatatgagaagtgctcgatgaagacaaagtacaggtgtacctcattttattacactttgatttattgcacttcatagataatgcacttttttttccttaacaaattgaaggtttttagcaaccctacatcaagcgagtctatcagctgaacgtgtttccaatagcatgtgctcatttcatgtctctttctcacattttggtatccaaactttttcattattattctgtctgttacagtgatctacagtcagtgatctttgatgttactattgtaatcattttggagtgtgcccataggatggcatacttaattt

SEQ ID NO: 159124 - DNA, 638 bp, Homo sapiens
ggctaattagaaacaggtacaggactcagtgttcacctacatttcaagtataagatagacctgtggggaaaaagttaatctgtaccttacaggcaaagtaattacattttactttgctaatagaagctgttaactggagttgtatgtatattaacagacagtagctgtagttgtatagtttagaagtggaaagttgcattttgaaatgtaataattctattctgggtcactgttaggcacaacatcccattgagctgtgatgatacagtatttaaaatattttaactttattcttattactcagcaatcagtgggaacttggcaaatatgagaagtgctckatgaagacaaagtacaggtgtacctcattttattacactttgatttattgcacttcatagataatgcacttttttttccttaacaaattgaaggtttttagcaaccctacatcaagcgagtctatcagctgaacgtgtttccaatagcatgtgctcatttcatgtctctttctcacattttggtatccaaactttttcattattattctgtctgttacagtgatctacagtcagtgatctttgatgttactattgtaatcattttggagtgtgcccataggatggcatacttaattt

SEQ ID NO: 159125 - DNA, 395 bp, Homo sapiens
tacattagctgcaaatggtcaaaacataccaatcaaaagacaaagatcaacagtatggatttttttaaaaagacccaactatatgatgtctacaagaaatgtatttaaaacacaatgacttaagtatgttaaaagtaggatagaaaaagttttgccctgcaaacactaatcaaatgacagctgaattacctatagcaatatcagaaaaaatataatttagagcagagaaaattaccaaggataaaaggacrctacataatgaaaacatcaattcaccaataagacataaaaaatattaaacaagtatgtaccaaacagagcttcaaaatacatgaagcaaaactgacagactgaaaaaagaaatagaaaaatccacaatatttggagacctaatc

SEQ ID NO: 159126 - DNA, 428 bp, Homo sapiens
atccccacaagcccaagaactgtgaaattgtgaagaatcagagagaggtatgttgcatgcattagctgtcaccttttttgtgcctgctaccctaaatcagatgtaacagtttatttttattacctatagttgatttcttgatactctttttggggggcctgtagcattaccatcatttcttgtttaattgctagtaatcttcctctcccaacytcctaatggcacaagttttttagaatggaaaatgaaatctattatttactgagctttgcacaaaaaccattagatattgatttttctgtatttcactgttgagaagaaaagcttataaatgaattagcatctgccttggtgctttatgtaaggaaaaaaaaatactttaaaagttaaaggagttggttttgacaaaataggctaagtagtgacaa

SEQ ID NO: 159127 - DNA, 560 bp, Homo sapiens
tgatattgtcttgccttcaaaggacaaataaagctggaaaccttctaagatgaagcatgagtttgcttgtttccaggtttttctggtctcagttgcctgggagctgctctcacactcctcagtgtctcctggaccctccttaccccagagtctaaatcagatggtacccctccattctcaacatcctgatcacctgagctctgaggcctgcctggctctgcaaagctcttccctttgcttctacagcccaaaccgatgatagctctttggaaagaattaagctaatacctcatatgaaataattatttcattaagcaaattcttatcgcatagctgctgtcttctaggctccactgtacgtgacaggaaaaacaaaggcaacatcggttccctttttattgtgcagtttactttctaaaagtgggaaacaggtaaagaaattaagatgattctggatgatgatcaatgccacaaakacaagaaaacaggacgatgtgataggagtgactgggaccagggacaccctgcactgagtggtcagggaaggctgccctgcccag

SEQ ID NO: 159128 - DNA, 631 bp, Homo sapiens
aaaacaaatcagagttaatttggaactgcttcttttaccattttctttgttgttcagggaagcctcattgagagatttaagagtagttgctattatactaggcctgtatcaaagagcaggtgaggactaggacaagaaatattatgaaaccctcagtaatcaccccatttttttttacgaagatgaaatcgagccgagccaagccaaccattcaccagaygaagaggtaaacaggaaaaatcttcctaaggcaaatttcaggtatttagagaaaaagagatatctttacctggaaattagaggataaaagaccaattctggtggaatcaccttagtcaggaaatacattttgatttcttaaagccatagttgccatatctaatgcatattatgtaccatgtactatattaagaacattacttcatttcatcctcacaataatcaaatagtgcagatattactattattttcactttacaatggagaaaactgaggcataaggaggtaaagaaatttgtctaaatgcaaaaatctatcacgtgacatagctggaattaatatcttggtttgctttctactactttaatattgtaagagattgcattatactgttgcctctccttatatgctc

SEQ ID NO: 159129 - DNA, 611 bp, Homo sapiens
tccagcttttctctctttctcttgcagctcatttcccctgtgttgatatttctctcatggccacaaatggattctgatgctccagaccttacgttccatgtttccaagcccaacagacaaaacagacttttctcccatcaaccgatgaaaattgtttctattattggttataaatgagtcacacatttgtcttgagccagtccccgttttcaatgtaaccctagggatgcgatatccaaccagtttaaattaatctggacctacccttggatttacatccgcaagcacctgccttgtctgtttcttgtttgtttgtttgcttcaggggtctctccaaagcaaggagaggtctctcagcttgagcttagttgcagccttggcatgcatggggttgatgccgttagagcaactcctaatcaatgggggatggagttcatggatagatgtcccatctcccatctttcagaaggacagttattaagtgcatttaatatataatgtttcttataatgtcccagtaggagtctgttccagctgtycactctggaaacctgtgctatgatagaccttgcacagacgtttccttttctcctgtctctatctcttcactc

SEQ ID NO: 159130 - DNA, 589 bp, Homo sapiens
cagattcaaggttctcatcttccccaggaagttattcattcattctcgtattcatcagtactaacaaaatacacacacacacacacacacacactctctctctctctctcatacacacaaacgtatatagtacttatatagtcattttatgagatatttttaaataactgagatgctgtaccataaatggagtttagttgcctgccgtatgcttaccctcccaagcacgaccataggattcttgatttttaatgtggctttggtgttctcatgctgcaagcacctcagattgcattccatattgtgtatcaartgtatttactgccaggtgaattatatgcctgacaaagaggctgggttatgcatgtcagtgttaaggaaaataaaggccttcatcagctgatataaatattttaccagaagaggaaatcagaacttagtctagtagtaaatgtttaggaaaaaatgtagtttggaaatatcactaaaaaaaaaaaaagaactgctgtcatgtctcagagaacttgaatatggtttatctcctctctatattggcctctgccgtgtgtgttagaccatggctaaaggt

SEQ ID NO: 159131 - DNA, 589 bp, Homo sapiens
cagattcaaggttctcatcttccccaggaagttattcattcattctcgtattcatcagtactaacaaaatacacacacacacacacacacacactctctctctctctctcatacacacaaacgtatatagtacttatatagtcattttatgagatatttttaaataactgagatgctgtaccataaatggagtttagttgcctgccgtatgcttaccctcccaagcacgaccataggattcttgatttttaatgtggctttggtgttctcatgctgcaagcacctcagattgcattccatattgtgtatcaaatgtatttactgccaggtgaattatatgcctgacaaagaggctgggttatgcatgtcagtgttaaggaaaataaaggccttcatcagctgatataaatattttaccagaagaggaaatcagaacttagtctagtagtaaatgtttaggaaaaaatgtagtttggaaatrtcactaaaaaaaaaaaaagaactgctgtcatgtctcagagaacttgaatatggtttatctcctctctatattggcctctgccgtgtgtgttagaccatggctaaaggt

SEQ ID NO: 159132 - DNA, 608 bp, Homo sapiens
tgctgggtaatttcagcatggtccctaaaataaacacatggaataatgcctgactgcaatcyacatttggacctggacctaaacctagaagaatgagagtctaaatctgagacatccttctgagctcattgtagatcagccaacctatgaatgaaagaataaatgcttatggtaggaaatcactgaactttcaggtgacttgttacacagcattcttacagctgactgatacatcaccagcctttcatttcctatcatttttctatctctatttctcctctgggattttatacagaccataatttctgcctgaaccactcttccccttaccactcctggtctggctatcttctctttatcttcatggtcccagctttgaagaaacttcttcctctgaaaagacttccttgctctgagatctagatagcatatcctcctatgtacctcagcatcatgatgtacttccctaatagtttttcttatccattataattgcataattaattttccttctctctcactcaactgtaaacttccagagagcaggaggtatatctgcttggttaattttggaatcccaatgcctacgacaggactgggacgtttta

SEQ ID NO: 159133 - DNA, 608 bp, Homo sapiens
tgctgggtaatttcagcatggtccctaaaataaacacatggaataatgcctgactgcaatccacatttggacctggacctaaacctagaagaatgagagtctaaatctgagacatccttctgagctcattgtagatcagccaacctatgaatgaaagaataaatgcttatggtaggaaatcactgaactttcaggtgacttgttacacagcattcttacagctgactgatacatcaccagcctttcatttcctatcatttttctatctctatttctcctctgggattttatacagaccataatttctgcctgaaccactcttccccttaccactcctggtytggctatcttctctttatcttcatggtcccagctttgaagaaacttcttcctctgaaaagacttccttgctctgagatctagatagcatatcctcctatgtacctcagcatcatgatgtacttccctaatagtttttcttatccattataattgcataattaattttccttctctctcactcaactgtaaacttccagagagcaggaggtatatctgcttggttaattttggaatcccaatgcctacgacaggactgggacgtttta

SEQ ID NO: 159134 - DNA, 608 bp, Homo sapiens
tgctgggtaatttcagcatggtccctaaaataaacacatggaataatgcctgactgcaatccacatttggacctggacctaaacctagaagaatgagagtctaaatctgagacatccttctgagctcattgtagatcagccaacctatgaatgaaagaataaatgcttatggtaggaaatcactgaactttcaggtgacttgttacacagcattcttacagctgactgatacatcaccagcctttcatttcctatcatttttctatctctatttctcctctgggattttatacagaccataatttctgcctgaaccactcttccccttaccactcctggtctggctatcttctctttatcttcatggtcccagcyttgaagaaacttcttcctctgaaaagacttccttgctctgagatctagatagcatatcctcctatgtacctcagcatcatgatgtacttccctaatagtttttcttatccattataattgcataattaattttccttctctctcactcaactgtaaacttccagagagcaggaggtatatctgcttggttaattttggaatcccaatgcctacgacaggactgggacgtttta

SEQ ID NO: 159135 - DNA, 386 bp, Homo sapiens
tgtgctcttatagactcagggcatgccagtcccaccaccacccccagcacctacacttccttgcctgaggtctttttctggctgctggaacctcccttgacacccatgtagcatgcaggacatgctggaaagtgaggcacccattttcaccagagcagccttcaattaatgaggaatggaatttgctatgtaaatttaccaggtccctcatgccttaggtgggatagccctggggtccctatcaatacatgttatcagtgttctctggggktattaagttccagtcacccatagtgtaacttgattgatagcttagcttttgttgacatccccacttcactatctcacctaaaattctgcaatgggccacagcgaggaagggaaat

SEQ ID NO: 159136 - DNA, 587 bp, Homo sapiens
caagttgaatgaaattaaaaaccttgtttactgcagaaattctcagatcctttgatatcccaagaggccaataaaatacaaagcattttcaagctcatttaatgagagcacaccttgggaaatacttgagttgggaggtattaagagtttgcattgattgaactaagtagatcgctataaatgttgaaagtgaggaaggtgtctgggtgactttcatgtttctgacttgggcagtgggatggtagggcaggttgtgggtagggsacatgaatagttcatttttggatttgttgagtttaaaatctctataggaaggaaagaaatccgtgctgttgatttgccagaaagttatcacttaagtttaatttatagatgaaattactcaggatgagggtataggctgtaggagaacaaaagttctgagggtggatatttggaagacaccagggtttaattaaagagagtaaaaccaccccacaaaggaaactgacaaggaatatttggaaatggaggataaccaaggagaagaggtctagtaacctaagaactaaaaagacacatttttggtttgcaaactagatcattta

SEQ ID NO: 159137 - DNA, 633 bp, Homo sapiens
tactggctgcaacttccttttgtcattatatttcccttcaactttattgaggtatggttgtcagctaaaaattatgtgtatttcaagtgtaaaaattaatgacttgatatacattgtgaaatattcaatgcaatcaagtgaattaacatatcaatcttctcacatagttactgtgtatgtgtgggggcgagggttgctaagaaaactgaagatctatcctttyagcaaatttcaagtataaaatacgatactgttaattacagttatactgttgtatattagatctccagaacttacttatcttgcataactgaaaaattttgaccaacattttcacattttcctctatccccagcccccagtaactactattttactctctatttttatgagttacgcatttttacatttcacatatagataatatcaggcatataaatcaggcaggattttttttctttgtctggcttattttacttaggataatgtactccactttcatctatattgtcataaatggcaggatttccttctttaagactgaataaaattccattgtgttatatataacacatgttttatttattcatccatctatagacatttatgttgtttccataatttggctattgt

SEQ ID NO: 159138 - DNA, 525 bp, Homo sapiens
ccctcacctcacagggtagggaaccaatgtgcaaattctaccagcagctaggtgcatctattccaattttgcatctggaactggggaaatagtcacagagtgttttagggacccactgggcccactgtgtgtcagaactgagctaaaacaccatcrttggcctgagcttcataagctcctactgtaactggagggccacagtgacatttctggtctcctggaatcaaggtcagttcagagcctttgtcccagtagtccctgaaaggtcagatgctttccttttccccaatgcacagttaccctggaaaaaggctgtaaggtctctttcaggagggatgagagaaagagtaactgtatacatttttggaagtgtcctggggtccttcctggaggtgacccagcctctccttcatataaggtgttgtaggtctgtaaactggctcaagtttgagaattgattgatgagtcatgattctcgtcgacgtaattcaagttagacttttgttcacttgaccagaaagtttt

SEQ ID NO: 159139 - DNA, 525 bp, Homo sapiens
ccctcacctcacagggtagggaaccaatgtgcaaattctaccagcagctaggtgcatctattccaattttgcatctggaactggggaaatagtcacagagtgttttagggacccactgggcccactgtgtgtcagaactgagctaaaacaccatcgttggcctgagcttcataagctcctactgtaactggagggccacagtgacatttctggtctcctggaatcaaggtcagttcagagcctttgtcccagtagtccctgaaaggtcagatgctttccttttccccaatgcacagttaccctggaaaaaggctgtaaggtcyctttcaggagggatgagagaaagagtaactgtatacatttttggaagtgtcctggggtccttcctggaggtgacccagcctctccttcatataaggtgttgtaggtctgtaaactggctcaagtttgagaattgattgatgagtcatgattctcgtcgacgtaattcaagttagacttttgttcacttgaccagaaagtttt

SEQ ID NO: 159140 - DNA, 492 bp, Homo sapiens
aaacacaaagtgaagagaacatatattcttcagcaaaacactggggatagtgtaaggaagaagaaaaatgtgtgtgcattggctatttggctaaagcttctcagtaccagagggaagctgtggctataaatttctttagacctttcagaagcccaagcagcataacaatccattggcttaaagagaaataaaagacatgtagtttcttctgtaattaaagatcactgttsatctaagtacatctgtttattttagcagtctatatttaatacgtatatttgtttcagaggatactaaaaacaaaactgcttatatgcagcatacataaaaacttcttttagcacattaatttatggaatattttagtggcactctggacataaagtatggtagaattttctgcccaaatgctgaagctagactgttatggttctcctagtatttttctgcagccaaattagacccaaccttatgaacatatgctgttgactg

SEQ ID NO: 159141 - DNA, 560 bp, Homo sapiens
gtccccagtacccaagtcatagcctggtaatggtctgtgggctgcacagtaggaagtgagggctggctagcaagcattaccaacagagctctgcctcytgtcagatcagcagcagcatcagattctcataggagccccaaccctgttgtgaactgctcatgtgagggatataggttacatgctccttatgagaatctaattcctgatgatctgaggtggaacagtttcattctgaaaacacccccttacccctccgagtccgtggaaaaactgttttccatgaaatcagtccctggtgccaaaaagattggggactgctggtttaaatcacccagtctgtggcattttgttatggcagcatgagcagactaaggcaaaaggaagacccacacaatttaaagaagaatcttcagaaaatttttctcattttcttccatgttggacacagagacagaaataattcaagcctgacaactgttcttattacaaatttcaaattttttgattgccttctctcccctctccgtgccccacccctaggggataccatgcaagaatga

SEQ ID NO: 159142 - DNA, 569 bp, Homo sapiens
acatggcctaggagtaatgagtagatagatactaccatatgctgctcctttcaatgacttttttagttgctcttaaacaaaggcaaaaataaataaaaataagaatacatggtcaaagactcaccaaccaaatcaaaagtacagattatgacgccaagttactttttcttttttgcagatgacacggtctgtttgattcaataagcatcaccacacaccccacatctacagcccaattttctgcctaaacgagatccaacttgcctatttacagttcactggacttagttaaagctctaataacaattgttcaaatgatttaacttcatgatgtaaccagaaactcttctgcaatagcccagaattaaaatatcttttggccctggcttgtaacattgatcaagatgtaaataagtcacagcttgtacttgttcaggaaatgattctgtctgcaattttatctaaagtcaaaaatataaattaatcaggagtaaattttctctaaatattggaaactatttttggyttacatgtaatgaaaataaattaataataaactgtaatagaat

SEQ ID NO: 159143 - DNA, 594 bp, Homo sapiens
ccttcatccctgaaaagacaatttctctggccacagtgacttgattctctaaaacttaatgcttgtacttctgggaggaaactccccttcttgttacctggatgagaaattggtgtgcagtgggtttgagcagggagtgtgstgataacatcatttgtgccctgactcctgctgagcctaaagccagatctactcccggatattttaggtccattagccaatacagtttttgattaagccatggtttctattttattttacttgtaataactgaagcaggaattatgtcttatttcaaacattatgaagtcctgatgcctaccgtagggctctgcacatctggggtagtgtgaaaatagcaacaggaaggcttcttcaggaaaaataatctagaaactagaaaaaattgtttcctttgccctccaatctctagagtcaaattttctaaatttaagagtaccaacttcatgtgtttgttaaggagctaaagtacctttcataacaggtgttattgtttcatttattcttaatttacattgctaatagcctgcttttcaaaggcacatacttggttctaaatggctataaattagt

SEQ ID NO: 159144 - DNA, 547 bp, Homo sapiens
gtgccctgactcctgctgagcctaaagccagatctactcccggatattttaggtccattagccaatacagtttttgattaagccatggtttctattttattttacttgtaataactgaagcaggaattatgtcttatttcaaacattatgaagtcctgatgcctaccgtagggctctgcacatctggggtagtgtgaaaatagcaacaggaaggcttcttcaggaaaaataatctagaaactagaaaaaattgtttcctttgccctccaatctctagagtcaaattttctaaatttaagagtaccaacttcatgtgtttgttaaggagctaaagtacctttcataacaggtgttattgtttcatttattcttaatttacattgytaatagcctgcttttcaaaggcacatacttggttctaaatggctataaattagttttcaaaatgggcaagtaacgtttgtgcagagccatgtgtataggacagacatatgacgcatattgctctaaaggtacatgcaaatgattatatggatggctgatgccg

SEQ ID NO: 159145 - DNA, 547 bp, Homo sapiens
gtgccctgactcctgctgagcctaaagccagatctactcccggatattttaggtccattagccaatacagtttttgattaagccatggtttctattttattttacttgtaataactgaagcaggaattatgtcttatttcaaacattatgaagtcctgatgcctaccgtagggctctgcacatctggggtagtgtgaaaatagcaacaggaaggcttcttcaggaaaaataatctagaaactagaaaaaattgtttcctttgccctccaatctctagagtcaaattttctaaatttaagagtaccaacttcatgtgtttgttaaggagctaaagtacctttcataacaggtgttattgtttcatttattcttaatttacattgctaatagcctgcttttcaaaggcacatacttggttctaaatggctataaattagttttcaaaatgggcaagyaacgtttgtgcagagccatgtgtataggacagacatatgacgcatattgctctaaaggtacatgcaaatgattatatggatggctgatgccg

SEQ ID NO: 159146 - DNA, 517 bp, Homo sapiens
acatcgaatccagtgcctgctctatgaaaggtactcaataaatgtttatgaaacatatatctttgggatgaattcctaaaagtcagatttcttagagatgggggagagagagaaagagaatttgtgtctctgtgtgtgtgtgtgtgtgtgtgtgwgagagagagagagagagagagagagacagacagagagaaagagacagagacccattagcaggcttcattctactggccaagtattgtataagggtaactgcctgcccataccagcatcaggcagatttcgtgtttagtaagaagaatttaatctactctcttcatttcatgtatagcagttgttatcataggaactggaagcttacacaatcattagaagggccaagaaagcaaagttgtggaagactgccaccccaaataccagcctgcaacagcaaagcctgttcagtagctcacctgaggccactgtgaacctcaacacctttggaggcacccacaaactttctcaggcaaatgcaggt

SEQ ID NO: 159147 - DNA, 578 bp, Homo sapiens
tgtgctttcttgttttttgttttgttttcttataccctaatgtttgttccatgatggaagcttaaataccacgtggacaagtggagaagaagcttaggcttcatcttctcccttttttcctacatagaatcaatgaagagttctcactgayttagccattgggataaattgatactgtccaatctctccatcttagctgacaccatcctggcccaagccaccactgtatctacttggactatcacaatactgttctgtcacctcagaattatgtttgttctactctctattgaagcaagaatgatttttaaaaggcaaatatgataatattagtctttaacactcttaacacccaaactatcctcatgaaatattgattcacactgataaaatggcttttgaggccaggagaaatctggtcttaaaaaacctacttctccaacttcattctccaccactgcccccaaagttgccatgctcttgccctcctgtcctcttgttcaactcagaccctttactaatgctgctccctctgtctgaatgttctttcactcagttgattgctgcacattttacaa

SEQ ID NO: 159148 - DNA, 575 bp, Homo sapiens
ttgattcaacttctatcccacaaaatccttcaatgtctgacttattagaattgatgaattgactgggaatgarctttgcgtacgattgtgtttcatctaagttctgttttcatgtttgctcttattcgccacccacgaaaactacattttggcagtgtattttagagggtcattgcatcggtcaatatatgagtaaatgaagatacacagataagggtagagttgagaggaagctgagtgagcaactgctcctttgaatatcttctaaaattacacattttttttttcaattttaggggaatatgatgttgaaatgatttctgtttttaaagaaaagataaaaagaagttatgggaggcattgtgaaactaaagctatgagacaaagagagaagacaataaaataacatttgtttttgatacatatggtctccctctccactgctggcctatttctctttatagttagaccttgactattgatggggtgtccatcctagatcaaaatcttgagtatacagctccagttttcagctttgattactgagtcctgagtttgctaaaggctatgtattt

SEQ ID NO: 159149 - DNA, 510 bp, Homo sapiens
agacatactatgaatgacaccctgaaggaggcaagagaaaggtttgtctatggagctattatgggaagagcaggttgtctaatgttcataacctaaagccaaacagaactatttttgtggtagagaaactatttcaactaatccttctgttttctgataatttaagcaggactcagcctagaaactgctttgcattcaacccatggtgcaggttttgatattccttcygaatgcctttcttataccactccaaaatggaattataacttctagagtttctggctctgtaatctcaccagatattctgatgagagaatgtattctgtctacgttgaggagcatactgaaagagtagcagcatttagtgcccagcgagcctgatgttgagttcatggagaaggccagagacatccaacttatgaggtctccccacttctatagtgtgctggctggtcccagtgggaatctcatcagcagagattaacagtgaggccataaaatagtttgctt

SEQ ID NO: 159150 - DNA, 575 bp, Homo sapiens
ttgattcaacttctatcccacaaaatccttcaatgtctgacttattagaattgatgaattgactgggaatgagctttgcgtacgattgtgtttcatctaagttctgttttcatgtttgctcttattcgccacccacgaaaactacattttggcagtgtattttagagggtcattgcatcggtcaatatatgagtaaatgaagatacacagataagggtagagttgagaggaagctgagtgagcaactgctcctttgaatatcttctaaaattacacattttttttttcaattttaggggaatatgatgttgaaatgatttctgtttttaaagaaaagatraaaagaagttatgggaggcattgtgaaactaaagctatgagacaaagagagaagacaataaaataacatttgtttttgatacatatggtctccctctccactgctggcctatttctctttatagttagaccttgactattgatggggtgtccatcctagatcaaaatcttgagtatacagctccagttttcagctttgattactgagtcctgagtttgctaaaggctatgtattt

SEQ ID NO: 159151 - DNA, 598 bp, Homo sapiens
gtactttggcaaaaattagccaataaatgagtgataaaaactggatatacatccaggtccatttggttctaagagctgtctgtcacagctctttctgtgcgtcattctcttcattctaacaataaatataratgtagatataaaatattgatataaaatatatttctgaattttatttattattgcagagtgaaaactaaaagagtcaaagacacttcaccaatgaaatgactataacagttggaggcattcagttcccaatgtatttgcatcctattatacactatataagtctttagacaatgtacatatgatcgtctggttagagcaaagattttcttgagacaagatataccaatcccatcttcatcctccttctacatatcagtatttacttgcacttttttctattcacttaacacaaagcatgatctattctggatgaataataaagaatactgactcctattttcctttttgtgtgctttctgggaaagggactcgcacaacatgtgtatgaactggcacagttgatgtcttgcacacaacatggagaatctggaaaagctacttctctattctgcattctgagacctgt

SEQ ID NO: 159152 - DNA, 630 bp, Homo sapiens
tcaaaacctttgtgatatagaagtatggagaagatgtggcttttacatataacctttaatggatctgtcctacatcttggtttcttttctgagrgcctctagggtactactagagctggctttaacgtgagaaagcaagcagagtaattgtttatcactgatgaaatgcatgtctggtgtatcagaaaataaacacttgggtttgaaagtgagaagcaaagtggaccaaatggactgccttattggaaccactgctggccattctcagacctcactggaaaagctaaggcagaatatccctataatatagaaatattccagcgatcccagagaatgaggcatggaaaggagggtaggcatctcattacctcttgagagtgatcaagattgcaggacccatctgagacagataaaatctttaacatgaaaatggaaatcctcaagaatagtgtgtggttaacacatgaagggaggcaaagaaagggacgctggtgaggtattttactgggcggtatgatacttgaattcgtgagtgtctataaataaaatgaggtagttctctatgtactgacatgaaatctctaagataaatcattatgtgaaacaagtaaggtttcacttacacgaaca

SEQ ID NO: 159153 - DNA, 579 bp, Homo sapiens
cacacagtctcaaaacaattaattttaccactacgcatttgacctaagagcactttttatcacagcaggaattccttatcaaattctcaggtgcaggtgccccataaacactttggaggcatatggaccttgtggctgagctggctattaactacacaaaacagtaagaggtggcctgggaagaaagaaaaatataaaacaccaaccccagctcaaaaaagtaaaccggaatgttcaactttgcccttcttgtgaaktttgtgtatttctcacccaccatagtgccatgaaaccttgggaatttagaagtcagccagcatgtggaaggttttgcttcattgtcataaagcatgcatattcatatagttacaaataacttatttaaatttagaaaaaaatggcaaaaaataccaaatggaggacaaggaagtcatcctgtttgtaaatcgaggctatggaatgcttgctaaaaactaatcaatgagaatatttcatagaaaaatactcatatgactggaaatatacatgtgtatatatatatttaaatttatccttagaggatatatttagagaaagata

SEQ ID NO: 159154 - DNA, 567 bp, Homo sapiens
agcccctataaagaccatgaaccacagtttccccaaaacttgattttccccttcatttccccctctcctttctaacaaaatcctaattgctgttcacatatccactccatttctagccctagaaggagaygaacctgattattcccagccaattaatgtatgtggttctcctggctgcaattagtattctagagatggaggtgggggcctaattagactaaaggaaaaaacactcatatgccagctggttttcgtttgtttgtttgttgttgttgttgagacaaggtgttgctctgtcgcccaggctagagtgcggtggtgctatcatggctcactgcagcctcaatctcctgggctcaagcaatcctcctacctcagcctctgagtagctgggagactacaggagcacgtcaccatgcccgaccaattttggttttgtttgtttgtctgtcttgtagagatggggttttgccatgttgcccaggctgttcttgagctcctgggctcaagtgatccatctgcctcggtgtcccaaagtgctggaatttcaagtgcgagccactgcac

SEQ ID NO: 159155 - DNA, 613 bp, Homo sapiens
ctttggtttgtatcaggctgaagttgatttccaagacaccagtggcagccaactcactccatgtagacccatgaggctgctattggagggggctgtgtccattgtaccctagaggaccttctgtggatgtggagcaggaggttcacacaggatataggcagaaagagcaaactcaaaatgaaatcagctccctctgtaccaggaggagagacaatgtgggcatttcttataatatatgsccctctctggagcttagaatcaacctcatggaggaaagggagaggaaaaaaccctcagagagggttttaacccctttctgaattataaacttgaataattgagacaatgatggagtttaatagaatttagattattttttgtcagataaaattggggctgggagccagaaatcagatttgactataatgagttgttgattgtggaattcctaactgagaaaatcataatatattttaacattttgttagaaattgactccaagatttttggtcttgtgtttttcaaatacatttctctcctcttctttggaatgggcaactattccattttgatattctcaacatctcctctgttttctgtaattatgcaaaag

SEQ ID NO: 159156 - DNA, 424 bp, Homo sapiens
atcatgtacgcatcctccaacttctttatgccttgctgctaatgcctcacatcctaaaatctaygacctttggagcattgctctggagatgtcctgctccacatatgcctgggcgttttgtattccagcccccgtccatcagggtagcccataaccatgaacagactggtatgggagtacaaaagcttggctcctttgcttcaaagtgaacaaactctgaggtgtaaattatgctacaggtttccccatgggatcaggctgagtctgggacttcatctgaaattgtactctgatatagtttgggtctgtgtccccaccgaaatctcatgtcaaattgtaatccccaatgttggaggtggggcctggtgggaagtgactggctcatgggagtggatttcccttgggtggtgttcttgtgacagtt

SEQ ID NO: 159157 - DNA, 577 bp, Homo sapiens
accgtggttgttcctgtgtcattcaataaatgcaagcaaatatttaaaagaatccactgtgactgaatgttgatttggccttaaatgtggatatcggggagccttttaagaacatgtagcttctgggctcttaagatgtaaacgaggcttgagctgaagccgcatttactttagccactagagggcagcacggcccagaaagtgtragcaggtagatgtcacttctctgctttaaagggtgtgtgaatggtttctggggctacagcaggtgggagggagccctgaaaaagcagacaactaaaaaataacccttacaatgacccccatggaaaagttaaacagatatgcaaagatcgctacatttctttagaaatcatggtgactaagcagagaaaattagatgaatatacagtacttagatatttatcccccacaccaataatggaagaaaagggaatcaggtactcggctaacctgagagcaaggtaccaaagacaagaagaaaggtcaaagtagagttttactcttttgaaggtaatgacgcttaaaagcatttagaagctgactggcctgggtt

SEQ ID NO: 159158 - DNA, 604 bp, Homo sapiens
gactgatagaccgtggttgttcctgtgtcattcaataaatgcaagcaaatatttaaaagaatccactgtgactgaatgttgatttggccttaaatgtggatatcggggagccttttaagaacatgtagcttctgggctcttaagatgtaaacgaggcttgagctgaagccgcatttactttagccactagagggcagcacggcccagaaagtgtaagcaggtagatgycacttctctgctttaaagggtgtgtgaatggtttctggggctacagcaggtgggagggagccctgaaaaagcagacaactaaaaaataacccttacaatgacccccatggaaaagttaaacagatatgcaaagatcgctacatttctttagaaatcatggtgactaagcagagaaaattagatgaatatacagtacttagatatttatcccccacaccaataatggaagaaaagggaatcaggtactcggctaacctgagagcaaggtaccaaagacaagaagaaaggtcaaagtagagttttactcttttgaaggtaatgacgcttaaaagcatttagaagctgactggcctgggtttatatgccagttctagca

SEQ ID NO: 159159 - DNA, 579 bp, Homo sapiens
aagaacctgcgtggtccttgggccagcacaacatgatgccaataaagtcagaagctggtctttctgatgctgcaggggtcaagatttattttgttgtcatttgtttgttttttgagacagagtctcactttgttgcccaggctggtsttggactcctggcctaaagcaatcctcccacctcagcctcccagtgtagggattataggcatgaaccactgtgcccaactggtttcaagaactttaataggactttgcattgcaagatttcagtttataaggtctggcctgcctttgccagaatatactaggcgtactgaaccttttcaccaaagaaacactaaaatatttacattcgacaattatcatctgtggtcatggtgatgttagcccctagttttgaggtaatggcctcccccagcttcagaacatgctctaagcctgtttggaacatatctcaggctagggacagcttgagactaagtcagcccaggcaatacagtgatgcttctcatctgtttggtcagtgctgagtggagacagagtggatcagacgatcctaggagaccccttcctcatact

SEQ ID NO: 159160 - DNA, 579 bp, Homo sapiens
aagaacctgcgtggtccttgggccagcacaacatgatgccaataaagtcagaagctggtctttctgatgctgcaggggtcaagatttattttgttgtcatttgtttgttttttgagacagagtctcactttgttgcccaggctggtcttggactcctggcctaaagcaatcctcccacctcagcctcccagtgtagggattataggcatgaaccactgtgcccaactggtttcaagaactttaataggactttgcattgcaagatttcagtttataaggtctggcctgcctttgccagaatatactaggcgtactgaaccttttsaccaaagaaacactaaaatatttacattcgacaattatcatctgtggtcatggtgatgttagcccctagttttgaggtaatggcctcccccagcttcagaacatgctctaagcctgtttggaacatatctcaggctagggacagcttgagactaagtcagcccaggcaatacagtgatgcttctcatctgtttggtcagtgctgagtggagacagagtggatcagacgatcctaggagaccccttcctcatact

SEQ ID NO: 159161 - DNA, 431 bp, Homo sapiens
gtgttagcaggcaccatcctcttgcccaggggcccaaagagaacacatacagagggtggactccgctctctgagagctgggacaggcttttcttctgctgccttggacatcagaactccaggcccaccagcctttgactccaggcccaccaagattgacaccagcggcctcccaagtcctsaggctttctgccttggactgagagttaccccatctgcttccctggttctgaggtctttggacataggctgagccatgctactgacatcccagggtctttagcttgtagacagactgccaagggacttatcagccaccatagttttgtgagccaattcccctagtaaatcacctctcatatgtctatatacatatcctattggttctgtctctctggagaaccctgattaatataaatttggtcttgggga

SEQ ID NO: 159162 - DNA, 476 bp, Homo sapiens
agccctggagagcactaatggtgtctttcaaacctggtatcctgaatgtgtgagcgtgattgggtgggggccagccctgggctgggctttgaccccctcctcgggcctgatgagagctctcattaccttccttccttgccagataggccttggggtgaagccagccctcaacctttgatgggaggaaggcttaattaccccctcaggcagagggagaggataatgaggagcagatgaaaagcctgggaaggttgctccttccagaggcccccacctcttagcacccaggstgcccccggccccaccttcagcctctttgggcttaggttaaggccttgcaccctggtctgcagagggccccagcacccatggcccttgtgtgattcacagatcacagggattaccttggattctctctaccacagtgcctgaaatctcattagcacttcctattggggtcacaccaagcactccta

SEQ ID NO: 159163 - DNA, 349 bp, Homo sapiens
gccagcccttcttttcctgctgaaactggaagcctggaggaggaagagagaagtccccagcctctaaagccaggactgggaacctggggcacagaacccgggggtacagaaactgcaagtggaccagcagataggacggctggaacgtgaatcctctctttggacttyagaagcaatccttgggttcctgggcagggtgagcagggcaggtcaagatgcagaaatgggcagagagaagcagagaaaggcagaccacacttcagggctcttcaaagtcagggacctgcagatcgcttcttctccagagcccagccagggtctggtacagtggagcggggataagtatgtg

SEQ ID NO: 159164 - DNA, 508 bp, Homo sapiens
tttttgagacagagtctcactctgtcgcccaggctggaatgaagtggtgcaatctcagctcactgcaacctccgcccccagggttcaagcaattctcctgcctcagcctcttgagtagttgggattataggtgcctgccaccatggccagctaattttgtattttttgatttttttagtagagatggggttttgccatsttggccaggctggtctcaaacttcctgacttcaggtgatccacttgcctcagcttcccacagtgctacgattacaggcgtgagccactgcaccgggcctagagcactcttttaggcaaactttcccctctggggatgctcctgaagatcaatagcatcgtgcaacagacaaagtgctggtgagtgaaagtcagacatcagattctagtgctcactgtgtctctgactctctttgtgacttgggatgagtcattttccaccgggtgggccctcgcttctccagctctactatgtgaatgagagttagtga

SEQ ID NO: 159165 - DNA, 394 bp, Homo sapiens
ctcactgggttggcttggaggagcaggactcytgcggcctttgccctttgtctttgggacctcctctagggggcaggagacaggtggaggatcttacttcctctgggtctgaaactttcattcacccaatgaaatggggaggcgctatactcgcatggggtaaacccctgacccctacccaaactcaccaggctggtatggtcataaacacacaacacccagaggcaggaggtccaggacatttctcccacgaccccttattcccacctcaactcctccctatcctgccccgtgccctattctcttcttctcccagcctttcaaaggcagagtgaccctgcaaaccctctcctctgctgtcttcagtccttgaccaagctggaggcagcactga

SEQ ID NO: 159166 - DNA, 500 bp, Homo sapiens
tccagaaaaagaactgttcttccagaaatacttctccaggccttgatgaagcggtccagctggctggagcaaatcttgtagtagactttcataaattcttggttgcagctgtattccaccagccagcaggcgatgcagattacatcctggatcacactcttgggcaggtgctccagggacataatctcctgtacctccagatcatcatcaccaccgatcagatccaggatgagcacaggtgatacaaacttattgtgcctggtcatcaggctgcagagctcagatgtgtgttctgggctgtctgggctattgtcctggaaatactccacagccttctgaatcttagccatgcttcccagatactcttccggcctacctgtggggccctctctgatgatctgctaagtgtcactggcaacatggtaagagttgatgatgtggtccaggatggatagygtcttctcaaaattgtcttgcagctgctgcagattatctgtctg

SEQ ID NO: 159167 - DNA, 552 bp, Homo sapiens
acatcttccatgagtaagctggacatatttcacaatctttaataattctcagatctgcatctccagtgagacctctctcctgaaactcagagctgtgtccaactatttacagtatactttcatttgagtgccttaatggaacctcaaatttttccagcgctaagctggctgtcaccatctctcccaccacacatggcaatagcarccacaataatgacaaccacaacaaatcaattttacctcatgtattttccatttaaggcctggaaaaaccaaccactcaaattagctccttccttcaatctacacatagagttgattactaactcgtaaagaatctgtttccttaatttccttaatctttctctcatctatctctgtctcttgctcccagggccatcttgtatgcttgtcctcctccctgcaatgattatgagagccttgacaacagacattgtctaacttacagctaaaacctttttttttttaattttttttttgtgtgtgtggagacagggtcttgctctgccattctggatggagtgcagtggc

SEQ ID NO: 159168 - DNA, 552 bp, Homo sapiens
acatcttccatgagtaagctggacatatttcacaatctttaataattctcagatctgcatctccagtgagacctctctcctgaaactcagagctgtgtccaactatttacagtatactttcatttgagtgccttaatggaacctcaaatttttccagcgctaagctggctgtcaccatctctcccaccacacatggcaatagcaaccacaataatgacaaccacaacaaatcaattttacctcatgtattttccatttaaggcctggaaaaaccaaccactcaaattagctccttccttcaatctacacatagagttgattactaactcgtaaagaatctrtttccttaatttccttaatctttctctcatctatctctgtctcttgctcccagggccatcttgtatgcttgtcctcctccctgcaatgattatgagagccttgacaacagacattgtctaacttacagctaaaacctttttttttttaattttttttttgtgtgtgtggagacagggtcttgctctgccattctggatggagtgcagtggc

SEQ ID NO: 159169 - DNA, 376 bp, Homo sapiens
taagaccagtgaggtcagatgtgagtttaatataaaaagaaatttagagcttcatagaataggctgcaagtagactaatgaagttccctgggattagtcaagcagaaacaaaaatgtctagttcttcttattatggtggagcttattgatagcttagatggtggaggtttcttagttaattttaaagaaatggcaggcaacttatttcagggaatgcttttaggttttttttttttcttaaatcagaaactagatacagtttatataatctttttgccctcttctgccacaagtatttattcttttgttcaataaatatgtcttcaaaattctatgccattgttctgccttctggaaaygtactatcaagcataaa

SEQ ID NO: 159170 - DNA, 559 bp, Homo sapiens
cacacttctgggttaaaaggttaccagtgttttcattcacaaaaagctgtatagacatattcaaacccacttccggaacacttcatataaattgatgacttcctctacttttgatatactaattttcctagttttaatgattgttgaagtatagaaataacaaagatattttcattctttattaaagtttcaatgtggtgtgatcgttcaataatttactgattttacaaatatttattgagtacctactatgtggcaggcaccattacaatatattagtgaggatgctttcggtggcatataaaaataaacataactcaaaacaccttgaagataaagaaaatgtttggggtcatgtaactgaaaagggcagagatggggctggcttcttctggctgggtgtcacccaatggctcaacatgtcaaaygtggaaactgtttccttgccatctgtttctctgctctgctttctacagtttctgcatcatcccctgctcatcccaaaatagctactaacagctcccagaaagggtttatttgcctcataattcctagcaat

SEQ ID NO: 159171 - DNA, 609 bp, Homo sapiens
tgtcaaatgtcttttattctgacacaatggtataaaactagcaatcagtaacagaagaaaatttggaaaattcacaaatatataaaaattaaacaatgtgctcctgaataacaaaggatcaattaaaaaatttaaagggaaattaaaaattttcttgagacaaatgaaaatggaaacacattataccaaaacctatgggatacagcaaaarcagtacaaggagggaagcttatagcaataaacacctacttttaaaaaaaaataccagacaaccttacattccaccttaaagaaatagaaaaataagaacacactaaactcaaaattagtagaataaaataaataataaagaccagagcaaaaataaatgaaatagagcctagaaaatcaatagaaaagatcaacaaaatgaagagtctgttttttgagaagataaacagaattgacaaatctttagctagactaagaaaaaaggaaagaaaattcaagtaaataaaatcagagatgaaaaaggaaacactaaaactgatcacaaaatataaagcatcataagagactattataaacaattatatgccaacgaattgagtaacttagaagaaatgaata

SEQ ID NO: 159172 - DNA, 465 bp, Homo sapiens
gaagcttatagcaataaacacctacttttaaaaaaaaataccagacaaccttacattccaccttaaagaaatagaaaaataagaacacactaaactcaaaattagtagaataaaataaataataaagaccagagcaaaaataaatgaaatagagcytagaaaatcaatagaaaagatcaacaaaatgaagagtctgttttttgagaagataaacagaattgacaaatctttagctagactaagaaaaaaggaaagaaaattcaagtaaataaaatcagagatgaaaaaggaaacactaaaactgatcacaaaatataaagcatcataagagactattataaacaattatatgccaacgaattgagtaacttagaagaaatgaatacattcttggacacatgcaacctatcaagatagagttatgaagagatagaaaatctgaacagatgaataataagtaagaag

SEQ ID NO: 159173 - DNA, 609 bp, Homo sapiens
tgtcaaatgtcttttattctgacacaatggtataaaactagcaatcagtaacagaagaaaatttggaaaattcacaaatatataaaaattaaacaatgtgctcctgaataacaaaggatcaattaaaaaatttaaagggaaattaaaaattttcttgagacaaatgaaaatggaaacacattataccaaaacctatgggatacagcaaaagcagtacaaggagggaagcttatagcaataaacacctacttttaaaaaaaaataccagacaaccttacattccaccttaaagaaatagaaaaataagaacacactaaactcaaaattagtagaataaaataaataataaagaccagagcaaaaataaatgaaatagagcctagaaaatcaatagaaaagatcaacaaaatgaagagtctgttttttgagaagataaacagaattgacaaatctttagctagactaagaaaaaaggaaagaaaattcaagtaaataaartcagagatgaaaaaggaaacactaaaactgatcacaaaatataaagcatcataagagactattataaacaattatatgccaacgaattgagtaacttagaagaaatgaata

SEQ ID NO: 159174 - DNA, 410 bp, Homo sapiens
agtgatttcagaattccatgaatgttgggatatgtccaggctggcaccctgggatcatgaaaatagaagttaagacatttaagaagcaagaaaacaaaatgggtaggtgaggtgactaggaagaatatcakgcccagcacttctagaattctcaaaatgaggagcatcacttaaattttgagggggatcatttttaggatggtgacccaagctctctttgtacagatgagaagtctagttatctcatgagacccagtgtgactaaaggaccatagcatgtagctgcgtaatggcacggtggcactaggagctgatccattcatttatttataattaccaaggggaagtatggggtgagatttattcttaactcttaaaatggtgacatacactattttaagaataaacct

SEQ ID NO: 159175 - DNA, 593 bp, Homo sapiens
aagctttctcagtccaaagggaagaaatttcccataaaaatagcacaaaygggcccacaggcccaacacaagtccaaaactcagcgggacagtattcactcaatcccacagctgcaaatatcatcaagagaactcactatcacgcaggcggcattaaggagatagtgtttaaacatttgtgaaggatctgcccccctacccttaccttttacccccacccacaaaataatctcccccattctccccacacccctacctccaacgcccactcttctccatgaataaatcacctcacaccaggccccacgtttaacattcaccattacaattccaaatgagtttggtagggatgcagacccaaatcgtattattctgaccctgaccccccatatctcatgttgttctcacactgcaaaatacaatgatgcctactctacagtttcccaatgtcttagctcattccagcatttactgaaatgtccaaagcccaaagtctcttctgagacaagactgccatcccttctgcccctgagcctctgaaatacaaagcaagttaattacctccaaggtatgactgtccaggcattgagtaa

SEQ ID NO: 159176 - DNA, 593 bp, Homo sapiens
aagctttctcagtccaaagggaagaaatttcccataaaaatagcacaaatsggcccacaggcccaacacaagtccaaaactcagcgggacagtattcactcaatcccacagctgcaaatatcatcaagagaactcactatcacgcaggcggcattaaggagatagtgtttaaacatttgtgaaggatctgcccccctacccttaccttttacccccacccacaaaataatctcccccattctccccacacccctacctccaacgcccactcttctccatgaataaatcacctcacaccaggccccacgtttaacattcaccattacaattccaaatgagtttggtagggatgcagacccaaatcgtattattctgaccctgaccccccatatctcatgttgttctcacactgcaaaatacaatgatgcctactctacagtttcccaatgtcttagctcattccagcatttactgaaatgtccaaagcccaaagtctcttctgagacaagactgccatcccttctgcccctgagcctctgaaatacaaagcaagttaattacctccaaggtatgactgtccaggcattgagtaa

SEQ ID NO: 159177 - DNA, 633 bp, Homo sapiens
ggaaggcagtttcagagcaaatctctaagggcgcctgaaagcttaagaagttcgacattaactttgaaggcaactggcaaccatggaatattttgagaaagttcttataactgaagcaacactaaaagaagattaatctttcaataaaagtttaggatataatttaaaaaggaaaaatggaagcaaaaaccaagtatgatagatgaactcaattataatgttggggagaagatggaaaagaaaacacaggccagagccacatgacaaagaattgattaacagttcctgtccctgatggcatctgagcacatgcattcgtgtctctgtcttccacagggcccctggaataaaagtaagtgaayatgcctataggagcaaaggtgtctgaagagaaaactaatctgccaataaaatggagaaaaccaactaccttatgaaacgattacttcagatctccagtcattagaaagacactaccagcatgaagaaggaagatcaagataaatagagagaataactgatcccatgaaaataaagatagttcagaatattaaaaagaaaagctgctttaactaggattctcaaagaaattctagaaggtagtacaggatggtataaaattgcaatagagaa

SEQ ID NO: 159178 - DNA, 633 bp, Homo sapiens
ggaaggcagtttcagagcaaatctctaagggcgcctgaaagcttaagaagttcgacattaactttgaaggcaactggcaaccatggaatattttgagaaagttcttataactgaagcaacactaaaagaagattaatctttcaataaaagtttaggatataatttaaaaaggaaaaatggaagcaaaaaccaagtatgatagatgaactcaattataatgttggggagaagatggaaaagaaaacacaggccagagccacatgacaaagaattgattaacagttcctgtccctgatggcatctgagcacatgcattcgtgtctctgtcttccacagggcccctggaataaaagtaagtgaatatgcctataggagcaaaggtrtctgaagagaaaactaatctgccaataaaatggagaaaaccaactaccttatgaaacgattacttcagatctccagtcattagaaagacactaccagcatgaagaaggaagatcaagataaatagagagaataactgatcccatgaaaataaagatagttcagaatattaaaaagaaaagctgctttaactaggattctcaaagaaattctagaaggtagtacaggatggtataaaattgcaatagagaa

SEQ ID NO: 159179 - DNA, 593 bp, Homo sapiens
aagctttctcagtccaaagggaagaaatttcccataaaaatagcacaaatgggcccacaggcccaacacaagtccaaaactcagcgggacagtattcactcaatcccacagctgcaaatatcatcaagagaactcactatcacgcaggcggcattaaggagatagtgtttaaacatttgtgaaggatctgcccccctacccttaccttttacccccacccacaaaataatctccccyattctccccacacccctacctccaacgcccactcttctccatgaataaatcacctcacaccaggccccacgtttaacattcaccattacaattccaaatgagtttggtagggatgcagacccaaatcgtattattctgaccctgaccccccatatctcatgttgttctcacactgcaaaatacaatgatgcctactctacagtttcccaatgtcttagctcattccagcatttactgaaatgtccaaagcccaaagtctcttctgagacaagactgccatcccttctgcccctgagcctctgaaatacaaagcaagttaattacctccaaggtatgactgtccaggcattgagtaa

SEQ ID NO: 159180 - DNA, 593 bp, Homo sapiens
aagctttctcagtccaaagggaagaaatttcccataaaaatagcacaaatgggcccacaggcccaacacaagtccaaaactcagcgggacagtattcactcaatcccacagctgcaaatatcatcaagagaactcactatcacgcaggcggcattaaggagatagtgtttaaacatttgtgaaggatctgcccccctacccttaccttttacccccacccacaaaataatctcccccattctccccacacccctacctccaacgcccactcttctccatgaataaatcacctcmcaccaggccccacgtttaacattcaccattacaattccaaatgagtttggtagggatgcagacccaaatcgtattattctgaccctgaccccccatatctcatgttgttctcacactgcaaaatacaatgatgcctactctacagtttcccaatgtcttagctcattccagcatttactgaaatgtccaaagcccaaagtctcttctgagacaagactgccatcccttctgcccctgagcctctgaaatacaaagcaagttaattacctccaaggtatgactgtccaggcattgagtaa

SEQ ID NO: 159181 - DNA, 464 bp, Homo sapiens
gacattatttttatataaaagactaataagatattttcttaagggcctctttactacctgtcacatgggatttgctggtaattaactctgtgtatatggctaaatgattcttgagacatagcgattagaaatcattaaataagactaaaatcaaaatgggaataaaaacaggctcagaaacaaggctacatctaagktaagagcaaactgtaaaaatattaatttgcaaacagatctttgatggttaggaatccatcttacaggtgtctagatactctgaacttttctcttatgactaagaaatcaggaaagcttttaaggaatttctctctgagttgtcaaaaattttaatagataccactaccactatgttagctcatacgacacactatacttagtgtgcttttgactttgacagtgttttcgagcataaaatgtgatgcatcatatctaaatatcttaat

SEQ ID NO: 159182 - DNA, 464 bp, Homo sapiens
gacattatttttatataaaagactaataagatattttcttaagggcctctttactacctgtcacatgggatttgctggtaattaactctgtgtatatggctaaatgattcttgagacatagcgattagaaatcattaaataagactaaaatcaaaatgggaataaaaacaggctcagaaacaaggctacatctaaggtaagagcaaactgtaaaaatattaatttgcaaacagatctttgatggttaggaatccatcttacaggtgtctagatactctgaacttttctcttatgactaagaaatcaggaaagcttttaaggaatttytctctgagttgtcaaaaattttaatagataccactaccactatgttagctcatacgacacactatacttagtgtgcttttgactttgacagtgttttcgagcataaaatgtgatgcatcatatctaaatatcttaat

SEQ ID NO: 159183 - DNA, 467 bp, Homo sapiens
tagttacaaaggtggacatgctgtctagacatcatgaatgctaaaagaaatgtgtgtgtttgtatgcacctgtgcacacactataagcatatgaaacacacctgtgacctatgcaacaaataaaagtgacacgtcatgaatgctccccaaatctaacttcagtgctacattttaaaaaagtgatggggaaataccttcttctggaggctakattgcctctgtatgtgtgtgtggggattgtaggagtagggagacttcctttttgatagggaacttggggtagagaatcaaccaaaaagcagccatcagagactcgtatgcatccaggactgttctatgtagcacggaggactctggttaagaatacagtgatgaagctttgaatgtccagtgaagctgggagggcacaactgacacgcatgaaatgggtttgagagtagactataaggaataaatgagtctggggg

SEQ ID NO: 159184 - DNA, 532 bp, Homo sapiens
aatttctaattgactaaataatatttatataaatgtgtggagtacgatgttatattttaatgtatgcatacattatagaatgataaaatcgggctaattaacatatcttccacctcccatatgtatctgcgtttgtatgtggcataagcattttaaattcactcccttaggaattttgaaataaacattatgttattattaactatagtttccatgctatgcaatagatctaaaaaatgtattcctcctaattgaaactttgtatcccttgaccaaattctccccattcccacctccccctcagcctctagtaaacatyattctattctctactgctatgattttagattccacatataagtgacatcatgcagtatttgtcattgctgtgctggcttatttcacgtggcataatgtcctccctcactattttgttctaatcaccacttctaagacattcttcaccaattgctctgcctggttagatgtagagcactttctgccatctaaaccttttaacccttcttttggt

SEQ ID NO: 159185 - DNA, 579 bp, Homo sapiens
gtcctagtgtttccagtttttgaatgataaaatcaggctgcctcagggaagctacaaagggtgaggtttgtttttttcttttcttttctatttatttatttatttatttatttatttatttatttatttagatggagtcttgctctgtgcccaggatggagtacagtgtcattatcttggctcactgcaagtccacctcacgggttcatgccattctcttgcctcagcttcccgaaagggtgaggttttatagtggcacttaagggatttatggaaaacagaaggtatgtgtgttctgtaatttttcattcatagttccatagtaaagctattttttttttgtttctacttcactgcccaagagattaamtgggttctgaaataagaggtttagtacctgataacactgcctggttttccagtcatgataaaaattatttttagctctgatggtggggaatgctagaaagagtcactcaactgcactggttttagcaatgcttcaactccttctagtccaccttcattgtgtttatctgttttctagctagttaatgtcagggaggcttcatctagatc

SEQ ID NO: 159186 - DNA, 536 bp, Homo sapiens
gaattctgatttctacagacttgcattgccatcttaargctttgagattttcaccaaagcccactcttcaggagcacagccaactggccttaaactagttgtgagggggcaggatcagcttaaaattagtcagcaaaatacttatcaagagcacaaaaagaccatgagggaccgtccatggtcctctaggaattaaaaatgtttgtattgtgggagagatgttagtgtagggccccaaattcacaaacaatggaagatgaggattagagccaacttatttctcactttggtaaggaaaacagctgctgctacacaggaagattctgtcaaagcaaaggaaataagaacctaagaaaataagaagatagtttgttaaaagatctgggtacccctggaacctttatcagctggctgtgtgaccataggcaagtcacttcctctctctgggcttcttgctggtccccaagatggcttccagttcctcataacaatatacgagttccaaattattcccagtatatgtcctggccaaatat

SEQ ID NO: 159187 - DNA, 509 bp, Homo sapiens
caaagcccactcttcaggagcacagccaactggccttaaactagttgtgasggggcaggatcagcttaaaattagtcagcaaaatacttatcaagagcacaaaaagaccatgagggaccgtccatggtcctctaggaattaaaaatgtttgtattgtgggagagatgttagtgtagggccccaaattcacaaacaatggaagatgaggattagagccaacttatttctcactttggtaaggaaaacagctgctgctacacaggaagattctgtcaaagcaaaggaaataagaacctaagaaaataagaagatagtttgttaaaagatctgggtacccctggaacctttatcagctggctgtgtgaccataggcaagtcacttcctctctctgggcttcttgctggtccccaagatggcttccagttcctcataacaatatacgagttccaaattattcccagtatatgtcctggccaaatatgaatcctgaccctgtgtaggagaattc

SEQ ID NO: 159188 - DNA, 523 bp, Homo sapiens
gaattctgatttctacagacttgcattgccatcttaaagctttgagattttcaccaaagcccactcttcaggagcacagccaactggccttaaactagttgtgagggggcaggatcagcttaaaattagtcagcaaaatacttatcaagagcacaaaaagaccatgagggaccgtccatggtcctctaggaattaaaaatgtttgtattktgggagagatgttagtgtagggccccaaattcacaaacaatggaagatgaggattagagccaacttatttctcactttggtaaggaaaacagctgctgctacacaggaagattctgtcaaagcaaaggaaataagaacctaagaaaataagaagatagtttgttaaaagatctgggtacccctggaacctttatcagctggctgtgtgaccataggcaagtcacttcctctctctgggcttcttgctggtccccaagatggcttccagttcctcataacaatatacgagttccaaattattcccagtatatgt

SEQ ID NO: 159189 - DNA, 523 bp, Homo sapiens
gaattctgatttctacagacttgcattgccatcttaaagctttgagattttcaccaaagcccactcttcaggagcacagccaactggccttaaactagttgtgagggggcaggatcagcttaaaattagtcagcaaaatacttatcaagagcacaaaaagaccatgagggaccgtccatggtcctctaggaattaaaaatgtttgtattgtgggagagatgttagtgtagggccccaaattcacaaacaatggaagatgaggattagagccaacttatttctcactttggtaaggaaaacagctgctgctayacaggaagattctgtcaaagcaaaggaaataagaacctaagaaaataagaagatagtttgttaaaagatctgggtacccctggaacctttatcagctggctgtgtgaccataggcaagtcacttcctctctctgggcttcttgctggtccccaagatggcttccagttcctcataacaatatacgagttccaaattattcccagtatatgt

SEQ ID NO: 159190 - DNA, 523 bp, Homo sapiens
gaattctgatttctacagacttgcattgccatcttaaagctttgagattttcaccaaagcccactcttcaggagcacagccaactggccttaaactagttgtgagggggcaggatcagcttaaaattagtcagcaaaatacttatcaagagcacaaaaagaccatgagggaccgtccatggtcctctaggaattaaaaatgtttgtattgtgggagagatgttagtgtagggccccaaattcacaaacaatggaagatgaggattagagccaacttatttctcactttggtaaggaaaacagctgctgctacacaggaagattctgtcaaagcaaaggaaataagaacctmagaaaataagaagatagtttgttaaaagatctgggtacccctggaacctttatcagctggctgtgtgaccataggcaagtcacttcctctctctgggcttcttgctggtccccaagatggcttccagttcctcataacaatatacgagttccaaattattcccagtatatgt

SEQ ID NO: 159191 - DNA, 523 bp, Homo sapiens
gaattctgatttctacagacttgcattgccatcttaaagctttgagattttcaccaaagcccactcttcaggagcacagccaactggccttaaactagttgtgagggggcaggatcagcttaaaattagtcagcaaaatacttatcaagagcacaaaaagaccatgagggaccgtccatggtcctctaggaattaaaaatgtttgtattgtgggagagatgttagtgtagggccccaaattcacaaacaatggaagatgaggattagagccaacttatttctcactttggtaaggaaaacagctgctgctacacaggaagattctgtcaaagcaaaggaaataagaacctaagaaaataagaagatagtttgttaaaagatctgggtacccctggaacctttatcarctggctgtgtgaccataggcaagtcacttcctctctctgggcttcttgctggtccccaagatggcttccagttcctcataacaatatacgagttccaaattattcccagtatatgt

SEQ ID NO: 159192 - DNA, 531 bp, Homo sapiens
acatgacagcaagcaagagaacgtgtgaaggaagcaaagggggaagagccccttataaaaccatcagatctsatgataattcattcactattatgagaacagcatggataaaactgccccccatgattcaataacctctcatcagctccctcccttaacatgtggggataagggggattacaattcaagaataagatttagctgaggacacagagccaaaccatatcattctacccgtgctttctcccaaatctcatgtcctcacatttcaaaacacaatcatgccttcccaatagtcccccaaagtcttaacttatgccaacattaactcagaagtccaagtccaaagtctcatccacctttggcaagtcccttctacttaggagcctgtaaaatcaaaagcaagttacttccaagacacaatgggagatataaaatggggcacaggcattgggtaaatacacccaactggctaaaacaaaggggctacaggccccatccaagtttgaaatccagtggggtatttattaa

SEQ ID NO: 159193 - DNA, 531 bp, Homo sapiens
acatgacagcaagcaagagaacgtgtgaaggaagcaaagggggaagagccccttataaaaccatcagatctgatgataattcattcactattatgaraacagcatggataaaactgccccccatgattcaataacctctcatcagctccctcccttaacatgtggggataagggggattacaattcaagaataagatttagctgaggacacagagccaaaccatatcattctacccgtgctttctcccaaatctcatgtcctcacatttcaaaacacaatcatgccttcccaatagtcccccaaagtcttaacttatgccaacattaactcagaagtccaagtccaaagtctcatccacctttggcaagtcccttctacttaggagcctgtaaaatcaaaagcaagttacttccaagacacaatgggagatataaaatggggcacaggcattgggtaaatacacccaactggctaaaacaaaggggctacaggccccatccaagtttgaaatccagtggggtatttattaa

SEQ ID NO: 159194 - DNA, 531 bp, Homo sapiens
acatgacagcaagcaagagaacgtgtgaaggaagcaaagggggaagagccccttataaaaccatcagatctgatgataattcattcactattatgagaacagcatggataaaactgccccccatgattcaataacctctcatcagctccctcccttaacatgtggggataagggggattacaattcaagaataagatttagctgaggacacagagccaaaccatatcattctacccgtgctttctcccaaatctcatgtcctcacatttcaaaacacaatcatgccttcccaatagtcccccaaagtcttaacttatgccaacattaactcagaagtccaagtccaaagtctcatccacctttggcaagtcccttctacttaggagcctgtaaaatcaaaagcaagttacttccaagacacaatgggagatataaaatggggcacaggcattgggtaaatacacccaaytggctaaaacaaaggggctacaggccccatccaagtttgaaatccagtggggtatttattaa

SEQ ID NO: 159195 - DNA, 612 bp, Homo sapiens
ctctactaaacagtcatgtataactcaggcatactggttttcatttgtaattttcattttattgyactttcaattttcaggttttgtccatctttcttccccttggcccttccatcacttctgctacttgatgaattctgtcttaaacagtagctagaatataaacatttaataaaatattaacctgattgcttgccctccctataaacaataaaatgacatacatgaacaaatgacaaatacaatattttatgttgtgtttatttctacctttctccaaggcttcttttaatctttattaaagtttattatagcaaactactatcaaatatttccatgcatttaactggttattgtaacatcaacacaagagagcaaatgaaattgtgaagcttgtactttctattgctctaaggtgtctatgcagatcattatgtattcttcaccacaggtcagttgcttagctaccagagaagtagagaactactaattgaaagtattctgtattgctggcaaggcttgctgcaggacgttgaacttggaaacagcagagactgtgtcagataaaaatgttgcagaggatgaaagaaaaatagttgcagcattatcata

SEQ ID NO: 159196 - DNA, 612 bp, Homo sapiens
ctctactaaacagtcatgtataactcaggcatactggttttcatttgtaattttcattttattgcactttcaattttcaggttttgtccatctttcttccccttggcccttccatcacttctgctacttgatgaattctgtcttaaacagtagctagaatataaacatttaataaaatattaacctgattgcttgccctcccyataaacaataaaatgacatacatgaacaaatgacaaatacaatattttatgttgtgtttatttctacctttctccaaggcttcttttaatctttattaaagtttattatagcaaactactatcaaatatttccatgcatttaactggttattgtaacatcaacacaagagagcaaatgaaattgtgaagcttgtactttctattgctctaaggtgtctatgcagatcattatgtattcttcaccacaggtcagttgcttagctaccagagaagtagagaactactaattgaaagtattctgtattgctggcaaggcttgctgcaggacgttgaacttggaaacagcagagactgtgtcagataaaaatgttgcagaggatgaaagaaaaatagttgcagcattatcata

SEQ ID NO: 159197 - DNA, 612 bp, Homo sapiens
ctctactaaacagtcatgtataactcaggcatactggttttcatttgtaattttcattttattgcactttcaattttcaggttttgtccatctttcttccccttggcccttccatcacttctgctacttgatgaattctgtcttaaacagtagctagaatataaacatttaataaaatattaacctgattgcttgccctccctataaacartaaaatgacatacatgaacaaatgacaaatacaatattttatgttgtgtttatttctacctttctccaaggcttcttttaatctttattaaagtttattatagcaaactactatcaaatatttccatgcatttaactggttattgtaacatcaacacaagagagcaaatgaaattgtgaagcttgtactttctattgctctaaggtgtctatgcagatcattatgtattcttcaccacaggtcagttgcttagctaccagagaagtagagaactactaattgaaagtattctgtattgctggcaaggcttgctgcaggacgttgaacttggaaacagcagagactgtgtcagataaaaatgttgcagaggatgaaagaaaaatagttgcagcattatcata

SEQ ID NO: 159198 - DNA, 612 bp, Homo sapiens
ctctactaaacagtcatgtataactcaggcatactggttttcatttgtaattttcattttattgcactttcaattttcaggttttgtccatctttcttccccttggcccttccatcacttctgctacttgatgaattctgtcttaaacagtagctagaatataaacatttaataaaatattaacctgattgcttgccctccctataaacaataaaatgacatacatgaacaaatgacaaatacaatattttatgttgtgtttatttctacctttctccaaggcttcttttaatctttattaaagtttattatagcaaactactatcaaatatttccatgcatttaactggttattgtaacatcaacacaagagagcaaatgaaattgtgaagcttrtactttctattgctctaaggtgtctatgcagatcattatgtattcttcaccacaggtcagttgcttagctaccagagaagtagagaactactaattgaaagtattctgtattgctggcaaggcttgctgcaggacgttgaacttggaaacagcagagactgtgtcagataaaaatgttgcagaggatgaaagaaaaatagttgcagcattatcata

SEQ ID NO: 159199 - DNA, 619 bp, Homo sapiens
catgccaccatgcctggctaacttttaaattttttgtagaaacagggtctctctatgttgcccagggtggtctcaaactagtgggctcaagcgatcctcccaccttggcctcccgaagtgttggrattacaggtgtgagccaccatatcctgcctcaatggtagtctaataaagacaatttgtaatccaaacttgaaaaaatatcaactcagttctcttacatttatgtttaataaatgttgcagggagatgaactcagaactttgtatcttagaatatttgcagtttcttcttattatagttatttgggtctttgtctcatcatctactctatgagcctccggtggaaggagactgtgatttcaccattgtggtatcctttgcagtgcgagttcccagtatatcatttgccaaaccctggtcccaaaatatgctcctccagggagaaatggtccatgatataataagcttgggaaatgttgcacactcactatggcctctctaagtgctttccaactcgcattaactcactgaatgcactgaaaagctaggtagaagaaaatcttcacaatctatatgtctgtcaaaggattaatatccagaatctgcaatgaactca

SEQ ID NO: 159200 - DNA, 619 bp, Homo sapiens
catgccaccatgcctggctaacttttaaattttttgtagaaacagggtctctctatgttgcccagggtggtctcaaactagtgggctcaagcgatcctcccaccttggcctcccgaagtgttggaattacaggtgtgagccaccatatcctgcctcaatggtagtctaataaagacaatttrtaatccaaacttgaaaaaatatcaactcagttctcttacatttatgtttaataaatgttgcagggagatgaactcagaactttgtatcttagaatatttgcagtttcttcttattatagttatttgggtctttgtctcatcatctactctatgagcctccggtggaaggagactgtgatttcaccattgtggtatcctttgcagtgcgagttcccagtatatcatttgccaaaccctggtcccaaaatatgctcctccagggagaaatggtccatgatataataagcttgggaaatgttgcacactcactatggcctctctaagtgctttccaactcgcattaactcactgaatgcactgaaaagctaggtagaagaaaatcttcacaatctatatgtctgtcaaaggattaatatccagaatctgcaatgaactca

SEQ ID NO: 159201 - DNA, 221 bp, Homo sapiens
gatctgcaaggctggctttaagagcacaaggagggaaagtaacgaaagggctggactactataaaagttacaaatacgtagttagaccaatagatttatatagtcaggtttttgtcatgtaatttrttaactattacagaaacgcaactaagaatatcaagtatttctctggctcttgacagaaaaaaatcagttgacttaaccctttgctgtcaaaagag

SEQ ID NO: 159202 - DNA, 221 bp, Homo sapiens
gatctgcaaggctggctttaagagcacaaggagggaaagtaacgaaagggctggactactataaaagttacaaatacgtagttagaccaatagatttatatagtcaggtttttgtcatgtaatttgttaactattacagaaacrcaactaagaatatcaagtatttctctggctcttgacagaaaaaaatcagttgacttaaccctttgctgtcaaaagag

SEQ ID NO: 159203 - DNA, 536 bp, Homo sapiens
cttgttcaggaccctacagcttagtaaatgcaacatatgaattgctgtgggtgcaaaagcagcagatggagagtcacaaggccaaggctccactcagcttccccactcagtcagtgtgtggccataggaagaccactctccctttgggacccagttttctgttctgactttgctcagggtgatctccaggtctccttcataaccagggctccacagttataattctattatgatatgatgcaaacacagaaagagaaaggaaaaaamcacagatctacctcaggaaccctcagaaaatttttactatgcatatcccagccacctcccaggggatctaggggaaaaaatgattatacgctatctgcctcctaggctcagaggtactaggagtatttaaggcaataggaaaattaaaagaaggaaggttgagaatgaaaatgttgagaacggagaagagaacagagaatagaaaggccaagaaacatgaagaaaggcctttaccaggtcagggagagcctgcagccctggctactcag

SEQ ID NO: 159204 - DNA, 556 bp, Homo sapiens
acctacaattgctctaaaataataaagtctattaaatgttttaacttaatcttaattttaatttaaaaataaaataaatgatgttattcaccattactgccccagacgttcatcctaactgcaaagtatgaaggcaatgttgaatcacagattttcttggcttgttattttacatcgctaacttggttttgacattaacagttagcatccaaaacaatcttaaccatcaggaatatgacttagccctacaattcagggaccwtaaggaaaacattttcaagttgtgttaatgtaggtctcactacaatgaatctcttaaaccaatatctcactaaaatcagagaatatttctagaactctcaaataaatagcaataagactatgcataattgcatagaagtcagtctaaaatgcaacaaaaatgaacaccatagttgacattgaaccaatataatgagttgttggccaataagcctgaaactcttctgtgagctgagatggaacagccacaagttgcttgaacattgtttgaaaatgagattgtcatgttttctga

SEQ ID NO: 159205 - DNA, 504 bp, Homo sapiens
tgctgacaggattcttaatcaaaaagtccaaagaagaaagatgagtggaatttacaaagattcagccagagagaataaatgaagacatttgctgtgcttctgtaggtgaaaaaaagatggcagatactcacgactctgttctggaggctctggaacttgttattggatcaattactctgagtccccagacacactgacctgagcagcatcagtgttccccaggacatgggctgttatcagtaggatttccgctgtgcatgctgattagaggagatggtgaccaacaggccctgaacggtggacascagccccctctgcctggaagcctttgataccatggagcatcacctaagttctgcattctcaattataaccaagttaaattactttatgtgtttattaaatcactatttagaaacttactgtgagtcatacttggcttcaaacacctctgcctgccatgagaaaactctgagcatgaagaaaatgtttatttactataaa

SEQ ID NO: 159206 - DNA, 408 bp, Homo sapiens
aaggcaacccactgacatcatccatgcagtccagcctctccacgtggagagtgtagtggagaaggctagacagtaagtctggaggggccaacaaagatttctgtccagggttggccaaagtcacaggatgagcaaagacctgactcaggagaggttgagcatgttaacccacagagctgttagatgggaggtgagacacccctccttccccagactggagccagctgtgaaagtcttcactccagccttaggaaagtggcattaccycatcaggtgcaagccgtgagactccgctccttgatgctcagttcccactttgagccccaccacaattgcggtgctttctcctcctacccctcaccctctcctgccttggccctcttcccctgctccaagacctatatcaga

SEQ ID NO: 159207 - DNA, 558 bp, Homo sapiens
gggattaataatcatgtgtcattgccaataaacgttttctttcttttgcacttccaaagaattttttcaccacctattttcctctatgtttttctttctctagtatttctttctctaaaaatttgtgcttgtgtaaataatttgcaaatgcaacttttttcttctttgaaatgatagctaaattcaaattacttttatcttattcaaaattcagagaaaaattcagaagtgacctattagatgtttgagratgtgctatactacatcaggtgcacaagttcctgtgaataagaagcaaaaaagctagcactttccccacttctgtttttaaagaataagcttatcaatggatattgaggaaaaaaactactggtaatatttaaatggtaaaatgggtatggtaaaataatattacgagcattttttcaagtaatacattttgaactttaagttttcttctgttaattttatctgtttataggagtaatcctgttttgttcacttcagtatattcactattcctttcccttacagtcaagcattggacatggccttgat

SEQ ID NO: 159208 - DNA, 591 bp, Homo sapiens
ttcaggccacccgtaagtaaatagaaacagtaggcataaatacacaaaaggaaagttatattaaaattctgcagaaatgtaacaagaataaaaaasctgaactggatttttaggatgttctacactcagcttttatgagaaacagacaaatgacaatctcatgccaaggatttgttttaaaaggctgtataacaggtagaccattgactaacacatgttttaccacctttatcttcagagtactgcagacaaatgatattcataatgactctacacgatactgaaatggtatctgaatattaacaactaaattctgaccagttatgatttaaaacatttagctatttattgattgttatttttttaaaaacttggaatgtgcattatatgtatatttaactataaagtcactgaacatttaattaacatatgtcctgtttttcaatcattactaggagtaatctttatagaaatacaagtagcaaccattaccacaaatgaattctcataagaaacagttattcaagtctttttctctctctctttgtcaaacgcatgtgcacacacacacacacacacacacactttgta

SEQ ID NO: 159209 - DNA, 591 bp, Homo sapiens
ttcaggccacccgtaagtaaatagaaacagtaggcataaatacacaaaaggaaagttatattaaaattctgcagaaatgtaacaagaataaaaaagctgaactggatttttaggatgttctacactcagcttttatgagaaacagacaaatgacaatctcatgccaaggatttgttttaaaaggctgtataacaggtagaccattgactaacacatgttttaccacctttatcttcagagtactgcagacaaatgatattcataatgactctacacgataytgaaatggtatctgaatattaacaactaaattctgaccagttatgatttaaaacatttagctatttattgattgttatttttttaaaaacttggaatgtgcattatatgtatatttaactataaagtcactgaacatttaattaacatatgtcctgtttttcaatcattactaggagtaatctttatagaaatacaagtagcaaccattaccacaaatgaattctcataagaaacagttattcaagtctttttctctctctctttgtcaaacgcatgtgcacacacacacacacacacacacactttgta

SEQ ID NO: 159210 - DNA, 569 bp, Homo sapiens
cacacacacacacacacacactttgtatgcctgtggattgtgtgagagagagaatgagcctgtaaatacagaattatatcagaattcttgtagcaaataagctatcaggaaaattgagccaacttagtcttggtcttgtgaaggacattttctcttttctgacctagtcttttctattaagtgaaagatgtcacacaatgaccactcatctatttttgatggatacatgaattgtacattacatggaaagaagagagaaaataatcctaattttatataatgtacaggttagaaagcctgatacagactaatataaaattaatgctttgaataaatttgtttatactattgctctgttagtgttgctacttttggtttgtttttcaattgtttttccaatatgtatttagtttgatttttaataatcttctctctctcttttttcttttcttctcctttacctcttgctcctcttccttaytctccttgccttcctcctcagtctcctcatcctcatcttcctcctcatcctctttctttgttttcattacaaaataaaataagcaatc

SEQ ID NO: 159211 - DNA, 500 bp, Homo sapiens
tgctctgttagtgttgctacttttggtttgtttttcaattgtttttccaatatgtatttagtttgatttttaataatcttctctctctcttttttcttttcttctcctttacctcttgctcctcttccttactctccttgccttcctcctcagtctcctcatcctcatcttcctcctcatcctctttctttgttttcattacaaaataaaataagcaatcagaaaagttcatacagatattgttacttrtctttagggacctggatctaacttagtgctgttgcttctgtttcttcccttttgtcctcctcttctttttctcctttgtgttctgttttactttttaaaaatagatgccacaactctgatttttaatctgattgtgtaaatgatccttaatagtaaaatcaattttaatatcttacaaaacagaagcacagcaaagcattttgcagaatttaccataaagtaaataataaccattcctagtatgataatgc

SEQ ID NO: 159212 - DNA, 500 bp, Homo sapiens
tgctctgttagtgttgctacttttggtttgtttttcaattgtttttccaatatgtatttagtttgatttttaataatcttctctctctcttttttcttttcttctcctttacctcttgctcctcttccttactctccttgccttcctcctcagtctcctcatcctcatcttcctcctcatcctctttctttgttttcattacaaaataaaataagcaatcagaaaagttcatacagatattgttacttgtctttagggacctggatctaacttagtgctgttgcttctgtttcttcycttttgtcctcctcttctttttctcctttgtgttctgttttactttttaaaaatagatgccacaactctgatttttaatctgattgtgtaaatgatccttaatagtaaaatcaattttaatatcttacaaaacagaagcacagcaaagcattttgcagaatttaccataaagtaaataataaccattcctagtatgataatgc

SEQ ID NO: 159213 - DNA, 554 bp, Homo sapiens
cttctctggtagctaagcaactgacctgtggtgaagaatacataatgatctgcatagacaccttagagcaatagaaagtayaagcttcacaatttcatttgctctcttgtgttgatgttacaataaccagttaaatgcatggaaatatttgatagtagtttgctataataaactttaataaagattaaaagaagccttggagaaaggtagaaataaacacaacataaaatattgtatttgtcatttgttcatgtatgtcattttattgtttatagggagggcaagcaatcaggttaatattttattaaatgtctatattctagctactgtttaagacagaattcatcaagtagcacaagtgatggaagggccaaggggaagaaagatggacaaaacctgaaaattgaaagtgcaataaaatgaaaattacaaatgaaaaccagtatgcctgagttatacatgactgtttagtagagtgtcttcatgtgggttaaagaagaaaaggaaataccagctggaatcagcagaacagatttagcacttgacccttggat

SEQ ID NO: 159214 - DNA, 490 bp, Homo sapiens
atagttgctctctaattttttgagcrtattaaggacttaaaagctaatgatggtgtattgttatgtcaaggccagcagagcatatcactttaaaaaactggcaatagaaacttctctttaaaaattgtaaaagtaagtaaagtttagaaaccaaccaagtacgagcaatgcaatgttagcatctcattggttcacaccagtgaaaagtatttaagaacaaagaaatggtatactgtaccacacagaaacttgcatgcaaatgtttattgcatgtgcagctatattcttacttactaaaacttagaagcacccagcttatcctttaataggtaatcattccttaattagataaacaaactctgctatatccatacaatgacataattatcaggggtaaaaaaataagccatccagtcatgattagacatggaggaaatttgaatgcatatttctatgtgaaagaagccagtctgaaaagtctacatattgt

SEQ ID NO: 159215 - DNA, 448 bp, Homo sapiens
gttcatggatatagttgctctctaattttttgagcatattaaggacttaaaagctaatgatggtgtattgttatgtcaaggccagcagagcatatcactttaaaaaactggcaatagaaacttctctttaaaaattgtaaaagtaagtaaagtttagaaaccaaccaagtacgagcaatgcaatgttagcatctcattggttcacascagtgaaaagtatttaagaacaaagaaatggtatactgtaccacacagaaacttgcatgcaaatgtttattgcatgtgcagctatattcttacttactaaaacttagaagcacccagcttatcctttaataggtaatcattccttaattagataaacaaactctgctatatccatacaatgacataattatcaggggtaaaaaaataagccatccagtcatgattagacatggaggaaatt

SEQ ID NO: 159216 - DNA, 490 bp, Homo sapiens
atagttgctctctaattttttgagcatattaaggacttaaaagctaatgatggtgtattgttatgtcaaggccagcagagcatatcactttaaaaaactggcaatagaaacttctctttaaaaattgtaaaagtaagtaaagtttagaaaccaaccaagtacgagcaatgcaatgttagcatctcattggttcacacyagtgaaaagtatttaagaacaaagaaatggtatactgtaccacacagaaacttgcatgcaaatgtttattgcatgtgcagctatattcttacttactaaaacttagaagcacccagcttatcctttaataggtaatcattccttaattagataaacaaactctgctatatccatacaatgacataattatcaggggtaaaaaaataagccatccagtcatgattagacatggaggaaatttgaatgcatatttctatgtgaaagaagccagtctgaaaagtctacatattgt

SEQ ID NO: 159217 - DNA, 494 bp, Homo sapiens
ggatatagttgctctctaattttttgagcatattaaggacttaaaagctaatgatggtgtattgttatgtcaaggccagcagagcatatcactttaaaaaactggcaatagaaacttctctttaaaaattgtaaaagtaagtaaagtttagaaaccaaccaagtacgagcaatgcaatgttagcatctcattggttcacaccagtgaaaagtatttaagaacaaagaaatrgtatactgtaccacacagaaacttgcatgcaaatgtttattgcatgtgcagctatattcttacttactaaaacttagaagcacccagcttatcctttaataggtaatcattccttaattagataaacaaactctgctatatccatacaatgacataattatcaggggtaaaaaaataagccatccagtcatgattagacatggaggaaatttgaatgcatatttctatgtgaaagaagccagtctgaaaagtctacatattgt

SEQ ID NO: 159218 - DNA, 490 bp, Homo sapiens
atagttgctctctaattttttgagcatattaaggacttaaaagctaatgatggtgtattgttatgtcaaggccagcagagcatatcactttaaaaaactggcaatagaaacttctctttaaaaattgtaaaagtaagtaaagtttagaaaccaaccaagtacgagcaatgcaatgttagcatctcattggttcacaccagtgaaaagtatttaagaacaaagaaatggtatactgtaccacacagaaacttgcatgcaaatgtttattgcatgtgcagctatattcttacttactaaaacttagaagcacccagcttatcctttaataggtaatcattccttarttagataaacaaactctgctatatccatacaatgacataattatcaggggtaaaaaaataagccatccagtcatgattagacatggaggaaatttgaatgcatatttctatgtgaaagaagccagtctgaaaagtctacatattgt

SEQ ID NO: 159219 - DNA, 496 bp, Homo sapiens
atggatatagttgctctctaattttttgagcatattaaggacttaaaagctaatgatggtgtattgttatgtcaaggccagcagagcatatcactttaaaaaactggcaatagaaacttctctttaaaaattgtaaaagtaagtaaagtttagaaaccaaccaagtacgagcaatgcaatgttagcatctcattggttcacaccagtgaaaagtatttaagaacaaagaaatggtatactgtaccacacagaaacttgcatgcaaatgtttattgcatgtgcagctatattcttacttactaaaacttagaagcacccagcttatcctttaataggtaatcattccttaattagataaacaaactctgctatatccatacartgacataattatcaggggtaaaaaaataagccatccagtcatgattagacatggaggaaatttgaatgcatatttctatgtgaaagaagccagtctgaaaagtctacatattgt

SEQ ID NO: 159220 - DNA, 582 bp, Homo sapiens
attaacatatttatataaggtaacattctgtggatttttgtttccaaataactcagaattgacaaaataaaaatataattattcaatgatgaatatcacaatgagcaatattgatctatttcataaacatttcatcctgtcaatcacagggatactcagttcaaatacatcaaaagaaaacattcttcaggtaaattgaaattacaatagtttcaatttttacaaaagtttagatgttgataacagtttcagagccacttctctgtatagaaaagctttctggggatgtcatggttgtaactaaaaacaaaaatacagatttatagataacaaaatgaagagaaatctgttataaatattgattgtatgattatgagktctttagaaattacaaattattttatcagtatattttaagtgtaggatatacttaatttgaatactaatatttattacatatgagcttaattgtgtctgttcaaaagatacaatgaagtgctaaactccagtaccttaaaatgtgaacttatttgataatagagctattgcagatgtcactagttaagatgaggtcaggtgagt

SEQ ID NO: 159221 - DNA, 582 bp, Homo sapiens
attaacatatttatataaggtaacattctgtggatttttgtttccaaataactcagaattgacaaaataaaaatataattattcaatgatgaatatcacaatgagcaatattgatctatttcataaacatttcatcctgtcaatcacagggatactcagttcaaatacatcaaaagaaaacattcttcaggtaaattgaaattacaatagtttcaatttttacaaaagtttagatgttgataacagtttcagagccacttctctgtatagaaaagctttctggggatgtcatggttgtaactaaaaacaaaaatacagatttatagataacaaaatgaagagaaatctgttataaatattgattgtatgattatgaggtctttagaaattacaaattattttatcagtatattttaagtgtaggatatacttaatttgaatactaatatttattacatatgagcttaattgtgtctsttcaaaagatacaatgaagtgctaaactccagtaccttaaaatgtgaacttatttgataatagagctattgcagatgtcactagttaagatgaggtcaggtgagt

SEQ ID NO: 159222 - DNA, 630 bp, Homo sapiens
gcactgtgtttttattcaactttggtactgtcctttgagaatcttcaacgtgatttggatatggcactttttatcaggatgttacgtcagagttgataaattcaaagtaatatcgttctttttcctgccaaagtcagctcctcctttccactgcactttcctgccgatgccaccactctttctcctgaatgttctcagaggacacccttgtacctggactggtcattacataggtgtaagttttattctctaaaaggggtgagtgagagtttatactaaggttgtaagcatccctcagggcagactctggatgtatattacagaactgctgaacttgtggaatgtgcatgtttaatactgaaaatatttaatgccacatgtgtaagacttttgccaactggaatctgaacatcaacaactttgaagggcttattctaccttctcggcacaaaaatactttctaygaatgcacatatttatgtgcaaacgtatagaaaattgactttaaagtgtacaacaaatttattttagcaattgggcctgggggacctagaaggagaatgagattggagtggtaggggtggaacattagctaataatgatttattttattaaaagtaattactgaaa

SEQ ID NO: 159223 - DNA, 578 bp, Homo sapiens
tgttggtgtctcaaattggctcttggtaagtaatctggacatatcgtgaaattataattctgtgtagacaattcgacttaccaggttagagtgatgcaatccaaatagatggctttcttctgatctggcttaacagaaatcttgaaaaatctggaggagtaaatgtttaatataccctcarttctcaaccattcttcttcccctgaaagacaacatcacaggcaggacatcctcccaagtgtacacgcaatattatgtacagttcccacgtgagaaagcacatcataatcttagtgagaatgatgttctcataaggtcagttatactcagtgtgcatagttgtccaagtgtgagtatgaaaccaagtcattcgcaagtaccactagtctgattattagtaataataatccacttgtgacatagtttttctttgctgaaataaaatattgttttgacaccatggttgaaatgttggtcttaggtcaatgctctctattatctgttgttgttgccaagcctctgagaggtgttttatgtggggcaaaaggtcccttcctgtgtctttggtcaaagcaaag

SEQ ID NO: 159224 - DNA, 578 bp, Homo sapiens
tgttggtgtctcaaattggctcttggtaagtaatctggacatatcgtgaaattataattctgtgtagacaattcgacttaccaggttagagtgatgcaatccaaatagatggctttcttctgatctggcttaacagaaatcttgaaaaatctggaggagtaaatgtttaatataccctcagttctcaaccattcttcttcccctgaaagacaacatcacaggcaggacatcctcccaagkgtacacgcaatattatgtacagttcccacgtgagaaagcacatcataatcttagtgagaatgatgttctcataaggtcagttatactcagtgtgcatagttgtccaagtgtgagtatgaaaccaagtcattcgcaagtaccactagtctgattattagtaataataatccacttgtgacatagtttttctttgctgaaataaaatattgttttgacaccatggttgaaatgttggtcttaggtcaatgctctctattatctgttgttgttgccaagcctctgagaggtgttttatgtggggcaaaaggtcccttcctgtgtctttggtcaaagcaaag

SEQ ID NO: 159225 - DNA, 578 bp, Homo sapiens
tgttggtgtctcaaattggctcttggtaagtaatctggacatatcgtgaaattataattctgtgtagacaattcgacttaccaggttagagtgatgcaatccaaatagatggctttcttctgatctggcttaacagaaatcttgaaaaatctggaggagtaaatgtttaatataccctcagttctcaaccattcttcttcccctgaaagacaacatcacaggcaggacatcctcccaagtgtacacrcaatattatgtacagttcccacgtgagaaagcacatcataatcttagtgagaatgatgttctcataaggtcagttatactcagtgtgcatagttgtccaagtgtgagtatgaaaccaagtcattcgcaagtaccactagtctgattattagtaataataatccacttgtgacatagtttttctttgctgaaataaaatattgttttgacaccatggttgaaatgttggtcttaggtcaatgctctctattatctgttgttgttgccaagcctctgagaggtgttttatgtggggcaaaaggtcccttcctgtgtctttggtcaaagcaaag

SEQ ID NO: 159226 - DNA, 549 bp, Homo sapiens
ttaagaaacctggcaaagaagtaaacatgccatgtagcttacaaaagaccagccacattgtgtgtattttaatattgtttaacagtaacacctaataaagagagcatcatgattgtgtgaactacattttcggtcataatgaatgctacaaaattaacctcccaagtttagacaggctacaacgtcttgggaaatatgcaagaagaattatttgataaaggtkacagtttttcacacctgaaaatgatcttctcccagcctatcttgatcaacagccagcagcaacacattgcagatataatctcaagaccttgtggcatgtacttctcactacatgcataaccttaatatggacagaggatcatggagattttgaatataatttcccacatgacaggagattaaatagaccacagtggaagaagctaggtctctggagaaccaaaaagtaaacttcagccagttctggaagcagataaacagcaggaaatgtactttcagatgggctactttctcaatagttctttcttgcaagagctctagggaaag

SEQ ID NO: 159227 - DNA, 586 bp, Homo sapiens
agaaacctggcaaagaagtaaacatgccatgtagcttacaaaagaccagccacattgtgtgtattttaatattgtttaacagtaacacctaataaagagagcatcatgattgtgtgaactacattttcggtcataatgaatgctacaaaattaacctcccaagtttagacaggctacaacgtcttgggaaatatgcaagaagaattatttgataaaggtgacagtttttcacacctgaaaatgatcttctcccagcctatcttgatcaacagccagcagcaacacattgcagatataatctcaagaccttgtggcatgtacttctcactacatgcataaccttaatatggacagaggatcatggagattttgaatataatttcccacatgacaggagattaaatagaccacaktggaagaagctaggtctctggagaaccaaaaagtaaacttcagccagttctggaagcagataaacagcaggaaatgtactttcagatgggctactttctcaatagttctttcttgcaagagctctagggaaagtatgagttactgggtaagaatgtaatagaaaaggggccag

SEQ ID NO: 159228 - DNA, 630 bp, Homo sapiens
agtgtaacgaggctgttttgttagaggctgtggttgcattcaaaaattagaataggaacaacgacttgtaaaaattcaacactttattttatttttgagacagtttcactgtgttgtccaggctggagtgcagtggcttgatctcagctcactgcaacctccccctccaggrttcaagccattctcctgcctcagcctcccgagtagctgggattacagatttgtgccaccatacctggctaatttttgtatttttagtagagaaggggtttcaccatgttggccaggctggtcttgaactgccaacctcaggcgatcctccccgctcagcctcccaaagtgctgggagtacaggcgtgatttaacattttaacattttaaactaccacttactacattcactgtgtctgtgatttaatatacctttttcagtggccacaaaattataaaatggatacagaatagtctcttcaaaacattaaggaagttctttcttttttctttttctttttctttttttttttttttttttggtggtttgagacggagtcttgctctgtcgcccaggctagagtgcagtggcacaatcttggctcactgcaacctccgcctcccgggtttaaggaattc

SEQ ID NO: 159229 - DNA, 630 bp, Homo sapiens
agtgtaacgaggctgttttgttagaggctgtggttgcattcaaaaattagaataggaacaacgacttgtaaaaattcaacactttattttatttttgagacagtttcactgtgttgtccaggctggagtgcagtggcttgatctcagctcactgcaacctccccctccagggttcaagccattctcctgcctcagcctcccgagtagctgggattacagatttgtgccaccatacctggctaatttttgtatttttagtagagaaggggtttcaccatgttggccaggctggtcttgaactgccaacctcaggcgatcctccccsctcagcctcccaaagtgctgggagtacaggcgtgatttaacattttaacattttaaactaccacttactacattcactgtgtctgtgatttaatatacctttttcagtggccacaaaattataaaatggatacagaatagtctcttcaaaacattaaggaagttctttcttttttctttttctttttctttttttttttttttttttggtggtttgagacggagtcttgctctgtcgcccaggctagagtgcagtggcacaatcttggctcactgcaacctccgcctcccgggtttaaggaattc

SEQ ID NO: 159230 - DNA, 406 bp, Homo sapiens
ttttcaaacaaacacattcagagggaattcattaccaccagactgccttacaagagttcctgaaaggagtagtaaatatggaaaggaaagactgttatcagccactacaaaaacacctttaagtacacagaccagtgacactataaagcaaccacacaaaccagtctgcataataatcagctaagaacaggatgagaggatcaaatccacatatatcaataataactttgaatgtaaatggcctaaatgcctcaaagaaaaggcagagtggcaagctggataaagaaaaagacccaatggtatactgaatttaagagccccatcctacatgcaakgacacccataggctcaaaatgaatggatggaaaaaaaatctaccatgcgaaaggagaacataaaaaagcag

SEQ ID NO: 159231 - DNA, 662 bp, Homo sapiens
aagaactaaaagtagaactaccgtttgatccagaaatcctactcctggatatctacccagaggaaaataagtcattacasgaaaaagatacttgcacatgcgtgtttatagcagcgcaattcgcaattacaaaaacctggaacctacccaaatgaccataaatcaacaagtggataaagacactgtggtgtgtgtgtgtgtgtatacacacacgatagaatattactcagccataaaaaggaatgaattcatggcatttgcagcaacctggatgagattggagactattattctaagtgaagtaactcaggaatggaaaatcaaacattgtatgttttcactcataaatgggagctaagctatgaggatgaaaatgcataagaattatacaatggactttagggactcaaggggaaaaggtgggaagggggtgagggataaaagactacaaatagggtgcagcgtatactgctcgggtgatgggtgcaccaaaatctcacaaatcaccactaaagaacttactcatgtaatcaaacaccatctgttccccaataacctatggaaatatattttataaaaaaattatagaaggaaaacagctataatgtagaattttatatccaaatgaaatgctgttgaacattgagagcattttaaaaaat

SEQ ID NO: 159232 - DNA, 629 bp, Homo sapiens
ttgatccagaaatcctactcctggatatctacccagaggaaaataagtcattacaggaaaaagatacttgcacatgcgtgtttatagcagcgcaattcgcaattacaaaaacctggaacctacccaaatgaccataaatcaacaagtggataaagacactgtggtgtgtgtgtgtgtgtatacacacacgatagaatattactcagccataaaaaggaatgaattcatggcatttgcagcaacctggatgagattggagactattattctaagtgaagtaactcaggaatggaaaatcaaacattgtatgttttcactcataaatgggagctaagctatgaggatgaaaatgcataagaattatacaatggactttagggactcaaggggaaaaggtgggaagggggtgagggataaaagactacaaatagggtgcagygtatactgctcgggtgatgggtgcaccaaaatctcacaaatcaccactaaagaacttactcatgtaatcaaacaccatctgttccccaataacctatggaaatatattttataaaaaaattatagaaggaaaacagctataatgtagaattttatatccaaatgaaatgctgttgaacattgagagcatt

SEQ ID NO: 159233 - DNA, 629 bp, Homo sapiens
ttgatccagaaatcctactcctggatatctacccagaggaaaataagtcattacaggaaaaagatacttgcacatgcgtgtttatagcagcgcaattcgcaattacaaaaacctggaacctacccaaatgaccataaatcaacaagtggataaagacactgtggtgtgtgtgtgtgtgtatacacacacgatagaatattactcagccataaaaaggaatgaattcatggcatttgcagcaacctggatgagattggagactattattctaagtgaagtaactcaggaatggaaaatcaaacattgtatgttttcactcataaatgggagctaagctatgaggatgaaaatgcataagaattatacaatggactttagggactcaaggggaaaaggtgggaagggggtgagggataaaagactacaaatagggtgcagcgtatactgctcgggtgatgggtgcaccaaaatctcacaaatcaccactaaagaacttactcatgtaaycaaacaccatctgttccccaataacctatggaaatatattttataaaaaaattatagaaggaaaacagctataatgtagaattttatatccaaatgaaatgctgttgaacattgagagcatt

SEQ ID NO: 159234 - DNA, 560 bp, Homo sapiens
agcccagagtgtgcatagcctgagtcaagctgaaggaaggaataaaaaaaaaatggggagaaagtcagggaatatatgatgaagcaaaatcttyatgtctgatgttctcagaatgaataaaattataaaatgcaaagtgcatatatcacagtttcagaagcaatattggtccaactgctgattttctaaaatggagaacagatcaacctctacacaaactgatagtgaggcagaatatcctggtcttcttattgtaagagaagaaaacgtctttcatggaagtaacagtgaaagaatccgttatcagaacataggacagaacgtttaggggtattttccctgcaggcactaattagatatatatcataagagctatgagcacacaggtttactatcagtgaggctgaagcagtgtaatttctgggaattataggcatgacacacatttgtgacaaataaaagacaatacagattaaactgctagatctaatgtcaacctgttttttgtagaaagcctagggataactgcccaaggtaaatttttacaatatgagcaccta

SEQ ID NO: 159235 - DNA, 355 bp, Homo sapiens
gcttgaagccaagtgtgctttaagaacacttgggtgggattccattgcatggaatgaacttctagaacaggggtgttcaatcgtttagcttctctgggccacactgcaagaagacgaattgtcttgggccacatataaaatgcactaacactaacgatagctgacaagctaaagaaaaataaaatcaccaaaaaaaatcccataatgttttttaaaagtttaccaatttctattgggcctcattcaaagctgtcctggactgtgtgtggcctttgggctgygggttggacaagcttattctagaaagtgaaaagtttcatgggaattgacagttgtagattaaatgatcacttac

SEQ ID NO: 159236 - DNA, 555 bp, Homo sapiens
taagaagaagcttgagatatttataatatggacacttgtttttttcctaaagcaaagctattactattagttagagattatgtagattttaatttctttatagaagacaaaataaaactagtagattaaaaaagttagttcctgccactattcttcccccaacaagatatctggggactgagtgccaraatgagcaaagaaagattcaaggaccaagactggtggaatcctctcactccagtattcttagagtcttgcttaggcttgaagcataacactgttgtcacatcacttgacaatgcatttacggaataagattcagtgagaaagaacaaacaagaagtgattatatcctttaaagagctttctcagaggcatcggctagtatcttgtttgcttctcatttgccagagttgcatcaagtagcttctcccaactgctcaggaaattgggaagtatagttttctcaacattttcataccaccacaaacactcccaagaatgttcataagcagtctgtaatacacaggacacgtcccaatgaccaagaattat

SEQ ID NO: 159237 - DNA, 573 bp, Homo sapiens
actttattgtgattattttgtaaagaaaagaattgcactataatttcgatgttgtgcaaattataataattaaatatttaggctaaaaaagataatgcaagaaggctaagttgtattgtcatattgttaagattactttttatttaatgttcctaatcagaagtgaaccattatctatgtaaaaataatttaattcagaaaattttggtctcaaatttacataatgccatcattaycctttttatgttctggaaaatttattctaaattacctagaaaaaaaggttgattctatagtgttattttttattctctatatctcaggtaagaataaagggaaacgagtaagtaaaggaaaaacaaagatgaaaaaggaaattgtactcaagtcacatagacactgaagtctcagatgtatgtggaactttctgtttggtagaggatatagaaaagagaaagggatatcgaatttctgacaacctacgtgcttagtgctttgtctaccaatgtgatgaggacatatttattttttccttgtgctttctgcattgagacaagtacattataagcttat

SEQ ID NO: 159238 - DNA, 595 bp, Homo sapiens
ctattttaacctcctcctgtctttgycagtgagaacatcttgacatgactccaattccaattctgatgtactggaagaataaaaacacatttatttaaaaaatctaaagcatattaatgatgccatagaaagacatcttgcttaagataaacccattaattttacctttgtaaacatgtttcagcatgactgtgtgattaaggcttcattctgtgcagactacaactgtagtaacggcagcagccaagaaaaaatagcaaaatatttttaaaaacagaagcaaacagcaaggctttcacaatccattgtttaaattcatcttttatatcttgttttattacgtttttctctcttactttatgtgtataatgaaataccattatcactgtcatcatccccagattaaagcttcgagaaagaaagaaagcctatcctagaattgatttttaggccattttgcttgagatgatcgacaataagaggattttcatttgctttgtcagtgtaagctggctgctgtgcatctgcagtgaaggcagcacaggtctctgtttgcattctgcggtttgttagcagcaatgacctgtcacagaaa

SEQ ID NO: 159239 - DNA, 587 bp, Homo sapiens
taatgcatacctaatagcactgctgaattatatacttgcttgagttgcatactgttgcagccctacaggtacatatttttatttacacaacttggatgattttcattcagtgaaacaatttattaatttattccttccatgtcaatgaacgtagagctttattattattttccatggttttcagggtattccataacacagacacatcaccatttattctttctgtagtagacatttaggggatttaaaatgtttacattataaatactgacaatttagtaattagtgtcttagakaatttattccaagttaaaaacaaaaatagagatttaatgtaagtccaactgagaaatctataaagtaggcaaaattttaaagttatcatacacataaaaattcaaatgtattcttatctactcatagttttagtaactcctctgataaaaaagagatcatagtagaaataatcagatatgaaaaaaattaaagatttaaaaatttggtatgtattactctccactgaagacatgatcttattggtaattattggaacatcatgctatctacatacctattattttagatat

SEQ ID NO: 159240 - DNA, 595 bp, Homo sapiens
ctattttaacctcctcctgtctttgccagtgagaacatcttgacatgactccaattccaattctgatgtactggaagaataaaaacacatttatttaaaaaatctaaagcatattaatgatgccatagaaagacatcttgcttaagataaacccattaattttacctttgtaaacatgtttcagcatgactgtgtgattaaggcttcattctgtgcagactacaactgtagtaacggcagcagccaagaaaaaatagcaaaatatttttaaaaacagaagcaaacagcaaggctttcacaatccattgtttaaattcatcttttatatcttgttttattacgtttttctctcttactttatgtgtataatgaaataccattatcactgtcatcatccccagattaaagcttcgagaaagaaagaaagcctatcctagaattgatttttaggccattttrcttgagatgatcgacaataagaggattttcatttgctttgtcagtgtaagctggctgctgtgcatctgcagtgaaggcagcacaggtctctgtttgcattctgcggtttgttagcagcaatgacctgtcacagaaa

SEQ ID NO: 159241 - DNA, 493 bp, Homo sapiens
gatggtgcttaaccattggtgaaggatccaccccccaacacacctccaccccctactgtttccagacagaagcctgctgcagaggcagagcctcttggaaatcgtgttctgtggcagtgcagaaggaaaacaagggctttgagtcgctctgcaggargccgccatcctctagaccccagattcgtagacctaccaacagttcacaccctcagtttggaaaagtgatagacactcaataccagcccagcccataagggcagccatgggggctaaagcctgcaaagccacaggtgcagtgccgtggtagaggttttccatgagcctctacctctgcagcaggctactcccccttcctactacccaccaccctccgaccaccctacagccagcatactgttccccaccctacccaccccttttttcttccacccccacacctcccatccatgattaaataatctcccaccaggccccacctccaacatttgggatt

SEQ ID NO: 159242 - DNA, 575 bp, Homo sapiens
caatgcattcattgaaaagatgactttaattatttaatttttttttttttttgagacaaggtctcactgtatcaccaggctggagtgcagtggtgcaatcttggctcactgcaacctccacctcctggcttcaagcaattctcctgycttagcctcctgagtagctgggactacaagtgtgcaccaccatgcccagctaatttttgtatttttaatagagacagagtttccccatgttggccaggatggtctcgatctcctgacctcatgatctgcctgccttggcctccccaagtgctgggattacaggcatgagtcaccacacctggccattgtttaacctttgtactaataaaacactacctttctaaaatcatgtatatgcagtagaccaatattaactgtatttttgtctgattactctaaacagcattacacaggtgcatcctctgttatctaaacttaaaataagtagaaattttactttatttatgtgattatttttctatttaagcaaacttcaagttatgtctagtcactaaaaatactaaaggtcacattttgtaagtgataca

SEQ ID NO: 159243 - DNA, 575 bp, Homo sapiens
caatgcattcattgaaaagatgactttaattatttaatttttttttttttttgagacaaggtctcactgtatcaccaggctggagtgcagtggtgcaatcttggctcactgcaacctccacctcctggcttcaagcaattctcctgccttagcctcytgagtagctgggactacaagtgtgcaccaccatgcccagctaatttttgtatttttaatagagacagagtttccccatgttggccaggatggtctcgatctcctgacctcatgatctgcctgccttggcctccccaagtgctgggattacaggcatgagtcaccacacctggccattgtttaacctttgtactaataaaacactacctttctaaaatcatgtatatgcagtagaccaatattaactgtatttttgtctgattactctaaacagcattacacaggtgcatcctctgttatctaaacttaaaataagtagaaattttactttatttatgtgattatttttctatttaagcaaacttcaagttatgtctagtcactaaaaatactaaaggtcacattttgtaagtgataca

SEQ ID NO: 159244 - DNA, 575 bp, Homo sapiens
caatgcattcattgaaaagatgactttaattatttaatttttttttttttttgagacaaggtctcactgtatcaccaggctggagtgcagtggtgcaatcttggctcactgcaacctccacctcctggcttcaagcaattctcctgccttagcctcctgagtagctgggactacaagtgtgcaccaccatgcccagctaatttttgtatttttaatagagacagrgtttccccatgttggccaggatggtctcgatctcctgacctcatgatctgcctgccttggcctccccaagtgctgggattacaggcatgagtcaccacacctggccattgtttaacctttgtactaataaaacactacctttctaaaatcatgtatatgcagtagaccaatattaactgtatttttgtctgattactctaaacagcattacacaggtgcatcctctgttatctaaacttaaaataagtagaaattttactttatttatgtgattatttttctatttaagcaaacttcaagttatgtctagtcactaaaaatactaaaggtcacattttgtaagtgataca

SEQ ID NO: 159245 - DNA, 575 bp, Homo sapiens
caatgcattcattgaaaagatgactttaattatttaatttttttttttttttgagacaaggtctcactgtatcaccaggctggagtgcagtggtgcaatcttggctcactgcaacctccacctcctggcttcaagcaattctcctgccttagcctcctgagtagctgggactacaagtgtgcaccaccatgcccagctaatttttgtatttttaatagagacagagtttccccatgttggccaggatggtctcgatctcctgacctcatgatctgcctgccttggcctccccaagtgctgggattacaggcatgagtcaccacacctggccattgtttaacctttgtactaataaaacactacctttctaaaatcatgtatatgcagtagaccaatattaactgtatttttgtctgattactctaaacagcattacacaggtgcatcctctgttatctaaacttaaaataagtagaaattttacttyatttatgtgattatttttctatttaagcaaacttcaagttatgtctagtcactaaaaatactaaaggtcacattttgtaagtgataca

SEQ ID NO: 159246 - DNA, 532 bp, Homo sapiens
tatctggcaagcttttccttgtccttcaggtatcaacctatgttatctcctccaccagaaagcccatgayattgacataaaagtgggatagatgtcccttttgtgtgttccagtagtgccctgctgtatacctgtcatggtatctatgacactatgtggacattgcctacctgtctgtgtttttaggttatagcatatgactattgggaggtggaccatgccatcttcatcttggaattccagtgctggttctagtaccttagcacgtggctgttgattacatgaatgaagaatgaaaaacctctaatatttaaacacaatagaattaatgccatgtgtaaattatttaatagtaattttgtattgtaaatgtacatagatatttctcattcttactaactctgataaagttctcaactctttagtatttaaactcacatttagttaactgaagtgttttaggtaaagaacataattctttctctttccagttgttgctgtgttgaacacttgctcccgtctacttacttct

SEQ ID NO: 159247 - DNA, 532 bp, Homo sapiens
tatctggcaagcttttccttgtccttcaggtatcaacctatgttatctcctccaccagaaagcccatgatattgacataaaagtgggatagatgtcccttttgtgtgttccagtagtgccctgctgtatacctgtcatggtatctatgacactatgtggacmttgcctacctgtctgtgtttttaggttatagcatatgactattgggaggtggaccatgccatcttcatcttggaattccagtgctggttctagtaccttagcacgtggctgttgattacatgaatgaagaatgaaaaacctctaatatttaaacacaatagaattaatgccatgtgtaaattatttaatagtaattttgtattgtaaatgtacatagatatttctcattcttactaactctgataaagttctcaactctttagtatttaaactcacatttagttaactgaagtgttttaggtaaagaacataattctttctctttccagttgttgctgtgttgaacacttgctcccgtctacttacttct

SEQ ID NO: 159248 - DNA, 532 bp, Homo sapiens
tatctggcaagcttttccttgtccttcaggtatcaacctatgttatctcctccaccagaaagcccatgatattgacataaaagtgggatagatgtcccttttgtgtgttccagtagtgccctgctgtatacctgtcatggtatctatgacactatgtggacattgcctacctgtctgtktttttaggttatagcatatgactattgggaggtggaccatgccatcttcatcttggaattccagtgctggttctagtaccttagcacgtggctgttgattacatgaatgaagaatgaaaaacctctaatatttaaacacaatagaattaatgccatgtgtaaattatttaatagtaattttgtattgtaaatgtacatagatatttctcattcttactaactctgataaagttctcaactctttagtatttaaactcacatttagttaactgaagtgttttaggtaaagaacataattctttctctttccagttgttgctgtgttgaacacttgctcccgtctacttacttct

SEQ ID NO: 159249 - DNA, 532 bp, Homo sapiens
tatctggcaagcttttccttgtccttcaggtatcaacctatgttatctcctccaccagaaagcccatgatattgacataaaagtgggatagatgtcccttttgtgtgttccagtagtgccctgctgtatacctgtcatggtatctatgacactatgtggacattgcctacctgtctgtgtttttaggttatagcatatgactattgggaggtggaccatgccatcttcatcttggaattccagtgctggttctagtaccttagcacgtggctgttgattacatgaatgaagaatgaaaaacctctaatatttaaacacaatagaattaatgccatgtgtaaattatttaatagtaattttgtattgtaaatgtacatagatatttctcattcttactaactctgataaagttctcaactctttagtatttaaactcacatttagttaactgaagtgttttaggtaaagaacataattctttctytttccagttgttgctgtgttgaacacttgctcccgtctacttacttct

SEQ ID NO: 159250 - DNA, 518 bp, Homo sapiens
tttctagtgaagtggttcttataatcaagcaaatcaacatattcttttctcacattgttaccctttaaatatgagtatttctaatggaatcttcagaatctcacaagtagagcccttttagaaggcagcaagtgttacctgtyaagccatatatcactgatagccatttctcttccctgtctactttgtttgtactgcttgttcagtataaatcaccttagaaacacaggtgcttctttagaatgattttaaaattatacttgcttacaacaggtatgctctcacacatcttcagtgtgaaaacactgtttagtggataatttggtttgctctcagggcaagtttttaaaaactgcaagtcattaagaatcattagaggaaaaatgaaatactaagcgtgtgtctttgctatctttacagatcaaataagaaaatagcagtgatcagcatgaagctccttatggagaaagagcagatgaaatattttctcagtgctcttcctacaaggcgagacccag

SEQ ID NO: 159251 - DNA, 518 bp, Homo sapiens
tttctagtgaagtggttcttataatcaagcaaatcaacatattcttttctcacattgttaccctttaaatatgagtatttctaatggaatcttcagaatctcacaagtagagcccttttagaaggcagcaagtgttacctgtcragccatatatcactgatagccatttctcttccctgtctactttgtttgtactgcttgttcagtataaatcaccttagaaacacaggtgcttctttagaatgattttaaaattatacttgcttacaacaggtatgctctcacacatcttcagtgtgaaaacactgtttagtggataatttggtttgctctcagggcaagtttttaaaaactgcaagtcattaagaatcattagaggaaaaatgaaatactaagcgtgtgtctttgctatctttacagatcaaataagaaaatagcagtgatcagcatgaagctccttatggagaaagagcagatgaaatattttctcagtgctcttcctacaaggcgagacccag

SEQ ID NO: 159252 - DNA, 518 bp, Homo sapiens
tttctagtgaagtggttcttataatcaagcaaatcaacatattcttttctcacattgttaccctttaaatatgagtatttctaatggaatcttcagaatctcacaagtagagcccttttagaaggcagcaagtgttacctgtcaagccatatatcactgatagccatttctcttccctgtctactttgtttgtactgcttgttcagtataaatcaccttagaaacacaggtgcttctttagaatgattttaaaattatacttgcttacaacaggtatgctctcacacatcttcagtgtgaaaacactgtttagtggataatttrgtttgctctcagggcaagtttttaaaaactgcaagtcattaagaatcattagaggaaaaatgaaatactaagcgtgtgtctttgctatctttacagatcaaataagaaaatagcagtgatcagcatgaagctccttatggagaaagagcagatgaaatattttctcagtgctcttcctacaaggcgagacccag

SEQ ID NO: 159253 - DNA, 518 bp, Homo sapiens
tttctagtgaagtggttcttataatcaagcaaatcaacatattcttttctcacattgttaccctttaaatatgagtatttctaatggaatcttcagaatctcacaagtagagcccttttagaaggcagcaagtgttacctgtcaagccatatatcactgatagccatttctcttccctgtctactttgtttgtactgcttgttcagtataaatcaccttagaaacacaggtgcttctttagaatgattttaaaattatacttgcttacaacaggtatgctctcacacatcttcagtgtgaaaacactgtttagtggataatttggtttgctctcagggcaagtttttaaaaactgcaagtcattaagaatcattagaggaaaaatgaaatactaagcgtgtgtctttgctatctttacagatcaaataagaaaatagcagtgatcagcatgaagctccttatggagaaagagcagatgaaatattttctcagygctcttcctacaaggcgagacccag

SEQ ID NO: 159254 - DNA, 529 bp, Homo sapiens
aatgctacaattttaaagttagatttctttgtgtattaatacaaacaccagagaagatggtcaataaagtaattactgtacaatgcctatcataatacttaaacctggaagaaaatcagaaaatgttaagtgaatagaattggtgaattgyttccattttatacaattttttgttcattttagggcttaccaaaacttgcagctctgaataaggcccaattatttactccttcaaataaaacaagactgcaagaataagagtgaatgctttgttttgttttgtttttcactgaaatattccagtctgtagcagctccaaatcacactgatctttctagagtctgatacaggtcctggtctcaaggccagtgttaccataatcaccatcttttgtgcttcaaggttgagccctcctaatttacctgcatgaaattggaaaagtcctgtttcatactttaagcaacctagatgtctctttcactaaaagtggtattcttcttgtgtgttttttttttttttttgcagcaaa

SEQ ID NO: 159255 - DNA, 620 bp, Homo sapiens
tgcagtggtaatctgtcccaaatggaaggacaaatagccaagcaatgttgacctacccattcatctctcaaaaacagrgttaagatattgattctcctgttttcaggatgaagcagggacagggagtttcttgttatcctctcaactcactctttttatggaaaaagtaattaatctgataaatgacacaaaagattttgatgttcattaacaaggtggtgattccaagaagttgaaataaaaagacttcagagcccgtctctctcaatcactatctttggtctcttgaggatgcttgtgcacaaaatagggagcacccatgtaagagctgcataggcaggctcagtccagcaactggtttcataaatccaacttttccaagcatgatggaatgtcagaatcccgtgagccaaaagttttatgatgagagaggaagaatgatatttactccccaatctaatttttaaattaaattttaaacaaagttaataaagttaacaaacctgaatacacacacacacatgcatatatacccacgcacatgcacacaggcttcttgcattcttttttttgtttaatcattcatgagaaatggttggattttgtattttctatctacc

SEQ ID NO: 159256 - DNA, 620 bp, Homo sapiens
tgcagtggtaatctgtcccaaatggaaggacaaatagccaagcaatgttgacctacccattcatctctcaaaaacagagttaagatattgattctcctgttttcaggatgaagcagggacagggagtttcttgttatcctctcaactcactctttttatggaaaaagtaattaatctgataaatgacacaaaagattttgatgttcattaacaaggtggtgattccaagaagttgaaataaaaagacttcagagccygtctctctcaatcactatctttggtctcttgaggatgcttgtgcacaaaatagggagcacccatgtaagagctgcataggcaggctcagtccagcaactggtttcataaatccaacttttccaagcatgatggaatgtcagaatcccgtgagccaaaagttttatgatgagagaggaagaatgatatttactccccaatctaatttttaaattaaattttaaacaaagttaataaagttaacaaacctgaatacacacacacacatgcatatatacccacgcacatgcacacaggcttcttgcattcttttttttgtttaatcattcatgagaaatggttggattttgtattttctatctacc

SEQ ID NO: 159257 - DNA, 620 bp, Homo sapiens
tgcagtggtaatctgtcccaaatggaaggacaaatagccaagcaatgttgacctacccattcatctctcaaaaacagagttaagatattgattctcctgttttcaggatgaagcagggacagggagtttcttgttatcctctcaactcactctttttatggaaaaagtaattaatctgataaatgacacaaaagattttgatgttcattaacaaggtggtgattccaagaagttgaaataaaaagacttcagagcccgtctctctcaatcactatctttggtctcttgaggatgcttgtgcacaaaatagggagcacccrtgtaagagctgcataggcaggctcagtccagcaactggtttcataaatccaacttttccaagcatgatggaatgtcagaatcccgtgagccaaaagttttatgatgagagaggaagaatgatatttactccccaatctaatttttaaattaaattttaaacaaagttaataaagttaacaaacctgaatacacacacacacatgcatatatacccacgcacatgcacacaggcttcttgcattcttttttttgtttaatcattcatgagaaatggttggattttgtattttctatctacc

SEQ ID NO: 159258 - DNA, 484 bp, Homo sapiens
taactattgctacaagaatacgtttgctgaataaattagcacatttattgatataattgatttgcatactgtggcagcacttcatggaccaaaccctaartcccatgaaaaattgaatagaattatttgacagttaagtatcattggaaaagcctggctctagttctcaggaagcaatctggttgattatgtgttttcggtgtgtagtcataatacaactgtatatcactagtgtacattagacactttgtgcactctacatatattttctcatttgatccttcaatacatgcataacagaagaaatagacgtggatttaattgctccactagggtcaaagaccaaaaacctcattacaatgccaatgttagaaattcttcttccaattaaaataaagttaccaaagacaattgctcctgccataatgagaaaatatcggatgaactttaaaaaattattttttttttgtttaaagccatcaaa

SEQ ID NO: 159259 - DNA, 484 bp, Homo sapiens
taactattgctacaagaatacgtttgctgaataaattagcacatttattgatataattgatttgcatactgtggcagcacttcatggaccaaaccctaagtcccatgaaaaattgaatagaattatttgacagttaagtatcattggaaaagyctggctctagttctcaggaagcaatctggttgattatgtgttttcggtgtgtagtcataatacaactgtatatcactagtgtacattagacactttgtgcactctacatatattttctcatttgatccttcaatacatgcataacagaagaaatagacgtggatttaattgctccactagggtcaaagaccaaaaacctcattacaatgccaatgttagaaattcttcttccaattaaaataaagttaccaaagacaattgctcctgccataatgagaaaatatcggatgaactttaaaaaattattttttttttgtttaaagccatcaaa

SEQ ID NO: 159260 - DNA, 484 bp, Homo sapiens
taactattgctacaagaatacgtttgctgaataaattagcacatttattgatataattgatttgcatactgtggcagcacttcatggaccaaaccctaagtcccatgaaaaattgaatagaattatttgacagttaagtatcattggaaaagcctggctctagttctcaggaagcaatctggttgattatgtgttttcggtgtgtagtcataatacaactgtatatcactagtgtacattagacactttgtgcactctacatatattttctcatttgatscttcaatacatgcataacagaagaaatagacgtggatttaattgctccactagggtcaaagaccaaaaacctcattacaatgccaatgttagaaattcttcttccaattaaaataaagttaccaaagacaattgctcctgccataatgagaaaatatcggatgaactttaaaaaattattttttttttgtttaaagccatcaaa

SEQ ID NO: 159261 - DNA, 484 bp, Homo sapiens
taactattgctacaagaatacgtttgctgaataaattagcacatttattgatataattgatttgcatactgtggcagcacttcatggaccaaaccctaagtcccatgaaaaattgaatagaattatttgacagttaagtatcattggaaaagcctggctctagttctcaggaagcaatctggttgattatgtgttttcggtgtgtagtcataatacaactgtatatcactagtgtacattagacactttgtgcactctacatatattttctcatttgatccttcaatacatgcataacagaagaaatagaygtggatttaattgctccactagggtcaaagaccaaaaacctcattacaatgccaatgttagaaattcttcttccaattaaaataaagttaccaaagacaattgctcctgccataatgagaaaatatcggatgaactttaaaaaattattttttttttgtttaaagccatcaaa

SEQ ID NO: 159262 - DNA, 624 bp, Homo sapiens
ttcccaggctggtctagaactcttggccctcaagtgttcttcctgccttgacccccaccctctccaaccaagcactgggattacaggtgtaatgacagggagtcatcacatctggcctcccctagcatttagatattaaactgttggaaaaatgagtaaaaaataaatrtaagtagcattttgagtattttcttcccatacacccatggattgtttagtgtatcttactacttcacataggagaccattcctgcatcaaactatataaactaagtatttaaatttgattttttccctacaataagctctatgctaaagctcattacatttgattttgacaatctgtttttataccacagttgcaaaaaattaatcacattctttacttcatgagacattatcattattgtttcctacaagtttctctggttttacttgtttcatttttttattccttatcccttgtcacagacaggcatgctaatgtgtttgatataggttctttactcttaaagaattcttacaagataagaaggttgttttctgagtgtgtgtatgtgtatatacgtgagtgtatacattttgcttaaagagtattgtgctataaatctaattttatttcta

SEQ ID NO: 159263 - DNA, 591 bp, Homo sapiens
gaagaactcactcaagtggattgtgctaaaccaagcttgtcyaacccacagcttgtgggctgaatgcaggtcaggacagctttgaatgtggcccaaatttgtcaactttgttaaaagagagtttgtgtatgtgtgtgtgtgtgtgtgtttgtgtgtgtgtgtggtttttttatttttatttatttatgtatttatttattttagctcatcagctatttttagtgtattttatgtgtggctcaagaaaattcttcttccaatgctgtccagggaagccaaaaggttggacattcctgtgctaagctattcataaggcatccaccccatgatccaatacctctcactgggccccacctccaacattggggatcatattttagcatgagatttggaggggacacacatccaaattatatcagggatatgtacccatcatcgagacaggttgtagagtatgcatactttcaaatgggtcctgtcatgttattttctgaaatggttaaaaccatttaattttccatccattgcccataaagcttgttttcctcatatcctcatcactcaatgttatctaggattcttatattttct

SEQ ID NO: 159264 - DNA, 591 bp, Homo sapiens
gaagaactcactcaagtggattgtgctaaaccaagcttgtctaacccacagcttgtgggctgaatgcaggtcagracagctttgaatgtggcccaaatttgtcaactttgttaaaagagagtttgtgtatgtgtgtgtgtgtgtgtgtttgtgtgtgtgtgtggtttttttatttttatttatttatgtatttatttattttagctcatcagctatttttagtgtattttatgtgtggctcaagaaaattcttcttccaatgctgtccagggaagccaaaaggttggacattcctgtgctaagctattcataaggcatccaccccatgatccaatacctctcactgggccccacctccaacattggggatcatattttagcatgagatttggaggggacacacatccaaattatatcagggatatgtacccatcatcgagacaggttgtagagtatgcatactttcaaatgggtcctgtcatgttattttctgaaatggttaaaaccatttaattttccatccattgcccataaagcttgttttcctcatatcctcatcactcaatgttatctaggattcttatattttct

SEQ ID NO: 159265 - DNA, 618 bp, Homo sapiens
tgaactcactgagaagaactcactcaagtggattgtgctaaaccaagcttgtctaacccacagcttgtgggctgaatgcaggtcaggacagctttgaatgtggcccaaatttgtcaactttgttaaaagagagtttgtgtatgtgtgtgtgtgtgtgtgtttgtgtgtgtgtgtggtttttttatttttatttatttatgtatttatttattttagctcatcagctatttttagtgtattttatgtgtggctcaagaaaattcttcttccaatgctgtccagggaagccaaaaggttggacattcctgtgctaagctattcataaggcatccaccccatgatccaatacctctcactgggccccacctccaacattggggatcatattttagcatgagatttggaggggacacacatccaaaytatatcagggatatgtacccatcatcgagacaggttgtagagtatgcatactttcaaatgggtcctgtcatgttattttctgaaatggttaaaaccatttaattttccatccattgcccataaagcttgttttcctcatatcctcatcactcaatgttatctaggattcttatattttctaagcaagtggtgaaa

SEQ ID NO: 159266 - DNA, 610 bp, Homo sapiens
attctttgttaaggcaaaacaaaagtcactttggcttctgttcccagtaagttcctcattttcatttgagaccttctaagtctggctttcactcaccattttcctgtgagccttctggtcacgagtatgtaacaattctttacaaagatccaaactttccctcaacttcgtgtctgcagagccctccaaactctgtgaactgtgtgtgctacccctttctgaacgtgtttatacattatcagctatctttgctgcagcctgacaatgtagtaagggaagacaagtccattttcagggggaaaattcaagaagggttcagagacttsaatgaaaagaagctgagtgctcactaccaagacaatagggaagaggccttgaagacatttaatagacccactttgcagtactaattttctctatgatcataaagaagaggtttacttggctcatgattctgcaggctataaggaagtatagtggcttctacatctaagaggaatcaggaagcctcccagtcataccagaatgtcaaggggcaatgagatgattcatgtggcaggaggaggagcaagacagggagaggagagaggtcccacaccctattatacaa

SEQ ID NO: 159267 - DNA, 610 bp, Homo sapiens
attctttgttaaggcaaaacaaaagtcactttggcttctgttcccagtaagttcctcattttcatttgagaccttctaagtctggctttcactcaccattttcctgtgagccttctggtcacgagtatgtaacaattctttacaaagatccaaactttccctcaacttcgtgtctgcagagccctccaaactctgtgaactgtgtgtgctacccctttctgaacgtgtttatacattatcagctatctttgctgcagcctgacaatgtagtaagggaagacaagtccattttcagggggaaaattcaagaagggttcagagacttgaatgaaaagaagctgagtgctcactmccaagacaatagggaagaggccttgaagacatttaatagacccactttgcagtactaattttctctatgatcataaagaagaggtttacttggctcatgattctgcaggctataaggaagtatagtggcttctacatctaagaggaatcaggaagcctcccagtcataccagaatgtcaaggggcaatgagatgattcatgtggcaggaggaggagcaagacagggagaggagagaggtcccacaccctattatacaa

SEQ ID NO: 159268 - DNA, 619 bp, Homo sapiens
cagggtcaccgtgcagccacattctttgttaaggcaaaacaaaagtcactttggcttctgttcccagtaagttcctcattttcatttgagaccttctaagtctggctttcactcaccattttcctgtgagccttctggtcacgagtatgtaacaattctttacaaagatccaaactttccctcaacttcgtgtctgcagagccctccaaactctgtgaactgtgtgtgctacccctttctgaacgtgtttatacattatcagctatctttgctgcagcctgacaatgtagtaagggaagacaagtccattttcagggggaaaattcaagaagggttcagagacttgaatgaaaagaagctgagtgctcactaccaagacaayagggaagaggccttgaagacatttaatagacccactttgcagtactaattttctctatgatcataaagaagaggtttacttggctcatgattctgcaggctataaggaagtatagtggcttctacatctaagaggaatcaggaagcctcccagtcataccagaatgtcaaggggcaatgagatgattcatgtggcaggaggaggagcaagacagggagaggagagaggtcccacacc

SEQ ID NO: 159269 - DNA, 556 bp, Homo sapiens
aaatgccacttgtaactggtgatgaagcatagaacaatgacttttctacatatctaattcaataaaagagtttacatgtggaaattcaacaaagtaactatactctggcaatgcacatcaacttaactggtgggaatatttcctgaggtggaaatacttcagttttatggtataatctaccaaggatgagtatagtataatccaccaactaagataaattgtctccagttttattaatcaaatgaatattatattggaagtgagcatttaatatttatatagttgtctacttcaagagtttctgattatatacatcagaaaaataaaatttttkataataaaatatattcaaaggatcctcccaaacatcccacagtaacacagcacatgatctaacaaccctaatagtcacaacagtccacataatgtctcattgtatatgcttccggttttaatttgaaaacagcctgtactttctcatccctagtaggcagaaaagaatagctgttcaccatttcaagcctctttatttgtttgaaaaatgcattcagtgcca

SEQ ID NO: 159270 - DNA, 315 bp, Homo sapiens
ggttcccatggtcttgaacagctctgcacctctgtctttgcaggacacagcctccctcccagccactttcatgggctggcattgagtgtctgcagctttttcaggtgcacagtgcaagctgtcggtacagctaccattctggggtctgaaggaygatggcattcttttcacatctccactaggcagtgccccagtggggactctgtgtgggggtgcccaccccacatttccatttcacaatatcctagcaggggttctccatgagcaccctgcccctgcagcaaacttctgcttgaacatccaggtgcttccata

SEQ ID NO: 159271 - DNA, 471 bp, Homo sapiens
tatgtgtaagggtcttaatgtgtacaattccatttttaggggctcaagagataaaatttcttttccaaaatggataaatacaaaatcatttttgcaataaaaatgtattgtgagggaatcttttgaatcaatgtgattacttattgtggaagatacaggccatatcgcatagcgtcttgcctcaaggatcttatcacttagtgagtgaaataaaacaattacacagataactgccagtaggcagcactaaatgtcttaagtgatggatagacagagaggtaagaagggtccaatcaaatgctgaaatgttaataaaacccagatcacaggcggtgatgatcaaatkaattgaacaggcttaggagaaatccgtgaaagaaagaaatctgtatccctgggatctttccatttttgagaatatattacatttgaatctcttagggatgtgtgattccccttccctttaaaata

SEQ ID NO: 159272 - DNA, 490 bp, Homo sapiens
aatgatacatgcatatacttggagagtaataggtattgctgaataatataaagtttgagaatacacttttgcttaaaacgtaaaattggtgatttatattattttatttttaaatgtagaaatagctaaagtataaattttgtataatgcaagtgcttttcctaggttttagttttgttttaatttaggagtaagggtaaagaagctatttataaatagtactaagtccgtgtkttcttttctctaaatacatcttgatgtgttacgaagatcaaatgttctgaaaaagcaaatttcctctaaacctgagtcctctctttcactagcagagagaaaaagtctctgctaaagttactggatgaaaacagaaactgtatacttgactctattaaaggaaaaaataaaatgttttttataatattaagtcaacttgaaataaaagaaaaaagttagctattcaggcctgtccctaacatttgtggaagttcag

SEQ ID NO: 159273 - DNA, 558 bp, Homo sapiens
ctcagtaagtgctatgtgtgaacagaagatgtagaatacagatcttttatcttcaggtcacttaatatccaagtctgaacataagaaacataaacacaaaaaagtaactttcagaaaagtgctatgcaatatatattggggatcttctaaggagggagatgccatcgtggacyatgatgatcaaagaaaggttaatagagcttcctattatgtgatactcttcaacaatatggggaagaggaaaagtgcattatggattattcaaaagacaagtgcaaatttggtgataagcatagaaaacattcagaagtatagaatgcatacattagaataatgtgattgtttcagaatatttgaatatacaattagaagtaaatgttgggacaaattatgaaggatttagaatattagatgtgagaatttgaactttattcataaataatcaaaaaaagaaaatgattttaaattgctcaaaaaagggctatccatcaaaaggagagtcagggaataacatgtattttgtgcattcaaaaaaaaaaatcaaaagactgtcttcca

SEQ ID NO: 159274 - DNA, 550 bp, Homo sapiens
tgcaataaagtaatatatatgaaaacaatcaacatgatagtcttgaagtgcaacattcactgggtttcatatgggagaaaaacagctaaaatcaaacacatggacaggcagtcagaacaatgtccatcatatacatagtaaaattaatacaaggacaaacattcatgagtggagtccatttgaatyagcctgtagtgaagacatgtgccttagggcacacataactcatgttagggagaaaatgtataattttactcaatgtgaaaacatcttcagaaataactcagtccatgctgtccagatgcagttctgttctgtagagatgaagaataagaatcatcaaagtggaaaaacctctgtcctgctccaaattctggtccacacaggagtagtactactggagagaaaagccatacatgtcccaaatgaaggaaagcctttacgttatcagtcatttcttatgagacatatgaaacttcacactggagagaaaccttatgaatgtaacaaaagtgagaaaggctttagatattccctacaccttaataaa

SEQ ID NO: 159275 - DNA, 477 bp, Homo sapiens
tatcttacagaagtgtgaaaagaaaccctctgaaggtaaagtctatggaaagcctttcatcttcattcatcgtgagtagatatttgttctcacactggagagaagctatgaaagtaaggaatatraaaaaagcctcagtgttgtctcagactcatagttcatacaagaactcacacagcagagactgcttatggaagtaaaaaatgcagaaaatacctctttaaacactatccctcctttatacatgattccacaccctggagggagactacaattgaataaatataagaaagctttcagttccagctcttcacttattgggcatgaatgagcacagggtaggactgaagcacagtaaacgttaacaattattgactttatcattgtcttatccctcaattataactcaaattcataattttgtagtttttcctttcttaaaaaatggtacaagatgacagatatctgtcttagcaa

SEQ ID NO: 159276 - DNA, 477 bp, Homo sapiens
tatcttacagaagtgtgaaaagaaaccctctgaaggtaaagtctatggaaagcctttcatcttcattcatcgtgagtagatatttgttctcacactggagagaagctatgaaagtaaggaatatgaaaaaagcctcagtgttgtctcagactcatagttcatacaagaactcacacagcagagactgcttatggaagtaaaaaatgcagaaaatacctctttaaacactatccctcctttatacatgattccacaccctggagggagactacaattgaataaatataagaaagctttcagttccagctcttcacttattgggcatgaatgagcacagggtaggactgaagcacagtaaacgttaacaattattgactttatcattgtcttatccctcaattakaactcaaattcataattttgtagtttttcctttcttaaaaaatggtacaagatgacagatatctgtcttagcaa

SEQ ID NO: 159277 - DNA, 588 bp, Homo sapiens
attgtcttatccctcaattataactcaaattcataattttgtagtttttcctttcttaaaaaatggtacaagatgacagatatctgtcttagcaacctttccgctctgccaccttaatgttgctatgtagtagytttgttacaattcatttacatacacatggtttcattttcagtgggaagcccttctgagctccattcaatttagatttagaattcgtatgctccatgataccttttttgtcagtttgttttttgttggtcacaatttgactgcattatggtcacattatgtggttttaatggtactgatttggggtacctgttatgactttcattttggtctaatgtggccaatgctgtccatttccctgctatatccattattctcatcttcttcactaagggaacatagattcactttttccaaggagcactgtttaaatgtctttatttatttatttatttatgcatattttattattttataatttttttttttgaaaaatggtctcactctgtctcccaggctggagtacagtggcatgatcagagctcactgcagtcttgaactcctgggctcatgtga

SEQ ID NO: 159278 - DNA, 266 bp, Homo sapiens
ttgactgcattatggtcacattatgtggttttaatggtactgatttggggtacctgttatgactttcattttggtctaatgtggccaatgctgtccatttccctgctatatccattattctcatcttcttcactaagggaacatagattcactttttccaaggagcactgtttaaatgtctttatttatttatttatttatgcatattttattattttayaatttttttttttgaaaaatggtctcactctgtctcccaggctgga

SEQ ID NO: 159279 - DNA, 589 bp, Homo sapiens
catcttcttcactaagggaacatagattcactttttccaaggagcactgtttaaatgtctttatttatttatttatttatgcatattttattattttataatttttttttttgaaaaatggtctcactctgtctcccaggctggagtrcagtggcatgatcagagctcactgcagtcttgaactcctgggctcatgtgatctcccagctcagactcctgagtaggtaggactgcaggcataacaggtgtgcaccgccacacccagcttttgttttgttttgtttttgtagagactgggtctcgttatgttgcctggactggtttcaaattcctgtgctcaagtgattctcccaccttggcctcccaaattgctggaattacaggcatgagccaccatgcctggccctggttaacgtctttaaatgagtttcccagtttttctcgtaactgtagtgagcgaatcttatagtcctggccaatgtgaaatgcagaattcactgctttggatttctgaaaatctgtttggaaaggggagagttattgttcctcttttttgttgaccaatttccctttgctttctgctgcttgc

SEQ ID NO: 159280 - DNA, 444 bp, Homo sapiens
gtttaaatgtctttatttatttatttatttatgcatattttattattttataatttttttttttgaaaaatggtctcactctgtctcccaggctggagtacagtggcatgatcagagctcactgcagycttgaactcctgggctcatgtgatctcccagctcagactcctgagtaggtaggactgcaggcataacaggtgtgcaccgccacacccagcttttgttttgttttgtttttgtagagactgggtctcgttatgttgcctggactggtttcaaattcctgtgctcaagtgattctcccaccttggcctcccaaattgctggaattacaggcatgagccaccatgcctggccctggttaacgtctttaaatgagtttcccagtttttctcgtaactgtagtgagcgaatcttatagtcctggccaatgtgaaatgcaga

SEQ ID NO: 159281 - DNA, 597 bp, Homo sapiens
ttgactgcattatggtcacattatgtggttttaatggtactgatttggggtacctgttatgactttcattttggtctaatgtggccaatgctgtccatttccctgctatatccattattctcatcttcttcactaagggaacatagattcactttttccaaggagcactgtttaaatgtctttatttatttatttatttatgcatattttattattttataatttttttttttgaaaaatggtctcactctgtctcccaggctggagtacagtggcatgatcagagctcactgcagtcttgaactcctgggctcatgtgatctcccagctcagactcctgagtaggtaggactgcaggcataacaggtgtgcaccgccacacccagcttttgttttgttttgtttttgtagagactgggtctcgttatgttgcctrgactggtttcaaattcctgtgctcaagtgattctcccaccttggcctcccaaattgctggaattacaggcatgagccaccatgcctggccctggttaacgtctttaaatgagtttcccagtttttctcgtaactgtagtgagcgaatcttatagtcctggc

SEQ ID NO: 159282 - DNA, 597 bp, Homo sapiens
ttgactgcattatggtcacattatgtggttttaatggtactgatttggggtacctgttatgactttcattttggtctaatgtggccaatgctgtccatttccctgctatatccattattctcatcttcttcactaagggaacatagattcactttttccaaggagcactgtttaaatgtctttatttatttatttatttatgcatattttattattttataatttttttttttgaaaaatggtctcactctgtctcccaggctggagtacagtggcatgatcagagctcactgcagtcttgaactcctgggctcatgtgatctcccagctcagactcctgagtaggtaggactgcaggcataacaggtgtgcaccgccacacccagcttttgttttgttttgtttttgtagagactgggtctcgttatgttgcctggactggtttcaaattcctgtgctcaagtgattctcccaccttggcctcccaaatwgctggaattacaggcatgagccaccatgcctggccctggttaacgtctttaaatgagtttcccagtttttctcgtaactgtagtgagcgaatcttatagtcctggc

SEQ ID NO: 159283 - DNA, 589 bp, Homo sapiens
catcttcttcactaagggaacatagattcactttttccaaggagcactgtttaaatgtctttatttatttatttatttatgcatattttattattttataatttttttttttgaaaaatggtctcactctgtctcccaggctggagtacagtggcatgatcagagctcactgcagtcttgaactcctgggctcatgtgatctcccagctcagactcctgagtaggtaggactgcaggcataacaggtgtgcaccgccacacccagcttttgttttgttttgtttttgtagagactgggtctcgttatgttgcctggactggtttcaaattcctgtgctcaagtgattctcccaccttggcctcccaaattgctggaattacaggcatgagccaccatgcctggccctggttaacgtctttaaatgagtttcccagtttttctygtaactgtagtgagcgaatcttatagtcctggccaatgtgaaatgcagaattcactgctttggatttctgaaaatctgtttggaaaggggagagttattgttcctcttttttgttgaccaatttccctttgctttctgctgcttgc

SEQ ID NO: 159284 - DNA, 524 bp, Homo sapiens
ttaaaagaagctgctcagtgccatgcctaacacaagatggaactccacgatgagatatgtgtgaagacagggtgccatggttacaaacaaggactccaggtgcagactgtttggttcaaacctggaccagcggtatgaatttttgcaactctctgtattgctctttgcctcagttytttcatataacaactagaagtaaaaacaaggttattgtgaaaattaaatgaattaaagtaagtggagtgcctacaacacccccaggcacacggtcagcactgagcatgtttttcattactactcttaatgaggtaagaatgagaaaacaggcgccagccatgagcctggggtttatctggcaaaggcatcagagaccccacttttaacatcctccattcattcatttgaccctgataaggaaggagtctcatgggagaggagcaagcctccacctgggggccagacatctcatgatcaaagttgaactctaccactgttcagctgggtgactttgggcaagtgacttt

SEQ ID NO: 159285 - DNA, 524 bp, Homo sapiens
ttaaaagaagctgctcagtgccatgcctaacacaagatggaactccacgatgagatatgtgtgaagacagggtgccatggttacaaacaaggactccaggtgcagactgtttggttcaaacctggaccagcggtatgaatttttgcaactctctgtattgctctttgcctcagttttttcatataacaacyagaagtaaaaacaaggttattgtgaaaattaaatgaattaaagtaagtggagtgcctacaacacccccaggcacacggtcagcactgagcatgtttttcattactactcttaatgaggtaagaatgagaaaacaggcgccagccatgagcctggggtttatctggcaaaggcatcagagaccccacttttaacatcctccattcattcatttgaccctgataaggaaggagtctcatgggagaggagcaagcctccacctgggggccagacatctcatgatcaaagttgaactctaccactgttcagctgggtgactttgggcaagtgacttt

SEQ ID NO: 159286 - DNA, 524 bp, Homo sapiens
ttaaaagaagctgctcagtgccatgcctaacacaagatggaactccacgatgagatatgtgtgaagacagggtgccatggttacaaacaaggactccaggtgcagactgtttggttcaaacctggaccagcggtatgaatttttgcaactctctgtattgctctttgcctcagttttttcatataacaactagaagtaaaaacaaggttattgtgaaaattaaatgaattaaagtaagtggagtgcctacaacacccccaggcacacggtcagcactgagcatgtttttcattactactcttaatgaggtaagaatgagaaaacaggcgccagccatgagcctggggtttatctggcaaaggcatcagagaccccacttttaacatcctccattcattcatttgaccctgataaggaaggagtcycatgggagaggagcaagcctccacctgggggccagacatctcatgatcaaagttgaactctaccactgttcagctgggtgactttgggcaagtgacttt

SEQ ID NO: 159287 - DNA, 524 bp, Homo sapiens
ttaaaagaagctgctcagtgccatgcctaacacaagatggaactccacgatgagatatgtgtgaagacagggtgccatggttacaaacaaggactccaggtgcagactgtttggttcaaacctggaccagcggtatgaatttttgcaactctctgtattgctctttgcctcagttttttcatataacaactagaagtaaaaacaaggttattgtgaaaattaaatgaattaaagtaagtggagtgcctacaacacccccaggcacacggtcagcactgagcatgtttttcattactactcttaatgaggtaagaatgagaaaacaggcgccagccatgagcctggggtttatctggcaaaggcatcagagaccccacttttaacatcctccattcattcatttgaccctgataaggaaggagtctcatgggagaggagcaagcctccacctkggggccagacatctcatgatcaaagttgaactctaccactgttcagctgggtgactttgggcaagtgacttt

SEQ ID NO: 159288 - DNA, 691 bp, Homo sapiens
agccatgaggcccagcacccaccattcaatgtcttcagaattgccgtccctcagaactcttgcaccacgaggtggcagcactcccagtgtctgggtgtcttctgaggggtaccaggatccagtagaggccactggctgtgctgtcatatcctaagtggcagcaaggcaggcttgggtctcttggctgcttcagcaccagaggttggacagtgcccatgcattgagtccctcatgagaatgggasggaaaggaagggcagaatggagtgatgtagggtccatccaccatgtccctggatggagagacccctgctcccacagtagtccacaccaggaccacgattggcactcatgaagatgccagcctccatgtatatgtccttgtctgacaactcctccttattttcatcctggagacaagaaccctgaacacagtagctctgagggcacctgagtgtaacctgagacagtccctgaagacctttcatccaagcaggatccctcccttgccatctccagacctgccccacaaactccctccctggtctcctggctcttgttcactccttccaggcagccttccacagtcatctctaaaatatatatgactgtcccttcctttatccagcaccttccatggctccccagagccctccaggtcaagttcaagttctttgatcagacactagatc

SEQ ID NO: 159289 - DNA, 691 bp, Homo sapiens
agccatgaggcccagcacccaccattcaatgtcttcagaattgccgtccctcagaactcttgcaccacgaggtggcagcactcccagtgtctgggtgtcttctgaggggtaccaggatccagtagaggccactggctgtgctgtcatatcctaagtggcagcaaggcaggcttgggtctcttggctgcttcagcaccagaggttggacagtgcccatgcattgagtccctcatgagaatgggagggaaaggaagggcagaatggagtgatgtagggtccayccaccatgtccctggatggagagacccctgctcccacagtagtccacaccaggaccacgattggcactcatgaagatgccagcctccatgtatatgtccttgtctgacaactcctccttattttcatcctggagacaagaaccctgaacacagtagctctgagggcacctgagtgtaacctgagacagtccctgaagacctttcatccaagcaggatccctcccttgccatctccagacctgccccacaaactccctccctggtctcctggctcttgttcactccttccaggcagccttccacagtcatctctaaaatatatatgactgtcccttcctttatccagcaccttccatggctccccagagccctccaggtcaagttcaagttctttgatcagacactagatc

SEQ ID NO: 159290 - DNA, 691 bp, Homo sapiens
agccatgaggcccagcacccaccattcaatgtcttcagaattgccgtccctcagaactcttgcaccacgaggtggcagcactcccagtgtctgggtgtcttctgaggggtaccaggatccagtagaggccactggctgtgctgtcatatcctaagtggcagcaaggcaggcttgggtctcttggctgcttcagcaccagaggttggacagtgcccatgcattgagtccctcatgagaatgggagggaaaggaagggcagaatggagtgatgtagggtccatccaccatgtccctggatggagagacccctgctcccacagtagtccacaccaggaccacgattggcactcatgaagatgccagcctccatgtatatgtccttgtctgacaactcctccttattttcatcctggagacaagaaccctgaacacagtagctctgagggcacctgagtgtaacctgagacagtccctgaagacctttcatccaagcaggatccctcccttgccatctccagacctgccccacaaactccctccctggtctcctggctcttgttcactccttccaggcagccttccacagtcatctctaaaayatatatgactgtcccttcctttatccagcaccttccatggctccccagagccctccaggtcaagttcaagttctttgatcagacactagatc

SEQ ID NO: 159291 - DNA, 504 bp, Homo sapiens
gcactcagatccacacatgccctcttactattccagcctctcacaatacagaggtacttctatttttatgagcagatcctaatttatccctaagagggcctgtaaattattcatggagctctctttagctggtggcagctatgatttctgagaaggattaaggcaagagtgtttatgaaacaggttaaattccctggtgccatagagctgattctgagaccatgacattcatgatctcccttctcyacttcccttttttgatttcttgcacactgagctggtctgggttgcttgcctgatggagtgactcagaactttatccctatagggactgaactcttagttaccttgcatctattattgggataccgtggttgctgcaaacacttgtttttacctttgttttggggtacagaagcacaaacagatgccccattgaatcctctggtatcccgacatagggcttccttgtctccattgtgtaggagaaactataatgcctca

SEQ ID NO: 159292 - DNA, 542 bp, Homo sapiens
actatacattttgtcctctgtcctaaaggtgggtgttcccaagttctcaggcttttataatgtgtcctctctttaattcctctggaagacatcattctttttacggttttaactgacacgtcttatccatcttcctgccttatcttcttactgtgtccttatcccatatttctggctgaaaacacaaattactcaccaggacttgaaatatatgcttgttacacttactaccacctcagactcaacaggtctaaagcatgaacaacgaacttactttatgcttccccaccgtttccttccccaaagcatcctttatgaaaatctcctttgctataaatgttctgtttattttgtttgtttgtttcaaaattctggaatcaccttcaaacactttgaaggtgattcatagtctccatattctgggaggtagaagaggagaggayggggatagagtgttacttagagctggggttgggattttgcttctctctaaatatatcagaaagattggagacccctcatctcctcccagtccacaaact

SEQ ID NO: 159293 - DNA, 594 bp, Homo sapiens
cgtgctcctacaagactccagtgctgccgctgatttgacaagaggcagagctcaggcggtaatgctcgctcacttgcagctcatctcctgctctggggcctgcttcctaataggccatggaccagactggtaccagtccacagcgtaggggttgggaaccccggtctaaagcatccggcttcccaggccatgagccaaggcagaccagagcagttggcagatgagacagggatctagactcagtttcacagtcctaaacctggtatctactcacttctastcagggttcagggtcaattctatgtggaaaaagaagtaatgtttctccctagctcttacagcaggtgcaaagttcatgggatttgcactgatgatgttcatatctctagtaagattattagttatctccaaaactggagctcattcttgaatgctatgtagtttgaatagccctgaatcctctgactgtttgttacaaaccctctctctggattgttattccctgttctataactgactctgagcttgtttcaatgttaacaggtcttagaacaataatgctgccacccacgagaaatgagagccaggtgagga

SEQ ID NO: 159294 - DNA, 516 bp, Homo sapiens
atagagaacaccatcttctctacaggaaaggcacgggtagcatggagaagcaccacttctaaaattctctcaactgagacgcatggagaataccaggggtcaaccacagtttaaaagctttatttctcagaaaggtcattctgtataagatttatggattgaaaatttattagaagaaaaaataaagggagaaacaggagggaaatcacatctaataattgctcctatggagtaattttctcttttaatttaatcctcctctaactcatcaaggttggtattatgagtcttactttacagatgataaaatagaagctctgaaatgttccacagcttgcccatgtttatgcaactaccaagtgtgaagcttatattcacactctgatgcctctaactggagggtggaatgggtggaacatagcagctataacacttgttttacttcaattatctctcacatactgtaggtacaattttttatttgataacaaaagwgctacaagtcaggatttgttt

SEQ ID NO: 159295 - DNA, 514 bp, Homo sapiens
aagtactctgttctaatgcttaagggacagctgtacatagtatatggtattgaaagttaggacaggcctacttcagaataagtgtgggcactggagttagatatagaatcatacaatgttaaacttataaaatcaaatatatgttgaggcaaggaattgtgttagaaactacataaaacaggccggtgcagtggctcatgcctgtaatcccagagcattaggaggccgaagtgggcagatcacttgaggccaggagttcaagaccagccyggccaacatggcaaaaccctgtctctactaacaataaaaaattagccaggtgtggtggcacacacctttaatcccagctactccagaggctaaggcatgagaattgcttgaacctgggaagcgggggttgtggtgagccaagattacaccactgcactccagtctggatgacagagcaagactctgtctcaaaatatatatatatatatatatataaaaaacaaggaaagatgagttcagaatt

SEQ ID NO: 159296 - DNA, 517 bp, Homo sapiens
gaattctgatgcagagcaaaagtaaagtactctgttctaatgcttaagggacagctgtacatagtatatggtattgaaagttaggacaggcctacttcagaataagtgtgggcactggagttagatatagaatcatacaatgttaaacttataaaatcaaatatatgttgaggcaaggaattgtgttagaaactacataaaacaggccggtgcagtggctcatgcctgtaatcccagagcattaggaggccgaagtgggcagatcacttgaggccaggagttcaagaccagcctggccaacatggcaaaaccctgtctctactaacaataaaaaattagccaggtgtggtggcacacacctttaatcccagctactcyagaggctaaggcatgagaattgcttgaacctgggaagcgggggttgtggtgagccaagattacaccactgcactccagtctggatgacagagcaagactctgtctcaaaatatatatatatatatatatataaaaaaca

SEQ ID NO: 159297 - DNA, 517 bp, Homo sapiens
gaattctgatgcagagcaaaagtaaagtactctgttctaatgcttaagggacagctgtacatagtatatggtattgaaagttaggacaggcctacttcagaataagtgtgggcactggagttagatatagaatcatacaatgttaaacttataaaatcaaatatatgttgaggcaaggaattgtgttagaaactacataaaacaggccggtgcagtggctcatgcctgtaatcccagagcattaggaggccgaagtgggcagatcacttgaggccaggagttcaagaccagcctggccaacatggcaaaaccctgtctctactaacaataaaaaattagccaggtgtggtggcacacacctttaatcccagctactccrgaggctaaggcatgagaattgcttgaacctgggaagcgggggttgtggtgagccaagattacaccactgcactccagtctggatgacagagcaagactctgtctcaaaatatatatatatatatatatataaaaaaca

SEQ ID NO: 159298 - DNA, 525 bp, Homo sapiens
tgtacagcatgaaaactatagttaataatactgtattgcatactgaaaatttgttaatagattttaggtgctctcaccacacatatacacataaaaatgggtaactatggaaggttatggatatgttgtggatatgttagtttgcttgactgtagtaatcatttcagtatatatatatataaacattatgtattaaatatatacaaattcatttaaaaaacaatcaaagaatacccattaaatatttgattagtacaaaagaatcagtaataacccttcaaacaacatcaattaggcaaacaccaccaagtgttgacaaaatgtggagcattaagaaatctcatgcactgttggtasgagtgtaaattggtaccaccagttgcagaccaatttggcaacatccagaagatgaacataccttttggctcgacactctccatactggcaaaacagtagtacaagggtacaaggagataggtgtgagaatgttaaatgtagcacagtgtttaataacacatgcataaa

SEQ ID NO: 159299 - DNA, 525 bp, Homo sapiens
tgtacagcatgaaaactatagttaataatactgtattgcatactgaaaatttgttaatagattttaggtgctctcaccacacatatacacataaaaatgggtaactatggaaggttatggatatgttgtggatatgttagtttgcttgactgtagtaatcatttcagtatatatatatataaacattatgtattaaatatatacaaattcatttaaaaaacaatcaaagaatacccattaaatatttgattagtacaaaagaatcagtaataacccttcaaacaacatcaattaggcaaacaccaccaagtgttgacaaaatgtggagcattaagaaatctcatgcactgttggtackagtgtaaattggtaccaccagttgcagaccaatttggcaacatccagaagatgaacataccttttggctcgacactctccatactggcaaaacagtagtacaagggtacaaggagataggtgtgagaatgttaaatgtagcacagtgtttaataacacatgcataaa

SEQ ID NO: 159300 - DNA, 525 bp, Homo sapiens
tgtacagcatgaaaactatagttaataatactgtattgcatactgaaaatttgttaatagattttaggtgctctcaccacacatatacacataaaaatgggtaactatggaaggttatggatatgttgtggatatgttagtttgcttgactgtagtaatcatttcagtatatatatatataaacattatgtattaaatatatacaaattcatttaaaaaacaatcaaagaatacccattaaatatttgattagtacaaaagaatcagtaataacccttcaaacaacatcaattaggcaaacaccaccaagtgttgacaaaatgtggagcattaagaaatctcatgcactgttggtacgagtgtaaattggtaccaccagttgcagaccaatttggcaacatccagaagatgaacataccttttggctcracactctccatactggcaaaacagtagtacaagggtacaaggagataggtgtgagaatgttaaatgtagcacagtgtttaataacacatgcataaa

SEQ ID NO: 159301 - DNA, 453 bp, Homo sapiens
atttttctgggaggtatcaatggggcaaaaaacaaagatccctgaagtccagattaatcagaggcaatacaaacatgcttccagggagccaagcctttgcttttctacttggctaaggctacttctgctccctagggcaactggccaatcagtgaaatgtgaaggttctgggaaatgtctgcaaaacattgaaaacttcaaaaggaggggctatataagaattgtaatggaagaactaaaygtgcttatctttacaatgacccatagaatctagcctctggtcttggtggagtccttccttgttggataatggggcaccctattgcttagcctagcaatctgtttatagagcattctcccctgggtttagtaggtcaattagaagagatcgtcatgttccacactgaccatattagcccattgcttttgcccctgatatatgaattttatttg

SEQ ID NO: 159302 - DNA, 502 bp, Homo sapiens
gtgtttctgcccctcattttctgtaacctgatgtgacactttgcaccagcagtattgtttgtcttccttgttgaggaaccttttcctgctaatataaacagtcctgcctgtagcccttggaacgaaaagtcctctgtactatgtgaccctacccttgggcatagctgacaaaccacagtggtcccctaacttgtgaggatgcaatcaaaagactggctagtagcaaatgatgtgtagtgttctgcccacatagaggagttttaccattcagaggctggagctgccatttgagtgtgctcccaggcaaaataaagagtaagcagtcgttcttccatgtgtcctctgagagagaggaggttgagcaggtatacttgaggatctatagtcaactgtgtatcctctsagggatggaggggatctcacctctggatcctgcggcattccagttatcaatttctattcacctaaaatttggctgtattttctttcctaactggaattc

SEQ ID NO: 159303 - DNA, 538 bp, Homo sapiens
acttataaaatagagcaaggctcaaattgtagttcctacatctttaagttctgagttcttataattcagtgaattaacctcttaraacatcagtgtcttcatctataataaaacctcattaacacagggcttttgcaaagattttttgaaatctggcataatatatacatagctctaattctggaatattgtaattaaccttgtcttagactgctcaggctgcggtaacaaataccacgaactggaaagctttaacaatagcaatttgttttctcactttctcatagttatggtggcctgaagtccaagatcaaggtctagcagggttctgcttctggtgagggctattttcctgacttgcagatggccaccttctcactgtgtcctcatatggcctttctccttgtgtacacctgcagagagaatgacctctcctatgtcttttcttacaaggacactaaccttatgagatcagaaccctgcccttatgatctcatttaatctcagttacttcccttaagaccctatctccaaatat

SEQ ID NO: 159304 - DNA, 538 bp, Homo sapiens
acttataaaatagagcaaggctcaaattgtagttcctacatctttaagttctgagttcttataattcagtgaattaacctcttagaacatcagtgtcttcatctataataaaacctcattaacacagggcttttgcaaagattttttgaaatctggcataatatatacatagctctaattctggaatattgtaattaaccttgtcttagactgctcaggctgcggtaacaaataccacgaactggaaagctttaacaatagcaatttrttttctcactttctcatagttatggtggcctgaagtccaagatcaaggtctagcagggttctgcttctggtgagggctattttcctgacttgcagatggccaccttctcactgtgtcctcatatggcctttctccttgtgtacacctgcagagagaatgacctctcctatgtcttttcttacaaggacactaaccttatgagatcagaaccctgcccttatgatctcatttaatctcagttacttcccttaagaccctatctccaaatat

SEQ ID NO: 159305 - DNA, 580 bp, Homo sapiens
agcttgttgttcccatgggcttgaagtatcacgagatcagattatgggatgcagggaaggaaaaagaagcacctaccctcatcttctgtttgtccctatgttctgcctattgcctctgcctctccaagttacctccccgtaggccagtctcagggctgtggctttcccaaggatttgcccattttgccacagagagggacttggactctgataatattgccattagcagtgtcagaaaagaacctctttccttcagtgctctattcattcctctgatagaatctgggtaaatacaagtctccttatgcagaataaacrgtccctgctgctctctctgctttggtctgttagtcactaaattaaattctgcattggaaagaatcagaagcctacaggtagcttagttcagcaaataatgagaaaaccaaactgaaaatcaacatacttcaatgcttgttatatggataaattctgtggacgctgtgggggtaatagtatcatatataatttattcaaaaaatttgtattttgttttgtagcacctagatgaaagcagggctcaataattgtaagctggatg

SEQ ID NO: 159306 - DNA, 479 bp, Homo sapiens
gtaaaactctttcttggcaaatgttggggagaagcagaaaagagaatatgcatgttttttcttggcttataactgttgatgattacatctatctatctatctatctatctatctatctatctatctatctatattaaagccttcttaaaagcccctcagaaacttactcatcccattstcttctgtgcctgctacttactgtgttgcttcatgatgagagacttctagtttattaatattttacctgcccatggaccctggttctcactcatgttacatcacactttatttccgtttgtgggatattacctacttcaatgaagtctcataaaggaagatactacattcccaagaacgtctcttggcatatatctgtctgtatctgtgtgtatctctataacttatctatctagatctgtttaaccttcaacatagagataactatatctagattctttttaactttaacatggagatct

SEQ ID NO: 159307 - DNA, 479 bp, Homo sapiens
gtaaaactctttcttggcaaatgttggggagaagcagaaaagagaatatgcatgttttttcttggcttataactgttgatgattacatctatctatctatctatctatctatctatctatctatctatctatattaaagccttcttaaaagcccctcagaaacttactcatcccattctcttctgtgcctgctacttactgtgttgcttcatgatgagagacttctagtttattaatattttacctgcccatggaccctggttctcactcatgttacatcacactttatttccgtttgtgggatattacctacttcaatgaagtctcataaaggaagatactacattcccaagaacgtctcttggcatatatctgtctgtatctgtgtstatctctataacttatctatctagatctgtttaaccttcaacatagagataactatatctagattctttttaactttaacatggagatct

SEQ ID NO: 159308 - DNA, 570 bp, Homo sapiens
catgcaaatttctcccaatcattcaaagaaagaaagaaagggacagtttatgtccagtatttaaaactatctaatttactcatcccaacaccctagtggttttcagtggagcggtggggaggagagaattattcatgtctgtagacattttgattgtcataatggggggtgaggaggtggagtggggaagagaggatgctactgccatctagtgggtaccagctaggaatgctgctaaacatcctacaggacctagggcacctccccaagcaaaaaaacaaaaacaaaaaaaaattgtatatagatagatagatattagatagatagatacatagatacatagatatctaacttgaaataccaattgtgccacagagagaaaaaaaaaaaaccrgataaccttgtgaggttgtactattattttcacttattttatagatgagtaatcgagatcttttgagattacatagcacatcttacccaagatcattaaatagtgaatggcagtacaagctcagggccatgttataaagggtaatgaatggggatataggcatgcagctaatgaga

SEQ ID NO: 159309 - DNA, 561 bp, Homo sapiens
attataatatgtaatttttgaattgttttatgacttaaaaggagtgttatgcaaagctgcaagcataataggccctctaaggatggctgtttgttatggttatacttggattaacgtgkattaatttcctgagaatgaataacaatctggctaagcactttaacagttcgagcaccaatacatgtaaaatagggagtgtgcaactgaccttacagtggttgccaggatcctcatttgaggtcttatcaggacagattggctcaatatattattttagatataaagtgctgcctcatactagaaactgtgcattatgactttcttctaagagtatagaaaaataaatctcagcaaaaataatatttaaatgaaattttacagggaaataatgcaattaatgtgctgtgtgtgtttttggtctaaaagttgaataagagatttctggtattttaagtgtgtcattttagccacatattacatagtctggacctggatgtacaaaataaaggcaaatgtctatgcagttacataatttaaattatatggtataaaattccatta

SEQ ID NO: 159310 - DNA, 561 bp, Homo sapiens
attataatatgtaatttttgaattgttttatgacttaaaaggagtgttatgcaaagctgcaagcataataggccctctaaggatggctgtttgttatggttatacttggattaacgtgtattaatttcctgagaatgaataacaatctggctaagcactttaacagttcgagcaccaatacatgwaaaatagggagtgtgcaactgaccttacagtggttgccaggatcctcatttgaggtcttatcaggacagattggctcaatatattattttagatataaagtgctgcctcatactagaaactgtgcattatgactttcttctaagagtatagaaaaataaatctcagcaaaaataatatttaaatgaaattttacagggaaataatgcaattaatgtgctgtgtgtgtttttggtctaaaagttgaataagagatttctggtattttaagtgtgtcattttagccacatattacatagtctggacctggatgtacaaaataaaggcaaatgtctatgcagttacataatttaaattatatggtataaaattccatta

SEQ ID NO: 159311 - DNA, 561 bp, Homo sapiens
attataatatgtaatttttgaattgttttatgacttaaaaggagtgttatgcaaagctgcaagcataataggccctctaaggatggctgtttgttatggttatacttggattaacgtgtattaatttcctgagaatgaataacaatctggctaagcactttaacagttcgagcaccaatacatgtaaaatarggagtgtgcaactgaccttacagtggttgccaggatcctcatttgaggtcttatcaggacagattggctcaatatattattttagatataaagtgctgcctcatactagaaactgtgcattatgactttcttctaagagtatagaaaaataaatctcagcaaaaataatatttaaatgaaattttacagggaaataatgcaattaatgtgctgtgtgtgtttttggtctaaaagttgaataagagatttctggtattttaagtgtgtcattttagccacatattacatagtctggacctggatgtacaaaataaaggcaaatgtctatgcagttacataatttaaattatatggtataaaattccatta

SEQ ID NO: 159312 - DNA, 546 bp, Homo sapiens
gtgttttgctttacttttatggagcatataaataaagatttcctgccaactttgctatccaagttggtgatgttatttttgatcatggttttcaatgtcaatcaaattcataatgaagtctaaaaataatgaaaaacttatgtaaagttaatgtacttttctttcaactttgccacaggcttatgagagctttctgcacttaggaaagctttcaacacttcccgggtttacaagtatctagtagtcccttcttatctgcagtttcacttctggtggtgtcagttacctgtggtcaaccgagcagagattttaagagaaagagactacattcacatacttctattacagtatgttgttataattgttgttaatttttactgtgcctaatgcataaattaaactttgtcatacatacatctttacaggaaaaatgatagtttatgtagggtttggtactatcagtgttttcaggcatccactkgggatcacggaatgtatctcctctaccaaaaaggaggcactactgtaagttaataaaaacagtag

SEQ ID NO: 159313 - DNA, 484 bp, Homo sapiens
gaaaaaaatacatgttatattttcagtacagtgcctggtgcatatcaaatgctcaagaaatggtggttactactgtttttattaaattacagtagtgcctcttgttggtggaggagatacattccatgatccccagtggatgcccgaaaccactgatagtaccaaaccctacataagtgtccattgcyagcaagatcgcacttaattacctgagtctcctacaagccttgcaaacttaatactccatctataactggttattttttctccagaaacctagatatgcaccaggcactggtgctgaaaacataacatattttttttaactccttaatcctcacttagaaaaaataaaaacttggatatttacagttttaaatgatgtcagtatctctttaacatccctcctatccaaccagtcatcaaatccaatctactcactatcttaaagtcagctttggtctatctcgctatggccttggtc

SEQ ID NO: 159314 - DNA, 596 bp, Homo sapiens
agtgagcacttactatgtgccaagcacagttctagttctttatacatagttattaaataggacacagaccaagcaattacaatatacagatcyaaagtataatggatcaatcaagatctagaatttatttctcaatccggtgccttagaccactcagccatgctttcttaggaggactgggcgcggaaggataaacttctatgtaaaatcctccagaaacccaggctccttctatgttgtcatccctcattctgtctgatttgatcttcatctgggtaatgttggctctccaaaccatgcccacatatcagactataggatgagcagcttcgtttaaagaatgtcacctccaagaagtatccatcagttatgctcacattctgtcatccagaatttagccgcatgaatggcctttcctgcggtgaagaaaggagaatcaagtgtctgctgagtacccatggtctctattaaaatgccaaggacagagccgagcactgtggcatgcgcctgttgtctcagctactcagtagattaagatgggaggatctcttgagcccaggaatttgagtccagcttgggcaacatagcaagatccc

SEQ ID NO: 159315 - DNA, 596 bp, Homo sapiens
agtgagcacttactatgtgccaagcacagttctagttctttatacatagttattaaataggacacagaccaagcaattacaatatacagatctaaagtataatggatcaatcaagatctagaatttatttctcaatccrgtgccttagaccactcagccatgctttcttaggaggactgggcgcggaaggataaacttctatgtaaaatcctccagaaacccaggctccttctatgttgtcatccctcattctgtctgatttgatcttcatctgggtaatgttggctctccaaaccatgcccacatatcagactataggatgagcagcttcgtttaaagaatgtcacctccaagaagtatccatcagttatgctcacattctgtcatccagaatttagccgcatgaatggcctttcctgcggtgaagaaaggagaatcaagtgtctgctgagtacccatggtctctattaaaatgccaaggacagagccgagcactgtggcatgcgcctgttgtctcagctactcagtagattaagatgggaggatctcttgagcccaggaatttgagtccagcttgggcaacatagcaagatccc

SEQ ID NO: 159316 - DNA, 585 bp, Homo sapiens
tggctgaagctaaagctctcatctaaagaaaatgaatttctgctttctgccagagtacctaggagcacaattctcagcctagcatctttgtgcctactaaagtaagattctggctgtaaagataagaaagattctacatctgcaggtatgaatactacatcatttagtattcattaagagaagataagataaaggggtattgtatcttccttcttgatttgtaaggattcaggagatgtggttatatagttagttgatgggttgatttagaaatttctttatttgttcatttatttattggttcattcattcattcacttatacaagtggaattacttaagagtgtctgttcttttctgggcacagttacatactggatgtgttaaggttacagaagccagagtcctagatttgagccattctagggcagagaaggaagggaagggactatgccatgcactctaccaagatttttacatatattcttcccaacactccccacaaccctgtaggattgtcatcattacttccagttccragagtagaaaatggagactctgagatgaggtacctgttcaatgtgac

SEQ ID NO: 159317 - DNA, 567 bp, Homo sapiens
ttctgggcacacaaccaggattcaagtgttacctgcaaggatacgggaaaggtcagaaaacattgggacctagaagtcagcttgctgaccagataattgttttcactatctactttaaatataagatctacagaaatggaattcatcccatagtttgataatctgctttcagtaacaatgttaaaggaaagggcatgatttttaactataaaaacttatataatgtgaataaaatcttcataacgtargcagtacctcaaagtaataacgtatgataagcactttataactattaactcatttaatacttaaaacacacaatgacatgtctcactgttgttctgttttattgttgagagaattgagacagagaaaggttatttgacttgcataggttccctcaggtggcttacgtcgagccaggatttggatccaaggtaatctgtagcattgggctgcagtgcatctggagggttaagtttagtaatccataaatcgtgtatttccatcacttattttactaagagcaaatcatgttcacccttatcctttaaagagaagtgcagc

SEQ ID NO: 159318 - DNA, 568 bp, Homo sapiens
gataatctgctttcagtaacaatgttaaaggaaagggcatgatttttaactataaaaacttatataatgtgaataaaatcttcataacgtaagcagtacctcaaagtaataacgtatgataagcactttataactattaactcatttaatacttaaaacacacaatgacatgtctcactgttgttctgttttattgttgagagaattgagacagagaaaggttatttgacttgcataggttccctcaggtggcttacgtcgagccaggatttggatccaaggtaatctgtagcattgggctgcagtgcatctggagggttaagtttagtaatccataaatcgtgtatttccatcacttattttactaagagcaaatcatgttcacccttatcctttaaagagaagtgcagcacaggaagtcatttccattgattatctcatttagtcaccacaagcattttttgaggtagttactgttaygctcattttacagttaactgaggcttattgagattgagtaacaagtcttaggtctctcaactaaaaagtatcatatgtggcattcaaa

SEQ ID NO: 159319 - DNA, 531 bp, Homo sapiens
cttttataaaagtaacatatttttatgcctaaacaacagcgttgagacattttgatgaagcctaaagttttagttaatattttgcattgtgtagagatatttactttagaatgtggcctagaattaggctaaacactttgaaaatgtgctctggttttgaaaatggttgacaatttcctatattacattctaaaactataaacatcctaacactataaatgctttcttaatgaaactataatatatatttaatattattacctatattgtgttactcattactaaaaatgttcagatcacataaatgactaaggccaattaaaaagtcatactgtagaggacagaaatgcccatataggttttagttagttgaaaactccatyacttataagcatagattaggtttttctttttcatttcttcagcaggcacattttagacaaactgacagcaaatccattatgtaatggccactaaaaaagctttcatcaagagtgtgcatgtttagtgtctctgtgtgggagaaactgg

SEQ ID NO: 159320 - DNA, 531 bp, Homo sapiens
cttttataaaagtaacatatttttatgcctaaacaacagcgttgagacattttgatgaagcctaaagttttagttaatattttgcattgtgtagagatatttactttagaatgtggcctagaattaggctaaacactttgaaaatgtgctctggttttgaaaatggttgacaatttcctatattacattctaaaactataaacatcctaacactataaatgctttcttaatgaaactataatatatatttaatattattacctatattgtgttactcattactaaaaatgttcagatcacataaatgactaaggccaattaaaaagtcatactgtagaggacagaaatgcccatataggttttagttagttgaaaactccatcacttataagcatagattaggtttttctttttcatttcttcagcaggcacattttagacaaactgacagcaaatccattatgtaatggccactamaaaagctttcatcaagagtgtgcatgtttagtgtctctgtgtgggagaaactgg

SEQ ID NO: 159321 - DNA, 479 bp, Homo sapiens
gaattcagcttataccctaggtcttgtatgggactgttaccgataatggataacattttaaggcagtgtttttctgcatttatcaactgttgatttatttttctactgggcctagttctctggactgtgcaggagggaaaatcaccttttatataaacataccyccttagcaaataaaatacagcctttcagcaggtatatgaataagataggggagaagaaaaatgattctgaaacctctttaaaatctatttctatattaactcttttatacattagatgttccttctttgcaactcttaaactcatgtgataaaaattttcttatctctaacttaggtgaatttacaattttctttcaaataagtgttttccatgaaagttacactggagtattggctggtcataaagaagaaatgttttatatctttcctttgatatgctgtgcttagccattttttaaaaaatgattctgctag

SEQ ID NO: 159322 - DNA, 588 bp, Homo sapiens
ctgcatttatcaactgttgatttatttttctactgggcctagttctctggactgtgcaggagggaaaatcaccttttatataaacatacctccttagcaaataaaatacagccyttcagcaggtatatgaataagataggggagaagaaaaatgattctgaaacctctttaaaatctatttctatattaactcttttatacattagatgttccttctttgcaactcttaaactcatgtgataaaaattttcttatctctaacttaggtgaatttacaattttctttcaaataagtgttttccatgaaagttacactggagtattggctggtcataaagaagaaatgttttatatctttcctttgatatgctgtgcttagccattttttaaaaaatgattctgctaggctcctctgaattctgattgtcctggatggtgctgttgcctaaacagaacggggctgtggtattatctggtattaccaaagtcaaagcaacctgaggatcaaatgtagacagaaatgaggatagccaaagaacattagccattatccaattgaaaagcaggtttggggccaaagtcagaaac

SEQ ID NO: 159323 - DNA, 355 bp, Homo sapiens
ttttttagtttaaaaacaagtaaacaactaaacaagatattgaaaggaaatatggaggaagatagaatgaagggtggcagaataagagaaagggaatgaggaaattaaacaaacatttattgggtgccaacrtataccaaacactttgccagattctttatatacacaatgctacttaatccataccgcgaccttgtcttagggttgtcattgggttcactttatcagtggacaaatagagagtaagaaagattctaatcagaggtccaagtcatgcaggcactgcccagcagagctgaggcaagactctggacctctaatgctctgtaccaccaggctgataactgcagtgaaa

SEQ ID NO: 159324 - DNA, 355 bp, Homo sapiens
ttttttagtttaaaaacaagtaaacaactaaacaagatattgaaaggaaatatggaggaagatagaatgaagggtggcagaataagagaaagggaatgaggaaattaaacaaacatttattgggtgccaacgtataccaaacactttgccagattctttatatacacaatgctrcttaatccataccgcgaccttgtcttagggttgtcattgggttcactttatcagtggacaaatagagagtaagaaagattctaatcagaggtccaagtcatgcaggcactgcccagcagagctgaggcaagactctggacctctaatgctctgtaccaccaggctgataactgcagtgaaa

SEQ ID NO: 159325 - DNA, 634 bp, Homo sapiens
aaaagcacagagtgtatgtgagggatgggcaaggcatagaaaagtgattgcaattataaatagagtggtcaaaaaatgcatcttgaagagacatttgagcaaataacaaaaagaggtgaaagagctagccttgcagatatttagatgaaaattgtttctggcagagggattgggaagtacagagatccagaagtggatgccatctggcttggaagagtcatggaggccagtgtggatgcaacagagtgagtgtgtggagaaaggtaggagatgagaccagaaaggccattgccagggtggggaatcaggaactctaccctaggtttggatggatggatagatggatggatggatagatagatagatagatagatagatagatagatagatagatagatagattctttatcattctttagccattctttatggcaatagatgatagatagataratagatacatacatacatacatacatacatacatacatacatacatacatacatacatacatagattcttcatctcaagtttcacaatttagaaacttatgggtctcttagttcctctgacgatctttgttgatgcggaggctggttagaatattttacagaaacatattcttatttcaga

SEQ ID NO: 159326 - DNA, 546 bp, Homo sapiens
cttaataaaatagattttctaagcttcgtgttctttcaccctttccaaccacatcactcttaaattttagtcttcactaatttacagattatgtgcaaccagataccattattaatgagcttaaaggaaaattaattagctgcctaatgacttccttcctcagaactgaaaatgatcctggatttcctcagatgctctgtgattgctgctctctgcctgtaatcagtgttttcaaaaagattgacttggcattttgctgtccatccmtgaattccccaacccgctaaagaacttgcggtcttccatgactctgatgacctgttagcaaactgttactttgtggtgcagaatattgacaggcatgttgattatgccatttgttttcacttttgctttttgtttcataactggggaaattcacagaacgcttttatgcttgttcttccagtttctgggaatctcctggatctttttcttgcggttctgtgttctttctgggctattcttcctcccctgtctcccattttccgcttcttaatctcattt

SEQ ID NO: 159327 - DNA, 592 bp, Homo sapiens
cagcatcctgcagcaggtaaagcaaaatagaaagctgaacactcttttactgttcattttcctctttttccatttaccagttatttaataattgcctactctatatgagacccttcattaggtccagaagataacacatgaataataagaaatattctctgtgctcaaggtttttactttctakagatttgagacaagcccagaaagcttataagctctaaactttatattgcatatccagcaggtgttttttggtttttgttttttgttttttttttgagacggagtctcgctctgtcgcccaggccgatcttggctcactgcaagctccgcctcctgggttcatgccattctcctgcctcagccttgagagttttttttttatatatattcttttctacataatggaatctttatacacaaataaatcttgaaaaccatagcttaactcttaagtttatttgtcttcattcttgaagacatagaaatcttcatcccactcttgaacctgtctcacatctcttcctaaaggatcctgtactatccaagtgtgtgatgtactactctctctaactagcatgcccttccttcc

SEQ ID NO: 159328 - DNA, 592 bp, Homo sapiens
cagcatcctgcagcaggtaaagcaaaatagaaagctgaacactcttttactgttcattttcctctttttccatttaccagttatttaataattgcctactctatatgagacccttcattaggtccagaagataacacatgaataataagaaatattctctgtgctcaaggtttttactttctatagatttgagayaagcccagaaagcttataagctctaaactttatattgcatatccagcaggtgttttttggtttttgttttttgttttttttttgagacggagtctcgctctgtcgcccaggccgatcttggctcactgcaagctccgcctcctgggttcatgccattctcctgcctcagccttgagagttttttttttatatatattcttttctacataatggaatctttatacacaaataaatcttgaaaaccatagcttaactcttaagtttatttgtcttcattcttgaagacatagaaatcttcatcccactcttgaacctgtctcacatctcttcctaaaggatcctgtactatccaagtgtgtgatgtactactctctctaactagcatgcccttccttcc

SEQ ID NO: 159329 - DNA, 444 bp, Homo sapiens
aaatgggctcctggagtcctcaggttcagaccttggctcctgagcagcacttttgaacccactcggggccacagggaagcygactgtcctgaaaggagagacccaggcctagcagcattcatgacaagctgattaaagagcccttgggccttggatggacatcggcagtagccaaggagtatttgccatgggcctggagcagcagtggccatgaggagagactcctgcttgaagaagggagaagaaaggataggaagaactttgtcttgcagcttgggtgccagctcagctacattagaatagaccatcacgtaaattccttagtttcccgagtacaggccctggctccgagaaaacatttctgtctctaacctgggccagcagggatctcacttccctgaaaggaaggacataagcctgcctggatttgccacctgctgactg

SEQ ID NO: 159330 - DNA, 551 bp, Homo sapiens
agactggataaagaaaatgtgatacatatacaccayagaatactgtgcagccataaaaatgaatgagatcatgtcctttgcagggacatagaaggagctagaggccattattcttagcaaactaacacagtaacagaaaattaaatagtgcatgttctcacttataagtggcagctaaatgatgagaacacatggacacacagaggggaacaacagacaccgaggcctatcagaggctggaaggtaggaggagggagaggatcagggaaagtaattaatgggtactaggcttaatacctgggtgatgaaataatctgtacaacaaatccccacgatacaagtttacctatgtaacaaacctgcacatgtgcccctgaacttaaaataaacgtttttttaaaagcaaacaacatgaatctctttgtatgtcttcatcagagctcttgagtgaccgagtacattgtcaatgaggagtagtattttataaaaatcgttttttgttttcctgagcagatttcaacaatgagtttaaaatattcagcaagccatac

SEQ ID NO: 159331 - DNA, 551 bp, Homo sapiens
agactggataaagaaaatgtgatacatatacaccatagaatactgtgcagccataaaaatgaatgagatcatgtcctttgcagggacatagaaggagctagaggccattattcttagcaaactaacacagtaacagaaaattaaatagtgcatgttctcacttataagtggcagctaaatgatgagaacacatggacacacagaggggaacaacagacaccgaggcctatcagaggctggaaggtaggaggagggagaggatcagggaaagtaattaatgggtactaggcttaatacctgggtgatgaaataatctgtacaacaaatccccacgatacaagtttacctatgtaacaaacctgcacatgtgcccctgaacttaaaatmaacgtttttttaaaagcaaacaacatgaatctctttgtatgtcttcatcagagctcttgagtgaccgagtacattgtcaatgaggagtagtattttataaaaatcgttttttgttttcctgagcagatttcaacaatgagtttaaaatattcagcaagccatac

SEQ ID NO: 159332 - DNA, 420 bp, Homo sapiens
tcgcagaataaaatataatggtttatttatagtggtttatttagatttggcaatgctttttttggatatgacaccaaaagtgtgaacaaaataaaaacaatagataaagtggacatcaataaaattgaaaaatgtttgtacttcaaaggaagctagaaataaagtgaaaagagaacccacagaatgggtaaaatattttaaaatcatatatctaataagagacttgtaattataatacacaaagaaaatttacaacttactaataaaaagacaaataacccaaataataacaaaggatctgaatagacatttattcaaagaatatgtaawaatgaccaataaacacatgaacagacccttgacagcattagtaaacagaaaaatgcaaatgaaagccacaatgagatatcattttacacc

SEQ ID NO: 159333 - DNA, 562 bp, Homo sapiens
gcagtacttgttatggtaaattatgaatatatgtaattaggcaatacatggttgtagtattttatctccacaaagagcactaatttctctggacaaaaatgaggaatgatgcttttctgccatctcaagacatgctcatgcatatatattggttgaataagaagcttattactaaatgtttcacaaatattgattaaatgttgattatgttcaaggcactattaattttgtatggaactgtaaacgcatatatcaggataactattcatgtacatattatttacaaatgggtgtgttgttgtcgactattttagtaagaaatgcttgaaacagctttaaatgaaacaaatttataagccatttattctttatttcaacaaatatctcttgarcgctcacaacgtgatagacatatttttcagtggtgaagattcggcattgaacaaagttcctgacctcttgtagctagtgttctaatggcagaaagtagagaacaaacaagtaaatatgtatcaagtgatgataaacagggtgaagtacgggaaaaacatggataaacaaa

SEQ ID NO: 159334 - DNA, 505 bp, Homo sapiens
ctatatattctaatagtcagtgtaaacagtttgttccaataagatcaggatatgatgactggcctaaaatatcctaatagaagagcctatratactcatgcattaaaacatgcattacaataagacaactctgtacagtgtcctcatccttttagcagttgtgtttgtatgaatacatattattcctcattaaaaaaacagtggcatagtaacttcattttctttaacactgtcagtcctctctttttcccttctgtgggaggctctggctctttttttttttttgcatgtgcctttatttctctttcccctttgtcattaccattggtcacttggacttggcaggagtttgtttctaagcatagctgctgatatgagatacagttactaatttgaagcactaccttatccaaactgaaaactctagtttctcttttgtgtcattgaaaggttatatgaaaatcactccccttcaacacaaaaaaagtgaaaatttaaaattagc

SEQ ID NO: 159335 - DNA, 599 bp, Homo sapiens
atggaaaaatggagaaagaaaaatgggcccaattttaaagagtttgagcaagccaaagaataatgattcattgacaaatccttgtattctgaatgcggtaagatcattagtcatttttcgctttcttctgagttgggacatactctttgtgtaattttttaatgtggtctcaaaataattgtttttttaaaaaatcaggtaattaattagtttttgaaccagcaattgttttggtatttggaccccttttctcaatcactgaaaaaaacaaacaaacaacaacaacaacaaaaagaagaatagatcacttgagagaaaagaactgccaaatttgatagtagttacagaaaacaackaaatgagcacccttgtagactattagtgtaaacacacacaaaaaaatttcttctaaaatctatgtgcatgtctatctttctaaaaaaaacttcattttttccctgtttacaccttgcaggacacaaaaactagtatttttgcatttcccttttttcactgtaacttccgactaaagtcattatatagaagaaaatgagtccaaagaggaagttaatgccaaaagccatagaaaaaccatcact

SEQ ID NO: 159336 - DNA, 560 bp, Homo sapiens
atgatatggtttggctgtgtctccccccaaatcttatcttgaattcccaagtgttgtgggagagaccggcaagaggtaattgaatcctgcagacgggtccctcccatgctgttcatgtgatagtgaataagtctcaagagacctgattgttttataaatgagagttcccatgcacatgctctyttgcctgctgccatgtaagaagtccctttgctcttccttcgtcttccaccatgattgcgaggcctcccccaccatgtggaattgtgagtccattaaacctctttcctttataaattacccagtctcaagtatgtctttattagcagcatgagatcagactaatacacactcccaagcttggccattgttttctaagctcccacaattgtacagagtggctgggtgagtagaagcttccagaacctggcatttacggtaacaaaaaacatacaaaaactctcttcaaaaaacacttaatttagacttgtagagaaagcaggacgttaatctaaattatttcgcttctaaggtagtttttattttaggagcattattgc

SEQ ID NO: 159337 - DNA, 560 bp, Homo sapiens
atgatatggtttggctgtgtctccccccaaatcttatcttgaattcccaagtgttgtgggagagaccggcaagaggtaattgaatcctgcagacgggtccctcccatgctgttcatgtgatagtgaataagtctcaagagacctgattgttttataaatgagagttcccatgcacatgctcttttgcctgctgccatgtaagaagtccctttgctcttccttcgtcttccaccatgattgcgaggcctcccccaccatgtggaattgtgagtccattaaacctctttcctttataaattacccagtctcaagtatgtctttattagcagcatgagatcagactaatacacactcccaagcttggccatygttttctaagctcccacaattgtacagagtggctgggtgagtagaagcttccagaacctggcatttacggtaacaaaaaacatacaaaaactctcttcaaaaaacacttaatttagacttgtagagaaagcaggacgttaatctaaattatttcgcttctaaggtagtttttattttaggagcattattgc

SEQ ID NO: 159338 - DNA, 588 bp, Homo sapiens
tgcagccaccaatttagctgaaggaggtattagcatagcaacaaactttcaaggtcaaatctgagtattttcttcccttgatgtagacaggcttattatggatttttcccttttcttgccttttttcacaaacatttttctacttttaactggtaatttttgatgaagatatgatgctctgctgttactaactttggtatatagaaaaacagaaagtttgggttttctaagatctttgtatttttttatattaaaatttccatacattcactagcgggtttattgggccctacacagcagataagaggagtatgacattactctacacagaaatgccctctacagtgatttcctcttctrgcctctgccccaggcctatcgctgccagaatgttccacttctgcaactgcccactcccactctccatttgtttgactgactccacctgcttattaactccctggttcatgtatcttcttatgtgagaggcacatgaatctcaggggtgtggggcacccttactttttggcttccccattttcttttgttcctaggtcccagatcatctatactcatttatatgctgag

SEQ ID NO: 159339 - DNA, 662 bp, Homo sapiens
cattatggagctctagaagccccatgttatgccgtatgcatgctggagaaccagaaaactgatggtataattcattctgagttggaaggccagagaaccaggaggtcagatgtttgaggggaggagaagatagatgccccagttcaagaagagagagcaaattcacctttcctctgcctttttgttctgttaagaccctcaatttatatrttttatatatatatataaattgcatcatgttcacccacattggtgagggtggatcttctttacttagtctgctcaaccaaatgctaacctcttctggaaacaccctcacagataagcctccatcctccaaaataatgctttgccagctatctgggcattccataacacagtcaagttgacacataaaattaaccaccagggtagccctagcaactaacacattttatattggttgttgcaaagttacatgaagcacatctaacaaaagtagagaaactcttatcatgacttttatatgttaatcttatttctgacttcatcaatcttttccttttcttctttgctctttacctatttttaaaaatttattctttaaaatttctcatgctgacatccttgttgggtaccatatggtacttggcatttttccttgggctgcctactacctctgt

SEQ ID NO: 159340 - DNA, 587 bp, Homo sapiens
ccagaggtctgagacccaggcgaggacaccagccaggtaggatgctttggagcacctgaacactgcataataaaggcttggaccagagtgttcacaatgagaaggaagaaactgtgtcacttttgcttaatgaaaatttcttctatctatcatggtcacsagaccaaatgtgaattttggttcagatttgactcagaacgtgagaaggaataacccatttgtctacaaaggcagactgccaattccctagttacccagactcaacaccattgttcaagaagctgtcacaaattagatatggggctaagtttccaggtaacctaagggacaattaaaaaagttattttggaatcactgggctatacatctttgaacaaggatatcactggagttaatcacagagataatataacacttaaatctgagtttgaaagtaaaaatgaccatatccctagccagatgtctgtcttaaaaacaaacaaataaagtaagtgtatgttctgatttggcagagttgacacagacagttcctgccattggtaccatggggtatttcaaaagcagcaatacctcaagtaagattctaa

SEQ ID NO: 159341 - DNA, 591 bp, Homo sapiens
cagaaaactttccaaatctggagagaaaaatgaacatccagatttttaaagcccaaagaatgccaaatagattaaatataaagatatctccactgagacatattatrataatttctcaaaagttaaagatggagagagaattttgaaaacagcaatagaaaagcaactcatcatatacaaggaaacctcataaaactatctgtagatttcttagcagaaaccatgcaggccaggagagaacggaatgatatttagccaaaatgctaaaagaaaaaactgccaagaacattataccctatacgctgtcctttagaaatgaaggagagataaggatgttcccagacaaacaaaagctgcaggagtatgtcaccattaggcctgacttacaagaagtgatgaagggagtttttcaattagaaatgaaataatattaattaacaacataaaacatatgaatgtataaaattcactataaaggtaagaatatcatcaaattcagaatactgttaaggaatactttaatggtggtgcataaatcaccttttcctctagcataaaaattaaaagccaaaagtattaaaaataaccaca

SEQ ID NO: 159342 - DNA, 591 bp, Homo sapiens
cagaaaactttccaaatctggagagaaaaatgaacatccagatttttaaagcccaaagaatgccaaatagattaaatataaagatatctccactgagacatattataataatttctcaaaagttaaagatggagagagaattttgaaaacagcaatagaaaagcaactcatcatatacaaggaaacctcataaaactatctgtagatttcttagcagaaaccatgcaggccaggagagaayggaatgatatttagccaaaatgctaaaagaaaaaactgccaagaacattataccctatacgctgtcctttagaaatgaaggagagataaggatgttcccagacaaacaaaagctgcaggagtatgtcaccattaggcctgacttacaagaagtgatgaagggagtttttcaattagaaatgaaataatattaattaacaacataaaacatatgaatgtataaaattcactataaaggtaagaatatcatcaaattcagaatactgttaaggaatactttaatggtggtgcataaatcaccttttcctctagcataaaaattaaaagccaaaagtattaaaaataaccaca

SEQ ID NO: 159343 - DNA, 591 bp, Homo sapiens
cagaaaactttccaaatctggagagaaaaatgaacatccagatttttaaagcccaaagaatgccaaatagattaaatataaagatatctccactgagacatattataataatttctcaaaagttaaagatggagagagaattttgaaaacagcaatagaaaagcaactcatcatatacaaggaaacctcataaaactatctgtagatttcttagcagaaaccatgcaggccaggagagaacggaatgatatttagccaaaatgctaaaagaaaaaactgccaagaacattataccctatacgctgtcctttagaaatgaaggagagataaggatgttcccagacaaacaaaagctgcaggagtatgtcaccattaggcctgacttacaagaagtgatgaagggagtttttcaattagaaatgaaataatattaattaacaacataaaacatatgaatgtataaaattcactataaaggtaagaatatcatcaaattcagaatactgttaaggaatactktaatggtggtgcataaatcaccttttcctctagcataaaaattaaaagccaaaagtattaaaaataaccaca

SEQ ID NO: 159344 - DNA, 587 bp, Homo sapiens
tgcttggcaaaaattcaagaccttgacaatatactctgcaacagagaatgtggggagtcaggcattatcttcattgtgggggagatacagaaaggtacaagtgtgatgggaagaaatttggcagtatctgacaacactgtttatgcacttactctcacgaaacccascaatcccacttctagaaatttaacaggaaaactgtacttccaatggtacaaatatatatatgcataaaattattgtagctttatctataactgcaaaatactggaaactacctaaatgtgcaagcatagactggtgaaataaactacgatgcacccacacaatagaatactatgtcgctctaaaaaagaaagagctatctctatgaatatggagtggtttacacagtatacattccaataaagagaagaaaggtggaaaagtactttacctttaaatgtaaaaaaaaaagatgggaaaataacataaatttgcttttttttccaaaaaaaaaaaaatcacaagaagaataaaccagaaaacaatgaaattgattatcacaagtggttggcagggaaaattgagtaaaagggatggggaag

SEQ ID NO: 159345 - DNA, 339 bp, Homo sapiens
gaattcttccctcctgtgtcagtttcaggtgcttaagatcacaccccacctccctccttctcacagggcccctgtaatcttcaagtagccagtattctcattaaagccatctaagacttttatrttgtaaactctgtccgatctcagtcaatcaaccagcctggatctaaaatcccataaatattctcccctgactattctgtgctgaagaactactaagtttgtttagatagcactctcttttacggcagttagtctaataattttccttgatccaaaagattttttggtgttcttttagaccaatgatggtctactctcctagtttctgtctgtctt

SEQ ID NO: 159346 - DNA, 277 bp, Homo sapiens
tgctcctggaccacacacatggtctgggggaagccagctgccatcccaggccctatagatggtctcatgtagtgagaaatgaaatcctcctagtaactccataggagtgagctgggaagagatgctctgccccttcagatgactgaagccctggccagcacctcaacaacagcctcctgagagaccctgagtcagatcctctgagttaagccacgctcagattcctsatcctcagaaactgcataagttaatgaatgtttatgttttaagctgctaa

SEQ ID NO: 159347 - DNA, 422 bp, Homo sapiens
aatttattctaatactgtgacagttttgtggccatttgcagacatacgcaaagcactgaaaaaagtgattttcacccaatgcgcatattccctgctgaggttgaacaagrcagtgttttggcttcttgtttcatcgttcacactgtaaacaagtgtccttttggttgtctagtgccatgttttcccatatttatgcttgtttgtaattttgctgtttactctggcccccaaatgtagtgtttaagtgccctctagcattcctacgtgcaaaaaagctgtgatgtgctttaaacaaatctttaaacataaacacacataaaaccaagttctgtattgatcagttagtgaaactgtggtcaggggctgctaggaacttaagcttgtatttgtcctaggggccagggttcagtatttatgaattc

SEQ ID NO: 159348 - DNA, 422 bp, Homo sapiens
aatttattctaatactgtgacagttttgtggccatttgcagacatacgcaaagcactgaaaaaagtgattttcacccaatgcgcatattccctgctgaggttgaacaaggcagtgttttggcttcttgtttcatckttcacactgtaaacaagtgtccttttggttgtctagtgccatgttttcccatatttatgcttgtttgtaattttgctgtttactctggcccccaaatgtagtgtttaagtgccctctagcattcctacgtgcaaaaaagctgtgatgtgctttaaacaaatctttaaacataaacacacataaaaccaagttctgtattgatcagttagtgaaactgtggtcaggggctgctaggaacttaagcttgtatttgtcctaggggccagggttcagtatttatgaattc

SEQ ID NO: 159349 - DNA, 380 bp, Homo sapiens
ggattaatatccagaactcaaacaactctatagaaacacacacacaaaaatcaacaaataatccaattaaaaatgagcaaaagatctaaatagacatttctcaaagaagacatttaaaatggccaacaggtatatgaaaaggtgcccaatattgttaatcatcaaggaaatgaaaattaaaaccacaatgagatatcccctcaccgaagttagaayggttattatccataaggcaaaagtaataaatggggcaagaatgtggagaaagaagaactcttatacatggttggtgagaatgtaaattagtacagccattctgtacaacaatatagaggtttctcaaaaaattaaacttagagctaccatatgatcaaataatc

SEQ ID NO: 159350 - DNA, 380 bp, Homo sapiens
ggattaatatccagaactcaaacaactctatagaaacacacacacaaaaatcaacaaataatccaattaaaaatgagcaaaagatctaaatagacatttctcaaagaagacatttaaaatggccaacaggtatatgaaaaggtgcccaatattgttaatcatcaaggaaatgaaaattaaaaccacaatgagatatcccctcaccgaagttagaatrgttattatccataaggcaaaagtaataaatggggcaagaatgtggagaaagaagaactcttatacatggttggtgagaatgtaaattagtacagccattctgtacaacaatatagaggtttctcaaaaaattaaacttagagctaccatatgatcaaataatc

SEQ ID NO: 159351 - DNA, 579 bp, Homo sapiens
attaacttacttactttctcttttaattggcctttatatgttttaaattttttcaatttaaaagtttgaagacttttttttttttttgagacaggatctagctctgttttccagactggagtgcagtgatgctatcatagccttgacctcccaagctcaaacgatcctcccactcaagcctcccgagtaggtgagactacaggtgcaccccaccatgcacaggtaaattttgtatttttctgttgatacagggtctctctatgttgcccaggctggtctcaaactcttgggctcaagcgatccatgggcattggtcttccaaagtgctaggattacaggcattagtcactgtgtctggccctaaaccacttttaattgtgtttgtttctctcaacaacttaacacatcctcctgctaagctgaaactgcagattttgactagagtcttgagattgccactatctgatggccccaygtgagcaagtccttttattttggggggtttcagcttcttcatcagcaatgtcagtgtcagtctaaatgagctctaagatgctggcagttctagaattccatagt

SEQ ID NO: 159352 - DNA, 574 bp, Homo sapiens
ttattggcaatttacattgaattgatgctgaaataatttttttgacattttgtgttaaaatacattactaacattagtttcattggcttcagttaactttttaatgtagctawtagaaaattctattatatatatatacacatagtgtacatagacacattgagggattacaggcatgtgccatcacacctagcctattagaaaattccaaattgagtatatgtcttgcttatatttccacaggatgttgttgcttttgagtattttgagtggacatgtgtataacttgtaagctttgtgatgaacggtagattaaaaattactctaatccatgacaacgcttgagtctttgagactttcttcaattcaaaaatttaccacaatgtagtgaagcagtgatcgcattaaagtttggtttggattggttagtgtagaagttgagtgtatggagtttgggaggactatttttaatttggtaaaagatttttcctataatctgcagctaaccatagaaattaacttaacaaatgtctgaagaaaaaataaaaaagtaaaatttaaaaaatcagacttt

SEQ ID NO: 159353 - DNA, 574 bp, Homo sapiens
ttattggcaatttacattgaattgatgctgaaataatttttttgacattttgtgttaaaatacattactaacattagtttcattggcttcagttaactttttaatgtagctattagaaaattctattatatatatatacacatagtgtacatagacacattgagggattacaggcatgtgccatcacacctagcctattagaaaattccaaattgagtatatgtcttgcttatatttccacaggatgttgttgcttttgagtattttgagtggacatgtgtataacttgtaagctttgtgatgaacggtagattaaaaattactctaatccatgacaacgctwgagtctttgagactttcttcaattcaaaaatttaccacaatgtagtgaagcagtgatcgcattaaagtttggtttggattggttagtgtagaagttgagtgtatggagtttgggaggactatttttaatttggtaaaagatttttcctataatctgcagctaaccatagaaattaacttaacaaatgtctgaagaaaaaataaaaaagtaaaatttaaaaaatcagacttt

SEQ ID NO: 159354 - DNA, 574 bp, Homo sapiens
ttattggcaatttacattgaattgatgctgaaataatttttttgacattttgtgttaaaatacattactaacattagtttcattggcttcagttaactttttaatgtagctattagaaaattctattatatatatatacacatagtgtacatagacacattgagggattacaggcatgtgccatcacacctagcctattagaaaattccaaattgagtatatgtcttgcttatatttccacaggatgttgttgcttttgagtattttgagtggacatgtgtataacttgtaagctttgtgatgaacggtagattaaaaattactctaatccatgacaacgcttgagtctttgagactttcttcaattcaaaaatttaccasaatgtagtgaagcagtgatcgcattaaagtttggtttggattggttagtgtagaagttgagtgtatggagtttgggaggactatttttaatttggtaaaagatttttcctataatctgcagctaaccatagaaattaacttaacaaatgtctgaagaaaaaataaaaaagtaaaatttaaaaaatcagacttt

SEQ ID NO: 159355 - DNA, 560 bp, Homo sapiens
cagacaggaagattaagtgatatccgagggagtctggggcttaatgaggtaagaactctgtacatcatcccaagttctttcaacattgagaagggacaagaaggggcatgcccttattgtatttatagaaattgaggtcaaaaattgcttacaacatttcctcaaagaaataaatgtagttagacctttatgcttcaggattttgtgcaaaggtacacactccccactccaatagccttaaaatttcagttcataggtgatactcaggggagaggagacaatttttttattcttctacccagcagtagaacaatacaattaccttttatgcacaaattccaataaaagcatcttaagataccatgttatacaaggcatgacttgttcccagaagcagctggaagggaagaaattcaaataaatttaaaaagaaatttagaaataaaagaacacacrtacacataaatacacacggacagaaaaggtgaaagagacatcagcttaagaacaaaacacataaaacacagaggcagcctcttcacaggagtttggaagtggaa

SEQ ID NO: 159356 - DNA, 586 bp, Homo sapiens
gcagcaagggttctcttagtattcctgacctcctaaatataagagaataaaataacaagagataaattttgagaaacaagagaactctaacatattccaaatctggttctaaacaatgagaactcttcaaggcattggacagtgaatttactaaattcacttatgagaagtcctcctataggggtaaggctgggagaggagaagctttgaagaagtattctgaggttaaaagacatccaaaagtgggtgcagggggttgttatttcagctgtgatttggcttggacatcttcccaagacaaaaagagatgggctgaaaatcgtttgttaagcaggagaggaaagactgtataggtaagaaacataaagtgtagcgcagagtgatggttctcaaacatgaatgtgcataattaattaattaccacaaaagcgtgtttaaacagtttcctatgccctacctccagattctgatgcataaggtaagaatcatgaatttgcrtttttaataagcctcctggtaatacaaacaggcctgtcatttaccctttcagaaccactcaaatagaagaaaagaaaaatcacccacg

SEQ ID NO: 159357 - DNA, 716 bp, Homo sapiens
cacattcacactgcagatagatactaggggaagataaagttcagaatatacatatgcagattatgcaaataaacctgcaccmttgaaataacactcttgaaaccataaaaggttaaatactgtttgtttaatcttatttttgaattagtgatttcactggctttgtggaaaaaccttcttgcctattgtacaattttggaactttacagcctgcattcaccagagggataaatactgggaggataatgcacagtctgtaaatggaactagccattttgagaatggtgggtcaattaagtttcctctttatacctcccaactaattttccttgtttcttttgttttcccagcagagtagggtgaccaagaaatcttttagctgataatatgagaatcaagattttacagaccagatggatgcaggcatttaatgatctgaaagaagaataccattgcagtcacagtacagaaaaaagtagtgaggagctattaaacttttcaggttaaagaaacagaaagtagcgtgtagatgatgaggaggcgagtgtggtaggaaaaggtggaaaagataggcagaggcaggcatctagagtcttcaggagcaacgtcaaggtttatattttattccaaatgctatgggaggccacagtggttgtatctgtcatattttgagtgggcatatccagagagcccttaagagtgctcaactcaaaaga

SEQ ID NO: 159358 - DNA, 716 bp, Homo sapiens
cacattcacactgcagatagatactaggggaagataaagttcagaatatacatatgcagattatgcaaataaacctgcaccattgaaataacactcttgaaaccataaaaggttaaatactgtttgtttaatcttatttttgaattagtgatttcactggctttgtggaaaaaccttcttgcctattgtacaattttggaactttacagcctgcattcaccagagggataaatactgggaggataatgcacagtctgtaaatggaactagccattttgagaatggtgggtcaattaagtttcctcttyatacctcccaactaattttccttgtttcttttgttttcccagcagagtagggtgaccaagaaatcttttagctgataatatgagaatcaagattttacagaccagatggatgcaggcatttaatgatctgaaagaagaataccattgcagtcacagtacagaaaaaagtagtgaggagctattaaacttttcaggttaaagaaacagaaagtagcgtgtagatgatgaggaggcgagtgtggtaggaaaaggtggaaaagataggcagaggcaggcatctagagtcttcaggagcaacgtcaaggtttatattttattccaaatgctatgggaggccacagtggttgtatctgtcatattttgagtgggcatatccagagagcccttaagagtgctcaactcaaaaga

SEQ ID NO: 159359 - DNA, 716 bp, Homo sapiens
cacattcacactgcagatagatactaggggaagataaagttcagaatatacatatgcagattatgcaaataaacctgcaccattgaaataacactcttgaaaccataaaaggttaaatactgtttgtttaatcttatttttgaattagtgatttcactggctttgtggaaaaaccttcttgcctattgtacaattttggaactttacagcctgcattcaccagagggataaatactgggaggataatgcacagtctgtaaatggaactagccattttgagaatggtgggtcaattaagtttcctctttatacctcccaactaattttccttgtttcttttgttttcccagcagagtagggtgaccaagaaatcttttagctgataatatgagaatcaagattttacagaccagatggatgcaggcatttaatgatctgaaagaagaataccattgcagtcacagtacagaaaaaagtagtgaggagctattaaacttttcaggttaaagaaacagaaagtagcgtgtagatgatgaggaggcgagtgtggtrggaaaaggtggaaaagataggcagaggcaggcatctagagtcttcaggagcaacgtcaaggtttatattttattccaaatgctatgggaggccacagtggttgtatctgtcatattttgagtgggcatatccagagagcccttaagagtgctcaactcaaaaga

SEQ ID NO: 159360 - DNA, 544 bp, Homo sapiens
ttagtctgatgggcttccctttgtgggtaacttgacctttctttctggatgccactaccrtttttttccttcatttcaacattggtgaatctgacaattatgtgtcttggggtttctcttctcaaggagtacctttgtggtgttctctgtatttcctgaatttgaatgttggcctatcttgctatgaagttctcctggataatatcctgaagtgcattttctaacttggttccatgctccctgtcactttcagatacaccaatcaaacgtaggcccaaaccccaattcttgatttctgtgcactcgcaggctcaacaccatgtggaagctaccaaggcttgaggcttgcaccctctgaagccatggcttgagctctatgttggcccctcacatccacacctggagcgactgggagccagaccaccaagtccctcagtcgcactcagcatggggatcctgggcctggcccatgaaaccatttcttttttttttgataggcctctgggcttgtgatgggatgggctgccatgaagacctctgatat

SEQ ID NO: 159361 - DNA, 531 bp, Homo sapiens
cctttctttctggatgccactaccatttttttccttcatttcaacattggtgaatctgacaattatgtgtcttggggtttctcttctcaaggagtacctttgtggtgttctctgtatttcctgaatttgaatgttggcctatcttgctatgaagttctcctggataatatcctgaagtgcattttctaacttggttccatgctccctgtcactttcagrtacaccaatcaaacgtaggcccaaaccccaattcttgatttctgtgcactcgcaggctcaacaccatgtggaagctaccaaggcttgaggcttgcaccctctgaagccatggcttgagctctatgttggcccctcacatccacacctggagcgactgggagccagaccaccaagtccctcagtcgcactcagcatggggatcctgggcctggcccatgaaaccatttcttttttttttgataggcctctgggcttgtgatgggatgggctgccatgaagacctctgatatgccatggagacattttccctat

SEQ ID NO: 159362 - DNA, 455 bp, Homo sapiens
atgggccaaatgggtgcctgtatacttgtcctggcccaggcgggcaatgaacatgaaacaatactgccagggaaacactgaagtcatccaaacaatccagaaattacataagacacaagcagtcaggctggcccagtgctcttacaccagccccgtgtggcctgtgaaaaagccaggtggcacctggtgaatgacggtagactactgtgagctaaaaaagtggtgccctctatacawgcaactatgcccagtgttgctcagctgctacagcaggtggtccttaggctgggaaatgtccatgctgtgattgaattgactaatgcctttttcagtattcctttagcaaaagattcacaggaccagtctgccttcacttggggggccaacgatgggctttccatgtgttaccataagggtacctgcacaggcccaccatctgtcatggtatgattgca

SEQ ID NO: 159363 - DNA, 596 bp, Homo sapiens
aagctttagagtagtaatgaagggaaggaaaagaagaaaagaacacttggaagaagaccaagcaagtgacttgagagaccaagcacctgttacctgcttcttaaagagcaaagagaaattagccagcctaagtaagaggatgggccaggagtgagaactctcatcagagggaatcacatgtacaaagtcctgaggcaaaagagaatactrcaaatattctcttttggtaattaaaacaaaacaaaacaaaaaatgtacctctggccaggtgaggtggctcacacctgtaatcccagcactttggaaggcaaggaagaaggattgcctgaggccaggagttcaggatcatcctgggcaacacagggagaccttgcctttacaaaaaaaaaaaaaagagaaagaaagaaaaaagaagttagccacgttgtggtgatgcgtgcctgtagtcctagctactcaggaggctgagttggggggatcccttgaacccaggagttcagggctgcagtgagctatgatcgtgcgactgcactctggccggggcacagagtgagatcctgtctctagcaaaacagaaaaaaaagtacctcaaattg

SEQ ID NO: 159364 - DNA, 473 bp, Homo sapiens
tatatatttaggaatggaattgcttggtcataaggatgttacaacagtccccccaacatgtggttttgctttctgtggtttcagttacccatagtcaacgtctgaaaataggtgagtacagtacaatcagatattttgaaagagaccaaattcatataacttttattacagtatattggtattattgttctattttgttaattgttgttaatctcttactgtggctaatttattattcataggtatgtatgtataaggaaaaacataktatacatagggttcagtactatccgcagtttcaagcatccactggggatcttggaacatatcgcctgcaggtaaggccccagggaacactttaatcttcaactctttactgtcaaactgtttttccaaaatacttgttacagtttacctccctctccccatctgcccactgcttaattgtctgatacttggagcttaacgcagtg

SEQ ID NO: 159365 - DNA, 456 bp, Homo sapiens
acactttcaaataaccagatctcactcattatcccaagaacagtaagggggaagttcaaccccatgattccatcacttcctaccaggcycttcccctgacacatggggattacaatttgagatgagatttggatggggacacagagccaaaccatatcagtctttgtcaatattttaataaatgctaaagatgataagattaatagccttggtacaccaattaataatatgtttctagaattgaaagcaaaaatcatatgatcatctcaatacaggcagaaaaagcttttgacaaaatccaacatcccttcatgataaaaactctcaacagactgggcatcaaaggaacatatgtcaaaataataaaagctatctatgacaaacccatagccaatatcatactgaatgggcaaaagctggaactattccccttgagaactgaaacaagacaaggat

SEQ ID NO: 159366 - DNA, 456 bp, Homo sapiens
acactttcaaataaccagatctcactcattatcccaagaacagtaagggggaagttcaaccccatgattccatcacttcctaccaggctcttcccctgacacatkgggattacaatttgagatgagatttggatggggacacagagccaaaccatatcagtctttgtcaatattttaataaatgctaaagatgataagattaatagccttggtacaccaattaataatatgtttctagaattgaaagcaaaaatcatatgatcatctcaatacaggcagaaaaagcttttgacaaaatccaacatcccttcatgataaaaactctcaacagactgggcatcaaaggaacatatgtcaaaataataaaagctatctatgacaaacccatagccaatatcatactgaatgggcaaaagctggaactattccccttgagaactgaaacaagacaaggat

SEQ ID NO: 159367 - DNA, 352 bp, Homo sapiens
ctcatactgctccttgtggagcaggactaccctacagttagtacagggtactatctatctgtctgtctgtctgaytatctatctatctatctatctatctatctatctatcatctatctatctatctatctatctatctatctatctgtcatctatcaatcatctatctatctatcaatcatctatctatctatctatctgatatggtttggctgtgtccccacacaaatctcatcttgaattgtagctcccctaactcccatgtgtcatgggaaggacccagtgagaagggaagcaattggatcacagggcgggtctttcccgtgatgtcctcatgatagtgaataagtct

SEQ ID NO: 159368 - DNA, 640 bp, Homo sapiens
tagtcctctgaatcaaagacattgatagatgtagtataagattacaatcatactttccttttgacagtcacattataaagcatgatgtattgcaattaatctcaattagctgatcacaattaaaattaatagcttattattgctgataaaaaatcatgactctcctgttctcaaatgtgcaagtaattcttgtaattttaatacaaatgtgcatattattactaattgatttaatctcattgtatttggttcatggatccaatttattaaaatattgatagtgtggtaatgatttgtctccccatttcatttacactaaaagacacaattcgtacaatggtctgcaagcccatcatgatctgccgcatgttaaccaccaaaattcttttatgtcttcacccttgaycttaccagtggtcctgtccacctcactgtcctctggacatgccaacatgctgctgtcttatgaccaagactctagttaatttcttggctttgaaagaaatccccccatatatccattgatcagctcattcgactcctcaaatctttactgaaacctcatattctcgatgagacctattcagtatttcaaactgcctcccagctgaaacgttccaaaaccccttagtcttctgtg

SEQ ID NO: 159369 - DNA, 640 bp, Homo sapiens
tagtcctctgaatcaaagacattgatagatgtagtataagattacaatcatactttccttttgacagtcacattataaagcatgatgtattgcaattaatctcaattagctgatcacaattaaaattaatagcttattattgctgataaaaaatcatgactctcctgttctcaaatgtgcaagtaattcttgtaattttaatacaaatgtgcatattattactaattgatttaatctcattgtatttggttcatggatccaatttattaaaatattgatagtgtggtaatgatttgtctccccatttcatttacactaaaagacacaattcgtacaatggtctgcaagcccatcatgatctgccgcatgttaaccaccaaaattcttttatgtcttcacccttgaccttaccagtggtcctgtccacctcactgtcctctggacatgccaacatgctgctgtcttatgaccaagactctagttaatttcttggctttgaaagaaatccccccatatatccattgatcagctcattcgactcctcaaatctttactgaaacctcayattctcgatgagacctattcagtatttcaaactgcctcccagctgaaacgttccaaaaccccttagtcttctgtg

SEQ ID NO: 159370 - DNA, 545 bp, Homo sapiens
attattccttggacatcaacctctgccaagatagtttataatgacattgaggctttttgatttacacaatttgttatatraaaaatactaagacgatggcagataatacacagactttaattaaaattgtactacaattaaatgtctaaataaattagaagggtacatggtacatctaattgtatgtttatatattttatttgtgcatttttttcctagggtttcttttgctttagtttgtaaaacgttcttatgtttataataatgtagcatatactaaataaagaaaaatcaggaaatagaaaatgaagaagaaaacattagctattgtcaaccaaacaaaaattgtgcaatctctaagcacatgaactatgtaatatttgtacagcatagtacaatgtttatgcttcacagggtgaggtagagactgcaaaaccttgaacttgggacaaacaagaaagtaaggaaattttcacaacatattaatattatagaaaatgttgaacttaacagttaagatacaagtagtgaaaaatgatagtatt

SEQ ID NO: 159371 - DNA, 232 bp, Homo sapiens
gaattctgctggtggcgttttgttttttgtctctaaatatgttatttagccacaggttgatgaatatttttcttcgtttagaaattcagaatggcattattattctkaacaaataatattgtttattttacctttcattttttcagatttcaatatgattaaaagtaatttcatttttctagtgctaattgaaatatttttcccttcatgggtgtttactatttctctagga

SEQ ID NO: 159372 - DNA, 232 bp, Homo sapiens
gaattctgctggtggcgttttgttttttgtctctaaatatgttatttagccacaggttgatgaatatttttcttcgtttagaaattcagaatggcattattattcttaacaaataatattgtttattttacctttcattttttcagatttcratatgattaaaagtaatttcatttttctagtgctaattgaaatatttttcccttcatgggtgtttactatttctctagga

SEQ ID NO: 159373 - DNA, 232 bp, Homo sapiens
gaattctgctggtggcgttttgttttttgtctctaaatatgttatttagccacaggttgatgaatatttttcttcgtttagaaattcagaatggcattattattcttaacaaataatattgtttattttacctttcattttttcagatttcartatgattaaaagtaatttcatttttctagtgctaattgaaatatttttcccttcatgggtgtttactatttctctagga

SEQ ID NO: 159374 - DNA, 232 bp, Homo sapiens
gaattctgctggtggcgttttgttttttgtctctaaatatgttatttagccacaggttgatgaatatttttcttcgtttagaaattcagaatggcattattattcttaacaaataatattgtttattttacctttcattttttcagatttcaatatgattaaaagtaatttcatttttctagtgstaattgaaatatttttcccttcatgggtgtttactatttctctagga

SEQ ID NO: 159375 - DNA, 566 bp, Homo sapiens
aaggtgatgagtagagatgatgatggtcataaacaactaataaagaaaatgagcttcacttttttaccttctgttctgtctagttgtttagtttattgaggccttagaaaaaaatatgacagccccagagaaaatattgtcaataaaagttaaatgtatttattttgataagacattgtttttattgcaaaagtaatatatacacagacaatttagaaattacagacaagccaaagaaaatgttgttacacaaatgcaatgttacaatgacttgtaacactttggtgtgtatccttttttctctaagcacatatgtgtaaatatatgcatttttaaaggatttcagtaatgttctcatgattaaatatatcatgcacatccttctttcttttctttcttgcttttttttttttttttttttttttgagacatggtctagctctgtcaccygggcttgaatgtagtgcaattctggctcacttcaacccccatctcttgagttcaagtgatccttctgcctcagcctcccaagtagctggcactgcaggtgtgcaccaccatgccca

SEQ ID NO: 159376 - DNA, 534 bp, Homo sapiens
catgactgtcctttctgtgtattggttattcaatcttttcttggattacatgaaccgattatcagtttttgtgagggtggagtgtctaagttgattgagttggatttctggcacttttctggcacttccaatgagaaatagctaatgaatcctgagtatctaagcagcctaggaacgtgacattttctaatacaaatgacataaaacttttttaggtgttgtattacctgaaggccaaagttctccttttctaacactatgacatattgatatatttaattcctcacataaaacaggaaaaaattacttggagaaaatacagcttttattataaggatgcaggcaggtctcatgcatctgagctttttatttatttgttartgctcattcatgttgtctttttttcaattggaaccaccaaaacttaagaaaaaattatgggagaaataaattttagtttaatgattgaacatctgctatgtgcaggcactgatctaggtgttatgttacaactgtgagcaggactaaatcctt

SEQ ID NO: 159377 - DNA, 609 bp, Homo sapiens
gaaagagggggggatgatgcaagcattgctgaatgtgatgggctgtaggaccagcagtggggatgtccacaagagttggctatatatcattggtgctcagtggaggggccagaggatttgaatatagttaataattaaaaatgcrgatgtgattaccaagggagtacatattatgtaagaaaatcaaacaatgaggacgtatctctgagaaactccaaccactctgaaaaactccaaaagaccattcttggtaactgtgccaagtgaatggcctggtctctgaaactctacactcagacacaggtcatcctggagagtggtgtccttctggattgtcacataccctgtgaatgaagcatgtgttacaacaataatggaaaatatgcaaatgagaaaaaaagtttctcagtgccccaccaacctaaattctggctccacccctatttgttttctcatatttgtctgaatttctccaaggagcccataatcaatgctgggtcattcctggagtcttgacggtcaccaggattcacctttggcttttgtttcagtccaaaagtaagagttagtgtcatgtgtgaggcaaacacatgctgcgacttgtttgag

SEQ ID NO: 159378 - DNA, 592 bp, Homo sapiens
tactcagaagatcctgattctccaagacctagacatctgcatttttgaactcagactgagaattaccatttaagtatttagcaccaccccctagtggtggttacttgaaattgcagatgtaacaaatttaaaatacaattctttgaattcttcctgtgtatttgttgcacgcaaagtaacaatctttcgcatctattttagagctagttaaatatagctagttttagaggaatagccacatgggggtaaaaactccttattctccagtgattatctggaaagaactctcagaagtattaagataaaaaaacagaaagttcataagtagcaattaattagctactacttrttgtcagagagcagttaaagcttccaactcatagccaggctgattattaaagagctatatgattagagtaattgaaactgtgcaggtgaaatggaaagttagtggcctccaaaagtcatgaaaaaccaacactgaacttacactaactatggaagaatagcagtacgatcccaaggggtgtgtatttctttgaaccattgttttaactggctagaggaattttgtgtttagaattttattatc

SEQ ID NO: 159379 - DNA, 427 bp, Homo sapiens
aattagaattcaggtattttgattttactttcatttcaattaacttcaacagagctttattgagaatctaccatgtaccaggcactatgctacatgctgaacatgcaaatataggaaataccactggcctcacggttatagtcttgtaggggactgggctatgcagaaacaagctgtattgtgatatatgcaataatgcaagtttgtacatattaccttctgagcaaagcagcaaagastgttctttttccataagttgttgactttctgtcatgtgaccctggtaagtaaccatgatcgaactgatcaagaatctgtaacttggtcaaaggtaaccacaaaattgtgcaaaactacaggatacataaatatttttggggtttcattattacagatgacgttgaggagagaaaagttttacattttt

SEQ ID NO: 159380 - DNA, 427 bp, Homo sapiens
aattagaattcaggtattttgattttactttcatttcaattaacttcaacagagctttattgagaatctaccatgtaccaggcactatgctacatgctgaacatgcaaatataggaaataccactggcctcacggttatagtcttgtaggggactgggctatgcagaaacaagctgtattgtgatatatgcaataatgcaagtttgtacatattaccttctgagcaaagcagcaaagactgttctttttccataagttgttgactttctgtcwtgtgaccctggtaagtaaccatgatcgaactgatcaagaatctgtaacttggtcaaaggtaaccacaaaattgtgcaaaactacaggatacataaatatttttggggtttcattattacagatgacgttgaggagagaaaagttttacattttt

SEQ ID NO: 159381 - DNA, 407 bp, Homo sapiens
gattttactttcatttcaattaacttcaacagagctttattgagaatctaccatgtaccaggcactatgctacatgctgaacatgcaaatataggaaataccactggcctcacggttatagtcttgtaggggactgggctatgcagaaacaagctgtattgtgatatatgcaataatgcaagtttgtacatattaccttctgagcaaagcagcaaagactgttctttttccataagttgttgactttctgtcatgtgaccctggtaagtaaccatgatcgaactgatcaagaatctgtaacttggycaaaggtaaccacaaaattgtgcaaaactacaggatacataaatatttttggggtttcattattacagatgacgttgaggagagaaaagttttacattttt

SEQ ID NO: 159382 - DNA, 287 bp, Homo sapiens
agggatgatgcaaaaccattagaaaccacccccgtgatccaatcacctcctgccaggccccactttcaacacgtggggattacaattccacatgagatttgggtggggacacagagccaaaccatatcactagattatacagtaatcctagctttaattttttgaggaacctccatattgttttccataatgrcaggatcattttacattccaccaacagtgcacaagggctctaatttctccaccttggtgctaacccttgctattttctgttttctttttaaata

SEQ ID NO: 159383 - DNA, 465 bp, Homo sapiens
agggatgatgcaaaaccattagaaaccacccccgtgatccaatcacctcctgccaggccccactttcaacacgtggggattacaattccacatgagatttgggtggggacacagagccaaaccatatcactagattatacagtaatcctagctttaattttttgaggaacctccatattgttttccataatggcaggatcattttacattccaccaacagtgcacaagggctctaatttctccaccttggtgctaacccttgctattttctgttttctttttaaatagtggccatcataatgggtgtgaggtgacatgtagattgactttaaartacaaaccccctttgaaatggtaaggggatctctgaactttcatgccttctggtaaactttgattttatcaaccagctgaaatcattcactgaagtacatgttattttgatctagacaagttgttaggatc

SEQ ID NO: 159384 - DNA, 465 bp, Homo sapiens
agggatgatgcaaaaccattagaaaccacccccgtgatccaatcacctcctgccaggccccactttcaacacgtggggattacaattccacatgagatttgggtggggacacagagccaaaccatatcactagattatacagtaatcctagctttaattttttgaggaacctccatattgttttccataatggcaggatcattttacattccaccaacagtgcacaagggctctaatttctccaccttggtgctaacccttgctattttctgttttctttttaaatagtggccatcataatgggtgtgaggtgacatgtagattgactttaaagtasaaaccccctttgaaatggtaaggggatctctgaactttcatgccttctggtaaactttgattttatcaaccagctgaaatcattcactgaagtacatgttattttgatctagacaagttgttaggatc

SEQ ID NO: 159385 - DNA, 231 bp, Homo sapiens
tgacgataaatcaatgtctaccacagacaagaacatggatgtgttctgtaatactgaaccaaakaagccaggctaaatagaatgtgctgtattttatagaaatcaaaaccaggcagaacaaatctacatcaggaactgggaaagtagctattttgtgtgttggggcagcagtgcctgggagaggccacaggtcaaggctactgcttggtccagggcgtggcagcctggtgt

SEQ ID NO: 159386 - DNA, 231 bp, Homo sapiens
tgacgataaatcaatgtctaccacagacaagaacatggatgtgttctgtaatactgaaccaaataagccaggctaaatagaatgtgctgtattttatagaartcaaaaccaggcagaacaaatctacatcaggaactgggaaagtagctattttgtgtgttggggcagcagtgcctgggagaggccacaggtcaaggctactgcttggtccagggcgtggcagcctggtgt

SEQ ID NO: 159387 - DNA, 231 bp, Homo sapiens
tgacgataaatcaatgtctaccacagacaagaacatggatgtgttctgtaatactgaaccaaataagccaggctaaatagaatgtgctgtattttatagaaatcaaaaccaggcagaacaaatctacatcaggaactgggaaagtagctattttgtgkgttggggcagcagtgcctgggagaggccacaggtcaaggctactgcttggtccagggcgtggcagcctggtgt

SEQ ID NO: 159388 - DNA, 518 bp, Homo sapiens
ttaggcaaggtggctcacacctgtaatctcagtactttaggatgctgagtcaggaggatcacttgaatccaagagttggagaccagtctgggcaacataggcacaccccatctgtacaaaaaattttaaaattagctgggtgtggggtggtgcatggctgtagtcccagctcttcaggagactgaggtgggaggacctcttgagcccaggagtttgargctgcagtgagtcatgatcgtgccactgcactccagtctgggcaacagagtgtgatcttgtctcaaaaataaataaaatagatacatttttaaaaagtatatatttttttaagagacaggggtctcagtatgttgcccaggctggtcttgaactcttaatgtcaagcaaccctcccacctcagcctcccttgtagctgggattataggcagcagcccctgtgaccagctatctccggaacttttccatctggatgatggataagcaaagctctgtacttactcagttaagcaataacttc

SEQ ID NO: 159389 - DNA, 518 bp, Homo sapiens
ttaggcaaggtggctcacacctgtaatctcagtactttaggatgctgagtcaggaggatcacttgaatccaagagttggagaccagtctgggcaacataggcacaccccatctgtacaaaaaattttaaaattagctgggtgtggggtggtgcatggctgtagtcccagctcttcaggagactgaggtgggaggacctcttgagcccaggagtttgaggctgcagtgagtcatgatcgtgccactgcactccagtctgggcaacagagtgtgatcttgtctcaaaaataaataaaataratacatttttaaaaagtatatatttttttaagagacaggggtctcagtatgttgcccaggctggtcttgaactcttaatgtcaagcaaccctcccacctcagcctcccttgtagctgggattataggcagcagcccctgtgaccagctatctccggaacttttccatctggatgatggataagcaaagctctgtacttactcagttaagcaataacttc

SEQ ID NO: 159390 - DNA, 495 bp, Homo sapiens
tgtctaaaagataattttattgaaaatatattgggtatgtttgagaagatggctttccagsttctcgcatgactgctgtagcatgtatgcccccagatgtgtcatttgtccctgaacaaggccaagtgagatcttcaaggacagcaggcaaaattccctttagctttcaagcgtctgatctagccttcaaatcctacacctaacgatgctctcttccaaagggccccttatctgtgtttttggctaacaagcagtggatgcctcctcgaagcatccgcttcaccgcagaagaaggggacttggggttcaccttaagagggaacgcccccgttgaggttcacttcctggatccttactgctctgccttggtaagcacatgcttttcttggttggcagcaaatacagatatctgggtgattgaatttagggcgggttcacccacgtcaaaggcctgacttgatgtgaaaggcctcatgggtgctacattccctaaaa

SEQ ID NO: 159391 - DNA, 495 bp, Homo sapiens
tgtctaaaagataattttattgaaaatatattgggtatgtttgagaagatggctttccaggttctygcatgactgctgtagcatgtatgcccccagatgtgtcatttgtccctgaacaaggccaagtgagatcttcaaggacagcaggcaaaattccctttagctttcaagcgtctgatctagccttcaaatcctacacctaacgatgctctcttccaaagggccccttatctgtgtttttggctaacaagcagtggatgcctcctcgaagcatccgcttcaccgcagaagaaggggacttggggttcaccttaagagggaacgcccccgttgaggttcacttcctggatccttactgctctgccttggtaagcacatgcttttcttggttggcagcaaatacagatatctgggtgattgaatttagggcgggttcacccacgtcaaaggcctgacttgatgtgaaaggcctcatgggtgctacattccctaaaa

SEQ ID NO: 159392 - DNA, 495 bp, Homo sapiens
tgtctaaaagataattttattgaaaatatattgggtatgtttgagaagatggctttccaggttctcgcatgactgctgtagcatgtatgcccccagatgtgtcatttgtccctgaacaaggccaagtgagatcttcaaggacagcaggcaaaattccctttagctttcaagcgtctgatctagccttcaaatcctacacctaacgatgctctcttccaaagggccccttatctgtgtttttggctaacaagcagtggatgcctcctcgaagcawccgcttcaccgcagaagaaggggacttggggttcaccttaagagggaacgcccccgttgaggttcacttcctggatccttactgctctgccttggtaagcacatgcttttcttggttggcagcaaatacagatatctgggtgattgaatttagggcgggttcacccacgtcaaaggcctgacttgatgtgaaaggcctcatgggtgctacattccctaaaa

SEQ ID NO: 159393 - DNA, 599 bp, Homo sapiens
ggctggtttgcagtggtatgatcatggcttactgcagcctctatctcctgggtttaagtgatcctcccacctcagccacatgagcacctggagttataggcacccactaccacccctggctcattatttatttatttattcatttttttttattattttttttgagatggagtctcgctctgtcacccaggctggagtgcagttgtgcaatctcggctcactgcaagctctgcctcccaggttcacgccattctcctgcctcagcctcccaagtagctgggactacaggcgcctgccaatgtgcctggctaattttttgtatttttagtagagatggggtctcaccrtgttagccaggatggtctcgatctcctgacctcgtgatccacctgcctcggcctcccagagtgctgggattacaggtgtgagccaccatgcccagcccattctttattttttgtagagacaggttctcgctgtgttgccaagactgatcttgaactcctgggctcaagccatcctctcaccttggcctcccaaagtgctgggattacaggcatgagccactgcaccctgctagcaaacttttaaaaatatcc

SEQ ID NO: 159394 - DNA, 599 bp, Homo sapiens
ggctggtttgcagtggtatgatcatggcttactgcagcctctatctcctgggtttaagtgatcctcccacctcagccacatgagcacctggagttataggcacccactaccacccctggctcattatttatttatttattcatttttttttattattttttttgagatggagtctcgctctgtcacccaggctggagtgcagttgtgcaatctcggctcactgcaagctctgcctcccaggttcacgccattctcctgcctcagcctcccaagtagctgggactacaggcgcctgccaatgtgcctggctaattttttgtatttttagtagagatggggtctcaccgtgttagccaggatggtctcgatctcctgacctcgtgatccacctgcctcggcctcccagagtgctgggattacaggtgtgagccaccatgcccagcccattctttattttttgtagagacaggttctcgctgtgttgccaagactgatcttgaactcctgggctcaagccatcctctcaccttggcctcccaaagtgctgggattacaggcrtgagccactgcaccctgctagcaaacttttaaaaatatcc

SEQ ID NO: 159395 - DNA, 446 bp, Homo sapiens
gaattcctggaggagtgaggagctctgtgctatgcttggccaccgaacatgggccatctctcctattatggtttgaaatgtaccatagtgtcttgtttggtaattgtataaaaatatggggagactgtgcgggtgtctgctrgcttgtctgctggttcttactcatggtgccttcttccctttcagacttggatatctttgtgtgcttcttggggcccttggaagggtgtctgtggggtttccgtgaggccaaagacagaggttccttctcacaaggatggtgtttgctttcacatggacagcccagaccacctggaaccaagtgcacagaagccccaccatccctgggcctcccaggtgtgatgggtgaggagtccaagtccgccggagatccaaggctctttgtggttgaatctgtgagtttcctttccttttttcctcccact

SEQ ID NO: 159396 - DNA, 446 bp, Homo sapiens
gaattcctggaggagtgaggagctctgtgctatgcttggccaccgaacatgggccatctctcctattatggtttgaaatgtaccatagtgtcttgtttggtaattgtataaaaatatggggagactgtgcgggtgtctgctagcttgtctgctggttcttactcatggtgccttcttccctttcagacttggatatctttgtgtgcttcttggggcccttggaagggtgtctgtggggtttccgtgaggccaaagacagaggttccttctcacaaggatggtgtttgctttcacatggacagcccagaccacctggaaccaagtgcacagaagccccaccatccctggscctcccaggtgtgatgggtgaggagtccaagtccgccggagatccaaggctctttgtggttgaatctgtgagtttcctttccttttttcctcccact

SEQ ID NO: 159397 - DNA, 446 bp, Homo sapiens
gaattcctggaggagtgaggagctctgtgctatgcttggccaccgaacatgggccatctctcctattatggtttgaaatgtaccatagtgtcttgtttggtaattgtataaaaatatggggagactgtgcgggtgtctgctagcttgtctgctggttcttactcatggtgccttcttccctttcagacttggatatctttgtgtgcttcttggggcccttggaagggtgtctgtggggtttccgtgaggccaaagacagaggttccttctcacaaggatggtgtttgctttcacatggacagcccagaccacctggaaccaagtgcacagaagccccaccatccctgggcctyccaggtgtgatgggtgaggagtccaagtccgccggagatccaaggctctttgtggttgaatctgtgagtttcctttccttttttcctcccact

SEQ ID NO: 159398 - DNA, 446 bp, Homo sapiens
gaattcctggaggagtgaggagctctgtgctatgcttggccaccgaacatgggccatctctcctattatggtttgaaatgtaccatagtgtcttgtttggtaattgtataaaaatatggggagactgtgcgggtgtctgctagcttgtctgctggttcttactcatggtgccttcttccctttcagacttggatatctttgtgtgcttcttggggcccttggaagggtgtctgtggggtttccgtgaggccaaagacagaggttccttctcacaaggatggtgtttgctttcacatggacagcccagaccacctggaaccaagtgcacagaagccccaccatccctgggcctcccaggtgtgatgggtgaggrgtccaagtccgccggagatccaaggctctttgtggttgaatctgtgagtttcctttccttttttcctcccact

SEQ ID NO: 159399 - DNA, 387 bp, Homo sapiens
gggaggatcttttgagccctagaactcgaggctrtagtgaactatgattgcactattgcactccagcctgggcaactgagtgagaccctgtctcaaaacaaacaagacaaaacaaaaaacaacaacaaaagaaattatttggccgggcatgctggctcatgcctgtaatcccagcactttgggaggcaaggtaggcggattgcttgagcttagaagttagagaacagctagggcaacacggtgaagccccatctctacaaaaaatatgaaaaattagctgagtatggtgttgcatgcctgtagtcctagctactcaggaagcggaggtggggggatcacttaagcccaagagtaaaggccacagtgagccaagatcacaccagggca

SEQ ID NO: 159400 - DNA, 395 bp, Homo sapiens
gatgagaagggaggatcttttgagccctagaactcgaggctatagtgaactatgattgcactattgcwctccagcctgggcaactgagtgagaccctgtctcaaaacaaacaagacaaaacaaaaaacaacaacaaaagaaattatttggccgggcatgctggctcatgcctgtaatcccagcactttgggaggcaaggtaggcggattgcttgagcttagaagttagagaacagctagggcaacacggtgaagccccatctctacaaaaaatatgaaaaattagctgagtatggtgttgcatgcctgtagtcctagctactcaggaagcggaggtggggggatcacttaagcccaagagtaaaggccacagtgagccaagatcacaccagggca

SEQ ID NO: 159401 - DNA, 426 bp, Homo sapiens
agaagggaggatcttttgagccctagaactcgaggctatagtgaactatgattgcactattgcactccagcctgggcaactgagtgagaccctgtctcaaaacaaacaaracaaaacaaaaaacaacaacaaaagaaattatttggccgggcatgctggctcatgcctgtaatcccagcactttgggaggcaaggtaggcggattgcttgagcttagaagttagagaacagctagggcaacacggtgaagccccatctctacaaaaaatatgaaaaattagctgagtatggtgttgcatgcctgtagtcctagctactcaggaagcggaggtggggggatcacttaagcccaagagtaaaggccacagtgagccaagatcacaccagggcaatgagagcgagactgtgtctcaaaacaaaaaacaa

SEQ ID NO: 159402 - DNA, 401 bp, Homo sapiens
gaactcgaggctatagtgaactatgattgcactattgcactccagcctgggcaactgagtgagaccctgtctcaaaacaaacaagacaaaacaaaaaacaacaacaaaagaaattatttggccgggcatgctggctcmtgcctgtaatcccagcactttgggaggcaaggtaggcggattgcttgagcttagaagttagagaacagctagggcaacacggtgaagccccatctctacaaaaaatatgaaaaattagctgagtatggtgttgcatgcctgtagtcctagctactcaggaagcggaggtggggggatcacttaagcccaagagtaaaggccacagtgagccaagatcacaccagggcaatgagagcgagactgtgtctcaaaacaaaaaacaa

SEQ ID NO: 159403 - DNA, 386 bp, Homo sapiens
ggaggatcttttgagccctagaactcgaggctatagtgaactatgattgcactattgcactccagcctgggcaactgagtgagaccctgtctcaaaacaaacaagacaaaacaaaaaacaacaacaaaagaaattatttggccgggcatgctggctcatgcctgtaatcccagcactttgggaggcaaggtaggyggattgcttgagcttagaagttagagaacagctagggcaacacggtgaagccccatctctacaaaaaatatgaaaaattagctgagtatggtgttgcatgcctgtagtcctagctactcaggaagcggaggtggggggatcacttaagcccaagagtaaaggccacagtgagccaagatcacaccagggca

SEQ ID NO: 159404 - DNA, 423 bp, Homo sapiens
agaagggaggatcttttgagccctagaactcgaggctatagtgaactatgattgcactattgcactccagcctgggcaactgagtgagaccctgtctcaaaacaaacaagacaaaacaaaaaacaacaacaaaagaaattatttggccgggcatgctggctcatgcctgtaatcccagcactttgggaggcaaggtaggcggattgcttgagcttagaagttagagaacagctagggcaacacggtgaagccccatctytacaaaaaatatgaaaaattagctgagtatggtgttgcatgcctgtagtcctagctactcaggaagcggaggtggggggatcacttaagcccaagagtaaaggccacagtgagccaagatcacaccagggcaatgagagcgagactgtgtctcaaaacaaaaaa

SEQ ID NO: 159405 - DNA, 426 bp, Homo sapiens
agaagggaggatcttttgagccctagaactcgaggctatagtgaactatgattgcactattgcactccagcctgggcaactgagtgagaccctgtctcaaaacaaacaagacaaaacaaaaaacaacaacaaaagaaattatttggccgggcatgctggctcatgcctgtaatcccagcactttgggaggcaaggtaggcggattgcttgagcttagaagttagagaacagctagggcaacacggtgaagccccatctctacraaaaatatgaaaaattagctgagtatggtgttgcatgcctgtagtcctagctactcaggaagcggaggtggggggatcacttaagcccaagagtaaaggccacagtgagccaagatcacaccagggcaatgagagcgagactgtgtctcaaaacaaaaaacaa

SEQ ID NO: 159406 - DNA, 391 bp, Homo sapiens
agaagggaggatcttttgagccctagaactcgaggctatagtgaactatgattgcactattgcactccagcctgggcaactgagtgagaccctgtctcaaaacaaacaagacaaaacaaaaaacaacaacaaaagaaattatttggccgggcatgctggctcatgcctgtaatcccagcactttgggaggcaaggtaggcggattgcttgagcttagaagttagagaacagctagggcaacacggtgaagccccatctctacaaaaaatatgaaaaattagctgagtatggtgttgcatgcctgtagtcytagctactcaggaagcggaggtggggggatcacttaagcccaagagtaaaggccacagtgagccaagatcacaccagggca

SEQ ID NO: 159407 - DNA, 426 bp, Homo sapiens
agaagggaggatcttttgagccctagaactcgaggctatagtgaactatgattgcactattgcactccagcctgggcaactgagtgagaccctgtctcaaaacaaacaagacaaaacaaaaaacaacaacaaaagaaattatttggccgggcatgctggctcatgcctgtaatcccagcactttgggaggcaaggtaggcggattgcttgagcttagaagttagagaacagctagggcaacacggtgaagccccatctctacaaaaaatatgaaaaattagctgagtatggtgttgcatgcctgtagtcctagctactcaggaagcrgaggtggggggatcacttaagcccaagagtaaaggccacagtgagccaagatcacaccagggcaatgagagcgagactgtgtctcaaaacaaaaaacaa

SEQ ID NO: 159408 - DNA, 426 bp, Homo sapiens
agaagggaggatcttttgagccctagaactcgaggctatagtgaactatgattgcactattgcactccagcctgggcaactgagtgagaccctgtctcaaaacaaacaagacaaaacaaaaaacaacaacaaaagaaattatttggccgggcatgctggctcatgcctgtaatcccagcactttgggaggcaaggtaggcggattgcttgagcttagaagttagagaacagctagggcaacacggtgaagccccatctctacaaaaaatatgaaaaattagctgagtatggtgttgcatgcctgtagtcctagctactcaggaagcggaggtggggggatcacttaagcccaagagtaaaggccacagtgagccaagatcrcaccagggcaatgagagcgagactgtgtctcaaaacaaaaaacaa

SEQ ID NO: 159409 - DNA, 426 bp, Homo sapiens
agaagggaggatcttttgagccctagaactcgaggctatagtgaactatgattgcactattgcactccagcctgggcaactgagtgagaccctgtctcaaaacaaacaagacaaaacaaaaaacaacaacaaaagaaattatttggccgggcatgctggctcatgcctgtaatcccagcactttgggaggcaaggtaggcggattgcttgagcttagaagttagagaacagctagggcaacacggtgaagccccatctctacaaaaaatatgaaaaattagctgagtatggtgttgcatgcctgtagtcctagctactcaggaagcggaggtggggggatcacttaagcccaagagtaaaggccacagtgagccaagatcacrccagggcaatgagagcgagactgtgtctcaaaacaaaaaacaa

SEQ ID NO: 159410 - DNA, 401 bp, Homo sapiens
gaactcgaggctatagtgaactatgattgcactattgcactccagcctgggcaactgagtgagaccctgtctcaaaacaaacaagacaaaacaaaaaacaacaacaaaagaaattatttggccgggcatgctggctcatgcctgtaatcccagcactttgggaggcaaggtaggcggattgcttgagcttagaagttagagaacagctagggcaacacggtgaagccccatctctacaaaaaatatgaaaaattagctgagtatggtgttgcatgcctgtagtcctagctactcaggaagcggaggtggggggatcacttaagcccaagagtaaaggccacagtgagccaagatcacaccagggcaatgagagcgagactstgtctcaaaacaaaaaacaa

SEQ ID NO: 159411 - DNA, 458 bp, Homo sapiens
tctttccttttttgtgttttctttaatttctttcattaatatttgtcatttttgttgtcaaaatcttttacttccttggttaaatttataagtacatttttrtagctattgtaaaaggatttgctttcttaatttcttgtttcagctagtttactatcaatatatagaaatgctactgatttaaacagggacaatttgactgtctcctttccaattcacatgtcctttatttctttctctcacctaattgtcctggctaagactttcactatgtgaaatatgattggtgagaacaggcatccttttcttgttctagtaaaatctttttcttgttcacagtaaaatctttcaccttttccacactcagtatgatcttagttgtagatttgtcctttatgtccttctgtgttaaggcatatattttctatactaaattgttgagaggttttttgtcattc

SEQ ID NO: 159412 - DNA, 438 bp, Homo sapiens
agctgcacccccatgtttattacagcactattcacaatagccaagatatggaatcaacaaaagtgtccatcaacagatgaatggataaagaaatgtgacatacatatataatggaatattatttagtcataataaagaagaaaatcctgttatttgtggcaacaagaatgcaagtggagggcattatgttaggtgaaataagcctggcatagaaacataaacaccacataactacgtgtwctcacttatgtatggaagctaaaatttttaatctcatagaagtagatagtagagttttggttaccatatccttgaaagagtaggagaaagaagagtataagaaaaatgtggttaatacatacaaaattacagctggagagaaggaagaagttctaattctctacagcactgttgggtgactgtagttaatgggaattt

SEQ ID NO: 159413 - DNA, 438 bp, Homo sapiens
agctgcacccccatgtttattacagcactattcacaatagccaagatatggaatcaacaaaagtgtccatcaacagatgaatggataaagaaatgtgacatacatatataatggaatattatttagtcataataaagaagaaaatcctgttatttgtggcaacaagaatgcaagtggagggcattatgttaggtgaaataagcctggcatagaaacataaacaccacataactacgtgtactcacttatgtatggaagctaaaatttttaatctcatagaagtagatagtagagttttggttaccatatccttgaaagagtaggagaaagaagagtataagaaaaatgtggttaatacatacaaaattacagctggagagaaggaagaagttctarttctctacagcactgttgggtgactgtagttaatgggaattt

SEQ ID NO: 159414 - DNA, 607 bp, Homo sapiens
tgaggtaccattcccctttcttcatatcaagggtatataatatcaacttgaataatcactgattattttaactttgaaagcatgtctaatttagtgtttaccaggtttcattgctataaagttgtatttttggctcattgtygtactctactctttggaggcaagctgctaagtacaacctacactcaagggtatgtggaggaaaagttaaacttcagattcattcagcataaagtcaatacccaattcaaggaatctaagaatgaaataaaatgaagagctgaaaaatgaaatagtcataaaaaacaaatgaaaatgatagagctgaaaaacttagtatatgaattttataacaaaattgaaagtattaacagcagaatagacaaagctgagaaaagaatcccagagattgaagaccagttctttgaatcaactcaataagacaaaaaaaaaataaaaataaaaaagaatgaacaaatcctctgagaaatatggattatgtagaaaccaaacctatgaattattggtatccttgaaagagaaggagaaagagcaggcaacttggaaaacatttgaggatattgtccatgaaaatttctccaacctc

SEQ ID NO: 159415 - DNA, 541 bp, Homo sapiens
ggtgcggtgtaggcagagagtgagtgtgggaaattatctrttggatactgtgcttattacctgggtgatgaaataaggtatacaccaaaccatcacaagacactatgcatagaacaaaactgcacttgtacccctgaaactaaaagttaaaaaaagaaaacaaaaatctccccaaaacaatttaagtaatattttgcagtaaatgccttactttgttaaaaaaaaaaaaaaaaaaaagtgagaaaaagaactaggtaaggagcactactatttgttaggtaagatctagttaggtttatttccctatacaaatgttattttatttaatctgcaagacaagtttcctgacaggagatgtcacctccatattatatttgagtagcctgaagtcagagtgggtaagtagttggtcaacattactcagttgatgactgaagttagaattggagcctttttcatatcattcaaagctctgctgctttcatgtgccacattttctgtgcctataccatgtgaggttaaaaaaaagaaattagttagt

SEQ ID NO: 159416 - DNA, 289 bp, Homo sapiens
cagatcatcaagacagaaaactaacaaagctattcgggacttaataacatttgaccaaaaggacctaacaaacatgtacacaacactccactcaacaacagaatatatatacttctcatctgcatatggaacatactctaaatcaaaccacatgaatgactataaaacaattctcaacaaattaaaaaaactgaaatcaaaccaatcacactctcagaccacaakgcaataaaaatgaaaattaatactaagatgtctcaaaacaatacaattacatataaattaaata

SEQ ID NO: 159417 - DNA, 328 bp, Homo sapiens
ctttcacctctttggttaatttctaagtatttagttttatgtgtggctattgtaactgggattatgtttttatttcttcttcagrtgtttcactgttggcatatagaaatgctattgatttttgtatgttgattttgtattctgtgactttactaaatttgtcagttctaatagtttatttcacagagtctttaggtattgacaagtataagatcatgtcatttgctaacacgtgtaatttgactttttcttttccatttggatgccctttacatccttctcttgtctgattactctagctaggacttctagtactatgttgagtaaa

SEQ ID NO: 159418 - DNA, 518 bp, Homo sapiens
atataaatgtgatattatttgcaccatctcaaaatgttacctttctttgtccctgtttccttaagcattagtgcagctaatttcctcacctccctcaggtctttgctggaatatcaccttctcaaagaggcttttcttcatcaccctatttaaagttccaactcaccctgaccctcccttgcatttatcctgcacttttttttctcatagcatttattatctcctawctatgtaatgctcttattcactaggctgtgttttgtttgaccctcttacttaaataaaagctgcaagaaagcagagattatgtctgttttgatcattattttcaaaattcataaactgctccctgatattagtaggtgttcactaaataattgcagaatgaatgaattcacaaataaaaacattttcattttaacgcttgagaaactcagtctttaagttttcactataaaaataaaattccctaacaaccatcttactgctgttacaaaagttaattttatttcttattt

SEQ ID NO: 159419 - DNA, 466 bp, Homo sapiens
atcatgaatagtgagcacattatgttattttcaatttctggagaattgaaaactcacacaatcaaaatttattgaaagaagcaaggaataattcttaaataaaagcaaaatgcaaagagtagtttatgaacttaatttttttttcctggtcttctctctgttggtaccattttaagtccatatgtgtgttcttctttcaataaggcattctaagttccagtttctaagttttaagttccactctgacattgcttaagataaagatgatgtttactctggcaattttttgttgttgctgttcttgattgcttatttttaatttaaaaaagggcagactccaggatgatacctctggacccactgggggtctgggggaccttgctaccctgaatggaaggacataagcctggttggtttttccaccagcwgattagagagcccaagtgctttcaggaaacataggcag

SEQ ID NO: 159420 - DNA, 621 bp, Homo sapiens
ctttttttagttaggcacaaatgcatctaatctataccacaaattgtgaatttcaatttaacaaataattatcrtatattttctatgcatgagatactgtactagccactcagtatagaaaggagaaaaatatagtctctgtaatcagggagttgaggtttcataggcatctgaaacagggagttgacaatgtcaacagagtactatcagtgttatgataagatgagtacatggttttatgggagcatttaagaaagatactttagttcttagactagggtcatggaagacaaggaggaatttacaagcaacatgaaaggggtgggtacatttaggcaagaaacagcatgtgccaaagccccaaggcaagaaagaatataaagttagataactacaaatagttttaaatggcatactttagcacacatggagagtaataactacagctaaatccagagagcaaggtaacaccacttccagaacttcaagaaccatataagggaatttggacttacctaggaattttgagggtatatttaaaatattctaactgagaatggagatgacataatcatatttcaaccctgaaaatataaatcttttttgaagagcatagagtaa

SEQ ID NO: 159421 - DNA, 621 bp, Homo sapiens
ctttttttagttaggcacaaatgcatctaatctataccacaaattgtgaatttcaatttaacaaataattatcgtatattttctatgcatgagatactgtactagccactcagtatagaaaggagaaaaatatagtctctgtaatcagggagttgaggtttcatagrcatctgaaacagggagttgacaatgtcaacagagtactatcagtgttatgataagatgagtacatggttttatgggagcatttaagaaagatactttagttcttagactagggtcatggaagacaaggaggaatttacaagcaacatgaaaggggtgggtacatttaggcaagaaacagcatgtgccaaagccccaaggcaagaaagaatataaagttagataactacaaatagttttaaatggcatactttagcacacatggagagtaataactacagctaaatccagagagcaaggtaacaccacttccagaacttcaagaaccatataagggaatttggacttacctaggaattttgagggtatatttaaaatattctaactgagaatggagatgacataatcatatttcaaccctgaaaatataaatcttttttgaagagcatagagtaa

SEQ ID NO: 159422 - DNA, 666 bp, Homo sapiens
ggatagcaacatatgcacccataaaacagaataaactatttttcatccacttttcaytgatgtcaaatctaatttttttatgaaatatttttatatgtaagaactctctaatatgacacaggattgagaacactggactgacttgtaggaaattacttgcctaagatgaagtataaggctccaagcgaatgtacaaaaagcataaattgttaaattaaattcaaaggagagtgtgtctgattaataaggattgtggtggtatttggaaaatggcattggtggcagaatacggttagaggaaaaccttagcaaatagaagaaaacaaacaaaaaagtccctcatgttccattttttcttactgcttctcatcatggtttgttggttttttgtagtgataatttttgggtcctttcttttccttatttgtgtttgctttaccagcggattttatattttcgtgtttctatcatggtaaattttatcattttgttttcagatgcaggactcccttcagcatttcttgtaagaccaatctagtcctacaacaaattttagaaaaaaagacaatatagtgtttagaaaaaaagacaatatagtgtgtttatttattttagaaaaaaagacaatatagtgtttagaaaaaaagacaatttagaaaaaaagac

SEQ ID NO: 159423 - DNA, 666 bp, Homo sapiens
ggatagcaacatatgcacccataaaacagaataaactatttttcatccacttttcactgatgtcaaatctaatttttttatgaaatatttttatatgtaagaactctctaatatgacacaggattgagaacactggactgacttgtaggaaattacttgcctaagatgaagtataaggctccaagcgaatgtacaaaaagcataaattgttaaattaaattcaaaggagagtgtgtctgattaataaggattgtggtggtatttggaaaatggcattggtggcagaatacggttagaggaaaaccttagcaaatagaagaaaacaaacaaaaaagtccctcatgttccattttttcttactgcttctcatcatggtttgttggttttttgtagtgataatttttgggtcctttcttttccttatttgtgtttgctttaccagcggattttatattttcgtgtttctatcatggtaaattttatcattttgttttcagatgcaggactcccttcagcatttcttstaagaccaatctagtcctacaacaaattttagaaaaaaagacaatatagtgtttagaaaaaaagacaatatagtgtgtttatttattttagaaaaaaagacaatatagtgtttagaaaaaaagacaatttagaaaaaaagac

SEQ ID NO: 159424 - DNA, 592 bp, Homo sapiens
acaaatgtttatttttaatatatatgatgaagtcactggaatgtcatcaatttcttagcagtacccatatccggagaagtgttgtcagcattgctatatttgttaagataagtcgatttcattttaattggaatttctagttcatctcagaaatacatttagaagatattttttcccaatagtgtctttcccagtggtttatttaacatcttggcactaattaaatggaaatattatttttaaatttttttctgaaaatactttaagaatatgaatggaatagacactcagaaatttagaacaatgaaactgagtaatggaaaaatagtgttataaaaacggtaaaattaatttaaataaaatgatgattttggatttttacttatcaatttattttttgatacaactgttattctggcaacatcctttgaagtaaaaaagatccaagatctgaattactcagtagttgtgtgactactactaatgcaatcacttaacctsttttccccacactgtcctcatctgtgaagtgaatataataacagtacataatttctaatgatgtggtgattaaattagataactgcttagc

SEQ ID NO: 159425 - DNA, 315 bp, Homo sapiens
ccaacaatccactcctgggaatctatgccataaaaataaaagcactaagatgtaggacaaatgtattaaggatggttattctggcattatttgagaagaaaaacatgaaaaaatgtactgcttagcaatacgggaatggcagaataaaacatgtccctggatatgccagcattrtttgcagacaaattttgagagtaaaaaagttgatacctaacaatatagaaatttcagaataaattatggtacatcatcacaccataaaatattagcagcctttataaacagtgaactgaatttgtcccagctgagttcaga

SEQ ID NO: 159426 - DNA, 516 bp, Homo sapiens
tgccagcattatttgcagacaaattttgagagtaaaaaagttgatacctaacaatataraaatttcagaataaattatggtacatcatcacaccataaaatattagcagcctttataaacagtgaactgaatttgtcccagctgagttcagaaaactaccaggtgagaaaagtgagttccagtggagccaggggatgctggtacggataaagaggaaggaaaggatgagagagggaaatggctaaaatggagaagaaattgaaaatgcacagaaaggcaagcatacaattatctggctaagcaatattgtatatatgggtttatttgtgtaattaacaaaacattcatggatatttgttttgtattcttttttgagaaccagactatcagctcagaggtggaactgaggggccaggcacaggcagatggacaccggctgtgttgagacaccctgggtccttccaaacaggctactaaggccccaacacatgcaacagagcagtgaagtccaggtgt

SEQ ID NO: 159427 - DNA, 516 bp, Homo sapiens
tgccagcattatttgcagacaaattttgagagtaaaaaagttgatacctaacaatatagaaatttcagaataaattatggtacatcatcacaccataaaatattagcagcctttataaacagtgaactgaatttgtcccagctgagttcagaaaactaccaggtgagaaaagtkagttccagtggagccaggggatgctggtacggataaagaggaaggaaaggatgagagagggaaatggctaaaatggagaagaaattgaaaatgcacagaaaggcaagcatacaattatctggctaagcaatattgtatatatgggtttatttgtgtaattaacaaaacattcatggatatttgttttgtattcttttttgagaaccagactatcagctcagaggtggaactgaggggccaggcacaggcagatggacaccggctgtgttgagacaccctgggtccttccaaacaggctactaaggccccaacacatgcaacagagcagtgaagtccaggtgt

SEQ ID NO: 159428 - DNA, 516 bp, Homo sapiens
tgccagcattatttgcagacaaattttgagagtaaaaaagttgatacctaacaatatagaaatttcagaataaattatggtacatcatcacaccataaaatattagcagcctttataaacagtgaactgaatttgtcccagctgagttcagaaaactaccaggtgagaaaagtgagttccagtggagccaggggatgctggtacggataaagaggaaggaaaggatgagagagggaaawggctaaaatggagaagaaattgaaaatgcacagaaaggcaagcatacaattatctggctaagcaatattgtatatatgggtttatttgtgtaattaacaaaacattcatggatatttgttttgtattcttttttgagaaccagactatcagctcagaggtggaactgaggggccaggcacaggcagatggacaccggctgtgttgagacaccctgggtccttccaaacaggctactaaggccccaacacatgcaacagagcagtgaagtccaggtgt

SEQ ID NO: 159429 - DNA, 369 bp, Homo sapiens
taaaactcataaaaacctgtaaaacaacaacacaacaaagaaaacaaagtagctatgtaataattaacatgatgactggaacaatacatcacatctcaatattaacaaggaacataaattgcctaaatgatccacttaaaagatacagattggcagaatgcttaaaaaaaaatcacaaaccaaatatctgctgtctttaagagacccatctaacatgtaagaattcatctaaactcaagataaacaggtrgaaacaaatattccatgcaaatggaaaccaaaagtgagcaggagtagctatccttacatcagacaaaacaaactttaaagcaatagcagttaaaaaagacaaagagggacattatataa

SEQ ID NO: 159430 - DNA, 369 bp, Homo sapiens
taaaactcataaaaacctgtaaaacaacaacacaacaaagaaaacaaagtagctatgtaataattaacatgatgactggaacaatacatcacatctcaatattaacaaggaacataaattgcctaaatgatccacttaaaagatacagattggcagaatgcttaaaaaaaaatcacaaaccaaatatctgctgtctttaagagacccatctaacatgtaagaattcatctaaactcaagataaacaggtggaaacaaatattccaygcaaatggaaaccaaaagtgagcaggagtagctatccttacatcagacaaaacaaactttaaagcaatagcagttaaaaaagacaaagagggacattatataa

SEQ ID NO: 159431 - DNA, 369 bp, Homo sapiens
taaaactcataaaaacctgtaaaacaacaacacaacaaagaaaacaaagtagctatgtaataattaacatgatgactggaacaatacatcacatctcaatattaacaaggaacataaattgcctaaatgatccacttaaaagatacagattggcagaatgcttaaaaaaaaatcacaaaccaaatatctgctgtctttaagagacccatctaacatgtaagaattcatctaaactcaagataaacaggtggaaacaaatattccatgcaaatggaaaccaaaagtgagcaggagtagctatccttacatcagacraaacaaactttaaagcaatagcagttaaaaaagacaaagagggacattatataa

SEQ ID NO: 159432 - DNA, 423 bp, Homo sapiens
ctctccccttgctcacaagggtctccttactgttcctcaaccaagcccacacccgctggcctcaggtccattcgagctgctccttctgtctggaactctttccctagacaccatcacattactcccctctccttctcactaccctttcaacacaacaatctgcccccagcccagtgctgccactacctttactctatgttactttgcttttccataacatttakcaccttttaaaatgataaacatggctgagtgtggtggctcacggctgtaatcccagcactttgggagaccgagttgggcagatcacctgaggtcaggagttcgagaccagcctagccaatatgatgaaacccagtctctattaaaaatgcaaaaattagccgagtatggtgatgcacacctgtaatcccagctacatag

SEQ ID NO: 159433 - DNA, 530 bp, Homo sapiens
tttaagaggccaggcacggtggttcacgcttgtaatcccagcattttgggaagccattgtggacagttcacgaggtcaagagtttgagaccaggctggacaacacagtgaaaccccatttctactaaaaatacaaaaattatctgggcatggtggcgggcacctgtaatcctagctacttgggaggctagggcaggagaatcgtttgaacctgggaggcggaagttgcaatgagccgggatagtgccactgcactccagcctgggcaacaagagtgaaactctgtctcaaaaacaaaacaacagcaacaacaacaacaacaacaactctctctctctctctctctctctctctctctctctmtatatatatatatatatatatatatacagcctttatgaatacaagcacttggcctatctttgtgctttatacaatttaattcattgatgctattactgattgactccaggaagaaaacaaacatgttccttccctttataagcatctttattcccagcacgaattcac

SEQ ID NO: 159434 - DNA, 634 bp, Homo sapiens
ggtgtatttcatcccttatgttcaactgcataaggcagacactcccagagcggccttccataggcctacccctgggaatgcattcctttcccaggtttattccttgctgggaaaagaattcagtgatatttctcctgtttgctttctgcaataagaaaagtatgactctgttctgcccggcccygcaggcggtcagaccttatggttatctcccttgttccctgaaaatcactgttatcctgtccctttttagggtgcccagatttcatattgttcaaacacacatgtttttacaaacaatttgtacagataatgcaatcatcacagggtcctgaggcaacatacatcctcagtttaagaagatgacgggattaagagattaaagtaaagacaggcataggaaattataagagtattgattgaggaagtggtaaatgtccatgaaatcttcacaatttatgttcagagattgcagtaaagacaggcgtaagaaattataaaagtattaatttggggaacaaataaatgtccatgaaatcttcacaatttatgttcttccaccacggcttcagccagtccctcctttcggggtccctgccttcccacaacaatatccagtcttattgcattattg

SEQ ID NO: 159435 - DNA, 609 bp, Homo sapiens
aatggaggtgaaattgcataaagttagcaacgaatgcctatttaaacattagaatcaaagggaggcaaagcaaaacgaaatccatcattaatataaatgtgctccattatcagggtgctgagccaagaaatgccatagggtgggttaagagggaacttagtgacctttcaggactttgaaacagccactcaggaaagtaggtcttgcctattttagacactctgaaaatctaatccttggaatgcagggacattatgggaatgaagtcatttgtcatatattctgagttccacatccagctgatatgtttatgatgattgtagtcgtgtttctatgagtgctctcaggttcatacacaaggtggtccatytgttattgatatttgaccactgtaagctccacaacttatgggttgaaatttatgtgagcacaaatgacttcttttaccttcagtaacacaagagtgacactagaatgtacagacttctagagtcagaatacctgagtttgaatgccatctttgcttcttactagttatgtgaccttaggtaagtaagttaacctctctggctttggtacagagggttgatgagaggattaaatgggtta

SEQ ID NO: 159436 - DNA, 618 bp, Homo sapiens
aagcaaatattttactactccaatgtatcttacaaacacaaatattcaagattcttttgcttccttaaaagtcctcagacttttccatttctgcctctgaaatctttccttttattataatgttcatgatgctctgttttatattactttggccctgttgttactctgataagaaagattaaatttatggtaatatcttgcatctccatgtactttgcatattctgcagcaattgctctgttcactgttaattctttgcctcaccaaagttaattcttttattaacaatcacatgttttcagtgctctgtctagccaatatcttctaatttctttttcccattccctttatgtattattgaattctctaagtgaattatttaactctgcacagcattttggaatatgatttgcatgaaacamcttttacaaactaaaagcatatcatattaaaatgtctataattgcttgaaggaaataccctcaggagtgttttaggctatgtacaatggctgtgaagaagttttgagttccaatgtgacaataatatgaaacaaacaaaaactactttcacagatttgacttacacttaagtagatgaattgtgtttatgtgccac

SEQ ID NO: 159437 - DNA, 614 bp, Homo sapiens
ccaagtgcctctggcttataaataaagccacaacatttaatctgagcacttttggaataagatggaaaatgacaaatttaccctcctcctgaaaacaaacaaaattaaaactgtcttctctcatctcctcaaagaaaaaaaacaaatacagacagaaataaaatacactgccacacatatataacacaaaagtcataatccgtggtgactcttcttcacaaagacaaaagtacatatattcctttatccgtgtcctctttttttctggcacaatttacttaggatttgtcatatrctttcacaaatttttctgttctaatggaatgccatttgtctaccttggactatagaactcttgacatagtctatatgcctatctgtgtaagctatgaccatattctccaatttacatgactctttttgatatgtgacattgtcatttatctcctctgacattttctttggcttatacattttctttcttttttttttctgccatttcttctgcaaccactcttaagaaaaccagataaacattgtaattggatttgaatgtcttccactaatatttctgttaatttctcccttttccatatcctattcatttgtatcaa

SEQ ID NO: 159438 - DNA, 565 bp, Homo sapiens
acttaagtgtagacactgatgtgtacactgtaccccaacatgtggtatatgtctggcacatgataggtgygtaatacaaatttgctaaatattcgttgaacagtgtatttcaggtggggctccattttccacttctgaggagaaggctgacccaagtctacctgataaaaaaaatttgatgttttggttttgttttgtttctgtcttttaaagggatgagtatgtgagctaagtaggtctgatgtggttcaaatgtaggattctattagcactattaagatagaatactctatttctcctaaatttgaagataatttcaaagattcactataagaaacctgagaactttagccaactcacaggaagacagaactaaaaagaggagagagaaggaagaaagaagggatggaggcagaggagaaaaagagagaagaaagagaaggaagagggaattgatgatatagagcaatgcatgatgttataatttgaacacctagatacctatccccaaagcaagagatatctcacggacttttcagttaaaagtggcactaaattctctagt

SEQ ID NO: 159439 - DNA, 541 bp, Homo sapiens
aagaagaaaggaagggagggaaggagggaggaggaaggaaggaaggaaggagggaactaagaaagcaagcaagcccattgcctccgaacatacttgtagcaatacaactaagctcagtgtttgtggaaaggagtttgcatataatcctaatactatgttcaacaatcttctagaaatgccatctacccttcccagcagttcaccctgagtcagcgtcagtttctttatgtaggactcagagcaaaaacaacattatcacatagaagtaggattcagattatctgccatgggagaagttggtttgatatttcatctacagacttcatctgtatacacttcaccatcctttatgggtgagcaatgaggcagcatttgctgtgctgcrtagaaaattaaatagtctacagactgataagatcaaaagcaaggagctaaagtgcaaatagttactagaggtgttaaataaagtgacatgctaattaatatatacacatatttgggatacatttatagaagagtattgcatgtagggtgttgcttt

SEQ ID NO: 159440 - DNA, 413 bp, Homo sapiens
gaacattttgcaatctccaaatagctgaatacatcctactattgggttgcaagcatattagaagtaggtaaaataagtgtggaagatttttaaaattgaaaaatgggaaatgagaactgtcactgggaagaagtgcctggcattatagcaaggggtatgaaatcaaagaaacatgggcaggaggatgatatttataaactaaagcccttgctaactatttttaagaatatttttagttayttcaattttcacttctaattctgtctcctacaactgaggttgcctttgcctaaaatagcaagcaagttctaaactgtaaaccaggagataatatttgcagatctaaacaaggtgtagtcaccttgtctttctacagcttaaaggcaactgttctaagttgtcctatgagtctc

SEQ ID NO: 159441 - DNA, 413 bp, Homo sapiens
gaacattttgcaatctccaaatagctgaatacatcctactattgggttgcaagcatattagaagtaggtaaaataagtgtggaagatttttaaaattgaaaaatgggaaatgagaactgtcactgggaagaagtgcctggcattatagcaaggggtatgaaatcaaagaaacatgggcaggaggatgatatttataaactaaagcccttgctaactatttttaagaatatttttagttatttcaattttcacttctaattctgtctcctacaactgaggktgcctttgcctaaaatagcaagcaagttctaaactgtaaaccaggagataatatttgcagatctaaacaaggtgtagtcaccttgtctttctacagcttaaaggcaactgttctaagttgtcctatgagtctc

SEQ ID NO: 159442 - DNA, 264 bp, Homo sapiens
aaggtgtagtcaccttgtctttctacagcttaaaggcaactgttctaagttgtcctatgagtctccctgcaaaacaaccttcaagccagataatcaaagacactcataattcaactactgcatagaatttaagataattccagagttttacrttatcttagtaaagaagagactaaaggggaaaattctcatattttgattagtgactcaaggaaagattgtatatattagtttaaaatattccatttatttttaccttgctat

SEQ ID NO: 159443 - DNA, 264 bp, Homo sapiens
aaggtgtagtcaccttgtctttctacagcttaaaggcaactgttctaagttgtcctatgagtctccctgcaaaacaaccttcaagccagataatcaaagacactcataattcaactactgcatagaatttaagataattccagagttttacattatcttagtaaagaagagactaaaggggaaaattctcatattttgattagtgactcaaggaaagattgtatatattrgtttaaaatattccatttatttttaccttgctat

SEQ ID NO: 159444 - DNA, 438 bp, Homo sapiens
tgtagtacaaaccttccaagagaaaaggaactgtcagtgctagtattgtggatsaatgtgcatcagaatttacctatatctatagctgatagcctaactggagtaataattacattgatgcccgtggttttcatctctcaaagtgtatcattaaatgataccctatgaagattagacaggttcaaagcagatgagagatttgaactcagagaggagaagtgtctttctttcctaaggccccagacagtggctgagctgaacgcagaccaactgcatccttttacatgagccttgctctgtctactacagtgtatcagccttgggccataatttaattacatgtgttagtgttagttctggtttgggacaactgttatctgacttgcaatttcctttgcatctattagtgaaaaggtcaaaagttttaactataaccaa

SEQ ID NO: 159445 - DNA, 438 bp, Homo sapiens
tgtagtacaaaccttccaagagaaaaggaactgtcagtgctagtattgtggatgaatgtgcatcagaatttacctatatctatagctgatagcctaactggagtaataattacattgatgcccgtggttttcatctctcaaagtgtatcattaaatgataccctatgaagattagacaggttcmaagcagatgagagatttgaactcagagaggagaagtgtctttctttcctaaggccccagacagtggctgagctgaacgcagaccaactgcatccttttacatgagccttgctctgtctactacagtgtatcagccttgggccataatttaattacatgtgttagtgttagttctggtttgggacaactgttatctgacttgcaatttcctttgcatctattagtgaaaaggtcaaaagttttaactataaccaa

SEQ ID NO: 159446 - DNA, 438 bp, Homo sapiens
tgtagtacaaaccttccaagagaaaaggaactgtcagtgctagtattgtggatgaatgtgcatcagaatttacctatatctatagctgatagcctaactggagtaataattacattgatgcccgtggttttcatctctcaaagtgtatcattaaatgataccctatgaagattagacaggttcaaagcagatgagrgatttgaactcagagaggagaagtgtctttctttcctaaggccccagacagtggctgagctgaacgcagaccaactgcatccttttacatgagccttgctctgtctactacagtgtatcagccttgggccataatttaattacatgtgttagtgttagttctggtttgggacaactgttatctgacttgcaatttcctttgcatctattagtgaaaaggtcaaaagttttaactataaccaa

SEQ ID NO: 159447 - DNA, 438 bp, Homo sapiens
tgtagtacaaaccttccaagagaaaaggaactgtcagtgctagtattgtggatgaatgtgcatcagaatttacctatatctatagctgatagcctaactggagtaataattacattgatgcccgtggttttcatctctcaaagtgtatcattaaatgataccctatgaagattagacaggttcaaagcagatgagagatttgaactcagagaggagaagtgtctttctttcctaaggccccagacagtggctgagctgaacgcagaccaactgcatccttttacatgagccttgctctgtctactacagtgtatcagccttgggccataatttaattacatgtgttagtgttagttctggtttggracaactgttatctgacttgcaatttcctttgcatctattagtgaaaaggtcaaaagttttaactataaccaa

SEQ ID NO: 159448 - DNA, 398 bp, Homo sapiens
atattcaaatcttgactctgaatcttattaaggcttctctaacatgtcctttagcttctccaaacaccattttttctcatctttaaaagtgggaaaataatagtgtctaatccataggattattttgaggatttaagtaagataatttggttaataaatatttactgagcttccactctccagcattgtgtggacatacccatgaggaagatatacaaagttcgtcctttaatagactaaacattctagttgggaacacagacattaaatcaacaaactaaaagcaagcatgactgtatcaagtaatacatgtaatgataaaaataaaagccatcgacrtggcagagatcagggaattagatggacaagagtgggaagatttttgagggaggtgaaag

SEQ ID NO: 159449 - DNA, 449 bp, Homo sapiens
aagctggctacatgaaatctcctttataaaatcctagtgttcttcatttcttcttttctctatcctagaattatacaaggttcaagttactcctttacccacgtggcaaatatccaatttaaaaaatatactttaatcctaccttggtttaaagcaygtggagccaccaacaatatagaaatatcgaagtatcaaaactgaaatgagccattttccttccaggcccactatgtgccgttggtctgagtctcatctgccaaaagccatggcctggctgccctttccttgggataggtcagtctgcctgaagctgagctcagcccatttccatgcatcattaaggctagataatgattagctaagttattccttctctaagcctaatgagctgtgaggtgattcgtttgtagttcagtctaaaaaatataaaagtagataacgtttttatc

SEQ ID NO: 159450 - DNA, 576 bp, Homo sapiens
catttaatcctaaaatagttaaggaccatctccatatgccaggccctgcaagatagctaagattaccatgatgacgaagacccagaaatagccatgaaagaatgtagggtttaggcagagcttatttcccgaaatgccattctgaaagctttactactcaacrtgtaggtcccatgacattgttttagaaatgctgaatcttaggctccactccaaacctattcaatcagattccgaacttaaacaagaaacacaggtatgtgggtatacacattaaactttgagaattattgccttaaaatgctaattctatgatatgttctactattaaaaaatcttctttgtttcattcaatttcaaaagttctgggttaaagccagttttaaaaggtttctgtattgaatagctttacagaggttttaatgtaatcatttttcattttaagctacaagaagcacacatgttcaaagaagtgctttgtgtttcccaacactttgaccaggaaaccccctttaatccagaatacttaaaataactaggactttagagaatgcctcttggaaaaattggagtcac

SEQ ID NO: 159451 - DNA, 574 bp, Homo sapiens
ccaccagggcaatgcctggtggagccatgggagagggactgtcactgagaccacaggatattaaaactaccagcatgcaatgccatcatgggagacttgaagcatgagctgagttcagcaaagccatgggagaggtgctctttcctagggctttgggagcccaaacattgtcccaaattatccaggaagtgggatatagagtcaaggaagattattagagcattaaaaatttaatatttgccctcttgagttttggatttacttaggactagttacctgcccttttttttttcttacctattctctcttttggaatgggaatgtctgtcctgtctgttcaccactgtattttaaaatagataatttgttttgatttcacaggctcccagcttgagggaatttgccacaggatgaatcatgccttgaatctcacccatacctcattcagttgaaaccctgggcttwgaacttttgaattgatgctgaatgagttgtgacttttggggctattgaaatggaataaatgtattttgtatttaaagaggacatgagtactgggggtcaggggtggaat

SEQ ID NO: 159452 - DNA, 561 bp, Homo sapiens
atattcttcacagtttgatgttgtgaaagtttctatttccatttgaccaacactcgaaatgcacagtggaaattacaaaatgtcacaaaataaatagatcaaattggatgatggacagtcggtaagagacacaggtgtttagaggacagtaactttaatgtgagtctcaggttgccacctagacttcatgaaaaagtaggaaatacaatgtataataaagaagattgagtgctgagaggctgggctgagcactgctttgagaaaggagagacctcagtcagagttgtcacgggaacaatgggtagagcagaaatgactgtcaacttctgttctagttgtatggmaaaggatactattcaccagtgatgggttcagtacatgctaccctaaggtacagcatctttgcatttgggaaaatagcagaaggaaggccacccttactttccccttgtccttctcccttgaagcaggtcataaaaatttgaatggtcactctctgaccttcttcctctcctgtcccctgcaaggagtgatgagactctctttcaagatgtgtcctcc

SEQ ID NO: 159453 - DNA, 396 bp, Homo sapiens
ataagctaatgatttacaaacatgaatttgttcacttcatgaaactggactctatattttcaaggttaagttagactttcatcattgatatacttaattacacggcaatactacgagatcctctcaaagaatttttggagttagatacactgcctgtctttacattgctttattcagaaatatgtatgcaatggtttctgtttaaaattattagctcccatgtaggaggaatgtgtttgttcacttaagttataaatccaggagcacytagcattttactgccttcaatataatagaaaattttgacaatgtcttcagggtgtttctctgatctcttgactcttgatggtaccacattgtcttctgatattatcacttaggtcatattaattacaa

SEQ ID NO: 159454 - DNA, 559 bp, Homo sapiens
ttgttgagagttctaaatttttaatggtattctggttkgttttaaagttttaataagagtagttccttctcttacatgtatacatatcatatattaaaaataatgtattttctatatctttcattatactccatactcaatattgaccttcaattgacattttattcatttattttagaaaggtttgttgagcatctcttatgttccaggtatgtgtctggacactagggatatagaagtaaacaaaagagatcaaaaggattttctttgtagagctctagttaccgtgggtatgatagacaatcaacaagtagctgaatgaattatatagtatattggaagccattatgtactatggctaaaatgaagctagggaaggcaatgaagaatgctctgtgtagagagtttatcgtttacagtgggtactcagaaaaatctatattgatgaatttgagtaaaaacttgaaagggctgaagaagcaagtcatctgaagatcaggaggcagagtatcacagacagaaggttcagctggtacaaaggccctgaagcaggggaaca

SEQ ID NO: 159455 - DNA, 641 bp, Homo sapiens
aagttctaactgcaccaccaaatggccattcccctatctctcttctccctctctctttgggcctctctattacctaagacaaaacaatactcatattagaatagttgataaccctacaatgcctctaagtgtttgagtgaaaaaraagtgtggtacattttgtatttgaaatcaaaagctagcaatgatgaagcttactgagaaaaacatgtcaaaagccaggatagactgacagctaagcctcttgggccagttaatcaagttgggaaaggaaaagttcttgaaggaatttagaagtaccactccagtgaacatatgaatgataagaaagcgaaacagccttgttcaagatatggagaaagttttagtggtctggatagatcaaattaaccacaacattcccttaaaccaaagtctaattcagagcaaagccctaactatctttaagtctatgatggctgagaaacatgaaaaagctgtagaagaaaaattagaagctagcagaggttgggtcatcaggtttaaggaaagaagccatttccataacataaaagtgcaaggtgaagcagcaattgctgatgtagaagctgcagcaagttatccagaagatctagctaagattattgttgagggtaactaca

SEQ ID NO: 159456 - DNA, 523 bp, Homo sapiens
aggcactgtactggccaatgagaacaatgctagcaagactggtaagtccttgaaattaacttttaaatcatatttatatactatgattgtmcagtatatagcaaatgagttatttttataaaacatgaaggatttttgaggcccaaatgaatgaatagattctatattttatatgcagacattattctatacattacaataaaattagcttatctcctgaagttattacatgttatgtaattttattttatttacacagtaccgtgtctcccatgacccaacaagtaatgttttcagaaatcacttcaactctctttgaagtgaaggcttatctcaagtgaaatactgctgttgcttcacagtggcatcataacataggactggaaataagaagagcttcatttcaaataaacacataatacattcattaaaatgggtgatatgctatgtataatatcctcttatggcaacatttgtgttaatggtgcaaaatacaaaaaaaaaaaacagaagaaacagaaat

SEQ ID NO: 159457 - DNA, 523 bp, Homo sapiens
aggcactgtactggccaatgagaacaatgctagcaagactggtaagtccttgaaattaacttttaaatcatatttatatactatgattgtccagtatatagcaaatgagttatttttataaaacatgaaggatttttgaggcccaaatgawtgaatagattctatattttatatgcagacattattctatacattacaataaaattagcttatctcctgaagttattacatgttatgtaattttattttatttacacagtaccgtgtctcccatgacccaacaagtaatgttttcagaaatcacttcaactctctttgaagtgaaggcttatctcaagtgaaatactgctgttgcttcacagtggcatcataacataggactggaaataagaagagcttcatttcaaataaacacataatacattcattaaaatgggtgatatgctatgtataatatcctcttatggcaacatttgtgttaatggtgcaaaatacaaaaaaaaaaaacagaagaaacagaaat

SEQ ID NO: 159458 - DNA, 363 bp, Homo sapiens
ctgccacagtaatttctagagctccacatacaccttgtcactcttgtttatatatctcaagctgagttttcaaattatttcttttgtctgtgagcagagagaccatcakagatgtcttatggtggcattagagaatcgggtaatttgatatcaataattggctgaagcatgtgtgtaaagaaagacttcatatctggttacacccatattagtggccacaaaagtattcctacctctaatcttgggtgcagtcatttggacaatacaacttttaataaattgtgttttagagtctagtggtcaagaggaatgaacataaatagtcttgtccacaaaagcctgtccttttagaatgaaggctgg

SEQ ID NO: 159459 - DNA, 553 bp, Homo sapiens
tttgctcagaattgggagacctgggttggtttggacaaaactttctagctctaggattctgtgtaaattcattttaatgattactcatagagaaaaaaactcctttttaaagaaaactgtcacaaaaacctgaaaagaaagagaaggaaaagagttaaaaatgaagattaggggccgacatctgcagtttactttgaaasatattaaaaataagaatgtacagagggatggatagatgggcaggtatgtgataaagcaagcagaatagaatagtagcagtatgatctatgtggttagtacatgagtgttcctggtaaaattcaactttacttcatgtttgaaatttttcatagtacaatgttagaaaaaatgaggattgtgatgaaggagacagagatgaaggaaatgctacttctagacataactgatcagcaaaataagcacagaaaagacaatgtcatccagattttcttggagaaacatctccatgtggacttctagaattttacctctaaagattctgaagttcatgctgcattcttatagctatatg

SEQ ID NO: 159460 - DNA, 526 bp, Homo sapiens
ctaaaggagattaattgggaacatagcatacaaatttattaatgtgtacacaggggagaaccactgagtgattgtcccaacaactcaatagatttcagaagcttttatactgtcttgaagttacagaaagaatgggggcttggatcatggcaaaacaggaaatgggagaggaagaagaggaggcctgtctagcaaaggtggtcttgttacatagataaaacctcacaggtarcaaccctcagagatcagagagggtaaatgtttctttcagatttttaaaattatcagatccaagttaatctttcctagatccagaaaagggaaggctttgaagaaaacctggctgcatcacacgcattctctacagatgcaaatcttcctgaaaaaagacagctttgcagggtcacttccttatgcaggacttctgtacagccctctcaaaatatgtcaaatattttggggtgaaatatttttattttcttcacttccttatgaaacctgtgaaacaatataacagtcagaaaat

SEQ ID NO: 159461 - DNA, 472 bp, Homo sapiens
agagctttctaagtcccaaattagaaatactttgttatttttgttcatacttgttagaggaaaaaaaaagttttcaaaatgtaatggttaaagtaataagacaaacagcctgattaaaaatggacaaaatatttaaatagatactttatgaaagaaaatatatgaataactaaaaagctaatgaaaatatatttatcatcattagtcatcagagaaagacaaataaaaaccacaaygagatactgctatgtgcccaccgaaatggcttatataaaaaagattattacaaacaccaagtgttggtgagaacatggaacaagtcgaattcatgtaccctgctgagtggaaagtaagttagcacaataactttaggaaatgtcttggcaatattgtgtaaagttagacatatttgggtaaaatacacttacccaagagaaatgaaagtatatgtacacacaaaggcttgccacaa

SEQ ID NO: 159462 - DNA, 472 bp, Homo sapiens
agagctttctaagtcccaaattagaaatactttgttatttttgttcatacttgttagaggaaaaaaaaagttttcaaaatgtaatggttaaagtaataagacaaacagcctgattaaaaatggacaaaatatttaaatagatactttatgaaagaaaatatatgaataactaaaaagctaatgaaaatatatttatcatcattagtcatcagagaaagacaaataaaaaccacaacgagatactgctatgtgcccaccgaaatggcttatataaaaaagattattacaaacaccaagtgttggtgagaacatggaacaagtygaattcatgtaccctgctgagtggaaagtaagttagcacaataactttaggaaatgtcttggcaatattgtgtaaagttagacatatttgggtaaaatacacttacccaagagaaatgaaagtatatgtacacacaaaggcttgccacaa

SEQ ID NO: 159463 - DNA, 526 bp, Homo sapiens
ctaaaggagattaattgggaacatagcatacaaatttattaatgtgtacacaggggagaaccactgagtgattgtcccaacaactcaatagatttcagaagcttttatactgtcttgaagttacagaaagaatgggggcttggatcatggcaaaacaggaaatgggagaggaagaagaggaggcctgtctagcaaaggtggtcttgttacatagataaaacctcacaggtagcaaccctcagagatcagagagggtaaatgtttctttcagatttttaaaattatcagatccaagttaatctttcctagatccagaaaagggaaggctttgaagaaaacctggctgcatcacacgcattctctacagatgcaaatcttcytgaaaaaagacagctttgcagggtcacttccttatgcaggacttctgtacagccctctcaaaatatgtcaaatattttggggtgaaatatttttattttcttcacttccttatgaaacctgtgaaacaatataacagtcagaaaat

SEQ ID NO: 159464 - DNA, 525 bp, Homo sapiens
tggcctcacccagaagtgattcagcactcaggattattgcccacacccctacgattgcacccccaagcaatcaccagcaagcacccaatgcctagccatccccaccccttcccccaaactacctttgaaaaacccctaacctaccagccttcaatgagattgatttgagtaataactccatctccagtgtggagtggccagcctcacatcaattaaactctttctttactgcaatgctatggtctttgtttgtgcagcaggcaggaagaactcctcaggcagttacacttcgagccttaagacaccttgatgtcagacttccagtgccctgaattgtgacagaataaatttctgttgttttaaaactcccaagtttgtgayagtttgttatggcagttctaggaaactaaaataaatggtgatttttgacgccccttaaatcacctcacttatgggagtgtccacttcatctactccaggctcaccccctcttttcccaaagagaagaaatattttgtgtacgag

SEQ ID NO: 159465 - DNA, 525 bp, Homo sapiens
tggcctcacccagaagtgattcagcactcaggattattgcccacacccctacgattgcacccccaagcaatcaccagcaagcacccaatgcctagccatccccaccccttcccccaaactacctttgaaaaacccctaacctaccagccttcaatgagattgatttgagtaataactccatctccagtgtggagtggccagcctcacatcaattaaactctttctttactgcaatgctatggtctttgtttgtgcagcaggcaggaagaactcctcaggcagttacacttcgagccttaagacaccttgatgtcagacttccagtgccctgaattgtgacagaataaatttctgttgttttaaaactcccaagtttgtgacagtttgttatggcagttctaggaaactaaaataaatggtgatttttgaygccccttaaatcacctcacttatgggagtgtccacttcatctactccaggctcaccccctcttttcccaaagagaagaaatattttgtgtacgag

SEQ ID NO: 159466 - DNA, 558 bp, Homo sapiens
aatagttgcaggctgcctcgaatggcgtggtgaagattaatgagatgatgcagagaagtgccctgagctyctgggacaaaaggcttggtagaagcacaaagtctaattataattttctaacattttcaaagagccctctggaaaggctagctcttgcttctaaatttggagaggatgcctgcctgggacagattgttttctctcaactggcagccccagcagcctcctgcttatgctggccttgatggttctgctctgatccagtggcactcagtctacctggatcccattaacagtagaaggtacagtccccaaaagtgccagcccctgatcttccatgccttttggatggagcaagggtaacccactttggacaggcatcagatggggttcagttattcttagggaatgtagatatagtccctggtctaaggatgggaatgtgacatagattagggagaatataagaagtctgcttggaccttctaggaaaaatttttcctccctaataagaggaagtcacagaaaatcttctagccctatgctcagcttcctgcc

SEQ ID NO: 159467 - DNA, 558 bp, Homo sapiens
gctgcctcgaatggcgtggtgaagattaatgagatgatgcagagaagtgccctgagcttctgggacaaaaggcttggtagaagcacaaagtctaattataattttctaacattttcaaagagccctctggaaaggctagctcttgcttctaaatttggagaggatgcctgcctgggacagattgttttctctcaactggcagccccagcagcctcctgcttrtgctggccttgatggttctgctctgatccagtggcactcagtctacctggatcccattaacagtagaaggtacagtccccaaaagtgccagcccctgatcttccatgccttttggatggagcaagggtaacccactttggacaggcatcagatggggttcagttattcttagggaatgtagatatagtccctggtctaaggatgggaatgtgacatagattagggagaatataagaagtctgcttggaccttctaggaaaaatttttcctccctaataagaggaagtcacagaaaatcttctagccctatgctcagcttcctgcccttgaacacag

SEQ ID NO: 159468 - DNA, 568 bp, Homo sapiens
gctgcctcgaatggcgtggtgaagattaatgagatgatgcagagaagtgccctgagcttctgggacaaaaggcttggtagaagcacaaagtctaattataattttctaacattttcaaagagccctctggaaaggctagctcttgcttctaaatttggagaggatgcctgcctgggacagattgttttctctcaactggcagccccagcagcctcctgcttatgctggccttgatggttctgctctgatccagtggcactcagtctacctggatcccattaacagtagaaggtacagtccccaaaagtgccagcccctgatcttccatgccttttggatggagcaagggtaacccactttggacaggcatcagatggggttcagttattcttagggaatgtagatrtagtccctggtctaaggatgggaatgtgacatagattagggagaatataagaagtctgcttggaccttctaggaaaaatttttcctccctaataagaggaagtcacagaaaatcttctagccctatgctcagcttcctgcccttgaacacagtttgagatct

SEQ ID NO: 159469 - DNA, 519 bp, Homo sapiens
acccacagagatgaactcctccaaactcccaacatttataatatgtttagttctcttagttgctactagtmttgtgatacctgggcagagactggagaagaaggaagatgtctgtcactctttttatatttctatggatgacctcttcttttttgggtactgtatgaggaggctggggtgaagaagagaagagattaagggagggaaaaataagtttccctttcgccttcatagttcttagtgagatggagctctgtaacaaaacacaaagtgaaagataaacaagcaggtttattaacatgtctgcctcatgtgtacattggagatacccaggaagaaataagtaattctcaaagatgttgctttgagttcaggcttaaataccatccttatctgaaataaaaaaagaagggtgtagggaaggctagttatggggaggtatccaggaaaagcatggtgtattaggccattctcatattgctctaaaaaaaacctgacactgggtaatttataaagaaa

SEQ ID NO: 159470 - DNA, 519 bp, Homo sapiens
acccacagagatgaactcctccaaactcccaacatttataatatgtttagttctcttagttgctactagtattgtgatacctgggcagagactggagaagaaggaagatgyctgtcactctttttatatttctatggatgacctcttcttttttgggtactgtatgaggaggctggggtgaagaagagaagagattaagggagggaaaaataagtttccctttcgccttcatagttcttagtgagatggagctctgtaacaaaacacaaagtgaaagataaacaagcaggtttattaacatgtctgcctcatgtgtacattggagatacccaggaagaaataagtaattctcaaagatgttgctttgagttcaggcttaaataccatccttatctgaaataaaaaaagaagggtgtagggaaggctagttatggggaggtatccaggaaaagcatggtgtattaggccattctcatattgctctaaaaaaaacctgacactgggtaatttataaagaaa

SEQ ID NO: 159471 - DNA, 513 bp, Homo sapiens
ggaagctgagggacagaactgtactgtgaacaacagttgttatgctgataaagtctctcaggtaacaggcctcagaagaatagataaaaggtctgtacagatgggcatgggaacagccttcattttcttcttcagtgactaatcccctgacaatgagatttcagacaaatgtttgaaggtaattgtgtttcttttggtagtactgtcctcagtcagctaacttccctagagagagctcctccttgtgtttggaggaagaaaaagggaaggtcagagagaccttgcttctgaggcagcttctaaagccttctaatttcctttaattcaaagtgcttagcatgccaaagaccatactttgyggtattgttttctgagcttcaacactaccttggtccaagtaatcaggcctggagttgaagcagaacagttggttcttctagctgagatcccaaagagatgcattcagtagtgaaaccagcattgcaaatttataaccgagacagtgaaagagat

SEQ ID NO: 159472 - DNA, 584 bp, Homo sapiens
ctgccctgcagagagccaaggcgtccttcagacaggaaataggatcttagtgggtggccgccaagagcgcacagactttgaagcaggaaaagacagtctctagagcaacatggaaaggatccaggtaagggagcttctgtcgtcagggccacattggcaccaagrgggtgcagcagaggggctgacttagaagaaggctagtttcttcccaatgccaccctattccaccaccccaccacccacgttctaaatggttttgcggaagtgaattgcttaatttcccatcttttagcctttaaaacatatttttctccctcaagtatttgttttcaggcaaaagcaagcctccaaaagccccttggttcttctctgtgtgtctcgccccttctgccttgtacaccagactgccggcaagcaagcggggaggtggcgaacagctgggatcctccagtgaaaagtttgctcagcgcgagagatgtcaagaggctgggattgtcgcctatcgggaggtggggagctctctcactcacacttcctgggaaatgaaggagaactaataggcagcccgcatttgcagccagcca

SEQ ID NO: 159473 - DNA, 591 bp, Homo sapiens
attgcagtagcagtattctgtggtagcctggctttagcaaatgctattttataacatgtccagagagaaggcagaagggagacagaacatactaggtagaagccctcttcttcatgtcccttgcaaactgggaatggaagttcttgagattatcttgcacaacttttcaacatcactttatcagcttctatgtcagaagcgcaaaattcaacataaaactcatgggtccttcaaggtaatatttttagtccagttaaccttgtctgtgaaaagccagagtcctgagactgaatgacatatgcaaacatgacatgcrcttggacaacagaataggcaggggaaaattaacagccctttcattattggctttgtaaacccaaacctataaaatttcttccagtgtaggagagaatatggccatcttaaggataagaagactgaggcccagtgtggtcatgtaactagggtatgatccttccaagagggacctgggtaagcatctgattctcattttagatttcagctgctcatatcaccgtttctcccaaactgcaagtaccaaaactgttgcctgcagcctcatattttatg

SEQ ID NO: 159474 - DNA, 304 bp, Homo sapiens
gtgaatttagccttataatatgtcttggacataaatttgttaaaagctaagctatctgatggttaagtgccaaggttttagggtcacagtgcctgggttcaaatccaaaccctggagctaaataatcatgtaactcttcataaattacttacttaacctcttagttttctcattggttaaatgaggataatattttcaatattattgtgggattatggtgatggttaartaagttcagacataaaaagtactctagaaaagcacactcaataaaggtgctataaattgctcctccaggtcagaa

SEQ ID NO: 159475 - DNA, 635 bp, Homo sapiens
ggctctgccacttcttagcgatttatttagagtaagtaacttttcttcactaagcctcagttttcctgtctataaactgaggataataaaagccacttccagaagttgtaataaaaattaaatatgatagtacacgtaaagttcataacagagtgcctggtacatagtatgtgctaacccatagttagctggtgagaggagctcaraagtataaaaagaggtaaaaatcaagtgttggtaagttttgtttcttgtgagcaattctgatccacagtgataggaaaggccaacttaactttttcctaaaatgaggttgggaaactttctgggattcatattatctctatctaccttactgtggacactcaagaaaatcatatgtagtcagatcttgatattagctagctgaaaatgttgaattttaaactcagatatttgtccttaaactatgtgttgaattatttaatttatatgtgcctggattgtgcacaaaattaagacttcatttctaccattgatgattttcaggtgagccaataagattgcaagctatattttcaggtctgtaacttaaggaaagggcacagcctgttaaacatcattttgtcatagaccatcaggttggatactgcatt

SEQ ID NO: 159476 - DNA, 635 bp, Homo sapiens
ggctctgccacttcttagcgatttatttagagtaagtaacttttcttcactaagcctcagttttcctgtctataaactgaggataataaaagccacttccagaagttgtaataaaaattaaatatgatagtacacgtaaagttcataacagagtgcctggtacatagtatgtgctaacccatagttagctggtgagaggagctcaaaagtataaaaagaggtaaaaatcaagtgttggtaagttttgtttcttgtgagcaattctgatccacagtgataggaaaggccaacttaactttttcctaaaatgaggttgggaaactttctgggattcatattatctctatctaccttactgtggacactcaagaaaatcatatgtagtcagatcttgatattagctrgctgaaaatgttgaattttaaactcagatatttgtccttaaactatgtgttgaattatttaatttatatgtgcctggattgtgcacaaaattaagacttcatttctaccattgatgattttcaggtgagccaataagattgcaagctatattttcaggtctgtaacttaaggaaagggcacagcctgttaaacatcattttgtcatagaccatcaggttggatactgcatt

SEQ ID NO: 159477 - DNA, 626 bp, Homo sapiens
aggggatcaaacaaagataacaaataagaataatggaagaaaataagaaatagtagagaaattttgctgagtcaaagaaggacacaaggttacaaaaatgtacaggttctttaagtacaataaattaatgaatatggaaaagaaccatatactttaatgtgttttttttccaaagtatgtttaggaaaatactagtcgtacatgatagtctgagcagggagaraaagggcaaccacatgttaataattttcagaagcagtataaatattatacccttcttggtgctttgtacaaaacatcagatctaggaattccggtggtgaagaaatctgttaatttttatttagcccagactttccctggtttagttgaacaaaacacctagtaatgtctcaatactccctttggaaagaatgatgtaattgatgaaagtacgtgggatttttgagtcagcacctggatttgcatgttagttctctgtgtctcttgattttctcctatcaaatgggaataataataataacaataatacctatattataggtagatatttcctattagggtgcatattagaagttgtggttgcttggcaaagtaacccattaattgatttaattaatagatta

SEQ ID NO: 159478 - DNA, 535 bp, Homo sapiens
ttttcccttaacaatttttacatggaatgaaatatttcaatacagatatattctatgtctatagatagaactctgtgaatagcggttagatctgtatcaagggaggcaaataagctggtgtttcacacactgtgcagagtttgaaagtcaatgtgtgyagatgaaaatgcagagaattcccccacaatattattttcttcatggaattttaccaacaatattgatcagagacccagaatttatggagtaacgtcagtgaacattctgataatattatttccaattaagtttattgacttgacaggccttcaaagatattcctgggttttaatattggcctccttggcttaagaaaacagtctttatttttcccatacttgaatgaacacatagctgcgtacaatccctcatcaacagatacatcactactaattacagaaaaagttatactttttttcttttatcaattgtgaatttggtattgactctaagtcatcagttcagcacttaaccatagaattgaagaagaaatatt

SEQ ID NO: 159479 - DNA, 615 bp, Homo sapiens
ctgttttgagagatctttatatattatagatactagtccactgtcagatatatggtttacaaatatttccttccagtctgtggcttgtctttttattctcttaacaggttctttcactgaamaaaagttgataattttgatgaggtccgatttattaattcttttcttttatagattgtgctttttgtgtcaagtcaaataacccttttcatggctctaggtcttagagcttttctcttatttttctctaaaagttttacacctctacatgttacagtgaggcacataattcattttgagtgaatttttgaataaaatatgaggtttagatttaggttatttatttatttatttttttagccaatgaaagtccacttgcttccttaccatttgatgaaagtctttccttctccatgaagttgcttttacatctttgtgaaaaattagttggggctatttgtgtggatttagttgtgggttctctattatgttctcagaatctatgtgtttatccttccatcaatatcaccttaccttaattactatagcattataacaggtcttcatatcaggtagagtgattcctaccactttattcttatttgtcaagattgt

SEQ ID NO: 159480 - DNA, 615 bp, Homo sapiens
ctgttttgagagatctttatatattatagatactagtccactgtcagatatatggtttacaaatatttccttccagtctgtggcttgtctttttattctcttaacaggttctttcactgaacaaaagttgataattttgatgaggtccgatttattaattcttttcttttatagattgtgctttttgtgtcaagtcaaataacccttttcatggctctaggtcttagagcttttctcttatttttctctaaaagttttacacctctacatgttacagtgaggcacataattcattttgagtgaatttttgaataaaatatgaggtttagatttaggttatttatttatttawttttttagccaatgaaagtccacttgcttccttaccatttgatgaaagtctttccttctccatgaagttgcttttacatctttgtgaaaaattagttggggctatttgtgtggatttagttgtgggttctctattatgttctcagaatctatgtgtttatccttccatcaatatcaccttaccttaattactatagcattataacaggtcttcatatcaggtagagtgattcctaccactttattcttatttgtcaagattgt

SEQ ID NO: 159481 - DNA, 433 bp, Homo sapiens
cccaccaagtattcagctaatgcataaatacttagttgtatctatgcatgccaaattattggcatcacctggttctaaatactgttagaaatattatggcactacttggttctagatatcattagaaatataattggtaaccttatctgaccagattactcatgtgctttggaagttcggattgcttaaatctaactcaaatagttgcccagccaagagtttccatccttggcttttcttaacagccttggaaataagtctcactktgaattgttacaatagcaaagaggcattttattgtgttccaattattgtgtagataatcctacaatattatgacaaagaatgagatattttaatgtaagaaattgtaatataatatttaacaaattaaaaatattatttactgaatattaaatactctaaaaatatt

SEQ ID NO: 159482 - DNA, 614 bp, Homo sapiens
ccaatcatgtgttcactgaaaagaaatttagattctatcctgacacttcagggagtcaatgaagatttttgtaaaagatgtatttgtgctttagaaagcacaatggctctgactatgtgaccaaagtgtaactcaggtgtcagcagcattgactctgcctaactacacaatagaaatccccttgaaccaccccctctaccccacaaaatccatgttcttcccaaagagtagtgggagacaaaaatatgccaccccaaaatttgaagggttgttgagctgaagacaagaggaagcagatacaggacagctctctgccctttctctgtttgcccaaaagcagagcatagacttataaagacaaaagttattgtgcctctccttttttatcagggagaacaaaagttaaccgatgaagatagctttggacccttatcagcccagagatgataccagagaaacttgtattaagaagctttactggccaggcrcagtggctcacgcctgtaatcccagcactttgggaggccgaggcgggcagatcacaaggtcaggagatcgagaccatccttgctaacatggtgaaaccccatgtttctactaaaaatacaaaaaaa

SEQ ID NO: 159483 - DNA, 449 bp, Homo sapiens
agtataacatgattcactgcctaatgttaacagatatcattctttaggagaaaaacataacatcaagaaatattcttctacctaagagaaagtattttatagaaactaatatggtaggtgccatggtttctacttcaggctgcaggcacccattccatggtctgctggccactcagagctgagacttgccctgagccaggaggagctgcctcatccaggctgataacccattgacaatgaaagtccacgtccaacgactgctttgtatgtgcacaaacccagatgccttgccttggctcatgccctaattctggaaaacgctatagagttaaaccagctccatccctttaaaatggggtgaagcctctgtgtcaactgcttcaagttcaactwctttcttcgtcccaacctgcttcctttactccctgacaggcactgttctgagagca

SEQ ID NO: 159484 - DNA, 511 bp, Homo sapiens
gactctctacacatctatttattcaataaaattatatcaagtacctactgcgtatcagttaccatgctagggcttggggatatggtggttgatgaaagagtctcagtttctgacatcatgtgtcttagcaggaaagattacagctccaaaagtctgaatatttagtggatagacaccttatgttggcttctaacctctgctgcagaatagatgaacaacagaaggttgcatttgttaaatgccaaagaaagaggtgccataggactgtagagaaacagttgattactgcaaaggctggactacactctgtgaaggagaagagaattgagacttgagggaaagagaagactagatgactggaaatgaacaggaatggcattccaggaaaaatgcatatggcaggtccaagaagagagacgccatatagcacacatgcacgtcgggaaggatgctcargacgtatggagtcacactgaccttgattcaaatcttagtttggccacttgtatgg

SEQ ID NO: 159485 - DNA, 476 bp, Homo sapiens
atggtattcctcagatctgaaacctgtgctatcttcttatggtctcacaaaatcctccagaatatctcctcataccaatgctcatccctggacactctccatggtgtgatgtgtggggtgtctgctcatgtgggatctgctttctggctcctggcttactgtaattatggtgtcattttgttggaagagtttactcaccaccttcagtttactggtctattatgggctgaattgccaatctccctgcaattcatatgttggagtcctaacccctagtacytcagtatttggagccagggtctttgaagacataattaagttaaaatgaggtcagataggtgggccttaattaacatgattggtttccttataagaagaggggattagacacaaacacagagagaagaccatgtggagacacagggaggacatcgccatctataagcaaaggagagaggcctcagagggaaccaacc

SEQ ID NO: 159486 - DNA, 476 bp, Homo sapiens
atggtattcctcagatctgaaacctgtgctatcttcttatggtctcacaaaatcctccagaatatctcctcataccaatgctcatccctggacactctccatggtgtgatgtgtggggtgtctgctcatgtgggatctgctttctggctcctggcttactgtaattatggtgtcattttgttggaagagtttactcaccaccttcagtttactggtctattatgggctgaattgccaatctccctgcaattcatatgttggagtcctaacccctagtacctcagtatttggagccagggtctttgaagacataattaagttaaaatgaggtcagataggtgggcyttaattaacatgattggtttccttataagaagaggggattagacacaaacacagagagaagaccatgtggagacacagggaggacatcgccatctataagcaaaggagagaggcctcagagggaaccaacc

SEQ ID NO: 159487 - DNA, 436 bp, Homo sapiens
gaattcaagcacctcactatgctctaaatggttttgcatataaatggtgagatcacaggtggagatcacttgctagagattatttaccagtctattcatagcaaatgccattgactttagccacactaatttggaatttatgctacaggggttctgttgaggttyattatactatagaataattaccattcaaaatgtgtaagcaagtttttaggaagtaacattaacgtatttaatctaatataatctctatacccttatcagagcatggcctcccttgctgtgtgtgaaatagttttattgcatttcttgaatgttgggtgataacagatataacagatgacagatataagtcttacagaaacacattaaggataaacaaatgtgggaggactttcctgtttgaagtctatattttgaaacaagtggcaaaata

SEQ ID NO: 159488 - DNA, 524 bp, Homo sapiens
acaggggccactctgtttttctttaacgtcaaggccaagcttcattgacagcacagttgttttgtattgacatgtccactctgaagtccctatcttgtaattatattatattattacattcctttgccattccaaacagaaaagattctaacttcctcttcctcccaatttcttgcccttatatgccctctttatttcttgtgtttgtgggatgtcacagtattgtgttaaagtgtttaaatattaactgtgttttgtcaaacagrttcatttgttatttgatttggggaatctttgaaagtaatacaggatttaaacgttttaggtatttcaatatagtgtttatttaaagtagttctaagctgggaaattagacgttatataatcaaggctttgttttcttacttttacatatctatctaaatactttcagaaagtattttaaaagtttcttctaaacagaactctgaaaatggaacaagatttttaggggcactcctaatttgtagaagccctgagataaa

SEQ ID NO: 159489 - DNA, 606 bp, Homo sapiens
ccttgtctattggaatttgttttggtcttataggcaatgttatgggctgagttttgtccccccactacaataaataatagaaaagatatgctgaagtcctaaccccaataccgtagaatgtgaccttattatgaaataaggtctttacagaggtaatgaagttaaaatgaggtcattaggatagaccttaatccaatatgaatggtgtcctttaaaaagggggaaatttggacacagagacagatacacacaaagggaaaaggatgtgaagacwcacagagagaaggtggccatgagactggagcgctgcgtctacaagccaaggaacaccaaggattgctggtaagccccagaacccaaaagaagcaaggaaggattcttccttagagctgccacagagagcaaggaattgcagacacctgaattcctgacttctactccgcagaccacatgtttctgttacttcagctacatgagtttttggcactttgttatagcagccctaggaaacacagaaagttactaaataacagttggaacaagcactaataattcttgcaaaggggtaataaatggagggtgcagagtgctgtgagagtatatgtt

SEQ ID NO: 159490 - DNA, 541 bp, Homo sapiens
gaattcctaagaagaccacgtttaaagcaccgatgagctgattttggtcctggttcaggaacatctggaggagcagctgtggatgacaagaacgtgtttatctcttttgaaaagaaaaagtggtggacaggcaaggtccttaggtagtgctgcccggcagaatagaggtctgttcccatcatccaaatttggggtggaaaataattgagtaaaaacacagcttgtttttaaatcaaatagcctaaagcttaatgaattgggaaggtagaaaaagagaactgaaattattcaagccatttgcctttgtgcctcccatccactgctaatattgtaatagtaaggatytataaagtctatcagcattgatctcaacattttctccactggcaaaacctaagcttcttccttattttagcaagattaattcctttggggttgtatttgggagatggtattattgatgacttgaaaaagtctccagaatttactataccccttacaagtaggttttttttttttttctttcttttggcaagattga

SEQ ID NO: 159491 - DNA, 610 bp, Homo sapiens
tagtaaggatttataaagtctatcagcattgatctcaacattttctccactggcaaaacctaagcttcttccttattttagcaagattaattcctttggggttgtatttgggagatggtattattgatgacttgaaaaagtcyccagaatttactataccccttacaagtaggttttttttttttttctttcttttggcaagattgaaaagactggacaatgactttttcacaaatgaattcagtagcttgggcttcaaccttataaatttatgatcatggcttttaaaagaattttttttaaagtgcctgtccttgtatttcccaaaactagtaaaaataaaagttaagtatttatgatacttggaaaaaaaaggagacaagttgcaattttatagtctaaactctgactgtaatagccatgcatttttactcttgcagtcaagtcaccaagggctttttttccttcatcataaacagatgaagcttcaagaaaatcaagaggaattggaatctggtaataaatgaactgtagccatgttacattaattattgttactcattttctaatattcctttgtggggagactttacaaaaaatcaattctaga

SEQ ID NO: 159492 - DNA, 613 bp, Homo sapiens
ttagtctggtaaatgtattcctgagcctatgatagaggtgtctcatttcttttgacattatggttttgtgcatacagtatattgcatgactctgcataaaacatactgatatatcttgtatatcaggcctatgatatggtccttcaccatctgcttaagagattagatttctttcttgcaggaccctgggtatatttggaggaaactgaattcaaatattgctcagttttctctgtgtagatgactcaaagatttatgaaacaaaagagaagataacacagatgctgctcatgttatgttattaccacagcactatggctamgtacttagcatttgctacaaatgatggagctggctcaatatagtggaggtctcagggcctgtgttatatggcatgtccagcaccaggagtgacagcaaggtacatgtagaccattcctcccagggtgagctgataatagttaaatcattatttgcagctaatctagagtctacagccatctaaggaaacattatctgagtctctcatggcatcagtgaaaaacaaagcaataatttatctctgactactgagaaggtggaaatgcaatataacaataactagtcctacata

SEQ ID NO: 159493 - DNA, 409 bp, Homo sapiens
tgacaggactgttttccatgcttgacggcagtttggtttaaattagagagaaagtagaccttaagtctctgtcaaacttagtgtctgaagacagtggccacactggcagcaaaacgtgaacctggtcatggttgagtcaacagtggtggatggcactctaggtttaatagaaggagctgatatcctattgatgatatttgcctctgcaaaatattccagttgtcctcagattgctgaagacccttgcaattacttccagcccagtcatgccatcaccattcagatactccaggcaatctaataagccyggtcccatgtttaacaatgcagtgttctgataggaagggttcttatatgaactctcttctaaataaccaaagcagatggatttaggattatcatccatttg

SEQ ID NO: 159494 - DNA, 378 bp, Homo sapiens
acaactaaggtcaagatctgaatcttctaacagcttgatccagacctttagtgagaccctgccagcctttgagacttccctcagcatctgagttgacacagagaagtattaaatatcctggactgtgtctgagagtctgctcctaaataaggctcatttcttttaaaaccatggattaatttcattaagcatgcaagagttctttagaaactttyttgtgtgggctgtagctcattttcattactgtgtttttctccccccgaccactccatcacttaggacaattcattagaaaatccaacagaatttatttgaagtaaccaattaatcctttgagatgcaacaattaatatgcaaattgtatcacattaagaatct

SEQ ID NO: 159495 - DNA, 378 bp, Homo sapiens
acaactaaggtcaagatctgaatcttctaacagcttgatccagacctttagtgagaccctgccagcctttgagacttccctcagcatctgagttgacacagagaagtattaaatatcctggactgtgtctgagagtctgctcctaaataaggctcatttcttttaaaaccatggattaatttcattaagcatgcaagagttctttagaaactttcttgtgtgggctgtagctcattttcattactgtgtttttctccccccgaccactscatcacttaggacaattcattagaaaatccaacagaatttatttgaagtaaccaattaatcctttgagatgcaacaattaatatgcaaattgtatcacattaagaatct

SEQ ID NO: 159496 - DNA, 450 bp, Homo sapiens
catttaaaaaaaatttctacatactagataattttaatatagaacacatgataaggaagatctgccatgaaactgtatgaaaaatatttgaaaaatcagttaatgaagtggtaattttagtctgaatgttttaaaatggaatgccattaaaaacactttaaaatatggtatttctgatacgatttattaatcatgaagaagcacatattgtgttttcatatcttaaaaccaacagagtgacttttgattttcagagagrtttaatgttcctattcaaatttcaactgtttctacaatttttgttttaattgaatgatcttaaagtgtttagagattttacttctcaaacaggccctttcccaggatttcctctcagaaagtacattaaatcttccatatttgaacagcagcttgatctctagagctttcctctggatgtctatttagcag

SEQ ID NO: 159497 - DNA, 455 bp, Homo sapiens
taatttataaaataggtgaaaacaatcagaattcaagccactctctggagaaattgtgaagtatgatgcaggttggcaatagaattaggagtgcaaagattgaagggaaaatgatgtttccagaacctttaaaacaaatgtcattaaaataacactatccatgcagattatatcatgttcaagacaaatctataggcagaagaataaaagagcataccttagcagcatttgaatttgatttaaatattttggagttctcatgttcaaatctttgtaactttaagagaaagcgaagttggataaggcagaatcaatgacatcaagtaaacaaaaagagatatattcttcctcttcttgtctatatgtcaaaatcctttaggactctgattaaatactycgttattctacctcatcatccttccactctttggaagattgatcactcccctgcatgt

SEQ ID NO: 159498 - DNA, 635 bp, Homo sapiens
ttagttcaggcttctaataaatagcattcacacatattttcgtttgaggctttgaaaaccctaaggtggcatatactgtatatgctatattcccaaaagatacatttatttcataatttcacattattttactacctcatttggtttaattttgttatttctcatctatcatttgcttatcttaatttaaaaaaaacttctatattattaagtatttcrtctttcagttggatgactttgcatgtaattatggaaaaaagaatgaaaatcataatttttgttatggttatcatgaatgatattgagagctgcaaacaatttacagttaatcatgagcttagttggagaattaattctttctatgtgggctacatagaagatggatttcaacacgtccctataaaatatcagctcatattttataagtaaaacaaaacaggcatgtacacataggcaaacatatctcacatctaaagcactaaacctttaatatataaaaatcattgtaggactgactttttagtttttaattatttatatttaaaaccattgtaatcacatcaattgggtcataatttagagtgtaaatattcataatatttcatattaagactgtttgacatggtctgagtgtc

SEQ ID NO: 159499 - DNA, 503 bp, Homo sapiens
cccatgctgaagtgcagtggcatgatctcagctcactgcaacctccacctcccgggttcaagccattctcctgcctcaacctcccgagtagctgggattgcagatgcccaccacgcccagctaatttttgtactttttagttgagatggggcttcaccatgttggccaggctggttttgaacttctgacctcagatgatccacctgccttggcctcccaaagtgctgggattacaggtatgagccactgtgatcagccttaaaaaagtatttttggttcaaatgttaatttacacatcaaagagtctgatgtttgtaggaktcataaattttagctgtagacaacaggcttattacagcagaaaaaaaaatatttatataaagtaatctctggaaggggtggagaatcaggcttggaacctttgcaggcaggaacagtgccccggtttactttgcagaagttacctgatgaaagtactttaagactgagcactagtaattacc

SEQ ID NO: 159500 - DNA, 610 bp, Homo sapiens
ctctgaagagctctgcatgcaaggaactttgggttttgttctccaggaaaaaaagaagtctcaaaagtttttaaagatcaatcaacataagtgaataaaaattaacttaagaagatgtgaatatgaaaaaagaaacaggattggtatgttatcacaataattcaaatgagagatgatgagctttgaagttacgcattgacaawaagtgcttctcagatgacaagaattgtcattttcaacatgtcactgacaggacttggaaattatttgactgaaggaagtggtactaagagaagaaaaaatggcatggtgcattaactagaacaaggaacactggtgatataacgggtgttgtttcttcataattaaaaatttttcaagggctatgtggaaggaagaggaaataaatttaataccaaaatttaaactgaaaaatagacaatttgggcataggcctcagaggggaaaactgagactaggggtaagaatttgagagtgactattacatataggtagtaactgaaaccatatctgccatgtgatcaccagctaaagcaatgcaactattttaccaaaagagaatgttgtgtcaaaaggggttaagaaaaaa

SEQ ID NO: 159501 - DNA, 610 bp, Homo sapiens
ctctgaagagctctgcatgcaaggaactttgggttttgttctccaggaaaaaaagaagtctcaaaagtttttaaagatcaatcaacataagtgaataaaaattaacttaagaagatgtgaatatgaaaaaagaaacaggattggtatgttatcacaataattcaaatgagagatgatgagctttgaagttacgcattgacaataagtgcttctcagatgacaagaattgtcattttcaacatgtcactgacaggacttggaaattatttgactgaaggaagtggtactaagagaagaaaaaatggcatggtgcattaactagaacaaggaacactggtgatataacgggtgttgtttcttcataattaaaaatttttcaagggctatgtggaaggaagaggaaataaatttaataccaaaatttaaactgaaaaatagacratttgggcataggcctcagaggggaaaactgagactaggggtaagaatttgagagtgactattacatataggtagtaactgaaaccatatctgccatgtgatcaccagctaaagcaatgcaactattttaccaaaagagaatgttgtgtcaaaaggggttaagaaaaaa

SEQ ID NO: 159502 - DNA, 601 bp, Homo sapiens
tagtacttcaaaattaccttttcatatccatgaacttgagtcaattctggaggattttaaagaatttggtgcatttaaatataccattcaattaaattgcttgagtttttgtttgtgtatctatgttcctgaaggtgrttctatttaaattattaaattgctgtaacaaattttttaaaacttatacaaaagtgctttaggattacaggtggctcactgctgtaatcctagcactttgggaggccgaggcgggcggatcacgaggtcaggagatcgagactaattttctttaaattctaactttattcacacgagtctttcaagtgcagactgggaatgattgaagaaaagcttagtgcataggccagttgttctcattttaagaatcacacaggaatcctgtaaaaatggagattctttctgaagccatattagactataagctccgcaagagtaaggatttgtcgttttgttcactgcagtatcctcagcacctacagtacctggaacataacaggtactcaataaataatagtgaataaatgaatgaaaatctagtatgaagacatcatgggaacttgcacctttaaaattcccttta

SEQ ID NO: 159503 - DNA, 571 bp, Homo sapiens
gaattcatattttaaaatattyccatgaagaaagcaccaggtctgaatgattttaagttagttttaccaaacattcaagaaatagataatcccaattgtataaaagtttttacagagaatcaaaaaagaaggaataattcccaattcattcaatgagtttagtagaacttaattactaagctggaaaggacagtatgagaaaggataattaaaagtaagtctcacccttgaacacagattttttttaaagttaaacaaaatcagcaaatttaataaagcattatactaaaaggatgctacttcatggctaaagattatctatcctaagaatccaaagttgtcttaacattagacagacagtagaaaggagataggttaaacctctgttatacttactctttatactgggagtaataattgaaaatgggttctccatgacagagaatcatgggaacagtgaaaattcctttataataccattaaacccccctgagaaactggtactttcacacattgtaatatctttatatgtatctggtttgagggataaaaatatatttctccatattcc

SEQ ID NO: 159504 - DNA, 544 bp, Homo sapiens
gagagaaagcaaatgcagagaytgaagagttctagagtgggcaaaataggatgtacagagaacatgagacaggtcaagtagaacccacagggtgtcaatcaaaggttttagttcccaagaatgggctggctggagctggtggtataaattctgtctctagaacatccaaactgtgtttttggcccttaatttaatttagttcatttaattttaaaactcagaccaagcagaatatgttgacttatgggtactatccctggaacagactgcctacatttgtgaccctttctagttggtggctttagataaactatttacatgtctgtgcctcaatttcctcatctgaaaatggacatgacagatgtaccaactgcatggagttgttgtgagcattacttttgagaatgagtacaggtactcagggtaaagctcttaactacagtgagggctcgttaattagctgttaaaatctgaaagaatataaacttgcagtctgcaaccatactttccatcacaaggagaaagtcattctgtagtaggaaag

SEQ ID NO: 159505 - DNA, 550 bp, Homo sapiens
ccagaatgctacagaaagctttttgaaaagtatagggtacctgtctagaaccagagttgtaattactgagtttactatgctgataccattgcctggaaaaatattatgccaaatatttcccttcttttgccctttgtgttggcttactttgggtaaaataacattagtcagattcttatccaacccaggtgaaatcctcgtacaaaatactaccagggagtgtcyaaattatttcattgtactgggattccgttgaattaaatgttgttaaaaatctagtattgtgaatcttttggttacacggagatttctgttttgtcaaaatgctattacactctgtaatttagaaagcattaaagaaccattgctgaatgtttggactgcttttgtttgtactagggctgtgttttgcaaactgtgccctgctacactctaaaaaatgtgggagtgggttttgatggtcaaaaatgtttgagaaatacaatgcatgttagcctattaatgggtctgaggtttaagcccaagatttcttgaacatctctctgtctct

SEQ ID NO: 159506 - DNA, 596 bp, Homo sapiens
atagtagtgtatgtgaactgtgatggcagcttgtctaggatggagacaggcagattagagaaatatatccaagtacaactgacaaacttggttttaaaggtcagggggagagctgacttctgagagtctggcagcggtctgcaaatttatatgaagggtcagataataaggattttaagtgtttcaggctctatcgtctctgttacagctgttcaactctgctattgtagtgcaaagcagccatagccaatacgtaatacgtacaactatgttacaattgctctttacttgtagacgtcggaatttgaatttcacataatttttatgccatgaaatatttttcttttaaagtttttttaaccatttaagaatattaaaaccattcttagcttactagtcatatacaatcaggcagagggttggatttggcctacagggctatagcttttcaacctctcagctggggcaacaaactagaagttgttgctacatacygaaacactggaagggaacgaagaaaacgttcaaggattgagagatgtttattgtaggaaaactaagttctaaaaagcctacaaaaagaactgttagaacag

SEQ ID NO: 159507 - DNA, 618 bp, Homo sapiens
atcagcaaactcaagtaacttgtctaagtttatatagttactaagacagaattcaagcctggttctgtttgactccaaaactcaagcccttrtacaaaaccatactggctccttgaacttcagtttgctcatctgtaaagagaagaaatgccattaaatgatttatcatgtctctttggtctccagcactctgtaagtttagtttcatagaggcatgatggccataaggagcaggagacatggaaatacataatgtgcctcaacttgtgacataattttccttccaatttaatgccatcgtctgaaattatgagatgaatgcatgtctaaattcaaagttacaggatgatactacttcagatttaaaatcaaaaagtgtatgaattatccagataggcaatatgagccctgggtattcattcctttcaaacttttccaaaaaatttttaaaaataagacaaaaattatacaatgtgccaccaacaagcatgtcagttattgaaattattaggtaaaaaacttactaatcaggtttttgatctgacacttttttaactgacaaatagtgaagcctttagaagtgatttttttctcttagtgtgctgctgttagttaagt

SEQ ID NO: 159508 - DNA, 618 bp, Homo sapiens
atcagcaaactcaagtaacttgtctaagtttatatagttactaagacagaattcaagcctggttctgtttgactccaaaactcaagcccttatacaaaaccatactggctccttgaacttcagtttgctcatctgtaaagagaagaaatgccattaaatgatttatcatgtctctttggtctccagcactctgtaagtttagtttcatagaggcatgatggccataaggagcaggagacatggaaatacataatgtgcctcaacttgtgacataattttccttccaatttaatgccatcgtctgaaattatgagatgaatgcatgtctaaattcaaagttacaggatgatactacttcagatttaaaatcaaaaagtgtatgaattatccagataggcaatatgagccctgggtattcattcctttcaaacttttccaaaaaatttttaaaaataagacaaaaattatacaatgtgccaccaacaagcatgtcagttattgaaattattaggtaaaaaacttactaatcaggtttttgatctgacacttttttaactgacaaatagtgaagcctttagaagtgattttwttctcttagtgtgctgctgttagttaagt

SEQ ID NO: 159509 - DNA, 588 bp, Homo sapiens
gggcagcacacactttttaaaaagtctttccttatttattcgtaagttgaaaggagagagtgatggcagaatgtgagtgtagtatattaagatatgaaatacaacagctgaatgagtagagtgttttcactgttctggtaagaatgaaatacatgggtatattcaaactaaatgctcttatatatgcatttcaaactggtattgctcaatataaagatatatgatgaaatgataaaattcatgccaataatttaaattaaaatcttctttatttagaacattaaatagcaaataaaacaccataagaagctgaagagggtctgtcaaaggaagaccaccaatctaccaccaggagtcgatttcagttcccctaaatatccaagcatgagggaatgctggcaatgtgaacgttcaatggyaaagtatctgaggattttgcagatgcaggttgtcaaactcatcattaatggaagtaatcaagagctctaagcatcctttttcttttccataagttccagggtgcatgtgcatacattctaaatgctggtctgttaaaccgatgtgcaaattttcaaggactatgccaaa

SEQ ID NO: 159510 - DNA, 548 bp, Homo sapiens
tccctctctaagaatgtctacagtgaarttatttaccacaagatggttttcatccagacagaggtatatctaacacgaataaatattttctgagcatttaccatctgccccacactacagtaacactgtcgagttcactgaaatgaacctgatggcttctgtgattccaggcagcaacatgtttctctaaatccaatgaaaataggaacttataacatcttcagcttacatatttactgttaacacgaagggggaaataaaatgatttcatttccctttcgctgtttgaggagcagtaaagcccagcttcttgactttgagtcatacaccttgaatggtaggttgggcaaactggtggtcaccttcaggtcccaacctgtagagcaacccaccttggaaagcctcatcattcagggaggtaagtgtgccaggctccacaaacctggacttgctggtgaaaagtctctccagccaagaacagcacagccaggaaagggtagtgggaggtagaaagcaagctcagagctggcaagtggacagaatgagtc

SEQ ID NO: 159511 - DNA, 595 bp, Homo sapiens
tctcctctatattgaatcttgtagtggattttattaaatgaagtgtggattttccctctctaagaatgtctacagtgaagttatttaccacaagatggttttcatccagacagaggtatatctaacacgaataaatattttctgagcatttaccatctgccccacactacagtaacactgtygagttcactgaaatgaacctgatggcttctgtgattccaggcagcaacatgtttctctaaatccaatgaaaataggaacttataacatcttcagcttacatatttactgttaacacgaagggggaaataaaatgatttcatttccctttcgctgtttgaggagcagtaaagcccagcttcttgactttgagtcatacaccttgaatggtaggttgggcaaactggtggtcaccttcaggtcccaacctgtagagcaacccaccttggaaagcctcatcattcagggaggtaagtgtgccaggctccacaaacctggacttgctggtgaaaagtctctccagccaagaacagcacagccaggaaagggtagtgggaggtagaaagcaagctcagagctggcaagtggacagaat

SEQ ID NO: 159512 - DNA, 581 bp, Homo sapiens
taaataaataaaacaattaatatctccaactctcatactgtcctgaattctagcccattttaccaactgctattcagatgtgacatcagaatcttaaactcaatacatccacactaaaagtattatctttttgttcccttttccatcagtggcctttgctttcctcagagttaagttattctgactttaccgtcagcatttttgcctcctgctcttctctaagtcctttaaattctattggctttcaaggcatgctgattatctctctcaatttttcacagtctgttgccatatatgaaggtggtactttgaggtgtctagccagctaaaaatggcacattaccttcaagccttcactcacaggatagttttcagggagtcaggtcttatccctcgccccatatctatagttcactggacacctgatctaagctaagccaatcacattctattggttagaaatttgatattgagattaaaaattctaatttactctagataattcctttaatatggaatataaaaaractgtagagccctgagacatccacctgtaaccatgtggaattaataatagaaaa

SEQ ID NO: 159513 - DNA, 257 bp, Homo sapiens
aaaagctttatggcaagcaattgaaatatccagaatttaaaccagggtctgcatgatttcaaaactcatccttgttctgccatatcatgccaccataaatctcctttattcattttgtattaatgcatacatttgtaattttgctttttactcrtcacattctgtggttatttatttgactgtctttcctaccagaaaaaaaaaagtgccttgaaaatagaatgtatttcttatttattttggtacccccacagatc

SEQ ID NO: 159514 - DNA, 551 bp, Homo sapiens
tgtttattggttagtattttcaaaacacttcaaggcaattaaacccttccccctctagatttcagcatccagtttaaaagtctctctgaatacatattatggagaatagggtcatgtcagttaatgttagttgcaaaaacaagtacagctgtcctcaacctgactttcatacttttgtgtgttggtaccataacccagttatttaaattctgggttttttcctcttagaattattattgatgaaattagcattatatagtcataaagtcattacctgcttttctaggctgtctgctgcacccccatggagagctaagtgggyccttaatgaacaagaaaaggttatctggctgcacacggtgtctcccagtctgctctggctagaagctacagcagccacagataacagttcaaagtcatgcaaatgagggctaggctaccactttgttcctcacagaggagatgttcctgtgatccactggcaaatgtacaatggaagcaggaaaaaaggatattttcagagacctaatccctccaggcagctggtttat

SEQ ID NO: 159515 - DNA, 594 bp, Homo sapiens
attctttgctatatcatgttatataatatttatttcaactttccggatcatcaggtctaaagaatgcctggctatggcctgtccatcaagttaacattctagcttgctattgtgtcaattatactttttacatctataaaagcagacaatcttttaagaatacactgaatcaataatttagtgtcttaccaatgtctacattttattttctaactataacttacattaaacactatttgtttcttaagtacataattttccacatgcaattattcactcaactttcaatttttaaactgttaggaaaaacagcttaagatagaaatatgacctaagaatttcaaatacataataattactcagttttagatttgggtgatacttgagtgaaacaaattgtaatgttttgagtgtgactgtctatcctgttgaggtaagttagcatatttggtcattgtataaagaactcattgtgctttgtaatgggccacctccrctatttgtggtttatgcatggcattctaagacatccccataggagagtcactctgctcctaatagaggctgtaggtcagtgtgttgagtcagcatgat

SEQ ID NO: 159516 - DNA, 433 bp, Homo sapiens
atgtagcagcctgcaagtgctggactaataataatgattaaggacctttttattctacaaaaggagcctggatttccatagaaaaaaaaatccattctttaatttctttattggcagtttttattgaaatcttagcatgctgggaaaacctgaaaatctgcccatttttttatagccagagagtacattttaaattttaccattaatatatacartttagtctcgcaaaaaacaccttataaaacctcacttatgagcagtgcttcatttatcatgttaatttttaaattatagaatgggggtatagatgaaaaatgaaggagtgaaagaatacttggtggataaaccataaatccaacaccattttctgttatttaatatcttactagacacagatgtggcagtttctatgtctcacagtttctatattata

SEQ ID NO: 159517 - DNA, 595 bp, Homo sapiens
agaaatcatacaaactaagaccagcacatatttgaaattttggggtggcagcatctggataaatttcagctgccatacttcaaagggactggcaaaggaaaatgatcttgggagccatataagggcttgccagtgttctgttttggggcatatagtatatagagagtatacccttttgggctaccatggaagayggtttccaaaagtattgttttctccatgataccattttttcaggggcccagtgagtcatttcatgaaaaaactgaaggaaaggcaattgtgcacctatgggaactatgggttttttgctaagccctagccaaaattcctcacttgggtctaacatgcctccattctgctgccaggtttgtttctcttgaggagttgatgctgtaaaagaaagttagtgcaggtatttgtaggacgaaaggtacacacccacacatgatgggccatctttcctaggacagcattctttgctgcagcattagccagattatttccttttgcttcttcagtgttagcctttgagtacccagaaatttttatgactgcaagttgccttggcatctgaattgcttctagtaaattc

SEQ ID NO: 159518 - DNA, 240 bp, Homo sapiens
catcaaaggtacatacctcagaataataggcatttatgagagacacatagccagcatcataatgggtacaaactggaaacattgctctgaaaaatagagcaagacaaagatacccactctgaccattcgtgttcaacatagttttggaagtcctagccagggcagtcaggcaagagatggaaatraacggcatccaattaggaagagaggacatcaaacgatcactttttgtaggcaatg

SEQ ID NO: 159519 - DNA, 565 bp, Homo sapiens
gtgtgtgtccttaaacatgaagtgagtttcttgtaggtagtatatagttgagtcttttttgtttttgttttatccattcaactactctatttctttkgattggaacatttaacctatttatattcagagtaattattgatacataaggacttattactgccattttgttaattgctatttgactgtgttataggtccttcatcttgttttactctctttctgtcttcttttatggttggatgattttctacagtgttgtcttttgattcctttttatcttttggatatctaatattgaattttgctttgtggtaaccataagacatacataaaacatctcatagttgcaataggatagttcaaacttataacttaactttgatcacctaaaataactatgcatctacttatcccacacacatatttggttttttgatgtcacaatttacatctttgtatattgtatattccttgacaaattattgtagctattattttaatagttttgtcttttgactgtatttctaaagatataactgatttatacaccaccattacattatta

SEQ ID NO: 159520 - DNA, 546 bp, Homo sapiens
aggcctccccagccacatggaactatgagtccattaaacctatttttttaaattaattacccattttggggtatgtctctatgagcagcatgaaaacagactaatataagggataatgtaaatctattatttctacccatttcaatgaatcttgttcagacttcacccttttcttgttccatcgtcgtctccttcctgcaacccagggtttatttcctatgaagtagcaagagtgattcaaaccctgaaatgacttcccatctcactcaaagtgaaagycaagttctgtattacaacctataaggtcctaaattatgacaatcagtttactcattggtttcattttcttctctctccaattctgcaacagtgccacagaggcattggtcaatgttatggggaatttcaaacctaagatgactctttagtgttcttgcaagttgaaacaaaggggctggaatgttacacctacctaaaatttaaatgagactgtgttgctagtggaatggttcccttctgaagagcaggttatctatatatgcagag

SEQ ID NO: 159521 - DNA, 591 bp, Homo sapiens
agttcttaattacaagcaaaagaggttaaaaatgacaaacttaagtaaaagaagaattattagaatacatcatggactcagaattaatagaaaccttcagagcttcagagggccagaaaaaatattagataaacataaaaagcaggaacccagaggcatggtaagcagtctaccatgctcactaacctgcatctattgccccctctgcaaccarttgagttgtgtagcttccaactatttctcttaatattgtatatcttacaattgaagagagcacaaaattagtgaaaataaattcactcgcctattttctgtctctatcagtctgagagagtaaggatctactatcttttgcttctttaagaaaaggtataacctaacattttcttaccctcacatagtaggaatttccctaccaccaaaactgcataaagataatttccaaatgaaaataaaagcattatgaggaaaaataaatgggttgggggaaaccaaaaaaatacataataattgatcttgatgataatttgaattgataacccacactttcttaataaactatcagtgagcaatggtatgtatgtgatacat

SEQ ID NO: 159522 - DNA, 589 bp, Homo sapiens
aatgcaaacaaaaatacaaaataagacacaggtaacatcagcaatgtaatctctccccatgcaccctgctcacctccaaaccaatatatgttgctgttacagaggagatctctctgaaatacgtgttcatgcaacacaatattttagaagacaatacattttcttgatcatacatgtgttgttagttcaccatttcttttttagaaataagcagttaccccaagactatgattatacattcatgaatgtattatgctctttatatttataccatatctattctctttatatttgaatttatatgcacttgctcctgcacacacatacacacacctgccatattccctgtatcacttttttatrttttaaaaatcagtgaagtccaaagtacactatatttccttatattataggacagcagcatctagaattttgttatgtgtacccatgaatatttttaatgcagatgatgagagtaatggtaataacatgtctgaaaactggaattttttcacttggcagtgattataagcatgacaaattaactttgtcaaaaaaacttcaaaaatgatctctttattatgaacta

SEQ ID NO: 159523 - DNA, 603 bp, Homo sapiens
aaagccaaatgaagaatgtgtacccagaaaaaaggagtaatcaactgggtcaaatgattctgattgggcaattattatgaggattaaaaygtaatcaatggataaagaaaaatcagctgtcatcaatgtcattagtaaaaaaaaaatctggtggaatgagtggacaaaagttgatttgaacaaagctagaacttggaatgagtgtggtatagttttgttgcaaaaagaagcaaaacacgtgaggtgctggatgatgggagaagtgtggttaagagattattattttttttataaactcagagaactaatagcatgatcgtatgttcatatttttaaaactttagtatgcatgagattcatttgctttttaaatgaaaacattaatgtactcacacctgtaatcctatgagaatacacacaggagccaaaattacataacaagataaaaacagtacaatcaatagattacggttcctgaaaaggtgggagtggaaggaattcaaagacagatgaagaactggatttaggaaggaaaaggggcagtttctctgtagtaacagatataagtaattttgtatacttggtattaggaaattaggggaa

SEQ ID NO: 159524 - DNA, 412 bp, Homo sapiens
agaattccgactgccttgcctrtgttaatatagcctgccctggagttcacctctgctggaaatatttcttccatcagtgaaattcaacaccacagggcaaatcttcaaaatacagtgagtattccccactaaactacactagtattctgaaattcagagcattcccagagtagggcaacctggagtgtgtcccaggaccctaaatagagcagaacaccagttttaaaaatggttgcaaaaatgttgtgccgttttagattgtattggatcacatattgacagcacatgcttcccttccaatgggtagagatgagccattccatggattttgaagtaggtttgaaggccaatttcctattgctttcactggtcaccaaaattgctagttccttctttgtttagcctattttag

SEQ ID NO: 159525 - DNA, 412 bp, Homo sapiens
agaattccgactgccttgcctgtgttaatatagcctgccctggagttcacctctgctggaaatatttcttccatcagtgaaattcaacaccacagggcaaatcttcaaaatacagtgagtattccccactaaactacactagtattctgaaattcagagcattcccagagtagggcaacctggagtgtgtcccaggaccctaaatagagcagaacaccagttttaaaaatggttgcaaaaatgttgtgccgttttagrttgtattggatcacatattgacagcacatgcttcccttccaatgggtagagatgagccattccatggattttgaagtaggtttgaaggccaatttcctattgctttcactggtcaccaaaattgctagttccttctttgtttagcctattttag

SEQ ID NO: 159526 - DNA, 570 bp, Homo sapiens
ccctaaagaataaagctatattgttcagataaggccagagacttttaagaaaattagcaatcacttttttcttgaccttttcactaagcagacaaagtgattcaactggagcaaatgtaaaagattattaatacaagaaaacataaaattaagtatcagataaaaacaatagctacattagtaccattttggctggcatgcatcaacaccaaatacaaaaccacaaaccacagaaagcatgcaataggagttaccgtgacagttaaggtggtaatcctctgttgggaaaatgtgttgacaaagacagagttatctattttgtgtgccaaagtacagtaatacatttgtgaaataatcaactttttgaatatgtttggctagtctgatatcttaaaaggatttgacaagatactgagaacatattaccctatcttcaatacagtatagttgtagagattttttaaaaattatttttagaatcctatttwaaaaatctatggctgaagaaaaagaaatgtcaaaattttaattcacctgattgaaaaaaataatgcagtaaagtcatatatg

SEQ ID NO: 159527 - DNA, 612 bp, Homo sapiens
tttatatttctaatatggtatgattataactgtaatatatttctatttatctgattatcctagagtatttttggcagattgttttaaaagggataacaatgacatacctgcaaaactgtaaatatccatcactggttagagaattagaagaataaatgtctaccatctcttctcaatctaatgtattaattttatgagggactcaattcactagagcactatgttagggaaaccaatagttttgatgtgaaaagataactataagctatttataagcatggcaaatagttgcctcacaaccaacccaataagaataataaacatttaggttgagacataagcatgaactagttgactatgatggatattggctgtttagtagtcatatacaattaaagatgagaaaaagaaacagaagtatatcktttcatattgaaatataggtgtcacattttttaaaaagtacaatgcttttaggcatatcagtaaaaagtgttcagaagctctgaaaaatcaccctaagaatagtattaggtttcgtggactcatagaaaaaaatttattccaataacatccttattttgcagataagatcaatgaagtatagataca

SEQ ID NO: 159528 - DNA, 479 bp, Homo sapiens
tctgatttatgatatccttcagtgaggcttttctggaaattgcacactcacaatcatgaatttgtaactaactgtttgaactgtgccaattaaaatattgttgaaaattcatggggctttgcattttayttttttaggttaactgttatgttttcctttttactgaaattggaaagtgagagaaatcatacagaggttgtatggagaaaaaaattaactaactgaggcagataggttgttgctataggatatggtcagctatcaaattgtgtctatcagttttccttgaccactcttttttagcctgcatctcacatggagaaaaaataaaaacactaaaagcattggatcttagctacatataaatactatacataatcttgaagaaagattattacttcccttagtttagatatgtgctataatagaatattctcgggttatgatgcatttgctgaaagtcaaattgtggtgttaac

SEQ ID NO: 159529 - DNA, 572 bp, Homo sapiens
ctcatacccacaatgacatggttttgtattgcatggggaatcagtgcatattacaaaacaatgctgactaataataacattggcacgttattcttcatactgtagtgtttctttcccataaagcttgaggctcactaaaatattactgaaaaatgattcctatagcctggcacagtaacattcatatgacatttttctgttgagtggttaatctgagttgatttaccaatcaaataatgaattgaattccaaagtgataatacccaagacacctggtctcagacacacctatgtgaagaagagtccactgccctttgggagggaagagctcacccaaatgagtttacatcagttttatgtcatggtactgaagtgatttgttaaggaagaatgttgatccatcttgagtgagtgaycaacttactcctgaatgttcttcccatcttacttcctatcacaactgctctcatttcaccctgacttctggggtcatcattgtctttgatcatgatcaactaagccacagagaaatgtctctttgccccatattcaagaaatccaagtgtttttga

SEQ ID NO: 159530 - DNA, 492 bp, Homo sapiens
tgtgggaacaaatctctggctcctccaggatgaaaggggctcaataaagtcaacttgccgccgagtggctgatcggtttcctcaaggaatagtgtcatattggaggctcagtgttgttctctgctgtgagtagattagctatgccaggggccaatatttaaaactgtcttggtaagtgggagtccgtgctgttgttccttgcatggccyccatctctgccactgtgtccactttgttcatgagtccattgtgcctgttgtggggtggctggtgacaaaaactggctaatgtcaaccagtcaagtcattttgcctactttgttgttcagtctctcttccggggtggacacttcttaatggacattacatgtgatacaaaaataacaagtagtatttactccctataccgatttatatgcctctatcccatatctcctttgtctcaggtattctagtacattcagagtcctggctagctagccaggccattcac

SEQ ID NO: 159531 - DNA, 542 bp, Homo sapiens
ctgcattatttgatgttttcaggcaccaactccagatacttacagaggaaaatatagagaagaccatgcagacycagccagtgcttatgcagatgaagtgaagaaaatcattgaagatgctcataacagtggaaggaaggtttgtatttatagctttggaaacatctcaacatcttttataaaagggattaaaactgttgggattcactgaagagatggaaaaggattatatctaatgtccctttctgttcttctctagttacgttttcacttgattcaaatttcaaaaatgcgttattacaatcatgcctctaagactgtctacttgtatttatcctggaaatacaaccattatctggttccagaactggttgcctaattctgaccttttcagtggtatgcagggtctagtctagaggggtaggggtcattatatggtgaagggaagagaagagacaaagtagcccttggacctgaggaccaatgcagatttccagacccacaagggagccttggtgcttcccttgaacttcgaccttctt

SEQ ID NO: 159532 - DNA, 542 bp, Homo sapiens
ctgcattatttgatgttttcaggcaccaactccagatacttacagaggaaaatatagagaagaccatgcagactcagccagtgcttatgcagatgaagtgaagaaaatcattgaagatgctcataacagtggaaggaaggtttgtatttatagctttggaaacatctcaacatcttttataaaagggattaaaactgttgggattcactgaagagatggaaaaggattatatctaatgtccctttctgttcttctctagttacgttttcacttgattcaaatttcaaaaatgcgttattacaatcatgcctctaagactgtctacttgtatttatcctggaaatacaacmattatctggttccagaactggttgcctaattctgaccttttcagtggtatgcagggtctagtctagaggggtaggggtcattatatggtgaagggaagagaagagacaaagtagcccttggacctgaggaccaatgcagatttccagacccacaagggagccttggtgcttcccttgaacttcgaccttctt

SEQ ID NO: 159533 - DNA, 600 bp, Homo sapiens
tgctttgtaattgaccaagtctagtcacgtgcattaaactgtatgccatgaaagagacaataaagtaaaagctttggagagaaaacagtctactttttgttctgctatttgagaagaaagcataatttatatagtcacagtctctttttattaataggagtaacaatagttactatctagtctgtgtttattatatttccaagtattgtgctacacacacagtttcttatgtagtcttcccaactgcttaatgacataagtatattattatctgaaagcctgaagaactaccaaaggtttaaaaaggtacatgttagcctttaagttcattctctctgaatccagctaactgtgctaagatctacaattcaatatttgtgagtttccatctttcatttcttttaaatgttactaaatatattgaatgactccatgtggcatcttatctttaactttggacagagggttctggtaggatgtgctggtatscaaaccggggttcagttgaaaaacaggcacccacttcttatcttgctatagataagaagaaaaaaagatgagggatacagggctataacacagggatctagacgttaggac

SEQ ID NO: 159534 - DNA, 567 bp, Homo sapiens
tataccctggccagttacagacagttgcttagtatgtaagaaaatgaataaacaaactataaatagattgccccttgggggaaggagtccaggcttaaggccattccaaagtatccacaytgattacacagacatgcctccaattggtcgtctaaagtatttattagtaatagtagctcaccttactcattgggtagaagctatttccttttcaagtacaactgctaataatgtagttaaggcattatttgaaaatattatacccaagtttagattaatagaaaacattgattcagataatacaactcatttcactgcacatgtcattaagaaattagcccaggtactggatataacatggaaatatcatattccctggcacctaccttcatcaggaagagtggaaagaatgaaccaaactataaaaaaagccacctaaccaaattagtcttagagactcggttgccatggactagatgccttcccattgccctgttgagaatctgaacaagctccttggagagatgttggcttatccccttatgaagtgttgtacaggttgccctg

SEQ ID NO: 159535 - DNA, 535 bp, Homo sapiens
ctccatccaggagatgcacccttctatagaagtaaaattgccttgctgagaaaattcatgtttgagggctatttcttttgcggcactgaaaatttatttccaacattcctaacagtacaaacacttggaataagtagctcctttctcccttccccttttccagcggcagcaacacctccaatatgaacttggagattggcatctatcatccttccattttaacccatccaaggactctttagaaaccatcaacaaaggctattctctaagacatatggcataggtcaggggctaggagatgttttctttgaaagattacataaacatcttaggctcacaggccatatgctctctgtcacacctattcaactctgccattctagcatgaaggcagccatagacatatgtaarcaaatggatgttgctgtgtcttaataaaactttataaaaagggccagatttggcctatggagctgtagtttgctgactcctgggaatagaccttatttaattaataattgccttagttagattt

SEQ ID NO: 159536 - DNA, 587 bp, Homo sapiens
cactgttccatatgatgcgtaggctgaattctcccacctttgcttcagtcctagggcccaggagctgcaatgggccattctcatctgaaggaattgcctcagcttkttagaggactggcatgaaaggaacaatcgtgatagtgggcataacacataaaccctctgggactccctttggtcatccacaaatggcagtaaagagatgagcgcctccttgttctcactcacaggtgggaattgaacaatgagaacacttggacacagggtagggaacatcacacactggagcctgtggcagggcggtggggtggtctgagggagggatagctttaggagaaatacctaatggaaatgacgagctgatgggtgcagcaaaccaacatggcacatgtatacctatgcaacaaacctgcatgttgtgtacatgtaccctagaacttaaagtattataataaaaaaaaagaaatgagcgcctcctttactggatacagctgctactttcttaggaaagttaggcttacaactaaggaggcagatatcccaactgttagcatccaggagatgtttaaagagcttaatagtcacat

SEQ ID NO: 159537 - DNA, 565 bp, Homo sapiens
gctgaattctcccacctttgcttcagtcctagggcccaggagctgcaatgggccattctcatctgaaggaattgcctcagcttgttagaggactggcatgaaaggaacaatcgtgatagtgggyataacacataaaccctctgggactccctttggtcatccacaaatggcagtaaagagatgagcgcctccttgttctcactcacaggtgggaattgaacaatgagaacacttggacacagggtagggaacatcacacactggagcctgtggcagggcggtggggtggtctgagggagggatagctttaggagaaatacctaatggaaatgacgagctgatgggtgcagcaaaccaacatggcacatgtatacctatgcaacaaacctgcatgttgtgtacatgtaccctagaacttaaagtattataataaaaaaaaagaaatgagcgcctcctttactggatacagctgctactttcttaggaaagttaggcttacaactaaggaggcagatatcccaactgttagcatccaggagatgtttaaagagcttaatagtcacat

SEQ ID NO: 159538 - DNA, 444 bp, Homo sapiens
taactattgtactatatgtctcccaaatataagaaacagtaagaaatactgaaaataaccaattcattatttcattcccctatcagttcaactgtccaactaagaagtatccaaattcagtgagtttatattgtctttagactttgttagtcaagacaaatgagacttattmttggagatgaagtgcagaaacattctcagggaccccctcagcgtctaagttaccattatccacaaggcaggtgggttcgattgcctgccgggtgacagtccaatgaccacaaccaaggaagatttaacaaggggactttattacttgcaacaagcgaggacaccaggaatagttcccaaagtggtgcctccctgagcaaaggtgaaaacagggctttcattgggctagttagttagctgagttaagttagttagtacgtaaaggtggagaag

SEQ ID NO: 159539 - DNA, 432 bp, Homo sapiens
cctggcccaacccccacctgatggtccctccttatccagcctggtacctgaagacaaaggccatataaccttgggagttctagggccccgcccactgccggtccctctccacgctactacagctgatgctttctggaaatgaccacctcgtggcaggaggccaaccagcacaaaaatagagtattaaaccaccaaagctaaggatcctcatggagtccactgcactccccgctcccccsgctaactccaccagaacaggcgctggaatccacgcctgacagatccacagatggttcacatcacaggactctgtgtggacaaccctcagtaccagcctggagccgagtagactcgctgggtggctagacccagaggagaaacagcaatcactgcagttcgtctcacaggaagccacatccataggaaaagggg

SEQ ID NO: 159540 - DNA, 534 bp, Homo sapiens
aagggaagagaaaaatcaaaaccttgagccaggttccctgtttctggctccagggcctcgtgggcccaccagcttcctgtactcagtatctgggatattcccatgaatcattacaataaattctgttttacttaaagcaaccaagtagctttctgttccttgcaactaaatgatttcggcttaaaacactcttggttttcttaatacattgacttcattcgytaatctttataatttttttaatttttaaaaagtaaaatctaatgaggaaaagatgctaatttttcctatttattcctcctgcagcagagatttttagttgcctacctcatatccattctaccctccctacactttggaggtagcatgtgcctaactaaaaactgctgttccaacctctccaagtcatccactggggtcccaaggaaaacccctgaaaggggctgactcagatgtcatgtgagttttgttccttccttcctcttagaatctttctgtctggaacgtggacatgatagctggagctccagcagc

SEQ ID NO: 159541 - DNA, 250 bp, Homo sapiens
gaattctctggtccagcctgactgcattgtaacttttttctttggccgccattcagcttcctggatgcacagggataaccagtgttaagtgccttcacctggggttctatgcccagggcaacagtcagtggtgactcagggtttggtgtttccacactccacaggggctgctctgtgctccgtgccactcaagatgaagcaagtgccrcaacacctgtgctccctgaaccctggatgagcagctgtgatg

SEQ ID NO: 159542 - DNA, 455 bp, Homo sapiens
tcctctggcctccaaagtctctgatgagaaatccagtgtttatcytgaggatctcttgtatgtgacgagttgctactctctggttgcattcaaaactttttctttgtcttcatcttttgtcagtttgattatgatgcatctcggtgtgggtctctgagttcatcctacttggagtttgttaagcttcttggatgtttatattcatgactttcatcaaacttgggatgtttttggacattatttcttcatataatctatcttcccttttctctcttcctctggactgcatcagtgtgtatgctgatctgcttgatggtgtctcacaggaaccttagactatgttcacttttcttcaattttttttcccttctatttcagttgtgctatgtccaagtttactaattatttcttctgccactcaaatatctctttgaatcacctagtaaattttttat

SEQ ID NO: 159543 - DNA, 478 bp, Homo sapiens
tgctctcatatagtgcctggtgggagtgtaaatttgtgcaaactctctggagtacagcctgacagtacgtgtcaaaatccctacaacatgtgcatatcatctgacttagcagtttcacatctaggaatttatcttcggaatttcttctaaccagagctgtgaacaaaagtctacccataagatatttatcccaacacgctttttgatttttaaaaatggaaaaagactgaatgtctgaaaaaaagtatattggktgaattaattgtggtgtatccaaagaataagccactgtgtgttataaatattaatgatgttgatgcacaaaatatatttaatagcctggggaaattattaagatatattgaaataaatcaggggataaaaccacacatttagcatattctcaattttttttaagtagttatatcattggaaaaaggctgagaagatatcaactagtatgtttctccgaataact

SEQ ID NO: 159544 - DNA, 429 bp, Homo sapiens
gtaacctttcgaggaaggaacactaggttgggggtaarctgcaacatcctgaatctgtcagaaaacagctctgttaacagctcttcacatccctgagtctcaaatttctcatttatcaacgagcccactggagtaaataattcagaaggctccatccaagctctgatattctgaaatacaattttttcttgcttgcatttttgaaaaaattctgtgctagttacaaaaaacaaatgtttattgtgaaaaacttggaaagtacaaaaaaagaagaaaaaaaatccataatccttacacaagtacaacatagttaacttttgaatgagtaaaagagaaagacagacaaaaacaccaacaaagcgtctgtcagtttctttgcttttcagtatcaaaacacgaagaaaatatgaataaccatttaataaccat

SEQ ID NO: 159545 - DNA, 429 bp, Homo sapiens
gtaacctttcgaggaaggaacactaggttgggggtaaactgcaacatcctgaatctgtcagaaaacagctctgttaacagctcttcacatccctgagtctcaaatttctcatttatcaacgagcccactggagtaaataattcagaaggctccatccaagctctgatattctgaaatacaattttttcttgcttgcatttttgaaaaaattctgtgctagttacaaaaaacaaatgtttattgtgaaaaacttggaaagtacaaaaaaagaagaaaaaaaatccataatccttacacaagtacaacatagttaacttttgaatgagtaaaagagaaagacagacaaaaacaccaacaaagcgtytgtcagtttctttgcttttcagtatcaaaacacgaagaaaatatgaataaccatttaataaccat

SEQ ID NO: 159546 - DNA, 438 bp, Homo sapiens
ggaaggaacactaggttgggggtaaactgcaacatcctgaatctgtcagaaaacagctctgttaacagctcttcacatccctgagtctcaaatttctcatttatcaacgagcccactggagtaaataattcagaaggctccatccaagctctgatattctgaaatacaattttttcttgcttgcatttttgaaaaaattctgtgctagttacaaaaaacaaatgtttattgtgaaaaacttggaaagtacaaaaaaagaagaaaaaaaatccataatccttacacaagtacaacatagttaacttttgaatgagtaaaagagaaagacagacaaaaacaccaacaaagcgtctgtcagtttctttgcttttcartatcaaaacacgaagaaaatatgaataaccatttaataaccatttggcttcccgcctcacaagt

SEQ ID NO: 159547 - DNA, 429 bp, Homo sapiens
gtaacctttcgaggaaggaacactaggttgggggtaaactgcaacatcctgaatctgtcagaaaacagctctgttaacagctcttcacatccctgagtctcaaatttctcatttatcaacgagcccactggagtaaataattcagaaggctccatccaagctctgatattctgaaatacaattttttcttgcttgcatttttgaaaaaattctgtgctagttacaaaaaacaaatgtttattgtgaaaaacttggaaagtacaaaaaaagaagaaaaaaaatccataatccttacacaagtacaacatagttaacttttgaatgagtaaaagagaaagacagacaaaaacaccaacaaagcgtctgtcagtttctttgcttttcagtatcaaaacacraagaaaatatgaataaccatttaataaccat

SEQ ID NO: 159548 - DNA, 399 bp, Homo sapiens
ctcttctaaagagcagttatcaccacactaagcataaaaaytcaactttgcctttcccctatcttatctgttctgtcttccccatactgactgttctattgtcaagatgcaatttgttaataagattcatggccaaaaataaagtagaagtggactttgcaaaaccttgtgaatataaagtgaagtcctaggcctaaaatatggcagaaagttgcttattaaaggaccttcgtctctcggcatattgaaatgatgtcagagtatgcaattataaatacgattgtcatatttaccatgggaagatatctatagtactttgctgggctgggttacagaaatatgtgtaatataacaccacttctactaaaatatgtgctaagtatgcaaagaaaagaattc

SEQ ID NO: 159549 - DNA, 399 bp, Homo sapiens
ctcttctaaagagcagttatcaccacactaagcataaaaattcaactttgcctttcccctatcttatctgttctgtcttccccatacygactgttctattgtcaagatgcaatttgttaataagattcatggccaaaaataaagtagaagtggactttgcaaaaccttgtgaatataaagtgaagtcctaggcctaaaatatggcagaaagttgcttattaaaggaccttcgtctctcggcatattgaaatgatgtcagagtatgcaattataaatacgattgtcatatttaccatgggaagatatctatagtactttgctgggctgggttacagaaatatgtgtaatataacaccacttctactaaaatatgtgctaagtatgcaaagaaaagaattc

SEQ ID NO: 159550 - DNA, 399 bp, Homo sapiens
ctcttctaaagagcagttatcaccacactaagcataaaaattcaactttgcctttcccctatcttatctgttctgtcttccccatactgactgttctattrtcaagatgcaatttgttaataagattcatggccaaaaataaagtagaagtggactttgcaaaaccttgtgaatataaagtgaagtcctaggcctaaaatatggcagaaagttgcttattaaaggaccttcgtctctcggcatattgaaatgatgtcagagtatgcaattataaatacgattgtcatatttaccatgggaagatatctatagtactttgctgggctgggttacagaaatatgtgtaatataacaccacttctactaaaatatgtgctaagtatgcaaagaaaagaattc

SEQ ID NO: 159551 - DNA, 399 bp, Homo sapiens
ctcttctaaagagcagttatcaccacactaagcataaaaattcaactttgcctttcccctatcttatctgttctgtcttccccatactgactgttctattgtcaagatgcaatttgttaataagattcatggccaaaaataaagtagaagtggactttgcaaaaccttgtgaatataaagtgaagtcctaggcctaaaatatggcagaaagttgcttattaaaggaccttcgtctctcrgcatattgaaatgatgtcagagtatgcaattataaatacgattgtcatatttaccatgggaagatatctatagtactttgctgggctgggttacagaaatatgtgtaatataacaccacttctactaaaatatgtgctaagtatgcaaagaaaagaattc

SEQ ID NO: 159552 - DNA, 571 bp, Homo sapiens
tcaagcttcctgccagtgctgggagctcaggagatgcccatggatttctttatctaaagcaccaggtgtgcggtggggcagtgtggrggaggggagaatagaaaatggtggaaacttaaatgctgtcaatggccagacatcaaaaatggggccaaactctgttacatctaccttttcagaaatcttttttcacttatctcaaaatagctctttaatgttattgtgtcttttttttttttgagacggagtcttgctctgtcaccaggctggagtgcaatggcatgatctcagctcactgtgacctccgcctcccaggttcaagtgattctcctgcctcagcctcccaagtagctgggactacaggtgcccgtcaccatgcccggctaatttttgtattttttgtagagacagggtttcaccatgttggccaggatggtctcaatctcttgacctcatgatccgcccgtctcagcctcccaaagtgctgggattacaggcgtgagccaccgcgcccggcctattgtgtcttctgttgatgaggaatctattttgctttttccatctccccttt

SEQ ID NO: 159553 - DNA, 571 bp, Homo sapiens
tcaagcttcctgccagtgctgggagctcaggagatgcccatggatttctttatctaaagcaccaggtgtgcggtggggcagtgtgggggaggggagaatagaaaatggtggaaacttaaatgctgtcaatggccagacatcaaaaatggggccaaactctgttacatctaccttttcagaaatcttttttcacttatctcaaaatagctctttaatgttattgtgtcttttttttttttgagacrgagtcttgctctgtcaccaggctggagtgcaatggcatgatctcagctcactgtgacctccgcctcccaggttcaagtgattctcctgcctcagcctcccaagtagctgggactacaggtgcccgtcaccatgcccggctaatttttgtattttttgtagagacagggtttcaccatgttggccaggatggtctcaatctcttgacctcatgatccgcccgtctcagcctcccaaagtgctgggattacaggcgtgagccaccgcgcccggcctattgtgtcttctgttgatgaggaatctattttgctttttccatctccccttt

SEQ ID NO: 159554 - DNA, 571 bp, Homo sapiens
tcaagcttcctgccagtgctgggagctcaggagatgcccatggatttctttatctaaagcaccaggtgtgcggtggggcagtgtgggggaggggagaatagaaaatggtggaaacttaaatgctgtcaatggccagacatcaaaaatggggccaaactctgttacatctaccttttcagaaatcttttttcacttatctcaaaatagctctttaatgttattgtgtcttttttttttttgagacggagtcttgctctgtcaccaggctggagtgcaatggcatgatctcagctcactgtgacctccgcctcccaggttcaagtgattctcctgcctcagcctcccaagtagctgggactacaggtgcccgtcaccaygcccggctaatttttgtattttttgtagagacagggtttcaccatgttggccaggatggtctcaatctcttgacctcatgatccgcccgtctcagcctcccaaagtgctgggattacaggcgtgagccaccgcgcccggcctattgtgtcttctgttgatgaggaatctattttgctttttccatctccccttt

SEQ ID NO: 159555 - DNA, 571 bp, Homo sapiens
tcaagcttcctgccagtgctgggagctcaggagatgcccatggatttctttatctaaagcaccaggtgtgcggtggggcagtgtgggggaggggagaatagaaaatggtggaaacttaaatgctgtcaatggccagacatcaaaaatggggccaaactctgttacatctaccttttcagaaatcttttttcacttatctcaaaatagctctttaatgttattgtgtcttttttttttttgagacggagtcttgctctgtcaccaggctggagtgcaatggcatgatctcagctcactgtgacctccgcctcccaggttcaagtgattctcctgcctcagcctcccaagtagctgggactacaggtgcccgtcaccatgcccggctaatttttgtattttttgtagagacagggtttcaccatgttggccaggatggtctcaatctcttgacctcatgatccgccygtctcagcctcccaaagtgctgggattacaggcgtgagccaccgcgcccggcctattgtgtcttctgttgatgaggaatctattttgctttttccatctccccttt

SEQ ID NO: 159556 - DNA, 568 bp, Homo sapiens
aaagctttccctcctaggaatagagaacatatcgggctgggcacagtggcttacacctgtaatcccagcactttgggaggctgaggtgggcggatcacaaggtcaggagatcgagaccatcctggctaacacggtaaaaccccgtctctactaaaaatacaaaaaaattagcccggcatggtggcaggcacctgtagtcccagctacttgggaggctgaggcaggagaatggcgtgaacccgggaggcggagcttccagtgcactgagattgcaccactgcactccagcctgggtgacagagcaagactccatctcaaaaaaaagaatagagaacatatctttttttaaagtgctctgaactgaaaccttatactaacccacaaaggaaacctcaatawattcctaaaagtttaaagaatatatggctgggtgcggtggctcacacctgtaatcccagcactttgggaggctgaggtgggtggattatgaggtcaggagtttgagaccaacctggccaatatggtgaaaccccatctgaactaaaaatacaaaaattagccaggggtg

SEQ ID NO: 159557 - DNA, 555 bp, Homo sapiens
acataaatgtgtatatatatatacatctacatccatgtgttttaaaagagcaatggatattgttgatcaattatactaacagagaaggtaaagaatttgctagattacttgctattcagtgggtttccctggttgagcctaggaaattgggaaatgatcaagggaagatcaatgttcagagatcactgagtgaaatgaaaacatgccattcaagcgttggtagatttcgtttggtttcaatgcatcttcctgttagcaggggcgtacttctttatgtctctgtagggctgtggtgttaatgtgagtggtagcaattgagttttggaaaaatgccaaaatggtgtggcattcttcttcgactttttttttttttttttttttcaaacaagggtgtccttagctttgggactgttttgagaatcggtcrgcctgcatggatgacaagggaggacactggaaatctcctttggggcttttgggtgggtagcaatgaaaatactgaatctgtttatctttgtgacttacagacaacaggagactgggtcatagcagtgc

SEQ ID NO: 159558 - DNA, 589 bp, Homo sapiens
tatttctgctaagtacaatgtttcctcctccatcctccaggccctagttcaatggaggatatctttgaagagctacacctgctgcagatcaacccatgggactggctgagtgtttgtttttataacagcactgcagatcgactttccctctgcccaactctgcttctttgaccctcttaaaggtatggttcattaaagcattccctaataatcttcaaactcagtcttctgcagaactaggctaatgaccgatggtgtcaggaaagggaagcrgtctctaaaaatgggatttttgagataaactattcattggccagttggcaataagaatctcattactggagtagagggagtattcacagtctctggcatgagacatcagtgtcgttgttactacctcatcaacggtaaactgaaatgatataccagtaaaataaatgcactgaagtgtcaatatcttaggcatttgagagtttccagggaggtagtatttataagaaacataattgcttggattgtgtctcagggtgattaatgaatcaaagaaagatagcaaaaatctaaattaattcatcaccaatttaagatg

SEQ ID NO: 159559 - DNA, 482 bp, Homo sapiens
gtttgcacattgtgtttcaagagaggagaagaggagttatcatactggcctaacattcagagggaagcagacctactgttactcaataggacaggaaagaaaacatttgtagtgtaggtaatcctctgggatgttttctgttattcacctacttaatttagatgataaatgggtaaaagcagccactacagcctaggaagtgtatggtgaccagacccatgtaggcaagcagaggggcaggataaaggtgaagagtatctaagctaggtaatagagaagcaaggtaatatgaaaaagttgtaaccctgagaccagttacatgtcaggggctgtagttcatcctactaactatctttttataagttttctcagaaaaaagaagtccaatctgaagcccagagaacctattccccmaagaaatgagcttattatacaaagccaatggatttatcttacaaaaagggctgttttcccagcagctg

SEQ ID NO: 159560 - DNA, 492 bp, Homo sapiens
gactattttgatagtttttcatgttcttcagttgacagaaatttaactaattaattccagtgtgtagatctgactggctgaattacttttggcttcataattacaaacatgtaataaatctgaaccaataatttcatmatcatagattgaagctgtcatgcccacggaagtggagcttaaaagaaattagatgaacttttaaaaataatctagtaaaataatacaatagaaatagaaataatatgtggtataattattggtcctattccaattccaactaacgttagtattcccacagaatcactaaaaatactgcacattctttttaaatattaaagaagagagatgaaaataatcttgggagattttttgatacagatttcaagctcctagatagaagagagtgtccatgctaatggagttgcttgcaagaggtgttgtatgtaattctgtttaatactaatctttatttaaaatttacagagataaaaa

SEQ ID NO: 159561 - DNA, 492 bp, Homo sapiens
gactattttgatagtttttcatgttcttcagttgacagaaatttaactaattaattccagtgtgtagatctgactggctgaattacttttggcttcataattacaaacatgtaataaatctgaaccaataatttcatcatcatagattgaagctgtcatgcccacggaagtggagcttaaaagaaattagatgaacttttaaaaataatctagtaaaataatacaatagaaatagaaataatatgtggtataattattggtcctatkccaattccaactaacgttagtattcccacagaatcactaaaaatactgcacattctttttaaatattaaagaagagagatgaaaataatcttgggagattttttgatacagatttcaagctcctagatagaagagagtgtccatgctaatggagttgcttgcaagaggtgttgtatgtaattctgtttaatactaatctttatttaaaatttacagagataaaaa

SEQ ID NO: 159562 - DNA, 537 bp, Homo sapiens
gattttgttgcttttttatggcagtgtcacattccatggtgtatatttatcacattttctttaccaatccacactgttgatgggatgctaggttgattccatgtctttgctatcgtgaatagtgttatgatgaacatataggtgcatgtgtctttttgatagaacaatttattttcctttgggtatatacccagtaatgggtttgctgggttgaatagtagttctacttttagttttttgagaaatctccaaactgctgtccacagtggctgaactaatttacattcccaccaatggtatattagcattcccttttctccaccatgtcaccagcatctgctgtttactgacttttttttattattattatactttaagttctagggtacatgtgcacaatgttcaggtttgttacatatgtayacatgtgccatgttgatgtgctgcacccattaactcatcatttacattaggtatatctcctaatgctatccctccccgctcgccccaccccacgacaagcactggtgtgtgatg

SEQ ID NO: 159563 - DNA, 633 bp, Homo sapiens
gtgtgtgtatttgaatgtgtgtgtgtatgcatttatatatttataaattagtgacctcttcttttttgatagcaggattttcaaacgtaaaatttaaattggaccaaaaaattgattgatttataattcaattgattgtcacaacttgaaacatttgagggatccaattcttaatataagaaagatttatgttattttgcaaagtaaatctcaagtcaatgctgttagagaagtgaaactcatattcaagctcttttttgtttgtytgagaagttctgcgaagccactaaatctcaagcaggaaatcattagtataatcactaagatgtttgcaattaccacatttttatagtgatagtttttttgtattcttattattgcttacattctcttaaacaaggatgtttgcccattatcagtttctttcaattaaaaacaataccatgaaggaaaatctttccatttcataaaatccctgctttaaaattttagcaatcatgcaaaataatgactgcagaaagattacaagatgttttgattatttaaacaataacattacacacattaaataaaaatcacatgaaatcttaatggactaataaaaatttaattctgacaaagaatgtcatagac

SEQ ID NO: 159564 - DNA, 529 bp, Homo sapiens
aattaggaagtgaggggaatttaatgcattgggactgagttttaaccaatgatagaagcggttagatgtttccttccccatatgctctggaaggataattgtgagatgcactctacatagtttgattccctgagagtgggttgaggtcctattgctcacagcagtgaccagtgcattagtgctcagtcactagcttttactttatctttgtctcattttcccacttcttccattttattactccaccccaaaaacctacgtgattctaagttcttgtttcagtatcagctttcagggaggaactgaaaccaagatagctgatactgaaagtagtgayggaaagtttacccttaaagatgggattctgaaattaattctctcataggtcaaatggcaacaagaacttcattgctggtaataaatgaggtgttgattatccccggtgtgctttacttccacgtttttaaagacacaacggtggaaagttaaatgagaatcagatgtaaagaaatacagatttatgtaatag

SEQ ID NO: 159565 - DNA, 378 bp, Homo sapiens
gccaatactgtacagcacaatattgtgccatattacacagtaggaaataaacataaaggttttccccgatttttttcctgttcctcttcactctcaccagtttctcttccaccatttatctgtcttccaggtttcttttttaaaattttatctgtttatttatttctgagacagggtctcgmtctgtcgcccaggctggggtgcagaggcgcaatttcggctcactgcgtcctcaacctgcttggctcaagccatcctcccacctcagcctcccgcgggccaccacacactgctacttttttgtattttcagtagagaggggttctttcatgttgaccaggttcagcgttctttcttcaacccaactttttcctccac

SEQ ID NO: 159566 - DNA, 378 bp, Homo sapiens
gccaatactgtacagcacaatattgtgccatattacacagtaggaaataaacataaaggttttccccgatttttttcctgttcctcttcactctcaccagtttctcttccaccatttatctgtcttccaggtttcttttttaaaattttatctgtttatttatttctgagacagggtctcgctctgtcgcccaggctggggtgcagaggcgcaatttcggctcactgcgtcctcaacctgcttggctcaagccatcctcccacytcagcctcccgcgggccaccacacactgctacttttttgtattttcagtagagaggggttctttcatgttgaccaggttcagcgttctttcttcaacccaactttttcctccac

SEQ ID NO: 159567 - DNA, 527 bp, Homo sapiens
tgactatataattacaatctaactctaatgttccamatttccatagcacaaagcccaacatttttcagacaaatagacagaacatccttggattgtaattttagtcctctgcatggcaaatgtaaccttagtaactcggttataggtaaaacaaaatgaaccttcgtattttagaaaatccttaaaagacgtgaaaacatatcaagagattaatgtaattattttcagtgcttccattgatataagccataagctacatacagtaaactgggaatggaaagatcagtttggaaggagcactatttttttaaattctatttgtgaatcatgacttgcaacctaaaaacaagagtgaggaaatgttttcaagtgtgtttgatggactgacttcctaatgatgctatgttagttttcacaagcctcaagaagagccctaccttgaaatgcatcccaagagaaaagctgacagtgctaacttttttcttttcgttttctctttcttattgacttctagtccaggactagct

SEQ ID NO: 159568 - DNA, 374 bp, Homo sapiens
gggaaatatgaaaatccaaacctccatcagatatccttacccccgttagaatgtctaccatctaaaagacaaaacagatgctggtgaggatgtggagaaaaggcaattcttacacattgttggtggggatgtaaattagtacagccattatggaaaacaatacgtagatttctcaaacactaaaaagagagctattacatgattcagcaatcccactactgggtatttatccaaaggaaaggaaatcagttcaaaggaatacctgtccccctatcaccatgtttrttgcagtaatattcacaatagcaaagacatggaatcaatcaaagtatccgtcaacaggtaaatggataaagaagtggtggtatatgtac

SEQ ID NO: 159569 - DNA, 565 bp, Homo sapiens
tttaaaaattatacatatcttttttttagaaacctttacaaggaatagtagcatcctatgaaaagttggcttaatatttgattatatatggtgtgtatgattatctccataatttgagacattaggctattggtcagaaatgtgatctccactgtaacagcattttaggggaacaattatatttgatatttctgttttcaatttatagtgtctattctagaaatataatctgccataatctgtcaaaactgccaagactgtttgtagtacttcaatggtactttacagctaatatcaccaccacccamcacccatctgcataatgcatttaaccttacaaagaatacttttatctattatattacttcattttcaaaatggtcttataaaacaggtagagcagggattttaactgaatttccattatgaggaaaataaggtaacaacccattcctggcaaaatctggactagaattcaaatcatttggctccaaactaacacatgcttctccaaaaagcagcccagtatttccagcgacttaatttaatgaacagattcaagaca

SEQ ID NO: 159570 - DNA, 414 bp, Homo sapiens
gaattcctcacaacagacagatcttgataaagcctaggaaatgtcaaaggaatttattcttgctatgtggcttatttgaaaataaaatatattaatattggctgtgggtttgtcatagatagctgttattattttgagatacgtcctatcaatacaggagggaggagggatagcattaggagatatacctaatgtaaatgacgagttaatgggtgcagcacaccaacatggcacatgtttacatatgtaacaaacctgcacattgtgcacatgtaccctaaaacttaaagtgtaatttaaaaaaagcaaaaggaaatasaaaaaaaaagaaaatacaatatatttaaatggatgataactcaaattgcaaataccagttataccttcctttttaaaactattcctgaaactagt

SEQ ID NO: 159571 - DNA, 595 bp, Homo sapiens
attttttgcatgactaaaactataaaataatattattttcatcatgaaatatacatgattatatgtagttccattaatgtatatagaacaacttttccaaaaggaactacttaacctctcataccattaaatgaattttcttgaagaaaacaaagtattttctactaccattttcttcactttgtggctccttataacttccctccttgtaacacctgctacgcggatgactgcagcactattaaaaatttactgtcagtgttagctttccaagttatggaaaaagtctcagtgcaaaacaaacaataaaagcaactctgcataagacaaatcyttacttatgttaatgattacatgcggtgacattgtcttatttaaatatgcttatattttcttcaatttggaaactactgtgagatcccaaaagatacactgtgtccacttcaaaaactctaaaattctaagtaccaaaggacaagcacatatttattcacactaatttttatccttaggaactgcctaagaaatttaaaaaaaaaaaaagaaaaagtgattttgagagattataattagttttgtgaggcttgctaaatag

SEQ ID NO: 159572 - DNA, 452 bp, Homo sapiens
actaatttttatccttaggaactgcctaagaaatttaaaaaaaaaaaaagaaaaagtgattttgagagattataattagttttgtgaggcttgctaaatagtcatggcaaaaaaaaaaawaaaacagcaactttcactgttaatttggaatgtttatcttctactcaaaactgaacgaatgtcttacattgttgtgctttttctttggtgcttatcactgaagaagaatgccaattccaagcccaacttggacatatacctcagtaaagctgccctgcagcagggctgaccacctccactgaaaatgcctaggcacagtgaaggcccagcaagtggatgacggcatcagctggtcctaaaacaaaaagacttgagtactatatggatgtaatgacctcaagatcccctatatttcctaagaaattagacatagcttcatcattttcacctat

SEQ ID NO: 159573 - DNA, 274 bp, Homo sapiens
ttcgcacttattttggtatctattagggaatcccgacttcaacaatttttacattgggattctaacgatgaattcctatttccatcatccttctacattattaattgtaatttttctgtatgggtgagctgtctctgcttccctatttatctrtctgtatatctttctttctatctgttcagttacttgtttatatctctatgggttcatagatgtttattttactcttttggttataatcaaatgacatatctattagttttgttgctcaatt

SEQ ID NO: 159574 - DNA, 423 bp, Homo sapiens
cgcctgtttgtttcctttccttcaggcgggtatgtcagtaaccctgctaatctaactggcttygtattgcacttttaaggatattcaagaatagtggtcctcggatcatttctttaacattcttctaataaagaattataattttagtggagactctaagttattcaatttattttttgtggcatctaagtagacttgattttgtctccccttttctcttttgcctgagcttggcaaatgactcaaaatcatcttcagacagctaatgactgctatcagagtgacccagttgaagtaacactctaaactatgtctcctgtaatcaaaatcctttgatgatagcgcatatatttccaacacccataacagtgttatttaaacagtattatagctcattaatggggcctaaaaatgaattgagag

SEQ ID NO: 159575 - DNA, 567 bp, Homo sapiens
agatctctttcttataagttagcatgcttacaattttttttggtttgattagctttaggcttgacggatggtttaacttttttaaaaaatcacattttaacactatatacatgtttgttaaataaagataacttattatgtctcttaaatgagattctttaaaattttyctgtagagttatatcacatgtgttaaaaatgtatgtactaaattaattactgaaaatgagcaaaaagtaattctgttaaaataagaaaataatgcatgcttacaaaaaggtctgagctaaaaaaaaatctttaaaaaaatctccataagtctttgaataacgtttgaattttcattggacttttgctgtttgtttattagctgagtcagtctacacaatactaaaatgccttacaatgacatgtatttaaaagtaagggtcatgagaaatatggtggaaaataataagtccaggggaaaatatatactaaagtctctgcagctattaaaattacccagccagaagtgatggcacacatgtataatcccagcagtttgggaggccaaggtgaagaggat

SEQ ID NO: 159576 - DNA, 560 bp, Homo sapiens
tttttttggtttgattagctttaggcttgacggatggtttaacttttttaaaaaatcacattttaacactatatacatgtttgttaaataaagataacttattatgtctcttaaatgagattctttaaaatttttctgtagagttatatcacatgtgttaaaaatgtatgtactaaattaattactgaaaatgagcaaaaagtaattctgttaaaataagaaaataatgcatgcttacaaaaaggtctgagctaaaaaaaaatctttaaaaaaatctccataagtctttgaataacgtttgaattttcattggacttttgctgtttgtttattagctgagtcagtctacacaatactaaaatgccttacaatgacatgtatttaaaagtaagggtcatgagaaatatggtggaaaataataagtccaggggaaaatatatactaaagtctctgcagctattaaaattacccagccagaagtgatggcacacrtgtataatcccagcagtttgggaggccaaggtgaagaggattgttcaagcccaggagttggagaccag

SEQ ID NO: 159577 - DNA, 587 bp, Homo sapiens
ttggttttcctttccttctgacacttcattttccctttgtctcccaaatctgttaataactatttttaggcagatggagcatttcatgaatgggtcactcttaaaaatctcatttggtttccaatttttcttcaagcattaagacttactacttttagattttttggttattatacacaaaagaatatatgtggatagaatatacacacatttatgcaaatatatatatatatatagcatgcatatatatgcacaygcatgtctatctatacatatacatttacaacaaagaaaaactgcttaattttatgtataagagattcagagaactagaccaggtaacactcagaatatacacattattaaggagaaagcaaaaaataaaagagaaatcagtaaacacacaaatcttcccattgacaaggttccctttctgagcttcctttcactttacttctgattttcttctcatattatgtgcttcaggtaattctgcacattttcttctcctgaagagaagccatcaccagaagaaaaagccatgaggtctttttagagagaagaaattcacaaatactgttaggcag

SEQ ID NO: 159578 - DNA, 580 bp, Homo sapiens
tatgaccccaataatagcagtcccaaaattataaataaattagatgtttaaattgttacccttttttatactacatagtgtaacacacattataatttccagaagagctcttaaagaaaaaaaatgtggagaatgaaaattgaaaagcagcagctgcttaggrgtgcttaacctagagctagacgtccaggcagatcgaaactgcctgctgctcctccttcccttttcctatactgcctacaaataatcggtttgatttttcataccacgattttgattaagcactgtgtcattatttctgggtaataaacagtttttattattttcagtttaaagcaattattgccaaaaggaatttttaattttaatattaatttatttagagacaggctctcactctgttgtccaggctggctggagtgcagtggttcaatcagacctcactgtagccttgaactcctgggctcaagcaatcctcctgcctcagcctcctgagtagctaagaatacagggcggtgcccccacatctggctaatttaaaaaaaaaaatttgtagagacacggtcttgctgtgctgccc

SEQ ID NO: 159579 - DNA, 593 bp, Homo sapiens
ggtgaacatgcccttagatgtaagaggatgaaggtaacagctattgagactagcaaatatagacttgattaaaaagtcagattgggtttaaaagaagtttccagaaaatggtggtggtggtgtgtatgtgataaaagacaaattccaaaggtgtgtgtaacagcgatcattcagtgatgacttacggagacagggctgtagatggaaaagatgactggacrtgagtttggaagtcttgtttgtttattttctaactgttaccttgaacaagtcatttaacctcaacctcagtatccctgactcttaaacagggatgacagttcacttaactttttctatgacatatctgaaagcacagaaattggttcatggaaaatgctcactaaatcttagtttggtcttatctaaatctaaaataatatactgtctggttttttgggtttttttttaaaggtttataagcaaaatgaagggaaagctacagcttcccattaggtgaacccaaccagaagactgagagaacgagagaaaggcagtctgattatgcaactgtagaaggttagcctcttgagacacagagcaggatggagagt

SEQ ID NO: 159580 - DNA, 584 bp, Homo sapiens
ctataaactagtgtttccatagcatgcgcaatggtaattcataatgaatgtaaacatgttactttgaagtcattttcttccatcttccctctccttgaactttgtcaggcctgccccttagttagcatttcctcaataaytattccagtgcaccaccaagtgcatttcaaagtgtatccgccacctgaatcacctgtatgcccatttttaaattggcttattagggtccgtctcatatctactcagtctgaaactctgggggtggggctgagaaaactgtttttaacaggtccccaggtaacttttatgcacacaggagtttgagaaccacaggactactccactgtaacacaagacaaatgcatgccccacaccaccaacagcagcctctctcactccatatcttaaaattgctgtctgggttgctggtttcagcagcattcactatacacctccatcacatgagcatccaagaagttcttgtccagactcattttcatgtaaaccttgcacagggcctacacctggccattccttactcctgctagggtaccaggacactgcacggtcttttataccaccat

SEQ ID NO: 159581 - DNA, 584 bp, Homo sapiens
ctataaactagtgtttccatagcatgcgcaatggtaattcataatgaatgtaaacatgttactttgaagtcattttcttccatcttccctctccttgaactttgtcaggcctgccccttagttagcatttcctcaataactattccagtgcaccaccaagtgcatttcaaagtgtatccgccacctgaatcacctgtatgcccatttttaaattggcttattagggtccgtctcayatctactcagtctgaaactctgggggtggggctgagaaaactgtttttaacaggtccccaggtaacttttatgcacacaggagtttgagaaccacaggactactccactgtaacacaagacaaatgcatgccccacaccaccaacagcagcctctctcactccatatcttaaaattgctgtctgggttgctggtttcagcagcattcactatacacctccatcacatgagcatccaagaagttcttgtccagactcattttcatgtaaaccttgcacagggcctacacctggccattccttactcctgctagggtaccaggacactgcacggtcttttataccaccat

SEQ ID NO: 159582 - DNA, 613 bp, Homo sapiens
gtggaaaaaacatggaaatattcttgtgcaatttgagaagttttgccagtggaatagttaggtggtttactactaaatttgaagacaaaatttatttcatactccccatgttgctattaattatttttaagaatttgtttttaaatatgtgatcaaatttcaaaaagagcttttaaaggtgaaatacgaaatatatttcatacattaatattagcatatttattatgcatttaatatgaattaatagtatacaacacaatattttacatgtataataacaaccttgagatcactatccatcagtagtcagcaatgtagtggtatgtctatgagttttgctttgaattttaagtttttgtttatttaacagcattagagtctgtcatcacaactaacttgggcttactgatgttatatgaagttacaattgtatttatgtttttgktgttgtttctctgaaattttgacaagtttggaagcataattaggcaattaataggtaaatagctgaatggaaataaatatgaccacctgggttcagttttctaaattgcttatcatgagctaacaatttctaggcaaatctggtttaaagcaccatgctgaaaaatac

SEQ ID NO: 159583 - DNA, 613 bp, Homo sapiens
gtggaaaaaacatggaaatattcttgtgcaatttgagaagttttgccagtggaatagttaggtggtttactactaaatttgaagacaaaatttatttcatactccccatgttgctattaattatttttaagaatttgtttttaaatatgtgatcaaatttcaaaaagagcttttaaaggtgaaatacgaaatatatttcatacattaatattagcatatttattatgcatttaatatgaattaatagtatacaacacaatattttacatgtataataacaaccttgagatcactatccatcagtagtcagcaatgtagtggtatgtctatgagttttgctttgaattttaagtttttgtttatttaacagcattagagtctgtcatcacaactaacttgggcttactgatgttatatgaagttacaattgtatttatgtttttgttgttgkttctctgaaattttgacaagtttggaagcataattaggcaattaataggtaaatagctgaatggaaataaatatgaccacctgggttcagttttctaaattgcttatcatgagctaacaatttctaggcaaatctggtttaaagcaccatgctgaaaaatac

SEQ ID NO: 159584 - DNA, 399 bp, Homo sapiens
gaattcttggggtattgtgttactgaagtgatcttaaagtacctttcatattgcatcctattgtagtttaaatatcacacagcaataagtgatagccagtccctgtttttggacacagcacttctcaacaaaatcacatggaattttaattgtttatattcaatctttttaagagaataasatatttccccgaaaaggaagaaaagtattgtgtatataagctcctgagctgtgggacaaataaaagtgtatgacagcctagcaggaggtggaggatgtcccagaagtaaaaaccttattccttttacttagtacttttatgtaattactcagagagagcaatatttttttttattcactgctgtacctccaagacttaaagcaatatccagtacatca

SEQ ID NO: 159585 - DNA, 635 bp, Homo sapiens
gaaatgttaattctctgtgaagtgtgcaaagatgtttgccatattgttttttgagtttactgtacttttagatttcacaaaataaaaattataattaaaaattaagcaggagagagtgtctgagatataaatgtaaatattgaaagatcaacaaaaaattatcataatcatagcatagttgagggtccacacaaccacacatagtcatgagtgaactatggaatgttaaagacagaggaccaagaattgaagcaagagatataagcaagatggtttataagaaataggccttgtgaactatggcaacaaatctgtagattttcttgaatttaatcagaaggcacaaaagaaagttggtaggaggaaagctctcagaattatgtattatgaagtttgcacagggaacaatatggaagaaagcttgaggaaaaataagagctgagtctggtaaacttaaatggctattgcsttagtctaagcaaggaataacaaagtgcttgagtaagagagtgtcagtcgaataggaaggaagaaattgatgtttcttaactaagggcacagcagtggaatagagggaaagaaatttataaaatttaattgacagaaattggtaaatatattgtgacaaagacaaa

SEQ ID NO: 159586 - DNA, 506 bp, Homo sapiens
ttttttccatgatactatggaagtaaagagtgagacttctaggtaaaattgtgaaataaaaaccagaccatttactgtacagcttcctactatccctgtcttgggttacatgagcatgaaagttgttagtatcattttggcatttggatatagtgaccacatagtgaaaggaaagaaaatgtagaaattggtagatataaagagttggactaaattaaatgtataccctgagcataacatattctcattgaaggagtaatgtgggaaaaaaacawctgcttagaagcacaggaatataacaagaaccttgattctaataatagtcatcatgggcttgctccttagattattttggggttcaaattcacataaatggcatggcatgagagctgtcacacaagctattgatatttctgagacatgtgacagaaacaaaataaactctcgggataaccacacaacaagccttgaagacaagcaaggtaaaatagcaaaacaccataaga

SEQ ID NO: 159587 - DNA, 506 bp, Homo sapiens
ttttttccatgatactatggaagtaaagagtgagacttctaggtaaaattgtgaaataaaaaccagaccatttactgtacagcttcctactatccctgtcttgggttacatgagcatgaaagttgttagtatcattttggcatttggatatagtgaccacatagtgaaaggaaagaaaatgtagaaattggtagatataaagagttggactaaattaaatgtataccctgagcataacatattctcattgaaggagtaatgtgggaaaaaaacatctgcttagaagcacaggaatataacaagaaccttgattctaataatastcatcatgggcttgctccttagattattttggggttcaaattcacataaatggcatggcatgagagctgtcacacaagctattgatatttctgagacatgtgacagaaacaaaataaactctcgggataaccacacaacaagccttgaagacaagcaaggtaaaatagcaaaacaccataaga

SEQ ID NO: 159588 - DNA, 457 bp, Homo sapiens
tccctgctgtgaaacttttttcacagagccaaaatattttaaaatgcacaaaatcagtctcatggatcatttctcaaaatctgttctttgactatataacattaaaacttatgtttcagaaaggtaaaggtttcaagtttctattgttcaaattttaaaattcttcattgcaaattgttttgatgatagctaattaaaactatgatttttaaatttatttaaaactattctaccaaacaagagtagacagtcaacatttattttaaatagtttatatcagcttttggtttcagcaataaatgtaaagaacaataaaattattaccaattatgataagaacaatatgtctttttctaagacagtaatgttttcccatgcakgttgctaaaagaagcaaatttatcactgtctttaattttaataaaattgtcttttattttaatgtctcagaattaaa

SEQ ID NO: 159589 - DNA, 600 bp, Homo sapiens
tctgcatgccaagatgtaagaggagatcacaacagccaggagcgatgacacagaggataaaagggtcaggcacctagcaaacaagcagtgattgccaatcctgtaagaaaactcctgaggacctagggcaataaaaacaaatgagcaaacaaacaattcatccttgtcaaagggccaagccatatattcagtaaaacagactctggccaaagcaagaggcaagagtacctcttgggagataggatgatactggcctacaaaatatgcctacaaaagaacagggaaagtagaaacccgctaaaaatacaaagaactaaaatccatcagaataaaatatactcaatttattccttttatgctgtatctcaggatatttatttatttattgggtaagtgtgtgatgaatcctgaaaggaatagccctgtacaggcaccrttctcaatggcatggcatttgccaaggacatcagaatctggatgtaattgtcaattggttcaagaagttcaagaaggtatttgtagctttaaggtgtctttttaactttaagggttcaggttttaataagaaaaataacacaaaatatttgttaaaaggaattg

SEQ ID NO: 159590 - DNA, 470 bp, Homo sapiens
aagccctccataattggtctcctatctccatttcctatcttccraatgctcatcatatccagaacactattttcaaactaaaataggtgctgttaacctgagcattcctaacccatgacattactaacactggttcctcagtgagaattcttttatctcatgtccaaattctattattcaatcataataattactctttttattaattatatgaaatgggtgactgagttgattcattgcagctaaatgatacacttccaagtctttcaaaacccgtacttagctttaatatatcaaacatatcttaaggaaatacagcgttttcaaaattccataaattgttacctaatacattcctttctgtataacaaaaatcatatgaatttataatcactctaccctcaaatattccataacagaattatccaaaaagtacagcaaagaaagagtaaaacaacctgttaacaatt

SEQ ID NO: 159591 - DNA, 500 bp, Homo sapiens
atgtttttaacatttctaattcatttattatacaacaatccatattagagagatgtttaactcgaatcataaatatttctatttagtcacggtagcttgacaaagtacctgcaaaatattcgtaaataaagatctgtttgatcctcagaaaagtacaaattaatagagcaataaagactcacataagaataaatatcatgtgtcaaaatcagggcaccttgtaacytgacaggaggttgacttcattgtgaattgactttggtgcacacttcattttattgtctgtgcattcttccctttacttttctcctctctcctttctctctgtctttcttcatccccatcgttctgtatttctttcatacttcagttgattgctcatcggcatgagttttcttttgtggacaattacaactgtgtctgctgcatcacaaatttattgacatgaggccttaatgattctttaatttgaattcataaaaactgggcaaaaaatgttg

SEQ ID NO: 159592 - DNA, 582 bp, Homo sapiens
gttggatctactccttagggtgtgtactgtaatcatgtctttcgaccattttattcatgcagtcaagaaaggacattttattttactgcctttggaaagggcagtattttggggcaaaagctgaatatagttcttcatggaactgaaatgtgagtacaaaaatactagtgaagtaaatattgccttggcagctcaggcttatctagtttaaccatgttatgttcattgtattgtagattacatatacattccaaaaacaggaaattcaatttgtgcttgcaaagaacatctcaaagtagatggaggaagagcaagagcgaaggtatgctgaagctggttcccactggattgtgagactagactgttaacatgtcttcccaattccttgttcagtratactaagttgatagcttgcaactgaccatggtaggagtatttacaccatggatataggcaaccactcaaatcagaatttattttccagggggctggtttactagtataccagagccaggacttggacttttgtgtaagtttctttatctttcttatgattgtcaaatttgtaagttctgtttaaac

SEQ ID NO: 159593 - DNA, 569 bp, Homo sapiens
ccttgtacacagaaggcaaaataggttttatttaattttcttttaaatatatgtaatttaatttgctgtttcaaaagtttaagcaaatcttattttaacggaaactaaataccatacctcataagtcaataagtagctacataaaagtttaaaatcagatagccatatttttctacagagcctggcacatgtcttttgtatttaattccctcgagagccggtggaagttgtagtcacaaaagggagtcgaactggaacgtggaactttggattgaatgattctaggccagatcaaaggttactcagtttttctttcttactgatataagggtttatatctatgctagcaaatggagacagtaaataatgtctttggataatttcctggcaggtttgttttacctgtgtcttctaatgattcaaatataggtaagcatttactgtgagcagytgatttatctttgggagagtaatctctagtgatttgactgtgaggcaacgtaaaagagattctcaaggcattttctccagtccactcagagctttgtttctcccatttttttttcctt

SEQ ID NO: 159594 - DNA, 610 bp, Homo sapiens
atatgtctataagagtgttcactactacagctttatttgcaatggtgaataattgaaaaccacacaaatatacattaataagagaggagatgaataaattttaacatatctatgcagtggaatactatgcagccattaaaaagaaagaaatatctagattatttacatgaaagtatgtccagttactatgtaaaaaatgcaagaacaggctgggcacagtgactcacgcctgtaatcccagcactttgggaggccgaggtgggcagatcacgagatcaagagattgagaccatcstggccaacatggtgaaaccccttctctactaaaaatacaaaaattagccaggcgtggtggcacatgcctgtagtcccagctacttgggggctgaggcaggagaatcgcttgaacccgagaggcagaagttgcagtgagccgagatcgcgccactgcactccagtctggtgacagagcgagactctgtctcaaaaaacaaaacaaaacaaaaaaaaaaccaaaaaaaaccaagaacagtgtgtgtgaaccataatatataaaatgattagtatgtgaacaggaagtaacatatcaaagactatataacaaaatatt

SEQ ID NO: 159595 - DNA, 589 bp, Homo sapiens
ggtcagtgatagggagggagacctagtggccagctcctgaaatagttgaggtcagaaatcttcaaggtattatctacagtccactaaccatcctcctgcaagtgatcaaggctgtaaattggctctgactgatagtcactcatttatgtataagatggaaggcagttactagtatagcaggatatccagatggaggaattaacaatgtccatctttatgtgttataggttcactgtaagagaataaattcccccacaaccatcctgcmtaaggcagcctcagtttagggtattgaaagccttaggctctcctattcctagaagagagagaagagccttttcttttctttcattttctaagcctaagctttagaaggtaaagaaagatttggacagttttgaagcgacaggattcctggccagaagccagggaacttgtgagggttatttccagagtggccagatctgtgttcaggtggagccagtgcctaagcactgaagtacaatccctgcaaccttgggatccccagcataagacgcagggccaaattccacacagggccaaatatggcacagggtaatggctgaag

SEQ ID NO: 159596 - DNA, 589 bp, Homo sapiens
ggtcagtgatagggagggagacctagtggccagctcctgaaatagttgaggtcagaaatcttcaaggtattatctacagtccactaaccatcctcctgcaagtgatcaaggctgtaaattggctctgactgatagtcactcatttatgtataagatggaaggcagttactagtatagcaggatatccagatggaggaattaacaatgtccatctttatgtgttataggttcactgtaagagaataaattcccccacaaccatcctgcataaggcagcctcagtttagggtattgaaagccttaggctctcctattcctagaagagagagaagagccttttcttttctttcattttctaagcctaagctttagaaggtaaagaaagatttggacagttttgaagygacaggattcctggccagaagccagggaacttgtgagggttatttccagagtggccagatctgtgttcaggtggagccagtgcctaagcactgaagtacaatccctgcaaccttgggatccccagcataagacgcagggccaaattccacacagggccaaatatggcacagggtaatggctgaag

SEQ ID NO: 159597 - DNA, 563 bp, Homo sapiens
tatatatgtcatacagtgtatatatatcatataacatatagaatataacattaataaaattaataaagagcattaaaaatgagaaacacagtgaagatatttgcaaaatatgtgagagacaaattattaatgtccagaattcacaaattacttccagtaagaagaaaacaaactaatagacaaattggacagaggatgtgaacatgcaattaagcattaattaaaattaacaaaatttaacaaaagcagcaagaataataccaacacacctctctctagccatgtgtacytacatatgtatagcagtatagaaaatagccaaacaggataaacactaaaatgaaggtagtggttacctgttacccaaaagagtaagacttggcagttgaggggaaacgttttgtttttttaaataaaagatgactatattaatatattatttgtgatatagaaacagtctaagaactatactgaaatgtattaaaagtattaataaaaatatgactcattatcctactataagcctctgttttcagagtttcatggttctttctagactaagt

SEQ ID NO: 159598 - DNA, 512 bp, Homo sapiens
taaatgtaagctcctttacttggatttctctcgcctgctccaattgcccaagtatgagactgtagaaaaggagtgtttattaactgtaatggtcaatagtgtctttgtctgccaaaagaaaaagtaaaatctctggaattcactgatttggaacatcatggaataygtatttctcttcaccctgtcagattaaacttgggtaccttggtctatttctaaatatggcaattacaaaaggacataggctaactaaaatatactctaagaatggtagttatattgcaaatgaccttgataatagataattattcaactagtatttatgagcacttatgatgaatcagttactcaggaaagttatcaaaggtaataagactgcatccttgttcctgcaatctgttctgtgtccaaaaaccttcctttgacttctgccttatatagcttaaacatcaaagccttcaccatggctacaagacactacagcattacttctataatgcctttctgacccc

SEQ ID NO: 159599 - DNA, 634 bp, Homo sapiens
ggatacacatatcacctggctagcacattctttattcaacaagcaaagctagagaaagttttaccatctgatattctttaataccaggcacagattaaaaaatatatacttttcttgtattttcttcacaagaataaataagagaaagaaaaaaaggaggaaaaataagagggaagaaatgaagtgagaaagagtaaaggaaattattgaccattcattacgtgatacgttgaatctactgagaaaaacagaaaactgtttttttagtaatccgtcccactaatttcatttaagtaattcactaatttggttaacaaatatttacagaatgttagctatgttctaggaattgaaccaggtatttaaaaaaaataaataaacatagtactaccttcaaacagttaacagtctaatagcaaagtccaaaatatattaaatggctaytgtatgtgtattcaacatcgtgctagacatttaggtcttctaaaaagagactttacatttataaaattaatgtacatcttcttacgaagacagttaaatgtgtattaattaaatgattcaaatagtcattaatcaggcaaacctcaggggattaaggaaaaaaaccaacataactacatgaattctgaat

SEQ ID NO: 159600 - DNA, 436 bp, Homo sapiens
aattgaccccccagaaatgatcatttcaagggataacagtaaagaaaacaatttctctacattgttttcttaaaggagggcaatttgaaatatacctagagtaatccattgatccacttctatgtcttagaaaaactttataagttctaactgcagttcttttgtttgctggtggtatgatactggacaagttgctgagcattcctcatttataaaagaatgatggagttcattgcataaggtatttcaaatgctyttcctctgtacgtgtagatagacatttccatctggtggtgcttcgcttttgcccatggacttcctctaacatttcttttaatatggatctcctgttaattaattatttcagtattagtatgcttaaaggtttttatttcccctttctttgtgaaaatcatatttgctcagcatagaattt

SEQ ID NO: 159601 - DNA, 435 bp, Homo sapiens
attgaccccccagaaatgatcatttcaagggataacagtaaagaaaacaatttctctacattgttttcttaaaggagggcaatttgaaatatacctagagtaatccattgatccacttctatgtcttagaaaaactttataagttctaactgcagttcttttgtttgctggtggtatgatactggacaagttgctgagcattcctcatttataaaagaatgatggagttcattgcataaggtatttcaaatgcttttcctctgtacgtgtagatagacatttccatctggtggtgcttcgcttttgcccatggacttcctctaacatttcttttaatatggatctcctgttaattaattatttcagtattagtatgcttaaaggtttttatttcmcctttctttgtgaaaatcatatttgctcagcatagaattt

SEQ ID NO: 159602 - DNA, 419 bp, Homo sapiens
aagctagggttaaaacctgatagaaaagacagagaatactcaacataaccaaacgagttcctcggtcaaacaccttgctgtgcagaatggatacctgtgcaactcatcatcgaaaatgaatccgaaataaagtcaaggacacagcccttgaggggatttcaaaggtatagttagacacatattgcaattgaactactaatattgggtaaatgagggaataaaacagattacatgattagttatcagcttcaaagatacgaagagaaaagactcccatttgaaagatactttggtcttttccttccacaagaaacatgtktcatgtgatccacacactatgtagatatctttcacaaaaactgtgacattatctgggtaaacatgtgaatcaaagactacaactagcactttacagcact

SEQ ID NO: 159603 - DNA, 403 bp, Homo sapiens
gacagagaatactcaacataaccaaacgagttcctcggtcaaacaccttgctgtgcagaatggatacctgtgcaactcatcatcgaaaatgaatccgaaataaagtcaaggacacagcccttgaggggatttcaaaggtatagttagacacatattgcaattgaactactaatattgggtaaatgagggaataaaacagattacatgattagttatcagcttcaaagatacgaagagaaaagactcccatttgaaagatactttggtcttttccttccacaagaaacatgtgtcatgtgatccasacactatgtagatatctttcacaaaaactgtgacattatctgggtaaacatgtgaatcaaagactacaactagcactttacagcactgatgctagatt

SEQ ID NO: 159604 - DNA, 410 bp, Homo sapiens
ttaaaacctgatagaaaagacagagaatactcaacataaccaaacgagttcctcggtcaaacaccttgctgtgcagaatggatacctgtgcaactcatcatcgaaaatgaatccgaaataaagtcaaggacacagcccttgaggggatttcaaaggtatagttagacacatattgcaattgaactactaatattgggtaaatgagggaataaaacagattacatgattagttatcagcttcaaagatacgaagagaaaagactcccatttgaaagatactttggtcttttccttccacaagaaacatgtgtcatgtgatccacacactatgtagatatctttcacaaaaactgtkacattatctgggtaaacatgtgaatcaaagactacaactagcactttacagcact

SEQ ID NO: 159605 - DNA, 413 bp, Homo sapiens
caaatggcagtatgtcctttttaaaggacagtatgctaagtgaaatcagccagacagagaaggaaaaatattgcatgatcgatcttctacatagaatctttttaaaagtgaaatagactgggtatggtggctcacgcctgtcatccttgcacttygggaggccaaggtgggcgggttgcttgagctcaggagtttgagaccagcctgagcacacaaaacaaaaacaaaaaatcatcttggcgtggtggcatgtgcctgtagtcccagctattctgaggctgaggtgggaggattgcttgagcccaggaggtccatgctgcagtgagcggtgatcgggccactgcactccatcataggatacaaatttacagctttgtagaatgaaataattctagagacctaatgcacagcag

SEQ ID NO: 159606 - DNA, 413 bp, Homo sapiens
caaatggcagtatgtcctttttaaaggacagtatgctaagtgaaatcagccagacagagaaggaaaaatattgcatgatcgatcttctacatagaatctttttaaaagtgaaatagactgggtatggtggctcacgcctgtcatccttgcactttgggaggccaaggtgggcgggttgcttgagctcaggagtttgagaccagcctgagcacamaaaacaaaaacaaaaaatcatcttggcgtggtggcatgtgcctgtagtcccagctattctgaggctgaggtgggaggattgcttgagcccaggaggtccatgctgcagtgagcggtgatcgggccactgcactccatcataggatacaaatttacagctttgtagaatgaaataattctagagacctaatgcacagcag

SEQ ID NO: 159607 - DNA, 413 bp, Homo sapiens
caaatggcagtatgtcctttttaaaggacagtatgctaagtgaaatcagccagacagagaaggaaaaatattgcatgatcgatcttctacatagaatctttttaaaagtgaaatagactgggtatggtggctcacgcctgtcatccttgcactttgggaggccaaggtgggcgggttgcttgagctcaggagtttgagaccagcctgagcacacaaaacaaaaacaaaaaatcatcttggcgtggtggcatgtgcctgtagtcccagctattckgaggctgaggtgggaggattgcttgagcccaggaggtccatgctgcagtgagcggtgatcgggccactgcactccatcataggatacaaatttacagctttgtagaatgaaataattctagagacctaatgcacagcag

SEQ ID NO: 159608 - DNA, 589 bp, Homo sapiens
tagggaaatggctttggaatttaacatgtaaaaaatgagaaagaatgcaaaatcacagtgttggtgaagaggaatagaaatggtgttctcaaaagtggctggaaatggctttaattactgtacaacttttggaggacaaatcttcagtaaacaccacaaacattaaaaataagccatatttgaccaaataatctcacttgtatgaatttttcctaaagaaagaaatcagaagtgtccagacacatatctatttccatccaatggaataatatacaagagtgaagatgaaccaactattgctacatgtatgaacatggataaatccatgtatgaacatagacgtacrgctctatgaaagaagcaagtcatagaagaatacaaacagtgagatacatcttcataaaatccaaaagcaagcacaaccaaacaatatcttatttataaataactacacagcaaaattataaatgaaagcaaagtatcaataataaaaattgaaaatagtaattaaatcttaggagaaggaggcatactcaaggaggaaccatctattgacttaaaacttgacatacaagtttggaagcaactg

SEQ ID NO: 159609 - DNA, 500 bp, Homo sapiens
cttcaagttcattaatcctttttttcttgcagtgtctgattttccactaatcccatccactgtattttttgtttcagatagttgcatttctagaagttccatttctagaagttccatttgagtctttttagtactcatttctytctcattaagttcatgcattcctctaccttctctaacctatggatcatatttataataacttttttaacattcttgtttgctaattttattatatctgtttttgattggttggtttatctcctgaatatgggtcatattccctcattatttctgtgttagaaattttaattaaatgttgggcattctcaattttatatcactgggtgctggacttttttgtgttttttgaagtagtattggactttattctggtgcataagttaagttggatccttgcaaaccttatgattaagctttgtaattaaagtgggcccactgcagcctttagactagaattaatttaacccagtactaag

SEQ ID NO: 159610 - DNA, 593 bp, Homo sapiens
cttccatgtgccctggcattccctcctcattcttatccctgctgctttccggagcactgatcctcagctctcactggggaggggttttggtaataagttgcccaggccctgtccctatagacagggattgggtaagtctggggttggccrgggaaccccaggcggttcttatacataccagagtttgggaacctctgttatggcaggtccgagaaagccgccatagtggcctcttcatcccacctttcattgaacaaatggggtcagagagaagtgacttgccataggccacatggtacagaaggttggcctagaggctagtccttctggcttcctgagctcctgcactgcctcagcttgtccctcgctggccctcagaggagaggtaaaagagcccagctagtgcctggacccttcaacccctctgcagcctgcctccttctctctccccatccatgctctccccacctggcctcagcatcaggctgctgcagagccaagcagaaagcaggttcccatttctacagcagcctttatcgcactgcattgtaattgcttgtttacctgctggctcaccgcagactgcaacgcca

SEQ ID NO: 159611 - DNA, 402 bp, Homo sapiens
cttggcattgcccatgtagagtatcctctaggggctctgcctttacagcaagtttctgcctagacacccagactgtccaatacaactctgaaatctagtggggatctgccaagcctccttcatacttgcattctgtgcaactgcagatttaacaccatgtggaagctgccgaggcttatgacttgtgccctmtggagcagtgacctgagctgtacctggggtcctttgagccacagctgtagctacagtggctgggattcagggagtggtgtgttgaggctgcacaggacagcagggccctgggcctggcccacaaaaccatcctttcctcctagcctctggtgatgggaggggctgcctcaaagatttctgaaatgctctcaaggcctttttcccattgtc

SEQ ID NO: 159612 - DNA, 546 bp, Homo sapiens
tgaaaatcaatcaatgtcatccactatattaacaagctaaagaagaaaaattgcataattatatcaatcaatgcagaaaaagcatttgataaaattcaatatccatttttaaaactctcagaaaaatagaaatgaaggggaactttctcagcttgataaagagcatccaccaaagaaccaacagttgacattatgtttagttatgaagactgaatgcatactaaagtgaaatgtcaaactcaacaccaaaatttaaaaatataatactatttttaatcattcaaaaaattaattacttaaytataaatccaacaaaacatgcataggacttacgttgaaaactacataatgctgatgaaagaaatcaaagatctaagtaaatggaaagccatatggtattcatggactggaaaactctgcatagtaaagattcaattctctccaacaaaaacaattttgaaaaataaagtgggaagaatcagcctacccaattttaagatttactatatagctacaataattaagacactgtggtatttggagagt

SEQ ID NO: 159613 - DNA, 543 bp, Homo sapiens
tcaatgttttgaaaatcaatcaatgtcatccactatattaacaagctaaagaagaaaaattgcataattatatcaatcaatgcagaaaaagcatttgataaaattcaatatccatttttaaaactctcagaaaaatagaaatgaaggggaactttctcagcttgataaagagcatccaccaaagaaccaacagttgacattatgtttagttatgaagactgaatgcatactaaagtgaaatgtcaaactcaacaccaaaatttaaaaatataatactatttttaatcattcaaaaaattaattacttaattataaatccaacaaaacatgcataggacttaygttgaaaactacataatgctgatgaaagaaatcaaagatctaagtaaatggaaagccatatggtattcatggactggaaaactctgcatagtaaagattcaattctctccaacaaaaacaattttgaaaaataaagtgggaagaatcagcctacccaattttaagatttactatatagctacaataattaagacactgtgg

SEQ ID NO: 159614 - DNA, 233 bp, Homo sapiens
ctggggaggtggggcgcggggtggcaaatccaggagggcctcttggaggacatggggacatactgagtcctgaagaaagggagatctcatctctatcaaattctagtgggttcaggcttgctagtctcctttccccastcttgccacccatttttgggaaaaataacaataattcatcaatcattaattcatcagaaaaatacttattgcctatgtaacatgccaggcattgt

SEQ ID NO: 159615 - DNA, 579 bp, Homo sapiens
caaattctagtgggttcaggcttgctagtctcctttccccactcttgccacccatttttgggaaaaataacaataattcatcaatcattaattcatcagaaaaatacttattgcctatgtaacatgccaggcattgtgctagtgtctagaaattcaacgatgatgaagacctagtcactgcctccctgaagctcccagccaagtgagagagctgacaagcaggcaagcagtgagcccctggagaccatgtggagtctgtgccagggctctcggagtgcacagaacccctgtgagcaaccagccttctcacttgacactccttccctgaacccaaggaagaggagccatccttgccatttgacagaggctgctggcttgcccaaggttctagggcaagtacctaggggacccgccacctcycctcagttctcagactcgaagcccctgctcttgtgtcctcctagcctggtcttgcaggagaaagaggctgaatgaaggtgggcttgtcgcctgggtgctgactgctcatgagcaggctcctgggtgaccctgcagaaagttggaacagtgtccttcctc

SEQ ID NO: 159616 - DNA, 421 bp, Homo sapiens
tgacatttgccaaatgagccagttaattgccaaatttgtactctcagacaaatggtaattatctggataagaatctgaaatgctggatagatttccccatttccactcggaygtaaaacagcccaggatcagttagtctgtttgactgagatttactgttccttttgcctcctcacagcctcaggtcaggggaggggtgagatggggcaaggaaggtatcaccctggccatctccagccaagagtggggaagaagacagaatgccaggcccacagagagttagcacccccctcagtctcctccttcaccttgcagatggggacgcaggcacagtgggaacctccccttcctgggccttggtttccttgtggtgaaattggactagatctctgattcccaacccagctacacattagaattc

SEQ ID NO: 159617 - DNA, 417 bp, Homo sapiens
gaattcactacatgggccatcggctgtgacatttgccaaatgagccagttaattgccaaatttgtactctcagacaaatggtaattatctggataagaatctgaaatgctggatagatttccccatttccactcggacgtaaaacagcccargatcagttagtctgtttgactgagatttactgttccttttgcctcctcacagcctcaggtcaggggaggggtgagatggggcaaggaaggtatcaccctggccatctccagccaagagtggggaagaagacagaatgccaggcccacagagagttagcacccccctcagtctcctccttcaccttgcagatggggacgcaggcacagtgggaacctccccttcctgggccttggtttccttgtggtgaaattggactagatctct

SEQ ID NO: 159618 - DNA, 656 bp, Homo sapiens
ccaggcacagtggctcacacttgtaatactagcatattaggaggccaaggtggcaactccagctagaggccaggaatttgagaacagcctgggtaacgtagcaagaccctgtctctacaaaaaatttaaaaataaaaaagtcagtcaggtgtggtggcacaggcctgtagtcacagctacgtggcaggctaaggtgggaggattgcttaagcccaggagcttaaggcttcagtgagtcatgattgtgccactgcactccagcctgggtgacagactgaggctccctctcaaaaataataataataataattaatttttgtgtattgaacccatatcctgcaacattgctaaactcatttattaactgtagtgtcttwgcttgcttgtggatttcctaagattttctagagagaaaattatattgtttataaataaaaacaattttgaatcttctcatctgtgccttttttctttttcttgaattcttgcactggctaggacctccagtacactgtcgaatagaaatagttataacagacttacttgctttgttcctaatctgagaggaaaaacatcccatttttcactactaagtataatgtcaattgtagggtatttttaaatagatgcccttttccagattgtgtaagttccct

SEQ ID NO: 159619 - DNA, 493 bp, Homo sapiens
aatatcagaggaaattttagaaaggaccctaggccatctctagctttctcatagcagtgaccctgttcctccccccagattgggacaytttaattttttttttttttttcaagacaaaggagtctcgctctgttgcccaggctggagtacagtggtgtgatctcggctcattgcaacctccacctcccaggttcaagcaattcttgtgtctcagcctcctgagtagctgggattacaggtgtgtgccaggacacccagctaagtttttggtatttttagtagagaaagggtttcactgtgttggccagcctggtctcgaacctgtaacttcaagtggtcagcccacctcggcctaccaaagtgctgggattacatgcgtgagccaccggcccggatgattcacttcttaataaatcatccaacccaatgatttggttccaaaagaaacagataacattcaaacactgtttcctctagttcatactgtaagaca

SEQ ID NO: 159620 - DNA, 651 bp, Homo sapiens
ggatttgtagtcatttctgttttcagtgtttgtttgttttttttgttttgttttgtgttttgctgtttcataatccagaagcacaccagctactctttcttcgtgcggtattgatctagaggatgtgcacagagcctactgggactctctatttatgaaactttagtggaatgaacaacatttagagactcaaacagtctggccaatggacattaacctgaacagtacatcccttctcctcccgtcccctctccttcactccctagaacacgttccctggggtcaggggaaggaatgataccacttkccagggagcagcttctctcttgatcatgagaaaaaggacaattcttcagggttttttgatcatgaaatacagaaggcaggaataaaaaaaatcaatcatacataggccctgaaaggaaggctgtctctggaaatgaagacaggtttatagtccaggctaggagctcttccagagcagggatggggtttttattttgtttgtttcacttgggttttctgggctctgagtgtcttgcacagagctgacaacatagcgcatgctaagtcaagggtgaagtaattaataattgaatcaatgtcccttcgcttcaactgttattaagtcaatagatgaatctggccctg

SEQ ID NO: 159621 - DNA, 575 bp, Homo sapiens
aaatcctgtctgagtttcccctgtggattccagacttaacagccccttaattgcatgggtcagttccttaagagaggccggacctggtggctcatgcctgtaatcccagcactttgggaggctgaggcaggaggatcacgtgaacccaggagtttgaaaccagcctgggcaacatgatgaaaccctgtctctccaaaaaaaaaaaaaaaaaaaaaatctaaaacaaaaaaaccaaagtgtgtgtgtttgtgtgtgtgtgtgtgtgtgtgtacgtatcctattggttctgtttctctggagaactctgatggacacaacacactcactgaggaatcttataaagtagactagcagctaacagacataactctaggtggcttcaggtgaagactttagaatgtagaaaaaaagagtccttatcagttgggtaacatacgctctaaatagatattaaaggataaagcaaccccctttmgagcatctcaggctgtttgtggtttgtgcaactactaacaggggacaagtaccagcacttgcccacgtgaccacctgataagaacacctttgttgagcat

SEQ ID NO: 159622 - DNA, 193 bp, Homo sapiens
cagctgtttctttccagcatttccctaagaaagtattcagtttaattgccatggaaaccacagctcttttttgtacacttgcatttcattagttttcatggcagttatttatgaatgacagttctcastataagtgtcattaaggctcacagggacaaaccagctgacccttggttggggtgcccttgaactt

SEQ ID NO: 159623 - DNA, 602 bp, Homo sapiens
tacacaggaggattcccctgctcagtgtaggccaactcttctgtggggaccccacaataagctcagggttgtcagctctgccagggtggcctgagtgttcttcagggccttgtgtaggctgagacaatgaatgccagattgtcatctttgtcattggtgtacagggctctggacacagtgaatctaactgtgcttctgacactcacacactgaaacctctgtgctcctgacactcacacactgaaacctctgtgctcctgctttgcctgggctccatcytctccaagcaggaagcctgaggctgggtgccctggactctggggccctctagttaggaggccagaccagtaggccagggcctgagggcttgagtggatgatgaggagcatgcctggggatgcaagctcacctcctgctccagcggggcctggggactctgtgctctccggcaatggtggcttctcttgctgctaattccactggaagctcccagccagctgccccatctccatgcctgccttgtctgttcattcctttgtttgctcagacacagcctgtccctatgtatcagtgaagacggaccaggccctttcaggggtctg

SEQ ID NO: 159624 - DNA, 324 bp, Homo sapiens
atccagatgtccaaaaacattttttgttaactctatgaaatttgatagaatgtgaaatgtgatagtacatgaactcactgacataaattgtaaaaccgagccccaagttctatatgtaaaaatgcagccgtttttcctgaaggctgaaacccccaacaaagacytgaggggtctggcgtgggggtctgccaccaccacctcctggctctcctctccttttctcaaagcattcccctacccaggaggcgcctttctctccaaacttcatcttactcactatgaaaattgaggttcctgtgactttttcacgggcacggaattcat

SEQ ID NO: 159625 - DNA, 622 bp, Homo sapiens
  misc_feature (1)...(622): n = A,T,C or G
nnnnnnnnnnnnnnnnnnnnnnnnnnnnnnnnnnnnnnnnnnnnnnctggcactgatggggacagagtgaagatcttggaacraggtgacccagtggtttaaatttcattatggtgttgaacatccaggcaacacacacaactcagtagaaatgcaaacagataatgcacccaggacctcacttcagtcacacccagagcagcaggaaggacagaaagttccagaaagagccatgtgcctggctgaggcattttcactgcaggaacaatgtgatgtgactgagcacaaggctgcctttgggcttttacaccacagttcacctggtcacatcccactgcaggtccatcttgggcactgactgatccatccatccacccaccaagggtttgccagactggagattccagaagcggctgaagctgtggtcctgccacagggtgtcggggctggcagggcaacagtcatcacattagtggatgtgaagttggctcagcacccagggtgggaagggcctgggagaaggtcctcccagggaaagcaatgtccaccctggccttggattcaggaagagcaagctcccagagaaacctgagggtcctgggcatggtggactaatgagggc

SEQ ID NO: 159626 - DNA, 622 bp, Homo sapiens
  misc_feature (1)...(622): n = A,T,C or G
nnnnnnnnnnnnnnnnnnnnnnnnnnnnnnnnnnnnnnnnnnnnnnctggcactgatggggacagagtgaagatcttggaacgaggtgacccagtggtttaaatttcattatggtgttgaacatccaggcaacacacacaactcagtagaaatgcaarcagataatgcacccaggacctcacttcagtcacacccagagcagcaggaaggacagaaagttccagaaagagccatgtgcctggctgaggcattttcactgcaggaacaatgtgatgtgactgagcacaaggctgcctttgggcttttacaccacagttcacctggtcacatcccactgcaggtccatcttgggcactgactgatccatccatccacccaccaagggtttgccagactggagattccagaagcggctgaagctgtggtcctgccacagggtgtcggggctggcagggcaacagtcatcacattagtggatgtgaagttggctcagcacccagggtgggaagggcctgggagaaggtcctcccagggaaagcaatgtccaccctggccttggattcaggaagagcaagctcccagagaaacctgagggtcctgggcatggtggactaatgagggc

SEQ ID NO: 159627 - DNA, 632 bp, Homo sapiens
gtcaaagttggtgaagacaccccatgggaggaccaaactgatattgctggaagttttgatgtaaatttgggatgtggctccttggagcaaaagattccatttgtcatcacactcagaggaaccgttcccacccctgtgaatgagggccctaagcagccttcccagtacccacagaccaactaggcttctactgtgggacccagactttcagagagacaatgtcatcttgtccacatttggcagttatactgcatcccttaaaagccactctaagtgagaaatgtacattctactttcagggggaaaaaaaaagaaagaaactttccttgagtcaattagatgaccccatggccaaaatcaaaattccacattaagaagaatattcaggaataatgtcagtgacttgggcccccacacaatacttgggctcagccccaccagactacagccactccgatatgctgtttccctcttccccaggggacctccttcatcctttcccaggagaaagaccccctggctccaagctggacaatkacatccatgacaccattgcaaactctaatccaccctaaacccaacaaacttccagatcaaatgcttctgctctgcactcccttcaccccgaaatc

SEQ ID NO: 159628 - DNA, 607 bp, Homo sapiens
actgctgcaaggttaaagaattcatacgcaggtgtattagtcggggtcctctaaagggaaaggactaataggatagatgtacatatgaaggggagtttatcaggagaattgactcacacgatcacaagtcccacaataggctgtctgcaggctaaggagcaaggaagccagtctgagccccaaaacctcaacagaagggaagccgacagtgcagccttcagtctgtggccaaaggccgtggcaaaccactggtrtaagttcaagattctaaaagctgaagaacttggagtcccatgttcgagggcaggaagcatccagcagggagaaagttgaaggctggaagactcagccagtcaagttcttccacattcttctgcctgctttattctggccgcaccgacagctaattggatggtgcccacccagattgaagatgggtctgcgtctcccaccccactgactcaaatgttaatctcctttggcaataccctcacagacacacccaagaacaatactttgcatccttcaatccaatcaagttgacacttagtattaaccatcacaacaagagtaccaaggagatgctgtgggtttggttccagaccac

SEQ ID NO: 159629 - DNA, 626 bp, Homo sapiens
ccgggtaaatctcaaaaaatgagtcaaatgcaactctacttttaaaatsaacaatcaatcaacacccccttatacaggttttgcctcatgaaaaactcaggctgtggttcacaagaaagattccggctgcagaaagccaggagcacattggaagaacccatcatcactccaagcagagcacttgaagagaaggcctggtgctctttcacatgagctaaaagtcagaaacccccagaaaataacagaacaaggtgtgggatgtatggtgcacatggtatcctggtttacaaactcaggagcagatgcaggaaaaatgcttagtgcaatgccagctggaaggaagtgtttctgcgcaccttgctcacttaccacactaggtgagaagagggtgtatgtgaacatagacagatgcatgctcaatgatgccccctagtatctaaggactcagtgggaccctgagtccagccaccttccctccaccagtggagaaaggtccctgtctccacccacttttctgggcagctgaagcattgagactggggagctctttcttcttttatttcatctttttgtttcaatcagaaatataaataaaaaatacaacacgaggcaactctaaaagcaca

SEQ ID NO: 159630 - DNA, 626 bp, Homo sapiens
ccgggtaaatctcaaaaaatgagtcaaatgcaactctacttttaaaatcaacaatcaatcaacacccccttatacaggttttgcctcatgaaaaactcaggctgtggttcacaagaaagattccggctgcagaaagccaggagcacattggaagaacccatcatcactccaagcagagcacttgaagagaaggcctggtgctctttcacatgagctaaaagtcagaaayccccagaaaataacagaacaaggtgtgggatgtatggtgcacatggtatcctggtttacaaactcaggagcagatgcaggaaaaatgcttagtgcaatgccagctggaaggaagtgtttctgcgcaccttgctcacttaccacactaggtgagaagagggtgtatgtgaacatagacagatgcatgctcaatgatgccccctagtatctaaggactcagtgggaccctgagtccagccaccttccctccaccagtggagaaaggtccctgtctccacccacttttctgggcagctgaagcattgagactggggagctctttcttcttttatttcatctttttgtttcaatcagaaatataaataaaaaatacaacacgaggcaactctaaaagcaca

SEQ ID NO: 159631 - DNA, 550 bp, Homo sapiens
tagttctagtctgaaggctggtgggcctgagacccggaagccctgacgttttagttagagcgcaaaggcaggaaaaaactattgttccactttgaagaccatctagccaggaagaattctctcttacttgggggagggtcagccttttttatctattcaggccctcaactgattagtcgaggcccaccacattagagagaccaatctactttacccatttaccaattwaaacttcaatttgatcaaaagcaccctcacagaaacacccagaataatgtttgatcaagaatctgggtaccccatagcccaatcaagttgacaacattaatcatcagaggtgtacctttgtcaacttgacacatacacacatgtcctcaaaccatacttaatctctaaataaagtcaatgacaaggtcataattctgcctaacatgatacaactatcctgtgtacagctgaaaatgcactaacctcttctcccgaagaggaggtgaaatccttgagtgatgtttacctttctcctgatatcttctaacttaaatattgtgag

SEQ ID NO: 159632 - DNA, 550 bp, Homo sapiens
tagttctagtctgaaggctggtgggcctgagacccggaagccctgacgttttagttagagcgcaaaggcaggaaaaaactattgttccactttgaagaccatctagccaggaagaattctctcttacttgggggagggtcagccttttttatctattcaggccctcaactgattagtcgaggcccaccacattagagagaccaatctactttacccatttaccaatttaaacttcaatttgatcaaaagcaccctcacagaaacacccagaataatgtttgatcaagaatctgggtaccccatagcccaatcaagttgacaacattaatcatcagaggtgtacctytgtcaacttgacacatacacacatgtcctcaaaccatacttaatctctaaataaagtcaatgacaaggtcataattctgcctaacatgatacaactatcctgtgtacagctgaaaatgcactaacctcttctcccgaagaggaggtgaaatccttgagtgatgtttacctttctcctgatatcttctaacttaaatattgtgag

SEQ ID NO: 159633 - DNA, 550 bp, Homo sapiens
tagttctagtctgaaggctggtgggcctgagacccggaagccctgacgttttagttagagcgcaaaggcaggaaaaaactattgttccactttgaagaccatctagccaggaagaattctctcttacttgggggagggtcagccttttttatctattcaggccctcaactgattagtcgaggcccaccacattagagagaccaatctactttacccatttaccaatttaaacttcaatttgatcaaaagcaccctcacagaaacacccagaataatgtttgatcaagaatctgggtaccccatagcccaatcaagttgacaacattaatcatcagaggtgtacctttgtcaacttgacacatayacacatgtcctcaaaccatacttaatctctaaataaagtcaatgacaaggtcataattctgcctaacatgatacaactatcctgtgtacagctgaaaatgcactaacctcttctcccgaagaggaggtgaaatccttgagtgatgtttacctttctcctgatatcttctaacttaaatattgtgag

SEQ ID NO: 159634 - DNA, 550 bp, Homo sapiens
tagttctagtctgaaggctggtgggcctgagacccggaagccctgacgttttagttagagcgcaaaggcaggaaaaaactattgttccactttgaagaccatctagccaggaagaattctctcttacttgggggagggtcagccttttttatctattcaggccctcaactgattagtcgaggcccaccacattagagagaccaatctactttacccatttaccaatttaaacttcaatttgatcaaaagcaccctcacagaaacacccagaataatgtttgatcaagaatctgggtaccccatagcccaatcaagttgacaacattaatcatcagaggtgtacctttgtcaacttgacacatacacacrtgtcctcaaaccatacttaatctctaaataaagtcaatgacaaggtcataattctgcctaacatgatacaactatcctgtgtacagctgaaaatgcactaacctcttctcccgaagaggaggtgaaatccttgagtgatgtttacctttctcctgatatcttctaacttaaatattgtgag

SEQ ID NO: 159635 - DNA, 610 bp, Homo sapiens
gggtcttgcaacatttgttctatgctgtttgctgtaagacacattactcatgttttcagacattttcggctgtcccaaagtaagaagtcattttctgcaaatggctacttcggctttaaatttgttcggtttcaggtcatcttggcccctccaacatcaacagggatctractaagagaaagaggctggcataaaaatgccttggaaaggttttagtttggccattctttggccaactaaactttggtgtttgattttttagtatttaatcaggcctctactctttgacccagccactccccagtcatgtccgggccgaactgctttataaccacgaggtgtctgtttccctcctaagactcttgagcttcctcctctgatgaatgatcttgaccatcactttgtgttttctcttctgctcttgggcccagcactgtgccagagcagtggtggcggggatgacgtcccatgaggcacctgcacagcacggggcaaaaccatggacccccgcggttaattaacagcaacggagaattgagaatagatcatgaaattgtctggaattagggctctttctactcatggagtccattattccaagcttggggta

SEQ ID NO: 159636 - DNA, 525 bp, Homo sapiens
tgtgcttaacaagttcaagcctatgtgtggatagaaaggtatttgcagagaagcaaaccgataagactttgcttcagggatgggggatgggtgctgtgtgctttgcttttgaaacgaatcatttccctcatcattatgtgaaatcgagatcaccatctattcctagggcaggcactgtctgtgagtgtggcctattccagaactgttggccttkcccccacctcattagatagccagcagagaagaacagctcaatctagattttctttctgaatttgactggcttcctgaaaaaagggtctacctgtgccaacgttgtcaacgccacatcgaaacgacccagagagctggagactgcacatttccaggacatgaaaaaatatgctctgagcttcagggcttttgtttttcttttctgaaacaagatgagggcaaaaaaaaaaaaaaaaaaaattaaaaacatcgatgtcaaaaccaaagctcccaggtcatgtcctgtcctgtcccagcctcagtaaaattcag

SEQ ID NO: 159637 - DNA, 385 bp, Homo sapiens
tgatttggcagtttcatgcaacattaaatatacatttacactgtgacccaccaatttcactctcagttatttcaaaaagaagtaaaaacatatatccactcaaaaaaaaagatttctacaagattttttatagccacattactcataatagtagaaaactggaagaaacccaaatgtttctcartagaaggttacacaaaaaagtgtggcttattcttatagtggaagttgatttgttaataaaaaataattaacccctaatacatatgagaatattaaaaaatgcacaaacattatgataaccaaaagaaaccaggaacaaaactttgtcgtttcactgtatgcaaattttacaattaaatcatgtgatgcagttttttaaaat

SEQ ID NO: 159638 - DNA, 560 bp, Homo sapiens
gtacatcctacaagtgaaaccccagtctgcaaccccattctttctcttccctgtatgtctagaggcttgccacatgccaggaatcttgcaggccagtctcacatttgctaaaagtaattgctattttctatgtctgctcaggcatgatgctctgaaataaagtacaaagcatagcaacttcaattaacaaatacaactaccatattattcaattctacacagattcatttttacccgagggatattacaaaacatcacaaagccgaatattattcctgtaacatctgtcatcaaaaccaaaatcatatagttagatctacataaatcatagcaaacctgccatcccacagcaagagtcaaacatccaccctatgccatggccttcaaaatattgagataattggtggataggcttgttttctcmtttcatcaccaaggtttcacttcagaacaataccacatgatgagtccactttttttgatgctaaaatgtgaatactgttttcataatttagtatgcagcgtgctggtccaaatcgacatgtttgtaagggattcca

SEQ ID NO: 159639 - DNA, 427 bp, Homo sapiens
tatgtccctctgattcctgagtgttcttgaaatctgaaatttagccaaagctaccctaagagtggccatgagaaaggacactggtgccgaattaaagttctgacagttgggctgggactgtgatgtttagaagtatagtagaatattcagcgctgtagggagtgggagcaggaaaggaagactctagtgatgaggtggtagcaaggtgtgctagtcatttccatttctaatttgcatatgtcagttgggcactgcttrcatgttcacagtggctatgccgtaattatgagtagtctttgtatctccgttcacccttgtgaaactcaacagaatcacggcaacagccttctggcagcataatgcagatgtgtcattctcctcccgcagtgaaaaaaagaggagagggagctgtgcactctctgaattc

SEQ ID NO: 159640 - DNA, 427 bp, Homo sapiens
tatgtccctctgattcctgagtgttcttgaaatctgaaatttagccaaagctaccctaagagtggccatgagaaaggacactggtgccgaattaaagttctgacagttgggctgggactgtgatgtttagaagtatagtagaatattcagcgctgtagggagtgggagcaggaaaggaagactctagtgatgaggtggtagcaaggtgtgctagtcatttccatttctaatttgcatatgtcagttgggcactgcttacatgttcacagtggctatgccgtaattatgagtagtctttgtatctccgttcacccttgtgaaactcaacagaatcayggcaacagccttctggcagcataatgcagatgtgtcattctcctcccgcagtgaaaaaaagaggagagggagctgtgcactctctgaattc

SEQ ID NO: 159641 - DNA, 568 bp, Homo sapiens
taagaataagacactagttcgaagccactctatgatttgtgcctgggattttaatcaatattctctgatgcaaaagccaacctagcactttgcctctttggtcatgttgtatgtgcccactcatgataagtgcttggtatatttaagtagtcatatccatagtaggtataggtatcagtttggattctccaggaagcagaattacgagtgtatgaggaggagggggtcacacctgggaaagataaagggagactgatcaaggtggggcaatgtattagtccattttcacactgctgtaaaaaaatacctgagcctgggcaatttataaaggaaagaggtttaactgattcacatttccacattgctgggggagcctcatacttagaatcatggcggcagacaaagagaaaccaaggaccttcttcacatagtgrcaggagagagaagagccagtgagtgaggaagtgccactcttttaaaattatcagatctcatgagaacttccttactaccatgagaacagcttgagggaaaccttccccattatccaatcacttcccactaggtt

SEQ ID NO: 159642 - DNA, 538 bp, Homo sapiens
atggcctgagaaaaatgcagatgtcttaaatggagccgtaagcgcccttgtaaatagttttaaattcactaaaataaaactgcaaaacagaacattgaattaaggtttcaccggtaattataatggaattgtaattaccattataattgtgggcagtgagaatagagaagggtagagtcaatgtcagatagaagtaacgttttttgatggaaagtgattcaacacacatcagagccttggagctctgctcttgcttttttgcagggagaagcaaaaagtgcgaatagacctccatgaactgctacagtcagttgtggtctggtgagggttttttctgagcatagaaaaaagcatcccagcacacgggaaggtgacttccatggcttttttctatcaataattctttagcactatgcctctcyactcgcaaagtcaaactttttttttttttaaagaaggtttggtattttacaagttgtaaactaatgaaaccgatacatagatgtaaattccatttaccatctctagctctagctca

SEQ ID NO: 159643 - DNA, 607 bp, Homo sapiens
aactataatattaagaaagatacccagaaaagctttagaaatctaaaatctcttcaggatgtttatactattttaattaataaccagttattagagaatttcaaagtatatgcgatgagataattgcgaggtttgagtgtctagtgactaaaacaactttgattgtgtttagtatattgcaacatgagaaaacagatgtgacagccatttggtgaagtttaacattaggagcattctgaaaaactgaaaagctttgtatatctgcatactttatattatttgaattatgtccaaaatattcctaatatctttatttttctatatgtgtggctaatatctaaattacattttcttaayacataattcaaaaattgtgaaagtttattaaaatgtaatgctcatgaaaacttgttttcatgaaaggttatggaagaattagaaaaggtaaaacaagaaatggaagaaaagggcagcagcatgactgatggtggtaagtacatgctcattttaggggaaaaactgagcaagagaaaaatagctcttcaagaaacctacttaacaaaatagtattaatatataaaacaaattatttgttgcttgtttgaag

SEQ ID NO: 159644 - DNA, 555 bp, Homo sapiens
gcagttacttatatgctatttttcctatctgacagtttgtatggtttgtacctttagcaaccttattttttttttatctaagttacactacttcagtacatattccacataaagaaattcagaasaaccgtattttaacgtcaactactgtagcaaaagctgctggtgcctgcccagattcctctttcatcaggctgctgtactcactctccagctgctatgaatattggctgttcagtgttcacagctgcatctttttccagaaaattacctttggccaataagagccaccccaaccacagacgtctagggaagctcacagtttccagtgatacagtggtataaagactacctttcttgccccaaagtgggccaacttcatagtgcctttcatgccttagagaatatctcatggtgtcggttactaagttctgttgaatctgcttcctaaagtctgttaactatcatattttcactattgtaattgccactcatcctagtttaggacaatctctcattgaactattcaaatcaccttctgaatcaattttcacc

SEQ ID NO: 159645 - DNA, 555 bp, Homo sapiens
gcagttacttatatgctatttttcctatctgacagtttgtatggtttgtacctttagcaaccttattttttttttatctaagttacactacttcagtacatattccacataaagaaattcagaacaaccgtattttaacgtcaactactgtagcmaaagctgctggtgcctgcccagattcctctttcatcaggctgctgtactcactctccagctgctatgaatattggctgttcagtgttcacagctgcatctttttccagaaaattacctttggccaataagagccaccccaaccacagacgtctagggaagctcacagtttccagtgatacagtggtataaagactacctttcttgccccaaagtgggccaacttcatagtgcctttcatgccttagagaatatctcatggtgtcggttactaagttctgttgaatctgcttcctaaagtctgttaactatcatattttcactattgtaattgccactcatcctagtttaggacaatctctcattgaactattcaaatcaccttctgaatcaattttcacc

SEQ ID NO: 159646 - DNA, 555 bp, Homo sapiens
gcagttacttatatgctatttttcctatctgacagtttgtatggtttgtacctttagcaaccttattttttttttatctaagttacactacttcagtacatattccacataaagaaattcagaacaaccgtattttaacgtcaactactgtagcaaaagctgctggtgcctgcccagattcctctttcatcaggctgctgtactcactctccagctgctatgaatattggctgttcagtgttcacagctgcatctttttccagaaaattacctttggccaataagagccaccccaaccacagaygtctagggaagctcacagtttccagtgatacagtggtataaagactacctttcttgccccaaagtgggccaacttcatagtgcctttcatgccttagagaatatctcatggtgtcggttactaagttctgttgaatctgcttcctaaagtctgttaactatcatattttcactattgtaattgccactcatcctagtttaggacaatctctcattgaactattcaaatcaccttctgaatcaattttcacc

SEQ ID NO: 159647 - DNA, 555 bp, Homo sapiens
gcagttacttatatgctatttttcctatctgacagtttgtatggtttgtacctttagcaaccttattttttttttatctaagttacactacttcagtacatattccacataaagaaattcagaacaaccgtattttaacgtcaactactgtagcaaaagctgctggtgcctgcccagattcctctttcatcaggctgctgtactcactctccagctgctatgaatattggctgttcagtgttcacagctgcatctttttccagaaaattacctttggccaataagagccaccccaaccacagacgtctagggaagctcacagtttccagtgatacagtggtataaagactacctttcttrccccaaagtgggccaacttcatagtgcctttcatgccttagagaatatctcatggtgtcggttactaagttctgttgaatctgcttcctaaagtctgttaactatcatattttcactattgtaattgccactcatcctagtttaggacaatctctcattgaactattcaaatcaccttctgaatcaattttcacc

SEQ ID NO: 159648 - DNA, 551 bp, Homo sapiens
gcaccagcatcgccacacatgacatagcaacacgattaaatttccttttgctcacatttagtgggacctgtgggggtgtgcagaaatcaatgggggatcaggagcctggaaaattacatacttgaagaattaatgaactataattccgtattacattctcaatcacattgtgcttccttttcattaatgaaactaaattggttttccatagacagggtacttttaaaaaatgcaatcatgcttctgctcagataaaagaagaaaaagttacctgcttttcagatgaggcttrttgtatcacgaaacatgtcagtaggaaatttatagagaagaacttatctgctgtgttaactcaacctgttgaagtgccttgaaattagcctttaaatccctggctggaaattgtagctaatttcccagtccttattctttttaaagagaaaaatgtttttgagttagatagtactatatagtatagtgataatcaaagacctctctgaatataatagatatcttctcataaaaaaaattcatagatcaaaatgtagtta

SEQ ID NO: 159649 - DNA, 535 bp, Homo sapiens
cttgacacctgagactactgagactctgcccagctcttcaagagctgcagagatcaatttctcagcacatctgtaatctactgctacaggacaccagttggaaagctcactctaaggaatattactccatgactaaataacggcctaatcagattccccattgagggcaccagtctgttagagaagtaggtgggcacgtagttacccaaagtgtctaagtcagggaacatcaggaaaccagaggtaaccaggggacaacataaagctcaaaataatcagcagaacccaaaatgtaagaatacagatatataaaagaaaagaatgcggagcaaaatgattacaagaccaaggtgcacaggtgagttcatcatccttgtttaaatgcaaacagccaaaaaratgtaaaaacagagttgactggtaagccaagatcaccttgaagaagtaatatactgttttatctaacattattagcaatgacttgaaggaagataaataaatagaatatagcttataaaaacatcacatcacccaa

SEQ ID NO: 159650 - DNA, 609 bp, Homo sapiens
tcttcagtttatgtgctcattctttccattggaaactcctttaactcttctgctgaaaatgttctctagggttcaactttagggaaatcttagcaaattttatttattactctagctattatgtttattttcataacagcttttctgaaggaggacatctaacacatctaggtgttcataatgtgagcctcatttgtattttcagagaaragttttatcttgagtttgaatgaactgtggaattagctgagttaagagactctcatttttgctatccatgaggcagaaaagtggtgtgaaggatatatgacttcagccaattgactactgaccagtctttctgttgtttaggccataggaaatagggcatttggagacaggtgctaaggaaatgagtagcacttttgtgtgtgtgtggttgtaggaaccactgtacaccctagaacactttattaagaccttactgcttatgtaattgaaaagacattgattgagctacaggtacctggtcagacattgagagacctgtacttggtctcaggatgctctgtgtagagcttccccaggctgttgggagctgggagactgcttggcctggacaggacccag

SEQ ID NO: 159651 - DNA, 609 bp, Homo sapiens
tcttcagtttatgtgctcattctttccattggaaactcctttaactcttctgctgaaaatgttctctagggttcaactttagggaaatcttagcaaattttatttattactctagctattatgtttattttcataacagcttttctgaaggaggacatctaacacatctaggtgttcataatgtgagcctcatttgtattttcagagaagagttttatcttgagtttgaatgaactgtggaattagctgagttaagagactctcatttttgctatccatgaggcagaaaagtggtgtgaaggatatatgacttcagccaattgactactgaccagtctttctrttgtttaggccataggaaatagggcatttggagacaggtgctaaggaaatgagtagcacttttgtgtgtgtgtggttgtaggaaccactgtacaccctagaacactttattaagaccttactgcttatgtaattgaaaagacattgattgagctacaggtacctggtcagacattgagagacctgtacttggtctcaggatgctctgtgtagagcttccccaggctgttgggagctgggagactgcttggcctggacaggacccag

SEQ ID NO: 159652 - DNA, 581 bp, Homo sapiens
gtaagccattaagaagttacttaatttctgaatctcagttttttgtacaagatagaatttgcacctctcatctcctacttttttctaggaatataagtaaagcaatttgaaatcccccaggattaaccgcataaatttaaggtattatctcccttgcaggtaattgttgtatgtaatttatctttatgtgcaacactttctcaccagtggttgctgtgactgcagaacactttcasactaaagctaatactaatatctggtaatcaacagattagttgattagtacttacgttaactcttcttactaaatttaagtaactgatggaccatgcttttttttttttttctttaagccgatcaaaatggtaagaacagttgcaggtgtgacctctaatatgttgcttttccaggcttatgtgtatcattgaatgtgataacattgtaactaggaccatgattattgtttagtcaaataaaccagccattatttaaggacacaaggttagttgacatggtaattttagagatgtatcacatacgtaggtgagtttacatggaaggccagggaatatatctcctac

SEQ ID NO: 159653 - DNA, 274 bp, Homo sapiens
gacacttgtgttgtaattttgctggaaagggagcatatcagagtggttaagagtgcatatttgagccaggttacttgagtttgaatcccagttcataccagcagtgtaaccttggttatttacttaacttctttgtgctctagtttcctcatatgtaaaaaggggatgatcgattttaatcatagtattctgaacatgaagtgagcactgyatgtagtcagcaataatggttagcagttattattttgagttactatgattgccttcttcaagc

SEQ ID NO: 159654 - DNA, 544 bp, Homo sapiens
acctctctttgccaagactcacatgctgcccagtacctgagggagagctccgttgtcgctggccaagagaaattccagtttaacctatgcctcccctagccaaatccattgcaaataaatgtgtgtgtgccacttgcagagaatctgcctgactcaccccccgcctttggcgtgccagggagagatgtaaatgctccgtcctggagctggcagtgaagtgggggccgcggcctcggkagcaccaagagtccccaaatctccccctgtgatgggtttagggatgtgttcctctcaagcaggtgcctggtcacagggcgaccacccaggctcacagcaacacacgtgtcactgagcccgagcccagcccgccgcagaactggccccgcagtcctcgtaaagacgcccagttgcgcgcaggggacttagcagtgagggagaagcagaccacccaaactcttcctctaaaccctaagaaggaaaaaaaatacttttccgcggaagcagcctccacacaccgcccgcgcccagctcaggggatgcccgg

SEQ ID NO: 159655 - DNA, 567 bp, Homo sapiens
gggtaatgtatgcaataacctcattgaatacatatcatatatgaatatagaaataatacttaggttatgggaatgttctgaggattaaaggagatatgttcataataagcrctatttattaatagatgttcttattaagtaatatttctaatctagtgtccttaccaaattgcttggccaggaaaaaatagaaagcaagctgtgaagaatctcttcaataaacctcataactgtcttttgaagaggtcttgcaagtggtgatgaattgaaagaataaaaataaaacttgtgataatggaaaatagaagtataagttttggaagaaaagactgcagtggatgtgtagctcagtttgtacacaccccaaataacattggaaagccaagttattgttctcaaagtctttgctcattttaaatagtaatagattcaagatagaggagaaactgatttctgaagtgagcttgatttcagcatgtaaaaggatacattcttttgacttagttcagaacatgctaatttcataggcaaattaaccaattgtcattcacggcaggacataccatg

SEQ ID NO: 159656 - DNA, 547 bp, Homo sapiens
aggggcaatccaaattcagtaagtatctcaagctaatttgttcttttgcttttaatctaactgatttgcttagaagacagtgcagaygagaccatggtttgttccccaatgagcctatgagctccacccctcactctcaccaggtccatgcaaggaaaggttgaggggagcaagggggcttataatgtgggaacccaacatctatccttaatcccctactaaggacagtggatacatcacataactggtacatccaaaagtattcatatactaataatgtgagtcagagtaggggatgtttttaagttcagtttgggttagaaccaagtagctcttaataataaggagtgtgtttctacatttttaagtaatttgctgatttattccaggaggtcaaatgttctcacagaatccccaagtcttttattccaaaacccatccccttcactaacaacttaatgtagcagccacttgccatagagaagagaaagaaggaaattcctagtattttggaaaaataacaaggtagaagctggagttaaaagtc

SEQ ID NO: 159657 - DNA, 627 bp, Homo sapiens
aggctatgtggcatagatgatgcagctactactttgtttgccagaatagccatgcttggagacttgagctgctgtataagaaacccaattgtcctaatgctgccttgcttggctccaagccaagctagttggagtggccacatggagaagccacctctctgtaggtagtctrgttagcagctctagtcttcaagtcttcccaacacaggcacatgtgagtcaaggaacctccaaatgattccgactccctgccatcaaatcactccagccctcaaatctcttcagctggaatcctaaccactatgaagaataagcaagccatttttctgtgccctgtcctatcccacagaatctgtgaacataataaaatgcttattgttgtaagttactaagttttgtaataattcatcaagcagcagtggtattcagatcagccagttactcaaacattcaaggaaaaaatacatctgaactataatcctatctgcctgtacagttcaaccctacattctagaggagcatgcaatctccaaacaaaatttttaaactaaatgtcatttcacttacccaaatgaagtttaaataactgtgttagtggtaactatgagacagacaaggaatctgaag

SEQ ID NO: 159658 - DNA, 514 bp, Homo sapiens
tctgccctcatcagcttttttatttcaatatccattcagacaagaatactcagtgtacagaacaatggggaagaaagggattcttctcctgggatgctcagtcacctagcaaaagcatttgagaaagggataaagggaagaagattattggattttcatatgtgctttcaagtgtacactaccccaaaacaaaccacaartttgtttccagttctccagcataatcataaaattggaccaaaaagcaagtccacctaagtaggcattatagattattctagggcagattcagatactggctcttcaaatctaaatccaggaggaggcatctgctcacagccaagtggacaattatataaactaagaacaatctaccttcccaggttgttggaactggttctgcctagattgattgttccaccttaagaaccactaaacacaaagaaactatttgggacctatgaagaaaaattacaaactaggggaaaggatgatctgcctcaatgactcagca

SEQ ID NO: 159659 - DNA, 514 bp, Homo sapiens
tctgccctcatcagcttttttatttcaatatccattcagacaagaatactcagtgtacagaacaatggggaagaaagggattcttctcctgggatgctcagtcacctagcaaaagcatttgagaaagggataaagggaagaagattattggattttcatatgtgctttcaagtgtacactaccccaaaacaaaccacaaatttgtttccarttctccagcataatcataaaattggaccaaaaagcaagtccacctaagtaggcattatagattattctagggcagattcagatactggctcttcaaatctaaatccaggaggaggcatctgctcacagccaagtggacaattatataaactaagaacaatctaccttcccaggttgttggaactggttctgcctagattgattgttccaccttaagaaccactaaacacaaagaaactatttgggacctatgaagaaaaattacaaactaggggaaaggatgatctgcctcaatgactcagca

SEQ ID NO: 159660 - DNA, 617 bp, Homo sapiens
gacacattacagagcttgagatgctttccatcctgagaaacttaggaagaaaatgtggcttcgaaaagatggtttagaaatagtcatatagaaaacaatatcggttccttgttctctatccctgtcgtccccactgccctctgcctgttgagagcagagttttagaaagatgttctgtttcctggcctaagaggagaaggaagggaatggatttgggctgggraaagatagaaataggtgaagtaggtggcaggaaggcacatggccacaattaacattttaggaaaatgaaaagaccttgaactagggctgctgtggcaataggttgacagctaagagatggttttccaaatttagttatagaattgtctgccttggacaacttttaaaaggagaaaaagccactgttataagcaagcagggccatctccatttctagaaacaagtgaaaatgagcatctttcattggatggttaaacattgttttggggatcacttgggactgagctaatttctttcagcctgcgatccacttcacatgtttggttcatcatctctgatctttcatctaacctgactttctctttgcttcttttctgcagtgctcatgtacccca

SEQ ID NO: 159661 - DNA, 462 bp, Homo sapiens
taataaaatacagatgcacaattcccatttatattatttaataatcatgacttaaattgtcaaggaaaataaatttatatagagtatagactatacagatattcatatattttccctgaaagttccaaggttatttttattgactatggcctttagcctctatatggtttaataatgactccttattaaatgtcagaaactaacstgaaccagaccatagcacccctcattctttttctttcttttcttaatttttaatctttatgaatatataatagtcccacacccctcattcgcattctttttcactttgactcataatctacattaaaccctatatggaaaaagaaaaaaaactttttttcgcttaaagaaacacataaaagatacacagtataaataagtttcatgatactacctcaccgagatgtttaagagctatattagcaaatgtaattttag

SEQ ID NO: 159662 - DNA, 462 bp, Homo sapiens
taataaaatacagatgcacaattcccatttatattatttaataatcatgacttaaattgtcaaggaaaataaatttatatagagtatagactatacagatattcatatattttccctgaaagttccaaggttatttttattgactatggcctttagcctctatatggtttaataatgactccttattaaatgtcagaaactaacgtgaaccagaccatagcacccctcattctttttctttcttttcttaatttttaatctttatgaatatataatagtcccacacccctcattcgcattctttttcactttgactcataatctacattaaaccctwtatggaaaaagaaaaaaaactttttttcgcttaaagaaacacataaaagatacacagtataaataagtttcatgatactacctcaccgagatgtttaagagctatattagcaaatgtaattttag

SEQ ID NO: 159663 - DNA, 462 bp, Homo sapiens
taataaaatacagatgcacaattcccatttatattatttaataatcatgacttaaattgtcaaggaaaataaatttatatagagtatagactatacagatattcatatattttccctgaaagttccaaggttatttttattgactatggcctttagcctctatatggtttaataatgactccttattaaatgtcagaaactaacgtgaaccagaccatagcacccctcattctttttctttcttttcttaatttttaatctttatgaatatataatagtcccacacccctcattcgcattctttttcactttgactcataatctacattaaaccctatatggaaaaagaaaaaaaactttttttcgcttaaagaaamacataaaagatacacagtataaataagtttcatgatactacctcaccgagatgtttaagagctatattagcaaatgtaattttag

SEQ ID NO: 159664 - DNA, 324 bp, Homo sapiens
actctggtatttgctataagtcttctccagacaaggaaacaatggcaaggcagcaattgtagttccagaacatcatttaatttttgatattcactgtgcctttgcgagactggaaatgacaacagggcaacaagttcattccagtacagtcgtttagttctggtgctcaatataagtcctccccagaatgggaagtgaaatttgaaaaacaatccagaaacaaaaagagactatgacaaagatatagaaaawattaaaagatatcagagagaaatcctaaatctaagtatacagtaactgaactgaaaaactcctgagaaagct

SEQ ID NO: 159665 - DNA, 493 bp, Homo sapiens
cttattatgtactgtggtttacattgagttgtgcttgtttttatttattaaaattgttaaatgattacatattaaatcttcaagactgctttcatttgaagggagccatatcacatggaagattcatatgaagtttcttgccaacaataatatccagaatgttttttcccaaaatctttctgagatggatgattcttatcctttcagttaccagtggtgcaaacttctagattaatctcccttaacactggctcagtgggtcacagtgatcatcaagaactgtgtgatcattcattgggtgtttgcctctctaggagtttattcacctsaaaattcaaatgattcccattgagagctgttggacatttcagctaatttgccttccatgctcaatttctcttctaactaaaattacccattgagctcttctttgcccaggggtgaccactgcctggattagagtaattcatccttaggcgcgcctgtgcctttg

SEQ ID NO: 159666 - DNA, 559 bp, Homo sapiens
tttatgcattcaccttattatgtactgtggtttacattgagttgtgcttgtttttatttattaaaattgttaaatgattacatattaaatcttcaagactgctttcatttgaagggagccatatcacatggaagattcatatgaagtttcttgccaacaataatatccagaatgttttttcccaaaatctttctgagatggatgattcttatcctttcagttaccagtggtgcaaacttctagattaatctcccttaacactggctcagtgggtcacagtgatcatcaagaactgtgtgatcattcattgggtgtttgcctctctaggagtttattcacctcaaaattcaaatgattcccattgagagctgttggacatttcagctaatttgccttccatgctcaatttctcttctaactaaaattacccattgagctcttctttgcccargggtgaccactgcctggattagagtaattcatccttaggcgcgcctgtgcctttgatgtcctcctcctactaaaggatttgccaaagacaatagtctttgactgaacc

SEQ ID NO: 159667 - DNA, 404 bp, Homo sapiens
aataggcattcccaagaaaattatccccaaacttctaaatacaaagagaaaactttatttaatgaatctcaaccccaaactaccgcattgcatggaataaaatccagttgaatcagtcatttgcagytggtagtctttaatagccagcactactaaaaaatcatcagatttaccctgcttgccatatagcatctagtcttcactcaggttctagctgtatatgtctggttttgacaaacacattagaaggattttcagtttacaagtccatctgcatagtcctgttaatagaaggcatctataaatatcaagcactttgttctcatccactttttttgaccatgtattgccacagcactaaaattcccccaccccttgccatcagctctttctaaaaggaattc

SEQ ID NO: 159668 - DNA, 424 bp, Homo sapiens
aagaaaattatccccaaacttctaaatacaaagagaaaactttatttaatgaatctcaaccccaaactaccgcattgcatggaataaaatccagttgaatcagtcatttgcagctggtagtctttaatagccagcactactaaaaaatcatcagatttaccctgcttgccakatagcatctagtcttcactcaggttctagctgtatatgtctggttttgacaaacacattagaaggattttcagtttacaagtccatctgcatagtcctgttaatagaaggcatctataaatatcaagcactttgttctcatccactttttttgaccatgtattgccacagcactaaaattcccccaccccttgccatcagctctttctaaaaggaattccaggctactaccaactagctgccttgtactact

SEQ ID NO: 159669 - DNA, 603 bp, Homo sapiens
agtgaacaagacagaaaaggtctttgccttcctggaattgatagtttagactttcttgcttctttaaagttccaccaggcttgtcacacccatcttcaaccttgaatcacacctatcacctgctttctgttttgtgttcttgagattcagtgctttgtgggagaaagggagcatgtcgtgtatatcctaaagatttgcattcatttcagttgggccatcgctgcaactcagtgatgtttctcttcatcctacaggtattgggtgatttckgggtacaacatactccagcagatttcctacctctgatctgcaatgatcatcgcttaccttgaccctttaactgttttccttcacaaacccttggcaaatagtgacctggaatgagacctaggagactgagactgaagctctatgagctttgtttctctataaagtgagctggttggagagataatattcaaagtttcatcttacgccacataataatactatggctgtatacctgcttgagccagcaaagctggaggtatcacacatgacatatccatgcttcttcctccttcccagacataaatgtgttgagtatctaagtctgttctcatt

SEQ ID NO: 159670 - DNA, 592 bp, Homo sapiens
tcggtgtgccacaattgaacgaatgctttaaagaattaattgttaaacctttgaaagaaaaaaggaaatcatagatagaaatgaagagagagagagtcaactatctctctctataaacatctatctcttttattaaaatgttgttgactcttggcggggcacagtggctcacgcctgtaatcctagcactttgggaggccgaggtgggcagatcacgagttcaggaaccggagaccaggttggccaacatggtgaaaccccatctctactaaaaatacaaaaattagccaggtgtggtggtgcgcacctgtaatcccagctactcaggaggctgaggcaggagaatcacttgaacctgggaggcagaggttgcagtgagccaagattgtgccattgcactccagcctgggtgacggagcgagactctgtctcaaaaaaaaaaaaaaaatgtcgttgactcttttaaaaagttaamcccaaaaaagtataaagaacattaaaaaaaatcacctatatctagcactcagaaataaattgttaacatttggtgaacaaaattctggatatctctaaaattataaaaatagatgga

SEQ ID NO: 159671 - DNA, 592 bp, Homo sapiens
tcggtgtgccacaattgaacgaatgctttaaagaattaattgttaaacctttgaaagaaaaaaggaaatcatagatagaaatgaagagagagagagtcaactatctctctctataaacatctatctcttttattaaaatgttgttgactcttggcggggcacagtggctcacgcctgtaatcctagcactttgggaggccgaggtgggcagatcacgagttcaggaaccggagaccaggttggccaacatggtgaaaccccatctctactaaaaatacaaaaattagccaggtgtggtggtgcgcacctgtaatcccagctactcaggaggctgaggcaggagaatcacttgaacctgggaggcagaggttgcagtgagccaagattgtgccattgcactccagcctgggtgacggagcgagactctgtctcaaaaaaaaaaaaaaaatgtcgttgactcttttaaaaagttaaccmcaaaaaagtataaagaacattaaaaaaaatcacctatatctagcactcagaaataaattgttaacatttggtgaacaaaattctggatatctctaaaattataaaaatagatgga

SEQ ID NO: 159672 - DNA, 450 bp, Homo sapiens
gtgaagtaaaatagtctttataaacaacatagttgtctatgtaraaaatcctatcacttccaccaatgatgtaaactattaataaatgggttttattgcagtatagaaaatcaaaatacaaaatcaattgtgttcctctatagtagcaatgaacaaatggaaacaaaactatcattactaatattataaaaaactatgaagtacttacatcattcaatcaatacaaaaaatgtgaaatttgtgcactgaaaactacagaacaatttctgagaaaaatgttaaaagacctaaataaatggagagatgtcaggttcatggatcacaaaatacaatattattaaaatgtgaattcttcccaaattgatctgtaaattcaatgtaatcccaatctaaatcgcagcaggcttttataggaaataataaactgactctaaaattatatgggaaaaa

SEQ ID NO: 159673 - DNA, 362 bp, Homo sapiens
atgtaaaaaatcctatcacttccaccaatgatgtaaactattaataaatgggttttattgcagtatagaaaatcaaaatacaaaatcaattgtrttcctctatagtagcaatgaacaaatggaaacaaaactatcattactaatattataaaaaactatgaagtacttacatcattcaatcaatacaaaaaatgtgaaatttgtgcactgaaaactacagaacaatttctgagaaaaatgttaaaagacctaaataaatggagagatgtcaggttcatggatcacaaaatacaatattattaaaatgtgaattcttcccaaattgatctgtaaattcaatgtaatcccaatctaaatcgcag

SEQ ID NO: 159674 - DNA, 450 bp, Homo sapiens
gtgaagtaaaatagtctttataaacaacatagttgtctatgtaaaaaatcctatcacttccaccaatgatgtaaactattaataaatgggttttattgcagtatagaaaatcaaaatacaaaatcaattgtgttcctctatagtagcaatgaacaaatggaaacaaaactatcattactaatattataaaraactatgaagtacttacatcattcaatcaatacaaaaaatgtgaaatttgtgcactgaaaactacagaacaatttctgagaaaaatgttaaaagacctaaataaatggagagatgtcaggttcatggatcacaaaatacaatattattaaaatgtgaattcttcccaaattgatctgtaaattcaatgtaatcccaatctaaatcgcagcaggcttttataggaaataataaactgactctaaaattatatgggaaaaa

SEQ ID NO: 159675 - DNA, 522 bp, Homo sapiens
cctatgttccaatcatttcattcccaggtatgaaatgattacattacatctttactcaagagtaatgaaatcatgttaatattttacaaaactgttcagatcagctttattagtaatagccagaactaaaaataagcccaatgtccatcaacaggtgaatggataaataaacagtggaacagccatgctacttaatgcctctcagcaataaaaagatgaactattggtacattcaacatatattatcctgaaataattatgctgagtaaaaaagsctagacaaaaagaagtacatgctgcatagttctatttacataaaatagtagaagcaaagtaatcaacagtcacagaaagcagatcagtggttacagaggtgcagggagaattgaagggattaggaaagtggattataaagaggcatcaggaaacctaggggtggcaggtatgctcactatctctatcatggtaacaattttataggtttatataaaacattaaattgtactctttaaatatgagttt

SEQ ID NO: 159676 - DNA, 521 bp, Homo sapiens
tctacctatttcctatttaaatatttagattgcttctaagttttcacagattttaggaatgatgcaatgaacatccttagacacacatccttcagtatgtaggtaagtcttcttatacctagaattataattattaggtcactgagtatacatacttaaaattttaagagatattgccaaagataacctgcaaagtggctgtacaaatttacattttcactaacagtgtaaaacaatatcagtttcctcatatatgcaccackattttatgctatacaagtttttaatttgtaccggtctttttagataaaataacatcccattttagttttattttgaatgtcgtgtgttactcctcatgtgtaaggctgcacatcctcacgcatatagtgcgtgttgctattttctcttccatagagcgcgcgcctccccttttagttctaatttagtaaacaatggaaaggagagcatggtaatctcaagtaggctaaattaggcttaatgtaacttcagtgagggcc

SEQ ID NO: 159677 - DNA, 514 bp, Homo sapiens
tgatgttatttctatcaggttgaactcttacaaatgtgttcagattgaaacagcagatagaagatggaaatgggaaacttaacactcaccccttgaaatagcactatttcttgaaaaatggcactgtatttatgtgtttcacactgttataaagaatacctgagactaggtaatttagaaacaaaagaggtttaattgattcacagttccacatggctgaagaggcttcaggaaacttacaatcatggcagaaggtgaagggaaagcaaggcacgtcttacatggcggcaggcgagaggtgagagagaaggaaaaactcccacttttaaaaccatcagatctcatgacaactcccttgctatcatgaaaccacccccatgatccagtcaccttccaccaagtccctcttttgacacgtgggtattayggttcacaatgagattttgatgggatacagagccaaatcgtatcagatacaaactaaccagcccacccaaatactatctttagtaat

SEQ ID NO: 159678 - DNA, 576 bp, Homo sapiens
atttctaactcttaaatgaaatgaagatcctataatattgtttgctttgctatacatggagaaaataaagtacaagacaacatccctctgccgttaatatgtcagagtttgttttttcattcaatgagcattaaatgaatattaaatgtgcaggcactgatgtaaaaatattcatgcactaagtttattgcacttagtctttacacagtttatgtggggtaagcaaaattacacctattgcagatgtgaaaacagaggcttaggttaatagcagctayaggagcctaccccaggtctttctaattttaaaattaatgtagagatagacattaaaccaaaaatgaaatataatacaaccaacagtatgatagatatgtgaataaaatacacaagaatacacagaaacacatatacgaagtgtgattaattatcaaatggttagaaaattattttcatatccatgtcctcagctggccaaaataattcataattatctttggaaggaaactttgccgtgtatattttaatattatttatacagtaaattttgagcactctatacattgtataaataga

SEQ ID NO: 159679 - DNA, 547 bp, Homo sapiens
gtccctgtcttagtccatttgggctgccataacaaaataccataaaccgcgttgcttataatcaacaaccatttatttcccacagttctggaggctgccaagtctaagatgaagactccagcagatgtgatgactgctgagggctctcttccttataaatggctgtcttcccactgtaacctcacatagcagaagaggtgaaacacccctcaaagcctccatttcctaatagcaaccctttaggggttaggacttcgacatatgaattttggaaggacacaagcattcagatcatagcagcttcctatgtgccaggtactgacattgagaaacacctaatggcttccaccaaaatactcctctttattttcacatttatttttttaactaatgctttaagaaaaatatcctatttagcaaaatattaactatcaatggtggtatattaaccatagcagggaagctttattagaggatagagaayagagaccttcaggctttctggaggagtctaccaactctgccataatctattttcaatacttat

SEQ ID NO: 159680 - DNA, 500 bp, Homo sapiens
caacatcttgcctgaattactacaggcagtttttataagaacatgcagaatcaaagagacggcaagtcatccttcatgacccctttgagcttctgactcaactagtgcaggaatccaagctacctgtaggctcttgttgtgagatgaagatttttcttatttttaaagccaatcasttttccattacagaaagcatctaactgatacccttatgccctgaccccttagaaattctgatattcattaactcatgttcatctagaccttttgttctaagtgatgaaaaactaaaataaatagaaaaaccaaacgctacccttttctcatgcacatatggataggagtctgtaaaatagcatcaattgtgtccttaagtgtttatagatcacaatcagtgacccacttctcctcatttcctatattttcctattaacacaggttttgtaaaggctatgccttaatgcatatatttaacagggaattcctgataaatattttgt

SEQ ID NO: 159681 - DNA, 407 bp, Homo sapiens
gctcttggtgacttagctgccttcaatgaacacaagagacaccattattctgagtcaagaggggaggattaaaatacaagtacaggtataaatagttctataggtagtatggaagttgaaagctgtctgataacttcaagaggcataatctgctaagagacacagaagagtggcgataggagactcgggataactcggcagtagtgaggccctcacagagcttggagatcataaatctggtgcaattaccaattcctaaagtaatttgattttctccagaggcataaggtgcccaagacaggtactctggacagrtagaaaggaccatttgtagaaccaatacaggtttggggtgtaccaaaggaggtatgtggagctgatgtgtgttaggtcagggtggggctttg

SEQ ID NO: 159682 - DNA, 538 bp, Homo sapiens
aagtgttcaatataatcaggcaacttcccatgctgttgctaagactcacgtattctctgctcaaggctgctataatatagagtttactcatgatgccggacacactattcccatgtctgattaactcaattgctcttttcagcaggtttgactttcaggttatataaatgggctccgcataaggaaaagaagtcactgcagagggtctttattttttcctttttggtaattagacaaagaaacaaagctttaatgttttatcaaaataattcctgtttgtttttattaggtttttaattataaaaaaatcaactaaactttaaaagggttaagaatttatacccacataacttmtttatcaaattattattatataatgtagttttaataaaatgttttgagcctttttaacatctttgaaaaacatcctcaattcaaatcctaaattaactctctgacttagacttattgctggaggcttgtcaaatagaaaaattaatcaccccaaggttacagaattcttctatggtttccaact

SEQ ID NO: 159683 - DNA, 545 bp, Homo sapiens
aaaacagagaccttaagacaatctactctctctgaagcttgctacctggtggcttcatctgcataatgaaaaccttgttctccacaatcccttatcttatcctagacactcccttctactgatgccagatctttagataaactctttcaaacaattgccaatcagaaaatctttgaatccacctaggacttgaaagccaccctgcaacaatctccccacttccagttgtcttgcctttccagactgaacaagtgtaccacttatatgtattgattgatgtctcagacccccccctaaaacacataaaagaaagcttttgctgtactaccttggktgcatgttctgaggacttcctgaggccatgtcacaggcatgtccttaaccttgggaaaataaacttctaaattgattaagacctgtcttagatacttttggtttacaaaacttgaacgcattttatttaggatcttgtttctactactatgacaaatcactcttggctaggttaacaataatttttatgttgacaaatccagtggatgaat

SEQ ID NO: 159684 - DNA, 580 bp, Homo sapiens
gtgtattagtctgttttcacacttctaataaagacatacatgagactgggtaatttataaaggaaagaagtttaatgtactcatagctccacatggctggggaggcctcacaatcatggtggaaggtgaggaagagcaaaggcgtgtcttacctggtgacaggtgaaagaacgtgtgcgggggaactctcgattataaaaccatcagatgtcatgaggtttattcactatcacaagaacagcacaagaaaaacctgcccccatgttcagttacccccgactgggtccctcacatgacwtgtgggaattatggtagctacaattcaagatgagatttgggtggggacacagccaaactattatcacccaggttttgaggtgtccattaatccagccaattgaagcctaacactaattccaccccttatcaacttgggatccattgcatctcaaaccatacttaatttccaaataaagacaataacaaggtataataatagttctgccaccatgatgcaactaatatgatgcagctatcctgcatacaactgaaaattcattaatccctttcccagaattaa

SEQ ID NO: 159685 - DNA, 465 bp, Homo sapiens
tagcataattcttaagggcccacaattttcartatggtaattaagcagtggcttaattttcagtatggtaattaggcagtggcttccacttaaagtgaccaggtccataagttcctaacaagagagtcagcctgtcctttgaagtgacttttcctctttatctatgaaagttctaggtagcaccttctttcattagaagactttttttcctacattgaaagtctgttgtttagtgtagccaccttcatcagtgatcttagctagatcttctggataacttgctatagcttctgtatccactcttgcttcttcaccttgcagttttatataatatggatggcttctttccttaaacctcatgaagcaacatctgctagcttgcaacttttcctcttggtcttcagagaattaaagaaacttagggccttgctctggattaggctttggtttaagggaatgttgtgg

SEQ ID NO: 159686 - DNA, 465 bp, Homo sapiens
tagcataattcttaagggcccacaattttcagtatggtaattaagcagtggcttaattttcagtatggtaattaggcagtggcttccacttaaagtgaccaggtccataagttcctaacaagagagtcagcctgtcctttgaagtgacttttcctctttatctatgaaagttctaggtagcaccttctttcattagaagactttttttcctacattgaaagtctgttgtttagtgtagccaccttcatcartgatcttagctagatcttctggataacttgctatagcttctgtatccactcttgcttcttcaccttgcagttttatataatatggatggcttctttccttaaacctcatgaagcaacatctgctagcttgcaacttttcctcttggtcttcagagaattaaagaaacttagggccttgctctggattaggctttggtttaagggaatgttgtgg

SEQ ID NO: 159687 - DNA, 616 bp, Homo sapiens
gtaacttggactctggtagtattagtaaatatggagacaaatgaatttgagatatgccaaaaatgatgatgggttgaatgaagaaggtaagggaaaaaaagtcattaaaagaaatactcaggttctggytatagcaactaggtaaatggtgaaacaaagcgacctgagcaatgggaaaggtctttcccaagaaatgaaggtaatcgacagaatcaatatatatttctgttgtgtgagcctttcaaatttcatgcatttttattttaagagcctctactgagcatcttataaatgctaaatcctactctagcctctgagaaatggaagctaagtaagattcagcggctttgcactaggattcagactggggaagagaatcatataaacattcaaattttcttccatgtgattcatgttacaataatctggtaggactcaacagagaaactagaggtcaggagagacttcaaagagatgacatctgatcaagtcttcatgaataaaaagaaagcattattttatttgaataaggtgaggatagctacttctgtattttattatattaaacaagaaattttgtatttcccctgcgttcccagtatggaatgtctaatat

SEQ ID NO: 159688 - DNA, 616 bp, Homo sapiens
gtaacttggactctggtagtattagtaaatatggagacaaatgaatttgagatatgccaaaaatgatgatgggttgaatgaagaaggtaagggaaaaaaagtcattaaaagaaatactcaggttctggctatagcaactaggtaaatggtgaaacaaagcgacctgagcaatgggaaaggtctttcccaagaaatgaaggtaatcgacagaatcaatatatatttctgttgtgtgagcctttcaaatttcatgcatttttattttaagagcctctactgagcatcttataaatgctaaatcctactctagcctctgagaaatggaagctaagtaagattcagcrgctttgcactaggattcagactggggaagagaatcatataaacattcaaattttcttccatgtgattcatgttacaataatctggtaggactcaacagagaaactagaggtcaggagagacttcaaagagatgacatctgatcaagtcttcatgaataaaaagaaagcattattttatttgaataaggtgaggatagctacttctgtattttattatattaaacaagaaattttgtatttcccctgcgttcccagtatggaatgtctaatat

SEQ ID NO: 159689 - DNA, 513 bp, Homo sapiens
cacaaaagtgccaacctggattgttatatctctaggcacccatcaagttttaccaactcttgcttcgtcttggtgagatcctgtcttatgtgcccatccttcagaagatgcatcttgttcccaactagaatgctgtacacattggggcagaaacgcttactctctaaggttctttgtcctgggaggttttctaaactccaaagctattgatgaaggaacacctcaatataacattggtgtctgggtaggaaagagtcctcaggtgatcttgaccttcctgcccaactgtgtcccatatagccaaccccatatactttcctttcacttcaatgtcatctatgttgttctcttgtgtttgtccctgtgaagaccatgagcaagcaggtcttgacataggctctgtcacaataatcaccagcctctttagcatggcagggacattgtagagagcaccttctgtgtgcccaatattacrctacgtgatgcagcaggcatcattcaccgagttctgtg

SEQ ID NO: 159690 - DNA, 520 bp, Homo sapiens
aaatagcacatgaggaatttgtacttaggaaaatctggccctaaaaactatatttgcaaccatgacttctaattcrcggagtttcataagaataaaatcatcatatgattgcctaaaatgatttatgaactataaattctttaattattgaaaataagttaagttctcaaaaagtagaaagaaacttaaaatattatggagatgggcatttttaattaaaatgctagggtttaaagattatttgctaagattctatacttattgtatgaaaatagaaatatatttagagggaaatttgtagcactacatgcccacagaggaaagcaggaaagatctaaagtcgacaccctaacatcacaattaaaaagaactacagaagcaagggtaaacaaactcaaaagctagcagaagacaagaaatgactaagatcagagcagaactgaaggagatagagacaagaaaaacccttcaaaaaaatcagtgaagccaggaactgttttttttgaaaaagatcaacata

SEQ ID NO: 159691 - DNA, 520 bp, Homo sapiens
aaatagcacatgaggaatttgtacttaggaaaatctggccctaaaaactatatttgcaaccatgacttctaattcgcggagtttcataagaataaaatcatcatatgattgcctaaaatgatttatgaactataaattctttaattattgaaaataarttaagttctcaaaaagtagaaagaaacttaaaatattatggagatgggcatttttaattaaaatgctagggtttaaagattatttgctaagattctatacttattgtatgaaaatagaaatatatttagagggaaatttgtagcactacatgcccacagaggaaagcaggaaagatctaaagtcgacaccctaacatcacaattaaaaagaactacagaagcaagggtaaacaaactcaaaagctagcagaagacaagaaatgactaagatcagagcagaactgaaggagatagagacaagaaaaacccttcaaaaaaatcagtgaagccaggaactgttttttttgaaaaagatcaacata

SEQ ID NO: 159692 - DNA, 520 bp, Homo sapiens
aaatagcacatgaggaatttgtacttaggaaaatctggccctaaaaactatatttgcaaccatgacttctaattcgcggagtttcataagaataaaatcatcatatgattgcctaaaatgatttatgaactataaattctttaattattgaaaataagtyaagttctcaaaaagtagaaagaaacttaaaatattatggagatgggcatttttaattaaaatgctagggtttaaagattatttgctaagattctatacttattgtatgaaaatagaaatatatttagagggaaatttgtagcactacatgcccacagaggaaagcaggaaagatctaaagtcgacaccctaacatcacaattaaaaagaactacagaagcaagggtaaacaaactcaaaagctagcagaagacaagaaatgactaagatcagagcagaactgaaggagatagagacaagaaaaacccttcaaaaaaatcagtgaagccaggaactgttttttttgaaaaagatcaacata

SEQ ID NO: 159693 - DNA, 389 bp, Homo sapiens
ggaattcaagaccagcctggttaacatggtgaaaccacatctctactaaaaatacacacatacacacacacacacaagccagtcataggggcacaggcctgtaagcccacctacakgggaggctgaggcaggagaatcacttgaaggagtaaaggagactttcagttcagagttggctacatttaattggccaaaactcagtgattggcagaagtgtaggctatggtctgtttacagctccacttgttatagttcataatgtacagaaaaatctttgggctgaatttaagataggtaaggaggcagctttaggctaaacttggtttaacagtctatgtcacctgcactgttccccacacattggaggggcctaatactgatagctttac

SEQ ID NO: 159694 - DNA, 512 bp, Homo sapiens
tgagtgactttgttcccatcttgcagatgagaaaacagatactcagggagattatgtaatacattatattctagataacacagctaagaaatggcccacatgttcattgaggctaaacmttctcactccaaaagctatgaagtctgaattagaatgcctcaacctgaaaaggtcaaattgatcattgtttagtacaatgactctacatatgaactcttggatttcaatttttaaaggagtcttaaaattgaaatgttcttgtcttatttgctagcatttcattgtatttagatttcaaaatgtttgccatgagaagtattatggtaatgatttgcccactctactaatgaaatgcccaaggtacttaatgaggaaattaagatatgcactaaaatcgagggacaacaatctaggaacagcaagcacttggtaaatatagtcttagtgtcactaggctgtttataagaagaataatttccctgatcataaaataaggaaatttcagatttgga

SEQ ID NO: 159695 - DNA, 421 bp, Homo sapiens
gaccgtggccaaacagaataaaatctgggcattaattctgggagcatttagctgcaccatttaatgagcagaatcctaagaaacttaacattctcattttagcagacaggctcttaagaacatasttgttccaattcttggccagctacataaaattctatatgctaccaacaccgatatttccagaattgcttagtgaaggggtgtgcgtgcgtgtgtgtgtgtgtgtgtgtgtgtgtgtgtgtatcctctgtgtggacaggatcatttccttcatgatatataaagaacccgagactatagcaaattttaagtcatttacctaattcatttcactaataggatacatttatttctctttgcaaactggaagctctagttgaatgtatacctttttcatgtgagaaacagccaaagaatt

SEQ ID NO: 159696 - DNA, 458 bp, Homo sapiens
ggacagacctggtgggaggtaattgaatcatgggggcaggtctttcccatgctcttcttgtaatagtgaataagtctcacaagatctaatggttcyataagggaaagtttccttgcacaagctctttctttgcctgctgccatccatgtaagacgtgacttgctcctccttgccttccaccatgattgtgagccttccccagccacctgaaactgtaagtccaataaaacctttcttttgtaaattgcccggtcttgggtatatctttatcagcagcatgaaaacggactaataaaatatgtgtaaatttgatcctgtcatcatgatgttggctggttattttgcagacttatttatgtggttgctttattgtgtcactgatctgtgtgcttcagtgtgtttttgtagtggctgggaatggtcttcccttgttatatttagtgcttcactcaggattt

SEQ ID NO: 159697 - DNA, 591 bp, Homo sapiens
gggtgtacaattgaaggaagaggtcagacagtaacacatagagcatgaattaaaagtaccctttcagagaaatgcagcattgagaccccagactgctttcctccgacgtccaggcggggattatctttamttgtgctatcagccacttaagtctgtattttaattatccatgaaaatgctcaatcattattgcagcttggaagtgatatggaatataaagaattcattgtatgtcctgtgactgggcctgttgatatggaacttgggccacaatttaaagccattatcaaataaaatctactcggaaaacctgaacaagacacatatggtcttcagtgatctggatagtgtggcctgagtcagtgggatgcacaaggatgcctgagtaaattcagagaaagtatcagctacagtcaggatctagtggaatcttcttgattggatgaggggcccaatgtgatctattcattggaaactccttggtcattggctggagagattttttcccaggcagcatttttagctttggccatggtctggctggaggaaaaccttttccatgctatgttggcatgttcagaccacagaggc

SEQ ID NO: 159698 - DNA, 546 bp, Homo sapiens
ggctgggcccaacatctctgttctttgtgcagcatagaaaacttggttccctgtgtcccagatgctccagccaaggctgaaaggggccaacgtagagctcaggctgtggcttcagagggtgcacaccccaagccttggcagcttccacatggtgttgagcctgtgagtgcacagaagtcaagcactggggtttggtaacctctgcctagatttcagamgatcaatggaagcacctggatgcccaggcagaagtttgctgcaggggcggggctctcatggagaacctatgctagggcagttcagaaggaaaatatggggtcagagcccccacacagagtccctactggggtaccacctaatggagctgtgagaagagagccaccatcctccagaccccaaaatggtagatctactgacagcttgtgctctgtgcctgcaaaagccacagacactcaatgccacacgtgaaggcagccaggagggaggctgcaccctgcaaagccacagaggtggagctgcccaaggccatgggagcccacctatggc

SEQ ID NO: 159699 - DNA, 546 bp, Homo sapiens
ggctgggcccaacatctctgttctttgtgcagcatagaaaacttggttccctgtgtcccagatgctccagccaaggctgaaaggggccaacgtagagctcaggctgtggcttcagagggtgcacaccccaagccttggcagcttccacatggtgttgagcctgtgagtgcacagaagtcaagcactggggtttggtaacctctgcctagatttcagacgatcaatggaagcacctggatgcccaggcagaagtttgctgcaggggcggggctctcatggagaacctatgctagggcagttcagaaggaaaatatggggtcagagcccccacacagagtccctactggggkaccacctaatggagctgtgagaagagagccaccatcctccagaccccaaaatggtagatctactgacagcttgtgctctgtgcctgcaaaagccacagacactcaatgccacacgtgaaggcagccaggagggaggctgcaccctgcaaagccacagaggtggagctgcccaaggccatgggagcccacctatggc

SEQ ID NO: 159700 - DNA, 525 bp, Homo sapiens
caggtgaggctgcagttacgtagactttactggggcygcactagccacttccatggtggctcactcacatacctggcaagataatgctggttgttttgaagaagtcatagttctttgccatatgggcctctccttcaggctgcttgagtgtcttgcagacatggcagctggcttcctccagagcaattgatttaagaaacaagcaaagcagatgtcacaatgtctaagtcttatttttgaatctgagcgctaatcaagctgctttttaaatttaagaattaggatctgcttactggtaggggcaaagaacaaatctgtgccatagtgagcaaataggagagaaaactttcttcaaatcattaagtctgtgtctaaatattaaacactcacttctcctcttatgctactatataaacttacctccacattatctacttaaaggaaaatcagtggcatatgtaatccaaaatcaattaaaaatacattatatattgtatgggagggcggggagtaattgctatttta

SEQ ID NO: 159701 - DNA, 525 bp, Homo sapiens
caggtgaggctgcagttacgtagactttactggggccgcactagccacttccatggtggctcactcacatacctggcaagataatgctggttgttttgaagaagtcatagttctttgccatatgggcctctccttcaggctgcttgagtgtcttgcagacatggcagctggcttcctccagagcaattgatttaagaaacaagcaaagcagatgtcacaatgtctaagtcttatttttgaatctgagygctaatcaagctgctttttaaatttaagaattaggatctgcttactggtaggggcaaagaacaaatctgtgccatagtgagcaaataggagagaaaactttcttcaaatcattaagtctgtgtctaaatattaaacactcacttctcctcttatgctactatataaacttacctccacattatctacttaaaggaaaatcagtggcatatgtaatccaaaatcaattaaaaatacattatatattgtatgggagggcggggagtaattgctatttta

SEQ ID NO: 159702 - DNA, 525 bp, Homo sapiens
caggtgaggctgcagttacgtagactttactggggccgcactagccacttccatggtggctcactcacatacctggcaagataatgctggttgttttgaagaagtcatagttctttgccatatgggcctctccttcaggctgcttgagtgtcttgcagacatggcagctggcttcctccagagcaattgatttaagaaacaagcaaagcagatgtcacaatgtctaagtcttatttttgaatctgagcgctaatcaagctgctttttaaatttaagaattaggatctgcttactggtaggggcaaagaacaaatctgtgccatagtgagcaaataggagagaaaactttcttcaaatcattaagtctgtgtctaaatattaaacactcacttctcctcttatgctactatataaacttacctccacattatctactyaaaggaaaatcagtggcatatgtaatccaaaatcaattaaaaatacattatatattgtatgggagggcggggagtaattgctatttta

SEQ ID NO: 159703 - DNA, 620 bp, Homo sapiens
tttaacgtgaaatttggaggagacaataccaaattatagcacagtatcaagcagttccttgcgggtgggccactcgaatctcccatccataacctccattacccttcaaaagcatcttaaactaaatatagaccaagtaaaaatattatgctttacagatgatatagctatttgaagtcaattctccatgggttttccatgtttatacacttcttgtgagtaagggcactgccaatctttgctccaaactatctttccaaggctgtttgtgtagtgaacagttataaagatygacacagtgtcttcctgcaaaacaaagagtaagattttttactgcccaatataataaatataatgtccccctttgagacaaagagctggttttcttgaaatctattataaaatatctgagttccctaaacttgagtttctttaactgtaatgaaaccaaccacatgtgcagcatcttccctgtccctttcccatcaccttcatggcattgagagacaaggagaaatgatacaaacatgtatttcatgtggcttactgcaccgtgagcaataaagccccgtcttacaccaagtgttttgttgcttctttcagtgtccatgaaagagtag

SEQ ID NO: 159704 - DNA, 485 bp, Homo sapiens
ctaagcagctaagaattcaactgctgagtcatttttttttcccaaccattcaaacagtttaacatgccttcctctccttaaatcagaacacagacttctaattccaggatgatgaaagcctgtcacttgacggtgaggggtgcgtttgatgaatatcacaaggtaatagtgcatatctcttactgakgagatcaaatgaaattgtagatttaagatgtaagtgtggcatagaaaaaagaagattaaatcacattcagaagaaaacaacatttgggagaagacatctagagacaaaaattgtcaaaagtttattgtaaggctatgaaaaatgagcttaagaaaagcaaaacagattattacaatatattgaaggttattgtaatgtaactgtaaacaggttattacaatataccatgaagcttactcatttgtaatgggttgaattatgtccccccaaaatccatatgttgaatccctaagcccag

SEQ ID NO: 159705 - DNA, 485 bp, Homo sapiens
ctaagcagctaagaattcaactgctgagtcatttttttttcccaaccattcaaacagtttaacatgccttcctctccttaaatcagaacacagacttctaattccaggatgatgaaagcctgtcacttgacggtgaggggtgcgtttgatgaatatcacaaggtaatagtgcatatctcttactgatgagatcaaatgaaattgtagatttaagakgtaagtgtggcatagaaaaaagaagattaaatcacattcagaagaaaacaacatttgggagaagacatctagagacaaaaattgtcaaaagtttattgtaaggctatgaaaaatgagcttaagaaaagcaaaacagattattacaatatattgaaggttattgtaatgtaactgtaaacaggttattacaatataccatgaagcttactcatttgtaatgggttgaattatgtccccccaaaatccatatgttgaatccctaagcccag

SEQ ID NO: 159706 - DNA, 485 bp, Homo sapiens
ctaagcagctaagaattcaactgctgagtcatttttttttcccaaccattcaaacagtttaacatgccttcctctccttaaatcagaacacagacttctaattccaggatgatgaaagcctgtcacttgacggtgaggggtgcgtttgatgaatatcacaaggtaatagtgcatatctcttactgatgagatcaaatgaaattgtagatttaagatgtaagtgtggcatagaaaaaagaagattaaatcacattcagaagaaaacaacatttgggagaagacrtctagagacaaaaattgtcaaaagtttattgtaaggctatgaaaaatgagcttaagaaaagcaaaacagattattacaatatattgaaggttattgtaatgtaactgtaaacaggttattacaatataccatgaagcttactcatttgtaatgggttgaattatgtccccccaaaatccatatgttgaatccctaagcccag

SEQ ID NO: 159707 - DNA, 571 bp, Homo sapiens
aacaggttattacaatataccatgaagcttactcatttgtaatgggttgaattatgtccccccaaaatccatatgttgaatccctaagcccagtatttcaraatgtgactatgtgtttagagataggacctttaaaatggcaattaacttaaaatgaggctcttggttgggccctaatccagtctgactggagttcttataagaagaggagctctgtacatacagacagtctacaggcgaatgcgtgcacagagagatgattttgtgaagaaggagcagagagcagtgatctgcaagacaaggagagagaccagaggaaactcacactgacaacaccttgaccttggacttcaagtctctaaaattgtgagaaaataagtttctgttatgtaagccacctagtgcatggtattttcttatggcagccttagtaaaatgagacaccaccgattttgtggattaatccagaaaggtcaaggaatgtgcctaagaccacataatggtacacttgtccttggtccactgctgcccttctggggtcttttcctgacccactcacctgcagcacagg

SEQ ID NO: 159708 - DNA, 543 bp, Homo sapiens
gtttagagataggacctttaaaatggcaattaacttaaaatgaggctcttggttgggccctaatccagtctgactggagttcttataagaaraggagctctgtacatacagacagtctacaggcgaatgcgtgcacagagagatgattttgtgaagaaggagcagagagcagtgatctgcaagacaaggagagagaccagaggaaactcacactgacaacaccttgaccttggacttcaagtctctaaaattgtgagaaaataagtttctgttatgtaagccacctagtgcatggtattttcttatggcagccttagtaaaatgagacaccaccgattttgtggattaatccagaaaggtcaaggaatgtgcctaagaccacataatggtacacttgtccttggtccactgctgcccttctggggtcttttcctgacccactcacctgcagcacagggtgtcagtgccttacccattggctcctgtgatttgcctctacacaggatcactgtcacctatgactgtctgaggctcatgtttctg

SEQ ID NO: 159709 - DNA, 543 bp, Homo sapiens
gtttagagataggacctttaaaatggcaattaacttaaaatgaggctcttggttgggccctaatccagtctgactggagttcttataagaagaggagctctgtacatacagacagtctacaggcgaatgygtgcacagagagatgattttgtgaagaaggagcagagagcagtgatctgcaagacaaggagagagaccagaggaaactcacactgacaacaccttgaccttggacttcaagtctctaaaattgtgagaaaataagtttctgttatgtaagccacctagtgcatggtattttcttatggcagccttagtaaaatgagacaccaccgattttgtggattaatccagaaaggtcaaggaatgtgcctaagaccacataatggtacacttgtccttggtccactgctgcccttctggggtcttttcctgacccactcacctgcagcacagggtgtcagtgccttacccattggctcctgtgatttgcctctacacaggatcactgtcacctatgactgtctgaggctcatgtttctg

SEQ ID NO: 159710 - DNA, 404 bp, Homo sapiens
tcagttacatcagaatattttacttttacagacattgtttatcaattctttccagcatgaaaagtatgtattaaagtgatcacctgagttatgccccaaggcaatattaagcattccctttcctaccaagtgattttctgtcaactagtgtatttrgtactcttgggaaaggcagagattcatttataaagaattatgctacacagtcataaatttaatcccccaaatcaatagcatttagattttttaagatgataaccaaggtgctatcaacaataataaagtctctgttctttacagtcagattatttttgcaaacgtaagtatttgactattggaaaaccacagtgttataatgcctatctagtgggagacttccccactggatatgttacagcaggaga

SEQ ID NO: 159711 - DNA, 593 bp, Homo sapiens
tcacttcaccatgtatatgtcaaaacatgaagacttctatgatcacatgttgggagatggtttcttcctatcatcaagtgagcaatcaattctgcagcagacaccagctgggtacccaccaattcaattctgacattatctacctaaagatagcatcagatcacacagattaagtgccaatccaatactgcctccaacttcagacaatggtcacaattctgagcctctgaaacttctgaccctctagcttcatgctggggttcccatgactccatcttttggttcaattaatttgctagggaggtcacaaaactaagggaaacacttatgtttaccgttcagtctaaaggacattacaaaagacagwgaaaaagagatgcataaggcaaagtatggggaaaggaacagggagcttccatcccccccagggtgtgccactctccaggaaacttatgtgttcaacaccccaatctcagtaatgcatagatcatccagagataaaatcaacgaagagacattggagttaaactacacactagatctaactgacatttacaaaacatttcacccatctgctatagaatatccattct

SEQ ID NO: 159712 - DNA, 607 bp, Homo sapiens
aaccactacccaatgatgatcattgacaacatttttgtttgtaatgttttagcccttattgttggtaatcatgatgatgggatggagcgatacttaaaaagtctttgtgaatattccatttcttgaatttgcctcactcaagatcttacttaaaatatggcattattggctgggtgcggtggctcatgcctgtaatcccagcactttgggaggctgaggcgggcrgattacctgaggtcaggagttggagaccagccaggccaacatgatgaaacccttactctattaaaaatacaaaaactagccggatgtggtggcatgagcctgtaatcccagctacttgggaggctgagctaggagaatcggcttgaatccgggaggcagagcttgcagtgagctgagatcgcaccactgcactccagcctgggcgagaccctgtctaaaaaaaaaaaaagaaaaagaaaaaaaaaaagatatggcattatcaatatatgctttgtggctgagagggtgtccttagattctgagattcaataatctatgcttctacttatatggtgttcatctaagttgctacgacagcctaagaaagctgcaggaaatggca

SEQ ID NO: 159713 - DNA, 607 bp, Homo sapiens
aaccactacccaatgatgatcattgacaacatttttgtttgtaatgttttagcccttattgttggtaatcatgatgatgggatggagcgatacttaaaaagtctttgtgaatattccatttcttgaatttgcctcactcaagatcttacttaaaatatggcattattggctgggtgcggtggctcatgcctgtaatcccagcactttgggaggctgaggcgggcggattacctgaggtcaggagttggagaccagccaggccaacatgatgaaacccttactctattaaaaatacaaaaactagcyggatgtggtggcatgagcctgtaatcccagctacttgggaggctgagctaggagaatcggcttgaatccgggaggcagagcttgcagtgagctgagatcgcaccactgcactccagcctgggcgagaccctgtctaaaaaaaaaaaaagaaaaagaaaaaaaaaaagatatggcattatcaatatatgctttgtggctgagagggtgtccttagattctgagattcaataatctatgcttctacttatatggtgttcatctaagttgctacgacagcctaagaaagctgcaggaaatggca

SEQ ID NO: 159714 - DNA, 607 bp, Homo sapiens
aaccactacccaatgatgatcattgacaacatttttgtttgtaatgttttagcccttattgttggtaatcatgatgatgggatggagcgatacttaaaaagtctttgtgaatattccatttcttgaatttgcctcactcaagatcttacttaaaatatggcattattggctgggtgcggtggctcatgcctgtaatcccagcactttgggaggctgaggcgggcggattacctgaggtcaggagttggagaccagccaggccaacatgatgaaacccttactctattaaaaatacaaaaactagccggrtgtggtggcatgagcctgtaatcccagctacttgggaggctgagctaggagaatcggcttgaatccgggaggcagagcttgcagtgagctgagatcgcaccactgcactccagcctgggcgagaccctgtctaaaaaaaaaaaaagaaaaagaaaaaaaaaaagatatggcattatcaatatatgctttgtggctgagagggtgtccttagattctgagattcaataatctatgcttctacttatatggtgttcatctaagttgctacgacagcctaagaaagctgcaggaaatggca

SEQ ID NO: 159715 - DNA, 542 bp, Homo sapiens
ataatctcttccattgactcctgttgtttttccacccagttccctgccttctgctgaatcttctttgggtgaaactacttctcactcatttgtcagccatatggtagtggttgggccaccacgttattatattatcccatctccccggctacattgatgacaaaggggtgatctctgggaagccaataagattcctcttctgcattctcctagctggaactgagaaagaacattattgcagctctaacatagagccatcagccaacaaattcgtcaacttgtggagcttactagtttgttatgcgagagactagaacccaagaaaacaagagaaagtatcaaagatgatraccctaattccagttgtttctatggtccaactctggctctcttttcaaagtttatttattcaactttgctttcattaacactcccattacctgtaggattaattccaagctccttactatgatatatacaaagtctttcacaacattaatctaacctactacagtctaacttcatctttacaaactacatgt

SEQ ID NO: 159716 - DNA, 603 bp, Homo sapiens
atgctgtatgtctctatatgcttcctgactttctgcttgcctgatctatcaatcattgataatggggtgctgaaatctccaactatactagtgggtttgtctatttcttcttttagtctacagtttttrcccccacgtattttgatgatgcattgttaggtgcaaacagctaggattattatgtcttcttgtaaaattgaccgcttattattataatgcctctctctttccctgataatctttctttttctgaaataggctttgtctgaaatttatatagctactccaactttcttttgattagtattagaatgatatagctttctccatctctttttttttaaccatctgaatcgttatatcttaagtagctttcttttaaataatatatacttggtcttttcttatatccatgtttaaaatctgcctttagaccatctatactgcaagcgattgttgatatatttgaattaatatttaccatgtttgcaactattttctactggttgcattttgttcttttttttccctctcttatccaatttagtttggtttgattgaacatttagttgaatgtttaattagtatgtgtgtatgaattat

SEQ ID NO: 159717 - DNA, 510 bp, Homo sapiens
atcttctctcttattgggaataggtgcagaatgatgaaaaggtttcttaaagcaacatgatgtctatgtgtgtatggctacaacttctttttaggtgtttgttttcrtaaaatatatcaatcatatttgtcacattttgggtactacatctattagggaaaattcaaaatggaactttttcatgaaggtaaagaaatagaattgtatgttgatttttccatagattggaatttattgtttattctctccttattgaggagtttatgaaggttgggagacagtctaagcctaggaaatctttaaaagtgactattgcatttacttgcattaagtcctatacagttgtatttgtcaattaaaaatatataataaaaagttctgtatttacacatagccaatatatgagttgtttcctgtgacatgtttctcagtgtgtttgatacaaacaccaatttagagggaattgctttaaaacttttctagacctgcacctttagacaaccaaattag

SEQ ID NO: 159718 - DNA, 466 bp, Homo sapiens
cctccctttcttgaccattttaaaactttagaayaggtgggacgctgggaagtcaaaggatcaacaaggtccttaatggcttttggtattttaatattaacaaagaaaagagattcctgttaatgacaaaatttatgaagattggcatatcataagcttctgctcatataattttaaggaggaagcagacaaaaaatatgaattcatcttgagggcatcttgtgacagccagattcaaaggtttctttggcagaacctccaacagcctgtgcactgagaggaatgtgcactggggtagagctgtgggaagttcctgccctttgcagtggggaggagcctggcctctctctcctcttccagggtgtggtacctggaattcagtctgcaaggcaggaagtgcactagcaggactctggctttgtggagagtccctgtttccccttttttcctttttgcccaataaatc

SEQ ID NO: 159719 - DNA, 466 bp, Homo sapiens
cctccctttcttgaccattttaaaactttagaacaggtgggacgctgggaagtcaaaggatcaacaaggtccttaatggcttttggtattttaatattaacaaagaaaagagattcctgttaatgacaaaatttatgaagattggcatatcataagcttctgctcatataattttaaggaggaagcagacaaaaaatatgaattcatcttgagggcaycttgtgacagccagattcaaaggtttctttggcagaacctccaacagcctgtgcactgagaggaatgtgcactggggtagagctgtgggaagttcctgccctttgcagtggggaggagcctggcctctctctcctcttccagggtgtggtacctggaattcagtctgcaaggcaggaagtgcactagcaggactctggctttgtggagagtccctgtttccccttttttcctttttgcccaataaatc

SEQ ID NO: 159720 - DNA, 368 bp, Homo sapiens
aattgattttcaagcatgccagtttagttcagtaacatatagtgctggagcagttggcttgtcatatgcaaaagtgtgaaccacaaacttgacttgacactgtactcaaaagtcagttcaaagtatatgtactttgaacacaaaaatataaatgaaaacatgttcaccaaagccttctattttaaagttcccagtattttgttcaagatagtcgaaaactggaaaccacccaaatgcctatcaacaggtgaattcrtaaacaaactgtggtagatacctacaatgaaatattactcagcaattttaaaaaaccagttgaatacatccaacaacgtgggtgagtctcgaaagtattatgtcaagtgaaa

SEQ ID NO: 159721 - DNA, 399 bp, Homo sapiens
gaattcattaaagagggattgtagccatgtggtgctgaagccgcattttccatgagcctgtcaataattttgatttgatctttaagtacctgtagattttcctctactttactagaggtgttaatctaaaagcagcatgtttcatttaaaagtgcatcactaaacccaacaaaaagtcctcgcagactcagtggtagtaaaactttcatccttcctttttgttaactattattcctgctataaggctaataattaagcaaaatacttctgcaatggaaactctctgtccaatatttcagttagaaggtgctaccatgtataaccctatagcaaacagtagagcgagcatagcaattcccrcaagtgtggtgtagtagataatttccatctaaaatttta

SEQ ID NO: 159722 - DNA, 609 bp, Homo sapiens
attatgtatttgtcttgttctttatttttcacaaggcagtaaattttactttttttagagttgctgtccttttatctgtgggactgattctttagtatttcagttaaaaaaattaaatttaaaatttaaaaagcccactgatgctacaaagtaacattgtaagttagtttggaagctctcccactagatttttaccttgctgaaggggccacatggaggtaaataacgcattctagagaaattagcaaaaatcacagtgctggcagttatatagctagggatcagcaagttggggaaaaagaagcttctttgtgaatttacctgagaatagtgtctactaatgaactattccaaacacactggtggcctgagagaatcttctccatgtctcagaagtgtagtgcttgatagctcacacgcttcactcwtaacaactgtaagatgatcccagcctgcagtcctctcttaacaagtatgcaaggaattccccagagacaccccaggagatacatttctgcattattgttcacaatctcagaaaagcaaacagaacataaagaaaactacagtatcttataaatcccaattccataaaaataggaatatgaa

SEQ ID NO: 159723 - DNA, 584 bp, Homo sapiens
taaatctacttagtgttctataaccttcttgtgcttggttattgatatatttctctaggtttggaaagttctctgttattatccctttgaataaactttctgcccctctttctctacctcctctttaaggccagtaactcttagatttgcccttttgaggctattttctagatcctgtaggtgtgcttcactgtttttaattctctttaattttgtctgttctaactgtgcatgttcaaataggctgtcttctagctcactaattctttcttctgcttgatctgttctgctattaaatgactctgatgcattcttcactatgtccattgcattttcagctccataatttctgctttattttttaaaaaaattatttcaatctctttgttaaatttatctgatagaattctgaattccttctctttgttgtcttgaatttctttgagtttcctcaacacaactattttaaatcctctgtctgaaaygtcatatagctctgtttttccaggcttggtctctgatttcttatttagtttttttagtgaggtcatgttttcctgcatggtgttgatactagcagatat

SEQ ID NO: 159724 - DNA, 594 bp, Homo sapiens
gaagctttacaacaatgactaaagaaatacgttgaaaaaactacataaatggtaataagaaatttgttataccatcattcagatccctctgatctagctgcaaaataattttgaactttatgttaaatrtattccttacatataattcattttctagagaaatttaaataggtgattctgaatatcacgtgtaatttcttacatcagcaaattcaaccctttgtgtaaaattcttacatatttatattcttacgtccatcagtggagactatgccattcatttctcagtgctgaaagtaaaaagtgagttggctgggcagtggcagtgggggcatagtgtttaagtctctatttccataagcagatattgaggaatttgggtaaaaatgagatagccatgaacagttacaaaaattgagtgaaaagtatccatcaaaagaaggaaacctgtatggtaataactatttgggaggacctaaaagaaaatccaagtgatttacagttctgacagtaagagaactctgaaatattagctgctaccaaactgagaggtcatggatctaatttcaacagaataatctggcaacacagcca

SEQ ID NO: 159725 - DNA, 594 bp, Homo sapiens
gaagctttacaacaatgactaaagaaatacgttgaaaaaactacataaatggtaataagaaatttgttataccatcattcagatccctctgatctagctgcaaaataattttgaactttatgttaaatgtattccttacatataattcattttctagagaaatttaaataggtgattctgaatatcacgtgtaatttcttacatcagcaaattcaaccctttgtgtaaaattcttacatatttatattcttacgtccatcagtggagactatgccattcatttctcagtgctgaaagtaaaaagtgagttggctgggcagtggcagtgggggcatagtgtttaagtctctatttccataagcagatattgaggaatttgggtaaaaatgagatagccatgaacagttacaaaaattgagtgaaaagtatccatcaaaagaaggaaacctgtatggtaataactatttgggaggacctaaaagaaaatccaagtgatttacagttctgacagtaagagaactctgaaayattagctgctaccaaactgagaggtcatggatctaatttcaacagaataatctggcaacacagcca

SEQ ID NO: 159726 - DNA, 456 bp, Homo sapiens
ctgctaccaaactgagaggtcatggatctaatttcaacagaataatctggcaacacagccaaatccaggtcagggtttaccaagctcccatttatggaaaaaaacaagaagactayggaaaggttgaaaaatgttagaatgttctgtaaccaaaggactttcgaattagtcaaatgaggtacctttttagaataaaaattagcactgagaagaaattgttcagagtagaagttccatctataatatggactcattggtcagaggaagagatgtgtcataagataaagaagaatactgtgctggataagaataaagcccagaaagcacaaaaaaattttaagataataattaaaaacaagataatgtaatttagaagtgtaatcaaagtataaataaaatcacatctactacaattaaaaaaacttagaagttagtttgttttaaaaagggggaaac

SEQ ID NO: 159727 - DNA, 456 bp, Homo sapiens
ctgctaccaaactgagaggtcatggatctaatttcaacagaataatctggcaacacagccaaatccaggtcagggtttaccaagctcccatttatggaaaaaaacaagaagactacggaaaggttgaaaaatgttasaatgttctgtaaccaaaggactttcgaattagtcaaatgaggtacctttttagaataaaaattagcactgagaagaaattgttcagagtagaagttccatctataatatggactcattggtcagaggaagagatgtgtcataagataaagaagaatactgtgctggataagaataaagcccagaaagcacaaaaaaattttaagataataattaaaaacaagataatgtaatttagaagtgtaatcaaagtataaataaaatcacatctactacaattaaaaaaacttagaagttagtttgttttaaaaagggggaaac

SEQ ID NO: 159728 - DNA, 547 bp, Homo sapiens
taacctctctgagccccattccttcatctgtaaagaggaataataaaattgccttcttgggttggtttaatgatcagagacaaagcccctacctctgagcaaatggtgcagcaaatggtgactcttaggtaattatttctcatttgactctagttgccttgtttgcaagagctttaccttccacctcctccaggaagccctccctggatttccaggcttcattcctccttcctgttatcaccaaatgacttcattaataagcacttttccctgcttagaatcgttatttgaatgatttttatcttctgtgctcgaaaaggcttataaggatgaatgacataattttatctcaaaaartccatctgcggtggctaaatgtcactatggatcactgttaacccagaatgatggctgggcaggggagagggacccaggagcaggcaggtcaccccaccgagcagagaagatgccggcaactgcagcctgtatgtagacaccaggtctgatagacaccccacctgggccttgattcttctttcttaaaagt

SEQ ID NO: 159729 - DNA, 418 bp, Homo sapiens
cttcaccaacagtcttcctacctctactctacacatggggagagactggccagggccctccagcaaggctgcaggcacatgatgaataagccaccagttcctggctgctcctccggccctctgcagaaacctctagagcatcagatktccttaatgtttgtgataagccagtcctttcgcaaccgctttctcttaaagggacagaaaaaataagctcaccgccgtgtctgaaaagcaggtactccacagataggctcaaagtctcaccaggaattcaaaactgtttcccagggtccccaccctagccttaggaagctggcaagttgtggggccctgttttaaggaaggttttgttgattaacacagaagttcccaagtctgtattcacagctaccattcacagggctcaagcccctcc

SEQ ID NO: 159730 - DNA, 584 bp, Homo sapiens
agatcttaattggcttttatttgcaattctagaatcaggcacctcatttttaaaatagaatgagtgttctgatgagctgagcagaggacgttggttttattgatataaaagggctgaggagagcagaaacagaaaacaaaaagcagactggttgtttcaaagttacttttcttataaaggttaaagcagaggcaacttccttatcatgccagctaaaactggtctgtttgagggtttggctattatctctctgtggctcttggtttcttggaaggtcagataaacaactaatttcgggttggtggtgtgaaactttarcatgagtgactccattttggtttggtctctttggcctggtgcagaagctaagtccaaaccaatgacctcctataacttttatttaagagaataaaaattcccattataagatatgacatgtattcatctatattttatttttgttttgtcacttcacctttttagggagaaaaaaacacagttgttactcggtaatgagggatgttgggactcagacgataccctaaagtatgacactttgggatactgagtactttgagctaaag

SEQ ID NO: 159731 - DNA, 548 bp, Homo sapiens
atgtttcccttccttccactgcaaaagaaactattattattcaaaattctgtttcctattcccttatgaaactcctttatcctccacaggtagaatacatttcagtcagatgtttttaaaagaaatttttttgtagacatggggtcttggagtcttgtgatgttggctaggctgatcttgaactcttagcctcaagcaatccttctgcctcagcctcccaaagtgttgggattgcaggcatgagccaccatacctggccttatcttagactrtcttaagaagagttcattcttatgataacaatattttctgagtcaaaagtgaggtcaggcattggcttagacaaggatttcatgaccaaaaacccaaaagcaaatgcaataaaaacaaagataaatagctgggacctaattaacctaaagagcatttgcacagcaaaaggaacagtcagcagattaaacagacaacccacagagtgggagaaaatcttcacaatctatacatctgacaaaggactaataaccagaatctacaacgaactcaaacaa

SEQ ID NO: 159732 - DNA, 515 bp, Homo sapiens
gttttcacattgagactgactaggcaaacaactcaatgcacggagaatgaagcaaagttagcagtggtgatggcccacctgggagcagcacagagccaaagaaacccccacccccaaacaagggaagcagtgagtgatagtgcaaaccctaccttgggcaaccacacttctcccatggatctttgcaacctatggatcaggagatccccttgtgagtccatgccaccagggccttgggtcagatacataaagctgtgtggagtcttgtcaaagcagccactcaggcacacacagagacccaggaggtttacatactctggtcccatgatctctggcaaggcaagaaacccayccattcatatcctgaggaagggacctgaatccagggagcaaaacagcatccttctgcagcccccattttcatggcatctcacaagttaagatccactggcttgtaattccagccagcaaatggcaacaggctggaatctgtctgagatggatccaagttccca

SEQ ID NO: 159733 - DNA, 577 bp, Homo sapiens
aggcagacgttttctgcaagggtggagcccccatggagaagttctgctagggtggtatggaagggaaatgtgggattggagcccccatatagagtcccacctgggatattgcctagtggatctgtgagaaaagggctgctattctccacaygccagaatcgtagatatactgacagctcatgccatgcacctggaaaagccacagactcaatcccagactatgaaagcagccaggaggggggctgtaccctgcaaagcaacaggggcacagctgccctagaccatgagagcccacctcttgcatgagtgtgtcgcagatgtaagacatggagtcaaaggaggttatgttggagctttaagatttaatgactgccctgctagattttggatttgcatgggtcctgtagtccctttgttttggccaatttctcccatttggaatgggaacatttatccaatacctgtacccccattgtatctaagaagtaactaacttccttttaattaagcttctaggcagaaggtccctgccttgtctcaggtgagactttggacttggacttttgagttaatgctg

SEQ ID NO: 159734 - DNA, 611 bp, Homo sapiens
gtaagttgtttaggtatctggattcctctggtcctcaggtctgcgggaaatttgttgacaggtccactcctcctaaccatgacctcctcctggtgtactggcyttttctcagctatgtccacaccactggcagctacacaggaaaatgacaccttgctgttccctctactccatccagaatacatcattcagacttgtgcctcaggcctctctgccccggcatcccttgtggctgtccaattcttgttttcctatgttctaatagtacagaaggtttgcaccctcccagggcaacgaaaaaaagaagtagagcatagccccttctattcttgaatccacaaacttctctggtgactttcatcaccccctccacccacacttaacattttaaattaaaaagccaaaaatatgttaactgctgtgacaattcatctgagaataatggaatactattatctatatctggcaaaatgataacctttcagattttcaacaatacagttcaccaaccaccattcagtgggattaaatatatatttatgcctagtcaggccttccttctagacacctaatattgcaaattattcaattatgtgtacatgttgacatag

SEQ ID NO: 159735 - DNA, 578 bp, Homo sapiens
gagacaaaaacagagctagaaagatcatcttctcttgtttacctaacaaagagcatttattcctgttcttccttgtctctgttttctagttaacatgattcagccttcatactcagatcaggtttgayatctccagccaagctttccctgaactagtcaatgtcccaattacaagctctcagaaaattatgtactgtcttatcacagcatatgccaacattacaattactcccttgtttatgtgattattttattatgattatgactgcctcctcactaacctctaacttccacaaggtcaagaactatgcttgtaatgtggtgggccctcaaaaaatattcattgaatggaggagtgaatgaatgaataaataaatgagtgaatagagcgtgctagttcatctcagaggctgctggccttcctcatgctcaaccacagcatgcttagctttgactggtttgtcagtacatggtccagtcatcactgccaaggtagaaagtttgtttttatcaataatttatgaagtacaaatcattgcagtttatgcaagaaagaaggtaaggtcttacgggttcct

SEQ ID NO: 159736 - DNA, 260 bp, Homo sapiens
tcttaaatcaaccactgagatggttagggtggaaactgactgttaagaagtataagacggctgggcaccgtggctcatgcctgtaatcctaccaatttgggaggtggaggcaggtggattgcttgagcccaggagtttgagaccagcctggacaacatggcaaaaccctgtctytacaaaaaatacaaaattaaccaggtatgcacatctatagtcccagctatttggggggttaaggcaggatcacttaaacccagaac

SEQ ID NO: 159737 - DNA, 260 bp, Homo sapiens
tcttaaatcaaccactgagatggttagggtggaaactgactgttaagaagtataagacggctgggcaccgtggctcatgcctgtaatcctaccaatttgggaggtggaggcaggtggattgcttgagcccaggagtttgagaccagcctggacaacatggcaaaaccctgtctttacaaaaaatacaaaattaaccaggtatgcacatctatagtcccagctatttggggggytaaggcaggatcacttaaacccagaac

SEQ ID NO: 159738 - DNA, 388 bp, Homo sapiens
ttttcatcagaccctgaaagctgtttgcctgaaaaatggcatctatgcctccaggactctggcgagaattgatctaaatgaagccctcactcagcccgtctatgaccagatcgaccctgtttttggaagcatttttaggtaaaggatctctcatcttgcaccttcgggaacaaacatcggaagaatgtggagccagtctttaagaatttagactttggatctgtaagtgtaaagagtagcttgtaactggagaaggaaaccttagtccttggcaaaacacaaaagccttcttggtttggtttacttaaaaatttcccatgatgacctggacacagaytgagatgctgctttcagactaatgttatgattcccattatttttcaaatat

SEQ ID NO: 159739 - DNA, 511 bp, Homo sapiens
ttcagggaccatatttgagaacagctgtcttagacaaatcatttaaaccccctgagcttcaggtaatttatctgtaaaatggtgacaatggtagtacctaccctgatactgctagggttgtcaggaagtttaggataatgcttacaaaatatggacacattgtacttaatagtacttgataaatggtcactattgtttatgggcagaatggaaataacatggttcagtggcttgtctgttgggaaacttgggttctgatcccagctctgaccaatactaatatgacaattccttaacacctctgagattttatttcctcatatacaaaaggaaagagaggaactggatgattaaaacatcttttgctcctttgaaattctaggattttaaattcttttctttttgttataataycttttgcctaagtaggagaaaaagggatttagccatgtggttatgtctcagtggttcattttcacattaaacttctaaacacatagcgttctattgc

SEQ ID NO: 159740 - DNA, 406 bp, Homo sapiens
cctctacctcttccctgttttatctcagagaggggagggagataggtggttaaaggtataattttaaataggggttacagtaggccttattgmcaatgtgatatttgagctaatacttgatgtgtagatatgtgggaaagagtatttctggctaagataatggttagtgcaaaggtcctaggtgaaggtcaggcgcagtggctcacgcctgtaatcccagcactttgggaggctgaggcaggcagatcacaaggtcaagagatcaagaccatcctggccaacatggtgaaaccctgtctctactgaaaatacaaaaattagctgggcatggtggcacgcgcctgcactcccagctacgcgggaggctgaggcaggagaattgggaggtggcagttgcagtgagcct

SEQ ID NO: 159741 - DNA, 450 bp, Homo sapiens
taatgaatcaaaatgcaattaaaaaattctacctaaatgcattactcttacacaacagtaaccaaaatgataaatgattctatctttcccttactcaagcttactagttatgccaggacagagtatytaggccaccactgtgtacaacttatacaaaagcctacagacctggaacaaggatggatttacaaactgaggacaaggtcggaagaaaagtaaacacttaggtcaaacagtatcaccagttgtgacctaagttaacaggcattcacaaagcataggattaactacctatgggaaactatcgccattttcatcagcaaacacccaacctacaacgagaccgagatctattattgatgaaattaaagagtctcttaatatggcacagaaaaggtcccacctacaatttaattaggaaaacataattggtcatgctgagaactaaag

SEQ ID NO: 159742 - DNA, 496 bp, Homo sapiens
ataaacccaagttacagagaaaatctggcaagatgaagggaagtcataatgaatcaaaatgcaattaaaaaattctacctaaatgcattactcttacacaacagtaaccaaaatgataaatgattctatctttcccttactcaagcttactagttatgccaggacagagtatttaggccaccactgtgtacaacttatacaaaagcctacagacctggaacaaggatggatttacaaactgaggacaaggtcggaagaaaagtaaacacttaggtcaaacrgtatcaccagttgtgacctaagttaacaggcattcacaaagcataggattaactacctatgggaaactatcgccattttcatcagcaaacacccaacctacaacgagaccgagatctattattgatgaaattaaagagtctcttaatatggcacagaaaaggtcccacctacaatttaattaggaaaacataattggtcatgctgagaactaaag

SEQ ID NO: 159743 - DNA, 557 bp, Homo sapiens
tactatctgggaggcctgatctttggtttcctggggaaaaaaaaaaaaaaaaaacttggataagacaaasgtaactttctcacgttttaagactgggagggtcaatttctatgtttattcaaaagaagccgtagatatcagctctatgggacaactgggccagtttaagtctctgtggcctgcggagtacatcgcaaacctcttgacatggctagtcacaaccaaacttttatgtttgattctcacttacagtctttatatatctcatgtagctcctttctctagtgatggaaaaacaaagtgtcaatggcaaataggtttctcaaatttaaatccctctgtgaatcccctaaattctataaaaataagtgggttttttttttgctcttctctatataaagttacttttatcacagctgttctattaagcaatctagagtccttttactataagctgaactacatcagtgagaatagacaggaaaatgtgtccactatcacctggacactgagcagttaactcctaagtatgagtaaaacaaggtgaatatacagaa

SEQ ID NO: 159744 - DNA, 390 bp, Homo sapiens
ggagaaataaataaattaatacacttaaaaagtccaaacagtgcctttaatagagtaagggactttgtaaaatttagtwaatattataattgagacaattatattataattgaaaaaatagaaattactaaattgaacactattctttaggatgcaaaacaattaatgagatgaatgtcatgagacaaaagctgttggcatgtatgtgctagaattattctctaccaccttccccatcatctttattcagagcgttttctcctgtcaggtttatgcattaattcaagaggagaaaaaattatctatcttggggaaagtatctccccaacttgtaaatttcccatgaagctccctcttcaaaatcattcaataaacatcttcatgtggtgc

SEQ ID NO: 159745 - DNA, 580 bp, Homo sapiens
tctcatgctggctttccaatatcgttggagaagctgaatcacttggctctcagagagcaaacatgctcttcttagaatccaccctcgatgcagtcctgaacttcttaactcttaatcatcacttgaattttagcaacataatccacttctcaatgaagttttcttcaatggtgttgttcccaaacattttcaccttatggtgtcaaaaagcamcctgcagtaaaatgagaacactgctcagaagagaggcaactgtctatggggctccatctaacctgggaccatccagtcacccttgaggtgagggtatcaaatgctgaacactcctgtaacccatttatatcccacagctcagagatggaaaatattgctagccattcactctcctccagtaggtcaaaacctaattatcctgtcttatggcctcatgtgcctgttagcactttgtagagtcaggattttgcctttaggctgttcatctcatggaagcaggaccattgtcaatttctgttccttcttatagctctagaagccatacactcttagtatttgttgaataaattaatgaaagctcaaaata

SEQ ID NO: 159746 - DNA, 628 bp, Homo sapiens
aagtttgaaacttccaagccacattagtgcttatttatttctatacctactagaatagaacttctttaagagattatataatcaaatttggaaatatatttagagaagagaaaatattatatactcgtaaaatgaaggcctttctatgttagagacacataaacataaaaatatacaggagaggaaatttataacttcaattctaaaattttagtcctttgtcaagcataaacacagaaatacaaacttaccaattcatatatatacttccacttcctggtaggcatgtaactctcaattgatctgatctcaagataaacaaagagacaaactaaaaagattaacaaaccatgttctctgtctttctgccgacagatacaagatctctgtaaaccttcaatcaatttacataaaaagccaaatgattagataataaagccmaaagacgctagcaccagaaatcaagtaaaaaatcaggacccaaaattaattatttatcacccaacaaaagagtcagtagcataaaaagagctgagttcactgttgagttctagaccttcaggagcacaaaaaaagagttgccaagaggcttcatttacttgaggtgagttcattgtgttatgaaggc

SEQ ID NO: 159747 - DNA, 606 bp, Homo sapiens
tcttcttttctttttctttttctttttttttttttcctaagccataccgtaaagaatagaaagaggtagatgactagaagtgaagaagaagaayattccaggaagcattaacctaatgaacaaaggtaaagaaagggctttgcatgtttagaagaaaatgagtattttagcctggctctaacagaaggtttatggaagaaataaatgagagataaaatggaaagactagataaggccaaattttggatgaccttaaatgtcaagacaaagattctgaactttatttgttttattgttgttttattttattttattttttgagacagagttttgctcttgtcgcccaggctggagtgcaatggcgcaatcttggctcactgaaacttctgcctcctgtgttctcctgcctcagcatcccgagtagctgggattataggcacacgcctgtatttttagtagagttgggggtttcaccacattggccaggctggtttcgaactcctgacttcaggtgatctgccctcctcagcctcccaaagtgctgggattacaggagtgagtcactgcgcccagcctgaactttattttcaagactagaaaagattg

SEQ ID NO: 159748 - DNA, 606 bp, Homo sapiens
tcttcttttctttttctttttctttttttttttttcctaagccataccgtaaagaatagaaagaggtagatgactagaagtgaagaagaagaacattccaggaagcattaacctaatgaacaaaggtaaagaaagggctttgcatgtttagaagaaaatgagtattttagcctggctctaacagaaggtttatggaagaaataaatgagagataaaatggaaagactagataaggccaaattttggatgaccttaaatgtcaagacaaagattctgaactttatttgttttattgttgttttattttattttattttttgagacagagttttgctcttgtcgcccaggctggagtgcaatggcgcaatcttggctcactgaaacttctgcctcctgtgttctcctgcctcagcatcccgagtagctgggattataggcacacgcctgtatttttagtagagttgggggtttcaccacattggccaggctggtttygaactcctgacttcaggtgatctgccctcctcagcctcccaaagtgctgggattacaggagtgagtcactgcgcccagcctgaactttattttcaagactagaaaagattg

SEQ ID NO: 159749 - DNA, 606 bp, Homo sapiens
tcttcttttctttttctttttctttttttttttttcctaagccataccgtaaagaatagaaagaggtagatgactagaagtgaagaagaagaacattccaggaagcattaacctaatgaacaaaggtaaagaaagggctttgcatgtttagaagaaaatgagtattttagcctggctctaacagaaggtttatggaagaaataaatgagagataaaatggaaagactagataaggccaaattttggatgaccttaaatgtcaagacaaagattctgaactttatttgttttattgttgttttattttattttattttttgagacagagttttgctcttgtcgcccaggctggagtgcaatggcgcaatcttggctcactgaaacttctgcctcctgtgttctcctgcctcagcatcccgagtagctgggattataggcacacgcctgtatttttagtagagttgggggtttcaccacattggccaggctggtttcgaactcctgacttcaggtgatctgccctcytcagcctcccaaagtgctgggattacaggagtgagtcactgcgcccagcctgaactttattttcaagactagaaaagattg

SEQ ID NO: 159750 - DNA, 514 bp, Homo sapiens
ggaaataaaaccatgcaaatatacatgaaaaaaataaaattatttaatgcctaaaataccccaataagtaatggttaaaacaatacacatatatcatctaagttattgttagccaggagtccaagaagagattatctggtccctctgtttcagggtcattcacagactacaattgagtcctggagtcgcatctgaaggttcaactgcagaagaatctatttcaaccaagctcactgacctggttgtggggaagacttgcagactgttggaacgagagcctcagcacatggctggctattggccagaggctgccccargtctttaccttgtgggactctccaacacaacaacttattccatcaaagccaacaaaaaagaaagtctaccagcaaaatgacagcaatggtcttgtataactgaagtgacatcacctcacttttacaatattctattcattacattgctatgtctagcccaccctcaatggaataagatcacacaggacatgaatact

SEQ ID NO: 159751 - DNA, 589 bp, Homo sapiens
cgtttcaaaaaaaaaaaaaaaatgcaataagatattcagatagaaagttatagtratccatataagaatgaagcccttatctgagcgtgcaaaggaatgcagaggagtgtatgggcaggtgatagtcttaggacattgagatcataccttcttatgcctgatctcatggttttagaggattgaatgaaaaagtagattccattatgaggccctagcttctggcaaaggtgactgaatgaatggtcacatactatattactaaaaacattgagacaatgattttgtaaggtaggcaggccaggtagatatgttaccaccattttgccacatgaggaaactgaaattctggaaaaagatagctaaggtagtccactgtattatgctatttccattataatttagtcaacacaagatacttatatgaacatacatctaaatagatttgtttaaactcacatcagtggatgtacaccttacgataaagtcagcataatcacatgtttacattacttccaagaatctataaggtacaaagtatagttcaaggaaaaattaatcaattttagaaatggtaatcctctttattcag

SEQ ID NO: 159752 - DNA, 424 bp, Homo sapiens
agcagaacatgctccatttctggtgcccctactccccacccctggaaaagagggatggagccttgaaacctcctccaagtgattctaatatgtccccactagacacgccggatctgatccatactattccattatttaaaaaaaaaaaaacccacatattccctttaaacatcctttttctttgtttgacatttgtatgtttccttaggctgctataacaaattaccacaaacttgggggcttaaaacaacaaagacttattctctcacacttccgagaccagaagtccaaaatcaaggtgtcaggagggccacactcctctgacagtctaggggagagccctaacctctttcagcttctagcagctcccrgccttccttgcatgacagcatctctccaacctgtgcctccatcttcatgctgt

SEQ ID NO: 159753 - DNA, 576 bp, Homo sapiens
ttaaactttatttattcagtggactgatacaataaatatttaaactttatccagtggattgagtaaatttatttaatcaattgaaaacttaatttgttttcaactgattaaggagacattcagaagatcaaaaatgttattcatcaaagagcatccatctgtaacaagagaaatattctgaagttggtgttcagatgttggtgtagaggtagtctacagatttttggaaactcagtttgaatagctacttcaagagaaaagagaggcacctccatgtggttgtcagcatgcccggttgttataagcyggacaactgaaaactacttgaaatctaagagggtctttccactgtcttcccagctccctcagctggattactccactccaccttctggtctcaggctaagtgttgctgcctcaacaaactatccctggccccctaattaggttgggcccctcgtatactctcagatacaactccatatttccttcttagctatcacaattatcactaaataagcatttctgtaataattcatttacattcacctccaataaatcatgagctctatgaca

SEQ ID NO: 159754 - DNA, 576 bp, Homo sapiens
ttaaactttatttattcagtggactgatacaataaatatttaaactttatccagtggattgagtaaatttatttaatcaattgaaaacttaatttgttttcaactgattaaggagacattcagaagatcaaaaatgttattcatcaaagagcatccatctgtaacaagagaaatattctgaagttggtgttcagatgttggtgtagaggtagtctacagatttttggaaactcagtttgaatagctacttcaagagaaaagagaggcacctccatgtggttgtcagcatgcccggttgttataagccggacaactgaaaactacttgaaatctaagagggtctttccactgtcttcccrgctccctcagctggattactccactccaccttctggtctcaggctaagtgttgctgcctcaacaaactatccctggccccctaattaggttgggcccctcgtatactctcagatacaactccatatttccttcttagctatcacaattatcactaaataagcatttctgtaataattcatttacattcacctccaataaatcatgagctctatgaca

SEQ ID NO: 159755 - DNA, 594 bp, Homo sapiens
ggagttcctggctgcaaggcgggagagcagacatctcttttctttaaataaacatgcccccagcattcggccttagggctctcaccttctctttctttccctaagtcaaagcaaacctctctttcacctgttatagaagtctagctaattcccacttcttaggatgagggaaagatagagcacttccaatgatagtgaatctaaaaagaaatggaagaatttttattatagtggtcacctgtatgagttcttattagacaggtatttttaaaggaaaaaaacccaaaataactgactagtagctggtatccatggtatcaataaatggccacggctgtgactgttaattgtcatgacccaatgggagcactgagaaatagcatcccctcttcttttcctatggaaaattaaaaaaaaagttgcctgtggagctgaatgttgtcatcagccaacagatgaggttgccaccttkttccctaagggaccatgcaagatgtcataaataggaggggccagtgacaagtagaagcctgattcattatgctgttagagttgacagagtgtgataatagtgataaaaatggctagttcagt

SEQ ID NO: 159756 - DNA, 454 bp, Homo sapiens
ccaagcagcctgatgaaccctggtattgctctgacatgataggccactcatttttaacttccatcaagagttgtaagtagtatgatatatttaaaaatgtatttcttattttattttaaactctgtgtgtgtgtttaataatttttttcattcaatttttttttttgttttagttagcattcttatggttgcaagcaacagaaatccaaccaaaactggctctaaaaaatagacagttgattgctcattgaygttctggaggtagatccctacttcatacaaaggctgactcagcagctcaatgatatcagtaaggatctggattctctctctctttccaccgtgctgtgcattgtgtggctttatgctctggctttacatagggcctccacacctgccctaccccacttcagaaggtccaggcttttccactaaaggctggctgggaaagagc

SEQ ID NO: 159757 - DNA, 610 bp, Homo sapiens
tcagttttaacttctttgcttagaaattaatgtgagcaagtgagcctcctctttttaaagccattttggattgagagtatttgttttctgagcattttatatgcattaaattgataatttagattttttttctaatgttttgagtgatacagaaatcatcatcatgggtttccttaaatktctgtggcaatgggcttattaaaaatgtaattttgtgcatggtgatttttggagggatatcaaacttatcctatgggtgttcagttttgtcagagagttatgatacattttattctgcatattaaaaatgttccagaaaggaaagcaaaaaaatcaccatggcaactcagtagaatgcccttattttgtttttctgaaaggaaaattctaaatctgagtaagaggtataaaaaagagcagtgcagattgtgtctctggcttccaggaagtgagctcataaaagaatgggtttgatgccctgggtgactctgtgttatttaggaccccatttgttttttctcataaggaagagctataaaaaggtggcgtatatattgacactactaaaacagatctgccaaagagcctgttgaatttttctttgtaatgc

SEQ ID NO: 159758 - DNA, 610 bp, Homo sapiens
tcagttttaacttctttgcttagaaattaatgtgagcaagtgagcctcctctttttaaagccattttggattgagagtatttgttttctgagcattttatatgcattaaattgataatttagattttttttctaatgttttgagtgatacagaaatcatcatcatgggtttccttaaatttctgtggcaatgggcttattaaaaatgtaattttgtgcatggtgatttttggagggatatcaaacttatcctatgggtgttcagttttgtcagagagttatgatacattttattctgcatattaaaaatgttccagaaaggaaagcaaaaaaatcaccatggcaactcagtagaatgcccttattttgtttttctgaaaggaaaattctaaatctgagtaagaggtataaaaaagagcagtgcagmttgtgtctctggcttccaggaagtgagctcataaaagaatgggtttgatgccctgggtgactctgtgttatttaggaccccatttgttttttctcataaggaagagctataaaaaggtggcgtatatattgacactactaaaacagatctgccaaagagcctgttgaatttttctttgtaatgc

SEQ ID NO: 159759 - DNA, 598 bp, Homo sapiens
cattttcttatgtgacccccactcctcatccaagctgggctgtctcttccttgaactttttgatttttattttggattcagggggtacctgtgcaggtttgttacatggatatattgtgtaatgctgargtttgggcttctattgaacacaccgcccaaacagtgaacacagtacccaataggaagtttttcaacccttgctactctccctccctcctttcctccctccctccctcccttccctcttttggagttcccagggtctgttggtcccctgtttgtgttcatgtgtacccattgcttagctcccacttataagtgagaacatgtggtatttgattttctgtttctgcattaattcacttaggataatggcctccagttgcatccatgttgctgcagaggacaggatttcattctttttttatggctgcagagtattccatgggtgtacatgtgctacattttctttatttaaaccaatgttgatggacacctaggttaattccatgtctttgctattgtgaatagtgctgcaataaacatatgagtgcaagtgtctttatggtacaacgatttattttcttttgggtatggg

SEQ ID NO: 159760 - DNA, 598 bp, Homo sapiens
cattttcttatgtgacccccactcctcatccaagctgggctgtctcttccttgaactttttgatttttattttggattcagggggtacctgtgcaggtttgttacatggatatattgtgtaatgctgaggtttgggcttctattgaacacaccgcccaaacagtgaacacagtacccaataggaagtttttcaacccttgctactctccctccctcctttcctccctccctccctcccttccctcttttggagttcccagggtctgttggtcccctgtttgtgttcatgtgtacccattgcttagctcccacttataagtgagaacatgtggtatttgattttctgtttctgcattaattcacttargataatggcctccagttgcatccatgttgctgcagaggacaggatttcattctttttttatggctgcagagtattccatgggtgtacatgtgctacattttctttatttaaaccaatgttgatggacacctaggttaattccatgtctttgctattgtgaatagtgctgcaataaacatatgagtgcaagtgtctttatggtacaacgatttattttcttttgggtatggg

SEQ ID NO: 159761 - DNA, 575 bp, Homo sapiens
acctgacccaaagagcccaaagggaataatggaagcttctgccaggcctttggggattaagtgatgggtatgggggcgggtggatgactctgtaatggtcctatttctgatgcaccaatagggacacagtcttaaaacaggaagaagaacaaaggggaatgaacgtgctctgcagtgggctggggagcagggcaggctgatcacgcttcaaaaagcactgtttcctcttccttcactatacatcatgactctgggaattaaagtttgtgctttgagcgacgtgtgtgtgtgcttatgtgtgtataaattgtgtgcctccatgtgtggatttgtgtccctttatatgtgtgtgtgtttgagcggatcattatctgtttgatgacctgagagaatgaggactgtgggtctcagaagcccatrttcaggtaggcagttgcaggaagcagagatctgcaagctggggcaggagtcccagctccactgtcttgtcagatttgaccattaaccaccagttctcagggttgtatctgggcaagaggctgaggctggggcaaggccggtcacagtgcagctgg

SEQ ID NO: 159762 - DNA, 452 bp, Homo sapiens
aaggtggtttcaaggcctcctccagaaggcatttctgctcactccactccctgatcagagatggctccctagtgctgaaaatcaattcaaacgtcgcctgacacctgtgtcttttccgtcttttccggccgcctccagccttctttctctgcctggcttctccccgtggggtgggccctccatgcctaccagctgaccagatacaccagccccaaagggccagcttcactcaggacctttgctcctgtggtgttttgttttgttaatctccacaatattcaaattctgtttctcaaggtccaggtgaaactccagggtccgtggatctttcctggcatttgcgacyggcctatctggggtcattgctttgtcttcacgctcgtctcccacaagtctgttaggtcccctttctctcactccctggagctcagctcaagccctggcacaaggga

SEQ ID NO: 159763 - DNA, 395 bp, Homo sapiens
ggctttcatgagttagctgcttactccatcaagcctgcaaggagaggtactcgactcaggaagagcccagtccctgttacaagggttttcacctgattgagccaggcctgcacaaaatagtctgtttttattaactgaaagtcaactgatttggggcctcaattacatttgcaaaatcccttcacctttgccagattctgttggttagaaataagtcaccggtgcccccacaccaaggagaggatttatgcagggtgtkaccaccacactgtgggctgccttcctggaggcgaaggctcccattccactgaaaagaaagtgaagccccaggcagtgtagaatagccttgagagacacagcctcctgtgctcagagcctctggaagctcagcacag

SEQ ID NO: 159764 - DNA, 469 bp, Homo sapiens
ggaccttggttccattttgaataagagatgtattccgtggttgtggatgttatatattccttttctggggagtatgaattgaggaaacaagaaagaggaaacaaatgagctcctagttccaatgctgtgtgtatattttatttctaatgattacagagggaagttactttattgcttccatgcaaaggcattctctggaagaagataaaaactccaagctaagcagttattaacttcttcccagagacactgctaagtggtaagaaacactgcctctgtacttttcctaccccatgtcaagttaagaaatggattttagaagtagagactgaacatgcgacttcyagatttatgatgaataagaagtgtttccattcagtagaccataaaaagaatacttgtttggagtttagatcagacttttgaattcaggtcagtttaaattctgttcccagttggccccttgacc

SEQ ID NO: 159765 - DNA, 600 bp, Homo sapiens
gatggaagagctacaagaatcctgtcttttgtttctgggagcttggaggcaagagatataaacctgtcacatttaacaaataattactattttggtatttatctttatttccaacatatttctgtctttttataactgcaaaggctcatttaatgtgtgttagacatatttctgacagctttatataaattaaatcatctaatcatcaaaacaaccttgagagaaagttactaccattatgtacattttatgaatgagaaaatcgagccacagagaggtgaagggatttgtctgagaacggaaatacattaagtgttggcttgctctcgaggctgtggtcttaactgctaygtcatgccatctcatttactgacttctctgcgcactggttcttcctctgcctgtctttccatctggaaaagagcatttaatatttctaggtcccctaggcctcttaaacagcctcatgtattaaaaaataaactatttcaattatgttgtttattttgaaattaaaagctttgagattttattttatagtgctcaaaaatctttaaaaagtgactaaaagctggcttttattgatgatgattagatgat

SEQ ID NO: 159766 - DNA, 453 bp, Homo sapiens
ctgaggtatccaggttttctcactgggactgactaggcggttggcgttacccacagaaagtgaggaaaagcagggtggtgcaagggcccacctgggagccacagggggaaaggggagctcccacccccagccaagagaggtggtcagtgattgtgctacccgacccrggaaaccacgctttttccacggatctgtgcaacagccggatcaggagatccccctagtgagctcacgccaccagggccttgggtcccaaggacagagctatgcaaactctcagcagccatttggccggagactacctaaaactaccgagttcactgcggctgcctgctgcctaagatgactcagctcctggggggagaggcgcagccatcactgcggctccagtctgccatttttttcccctgccagtacggtggagactggacaatttcgacccaggaggaattc

SEQ ID NO: 159767 - DNA, 396 bp, Homo sapiens
agatatgggcttgatttagttttcttttttttttaaagkctgtgtggatatttgcgtatataaataggaagatgtgtattattaaacaactttcatgttaggtgctcaagaagaaggtggcatggaatcatgagaattaagcatgaaatcatcttttttattccttcacccaggaccaggtggggaggcaagaaacaccatctatactaggacataaattgtacctggaagctagctcaccatgcattgggcttagtgtgtaccaagttactatacatggtcccctaggaaacacctgaccttcctgcactatattttcttggaaagactgcccaggttacaacaccagtcctatggaagcaaccacagtattgcagccagggtggaagactcttg

SEQ ID NO: 159768 - DNA, 507 bp, Homo sapiens
tggtacatgtcttcagattcattatataatttcatcttcagcataaatacagtgtaagtacttattcctatggggagaacaaacaaatcaaggcccagtatcattatataacattcccaatctcagccagctacataaatggcagagcaataataagacaccrattttgtctggaaccaaaccctgtggtttttttccactacatcaggctacctctttatgacatggccacacagaggcaaacaaaacatttgggagagatatctacattttgtaatttggagatcaaagcaatatggtatcattttaattgggagcattattgagtaaatcccatacaatatgggtaactttggatttatccttaagctataattccttaataaagattcataattaaatgagtcggtgtataaatttacccaaataaaatcatataacatagataaaagcattttgggttatttagaggcaaagcattatataatttttataagaatttcagtt

SEQ ID NO: 159769 - DNA, 509 bp, Homo sapiens
ggatctaaggtaataaatggttacagagtgattaatatgtgttattttaaaccttatagcaacctgatgaggtrgaaactattactagctccattagacaagtgagaaaagtgggacacagaaatctagcaattaggggagcaagaattaaattccaaacatttggactttagagccttcgcctttatcactacactgtaagacgtatctctaagattatattctaataaatactcccttgtaagacagaggcttagtccttgcaatcagaggaggaggcaggcatcctttcgggaagaataaggaaagaaaaaaattataatttctggtgttcaggatgagttttttgacttaagactggtcctgcaagtaggcctagatggaatcagttttgaggttaagacttcctagctatgggaattaagaaatatgtgggcaaggagtcaggtggtcattactgtgtctaggttttaagctataaagttgtatttttttaaatatgtttatcc

SEQ ID NO: 159770 - DNA, 509 bp, Homo sapiens
ggatctaaggtaataaatggttacagagtgattaatatgtgttattttaaaccttatagcaacctgatgaggtagaaactattactagctccattagacaagtgagaaaagtgggacacagaaatctagcaattaggggagcaagaattaaattccaaacatttggactttagagccttcgcctttatcactacactgtaagacgtatctctaagattatattctaataaatactcccttgtaagacagaggcttagtccttgcaatcagaggaggaggcaggcatcctttcrggaagaataaggaaagaaaaaaattataatttctggtgttcaggatgagttttttgacttaagactggtcctgcaagtaggcctagatggaatcagttttgaggttaagacttcctagctatgggaattaagaaatatgtgggcaaggagtcaggtggtcattactgtgtctaggttttaagctataaagttgtatttttttaaatatgtttatcc

SEQ ID NO: 159771 - DNA, 628 bp, Homo sapiens
caatactagttttcatgacttttctcacaaacccttctatcttggcccctcagctgcagctacatcaataaagccctgacattatgcattctgaagacgaggcaggtaaattttattttggggtgatttaatccaaattatattagctttaaacacacacacacacacacacacacacacacacasagagagagagagagagagagagagaataaaccatgcaaacttttaaataggaaattttataataggaaaatacattaatacattaagaagttaaatttagcattaagagtgtcagtgggaacactaatgcaagaatgacatgttttccaaacctcaaggcctcacaaggcttcatcctatatactgtgtatggctgttaacattaaagcattgcaatttgtaaatcacaaccagtagaagctatttgctctcattgttactctagataattttgaatattactgtgccagtttgactactacatttttgagaaactgccttttcctattattctttccatgtaatgtgataaaaagagaaaagccagaaaagctgacattcttaaaataaattggaaacttctcttttgatactgtggttttctttattaatatttaaatca

SEQ ID NO: 159772 - DNA, 421 bp, Homo sapiens
tggcatgattatggctcactgcagtctcaaattcctgggctcaagcaatcctccaacctcagcctcccaagtagctggtattgtaggcctgtgccaccatgcccagctaattttttcctagagatgggggtttcccttgttgctcaggctggtcttgaacttgtggcctcaagccataaacctctttcttcataagttacctaacctcagatatttctttatagcaatgcaagaaygatctaacacagaaatcttccctggactcaaggaacagagacatcttgatgaatcagtgtaatgttattcatgcttgctgtgttatacaactcagaaaggacagttcctggcagaccttgaatcaaatagagctgttgactagctttgttcatccatgaagcgaaatgagagtcatgctgtgttg

SEQ ID NO: 159773 - DNA, 455 bp, Homo sapiens
catgtgagaatattataggcccccattaaaataaaatgtaatggtaattattctttttaaaatgtaattgttctaaaatttgctacttgggagatgtcatatatttrgttatttatggtaatttaatacataaagggacaagttatctatgtttttctgatttgttccctaaattttatatccttaaaaggaatatttcagtactcacctagattccagagaaaaataaacactgtccaagcattgatcttgaagatacaggttttaagagtctgagaaaacactgaagatcatttattcatttacttagccatgcagttattaagctactggtatgttctaggtagatcagagattatgaaaacatattactaaagactggtcattggtctgttatatagaaactgtatgttaagacctactgtgctgctggattctttgtaggtaagcccctt

SEQ ID NO: 159774 - DNA, 646 bp, Homo sapiens
aaatcattgccactagacatgcaagaaacactaaagagtccttcagattggtggaatttgttttattttcttttatatgtacataaaataaactattatacatatttatttaactgatttatttatttaactgatttaataccctttcttattattggtctgttcagattttctatttcttcatgattcagtcttgataggttgtatgtatctaggaattcaccaatttcttctaggttaaccaattgtttggcatataattttccataatagccttttaygatcctttgtatttttgtgatatcaattacaatgtctcctatttcatttccagttttatttatttgagtctattctgttttttccagttaatttagctacaggtttatctattttgtttatctttttaaaaaaccaacttagtttcattgagagagtctttcttattgaaattaaaggatgttagtaacttgaaaccatacaaagatataaagatctctagttaggatgaatatacaggcaaatataaaagctagttttattgtaattttgatttataattctaccttttgttttctacagaatttaaaagacaaatacataaacataattttaaatctgttactgtgcatccaatatgtaaaga

SEQ ID NO: 159775 - DNA, 548 bp, Homo sapiens
ttaggagatgcagcaaaagcagcacaaagcagkacatttataatgataaatctctacattacaaaagaagaaagatctcaaacaacttaatgttagacctcaaggaactagaaaaagaacaaaagcccagctagcggaaggaaggaaataataaatgtcagggcaggaataaatgaaaaagacacaaacaaaacaagagaaaaaatcaacaaaattatgaatgaatgaaaaagacactaacaaaacaatagaaaaaatcaacaaaattataagtcagtgttttgaaaaggtaaacaaaatgaataaacccatagctatactaagtaaaaaaaagagaaaattctcaagtaaataaaatcagaaataaaagaggagaccttacaacagatgcctcagaaataaaaaagcatcataagggactattaatttctttaatagtgttgggaaaactggatatttgcatgtaaaaatttaaaattgtatctttatacacaaaaacaaacttaaatggattaaagacttgaatataagacatgaaactataaaac

SEQ ID NO: 159776 - DNA, 555 bp, Homo sapiens
ttaggagatgcagcaaaagcagcacaaagcaggacatttataatgataaatctctacattacaaaagaagaaagatctcaaacaacttaatgttagacctcaaggaactagaaaaagaacaaaagcccagctagcggaaggaaggaaataataaatgtcagggcaggaataaatgaaaaagacacaaacaaaacaagagaaaaaatcaacaaaattatgaatgaatgaaaaagacactaacaaaacaatagaaaaaatcaacaaaattataagtcagtgttttgaaaaggtaaacaaaatgaataaacccatagctatactaagtaaaaaaaagagaaaattctcaagtaaataaaatcagaaataaaagaggagaccttacaacagatgcctcagaaataaaaaagcatcataagggactattaatttctttaatagtgttgggaaaactrgatatttgcatgtaaaaatttaaaattgtatctttatacacaaaaacaaacttaaatggattaaagacttgaatataagacatgaaactataaaacttctaga

SEQ ID NO: 159777 - DNA, 555 bp, Homo sapiens
ttaggagatgcagcaaaagcagcacaaagcaggacatttataatgataaatctctacattacaaaagaagaaagatctcaaacaacttaatgttagacctcaaggaactagaaaaagaacaaaagcccagctagcggaaggaaggaaataataaatgtcagggcaggaataaatgaaaaagacacaaacaaaacaagagaaaaaatcaacaaaattatgaatgaatgaaaaagacactaacaaaacaatagaaaaaatcaacaaaattataagtcagtgttttgaaaaggtaaacaaaatgaataaacccatagctatactaagtaaaaaaaagagaaaattctcaagtaaataaaatcagaaataaaagaggagaccttacaacagatgcctcagaaataaaaaagcatcataagggactattaatttctttaatagtgttgggaaaactggatatttgcatgtaaaaatttaaaattgkatctttatacacaaaaacaaacttaaatggattaaagacttgaatataagacatgaaactataaaacttctaga

SEQ ID NO: 159778 - DNA, 367 bp, Homo sapiens
ccatggtttccttttttggacattataaatcccttcctatggtacaacagaccaataaaataggcattacaatccttcaagaagcagccaatagtttataaaatctagacggtgattgacttgtctggttttattttctgccagctattagcagcaaaggtcaaaaaagaactataagtcaactgaaacttcaaatgaatgtacatctctctttttcagacaagtgagacctcatactcccaggaatgtgcagatcagaaatcaaagcaacatctttggctgagctacagagatagaaaactgggatttcaagtagacttaaaygccatatttaggaagggtttcaagtaaatcacatctaaatccc

SEQ ID NO: 159779 - DNA, 574 bp, Homo sapiens
atgcagtcacatgccaaagctgtgtcagctgctgtggtgagcacgagcccttaaatttcatcagtaatgctatctgtcaatctggattcaatagcagtttaaattctggtgactgtttaggaacgctctgctacactatttcaccactacactactgccataaagcaaacctagcgatcaaaaatgcttgattgattatgggcccattaaggatatcttcactttgattcatgaaacatgcattctgtgcactggaggaagaaaagctcaagtcacaatwtgcaaatttacaagtcagtgtattgcctccttttccccatcgcaccccactccattcaaactgcagtattttgaaggagtgtaaaaaagttatttcttttattaaaagagctgtcggaagagcagatacataaatgtgggtgaataagtcacaggatatttacccttattaaattttcattccttacactcatctgtaccccaggcatgccatgcaatgctggctcttctttccctagaaaagtcaagaatagtggtatcaggcatttgtactccttgtttctatgcaacaaga

SEQ ID NO: 159780 - DNA, 239 bp, Homo sapiens
atgagctattccatcacattgcttacattaaattattacactagtgagaggaaagggttctctataatcattccattaataaactacaaataaaaagtagtttataataattacatttaactttcaatacatccactttcatttctaattgtgtgtatgttttcaaatgcatgtttattactcgaaaatattggtggctcatgctcarcatttttcagacagggtatgcaatctccaga

SEQ ID NO: 159781 - DNA, 405 bp, Homo sapiens
cagaattctgttaaaagtcaaatattaaggatgacctgggaaaacccagcctgtctatgtttggaaggtatatcttytagtaatgtcatttgatgaagaggaatcacaacacataggctttatgacaatatccaccatcataaatgagatgtggctgaaatatgggtgataacgtcttcatttaattaacactggaagccaagatttcaccactatacaattcatccatgtaaccaaaaaccacttgtacccctaaagctagtgaaatagtaataataataaattgaacaaaaggatagtgaattgagggtgacaaagtgtctacaagaggtacatttattgccagtggccatggaaatgaatgctggcaataatggagcagggaagagacaaccaggagttcag

SEQ ID NO: 159782 - DNA, 389 bp, Homo sapiens
aaaacccagcctgtctatgtttggaaggtatatcttttagtaatgtcatttgatgaagaggaatcacaacacataggctttatgacaatatccaccatcataaatgagatgtggctgaaatatgggtgataacgtcttcatttaattaacactggaagccaagatttcaccactatacaatwcatccatgtaaccaaaaaccacttgtacccctaaagctagtgaaatagtaataataataaattgaacaaaaggatagtgaattgagggtgacaaagtgtctacaagaggtacatttattgccagtggccatggaaatgaatgctggcaataatggagcagggaagagacaaccaggagttcagcctgccctggtgtcctatgaattc

SEQ ID NO: 159783 - DNA, 389 bp, Homo sapiens
aaaacccagcctgtctatgtttggaaggtatatcttttagtaatgtcatttgatgaagaggaatcacaacacataggctttatgacaatatccaccatcataaatgagatgtggctgaaatatgggtgataacgtcttcatttaattaacactggaagccaagatttcaccactatacaattmatccatgtaaccaaaaaccacttgtacccctaaagctagtgaaatagtaataataataaattgaacaaaaggatagtgaattgagggtgacaaagtgtctacaagaggtacatttattgccagtggccatggaaatgaatgctggcaataatggagcagggaagagacaaccaggagttcagcctgccctggtgtcctatgaattc

SEQ ID NO: 159784 - DNA, 464 bp, Homo sapiens
agacaacccgcagattgagagaaaatattcactttttatgcatcggacgaaggactagaatgcagaatctacaaggaactcaaacacaccagcaagaaaaaaacaaataatcccatcaaaagtgggcaaaggacatgaatagagatttctcaaaagaagatatgcaaacagctaacaaacatacaaaaaatgttcaactcatcatccgggaaatgcaaattaaaatcataataagataccaccttactcctgaaagaakggccataattaaaaagtcaagaaaacaatagatgttggcatggatgttgtgaaaagggtacacttttacactgctggtgggaatataaattagtataaccactaaggaaaacagtatggagattccttaaagaattataagtagaactattgtgtgatccagcaatcccaccaccgggtatctaccaaaaggaaaagaagtcatt

SEQ ID NO: 159785 - DNA, 610 bp, Homo sapiens
taacgtatgcctagttaagcaggagtagcctttaatgtatgcctagttaagatctactcttatggcacatcccttctggagtttcagctgaatgctcgggtgttcaatgaggactctgctttttggctactcaaaactcaaatgtctcctagccccatgtgaactcttgttcagatttcagctcccagtttatttgcccaggcttgtggagttctaccctttgtattgtgaatttgcattaagcgaaagagtgaataaggcccctatgtgtatttctatagctttttctcttgaatgcttttttttttctagaactttgcccttcaaatcccagccacctagcttcactgcactcagatctttgtcttcttaacccagcaagacattcatgctgtgttttggatcccctccctgcaccatggcctggatagatccttcagtagaaagttgggaagaytgtaggaaccaccttatttgtttccctttctttagggatcagcatcctatgtcacctgttgtctaatatctgatcatagttttaaaatatattttgttcctttttctgtttcttttgtttttactgtgagagggtaagttctttattataatc

SEQ ID NO: 159786 - DNA, 581 bp, Homo sapiens
ctacagtggtttacatgagtcatgtgttgagtgaggcagcctccagtagaattcaagaaattctacatgaactattacccaccgtgcacttgtaatttctgtgggagtagtggagctttgagggggacaagatcgttttgtgagataatttyagttgaattcagtgctgatgaacatcatctgtatatcacctatttttgtattttgttggccttgcaacctgcgtgtagctttggagtgttgtggtagctgatgtagtaaatgaagtaggaatggaatcattgcagtaccaggctccatggcaagggtcacctggcaggacaaggtgacccctctgaatgagatcccgggtggcacgttagactgccattttcttgccttcttgcctgcactctcccctccccgtcactgagtttcagcatgggttgggtgttttctttccacaggcttggcaatattcattcctaagtgtttcatctactttggtagatgtagatagatctccctacctacttaggtttgaaaggatcacatccatttctcttctgctgtatcctgcatgtttctcttccacatccttt

SEQ ID NO: 159787 - DNA, 383 bp, Homo sapiens
tataaaaccttttatgtaatgagtgtctaatgtgaagaacatgatggactatctaaacttatttttayaagactaaagctcagaaacataagcaattcccatgcgtcatgacctgtcaccagttaacataatgtgaaggaaagtgatgagagtgattttcatttacttagacgcctgctcattcatttggttggagcaatcccaagaaaaccttgcccagtggaaatttcaaggtttctattagactgtaagcatcttgaagtcaacggacttactttactcctttatgtactccacataaccaccttgtcacatatacaccaaaagcaaaataactgcttattgtgaataagtaaatcaccattaattattttgtaaatata

SEQ ID NO: 159788 - DNA, 179 bp, Homo sapiens
gccctccaaaagcttattgtcttgaagaggggaaaaaaacaggaacaaaaataactatgatacaaactacagcccccaaaagaatcaatagtcagatgagagacagccccgccctgtaaatctgcagtctstactgtgcatcccagttttcagatcccagttgtgtgcccttaggtgtc

SEQ ID NO: 159789 - DNA, 555 bp, Homo sapiens
ctggaagcaagacttcatttgccgttcttcatggtaatacttttgaagaaaggttttatctcttaaaactaatttgctctacagccagaatatttttacttcaaagatctgtgtagttaacaagattcactgagccagacagtcctgactgccctacttttttcttatcttcatttattttatttaaaaagtccctctacgttacaatcctgaagtctgaactttataatgaactttgatttgtaaagtatatatttttaaacctcaaaagtcagttaataatgagcaagcttctgtttttctgaagaggtggaagaggaggaggaggaggaagaagaagaaaacggggaagaraaagaagaggaggaggaggagccctagacttctgggagggctactggaacagcttttgggttgccttttgcccccaacttccctgttcctttgggaatgacctctgtccaaacagcaatgtcattttgtagatgcagcctagtcagtttcctgggaggagaggaaagtcctgcatcctttcccaaagcctgttactatgac

SEQ ID NO: 159790 - DNA, 584 bp, Homo sapiens
acctgttgtgcctgcgccctaacccccttataaatatgtgtgactttccccccaaacctattgaatctccatgactttattgtgtaatccakggcctgtgaagcataaaacctaacctgcccatcctttctttgaagacagagcacctttggtccatgctggagactgtctcttcctggtttgctaactgatattgccaatccaactttcctattgtgtagccatcctggtgttcttttggacaataacactgattgtatacgtcatttcattctcctcacaacaatcctgtgagctcagtgttattcttgttttacacacaaagaaaagttggctcagaaaaatcaagcaacttgcacaggtcaagtcagatttcaattccaggtctagctgactccaaagctgtgcttggcactgttctattttatgggagaagtgccaggggtccaagatgagctctgcaagagaagactgcatctgtttgctgtccatcatctgtaacttgtagctggaatggtcatatgctccagtttgcctctgacaatcccaatttatggctactgttctggtattattgttaagaa

SEQ ID NO: 159791 - DNA, 646 bp, Homo sapiens
aaataaaaactttcacaaacaaagttaagagtcttcatcatcataactgttttacaagaaatgctaataagagtccttccatctgaaaaaaaaaggatgttaatatacagcaagaaatcatctgaaagtataaaactcactggtaaaattaagttcacagacaaattcagaatattctaatactgtaattgtggtgtgtaacacttgtgtctttagtctgaagaagaaaagacacatctatcaaaaataacaactataacagtttcttaggagatagacaatatggaaagatataagttgatacaacaaaaagcctaaatatggggaggagtatgaaatcaaaatgcagggctttatagatatttctttgtttgtttctgtgcttttctctgccactaamcttaagtagccattagtttaaaataacttgtacaactaaaagattttctttgtaagccatacagtaatcacaaaacatagacttataatagagaaagtaaaaataaaaagcaagggattcaaacatactaactttgtggttaagaaaatcacttaaccacaaaggaagtgaagaagaaagaaaaagaggagttataaaataaccagaaaaaaaagtaacaaaatgacatttgtaagtccttatcta

SEQ ID NO: 159792 - DNA, 584 bp, Homo sapiens
agcaacacttgccattgtctgattattttcagttttgggtagataaaactgcatttggctgagataaaatgaaaaaagtatgttagaacagacctttaaagtgcgttttatttcaattatcttattggtccrtttattatgtaattgctaagtatagtaaatggcctggtagacacagtgacttaaatgttgcttttggctttaactaatggaaaaccttaccatggcctaaacaatcagggtttattttgttcatataagaaaaagtgaagagtgagaaagtaggtagatcttgattcaactacttaacaagatcaacaaggattttgctcctgtctttctgctgtggcatgcctagagggttcactttttattttcatgtttgtggtgacatggtcacaagttggctactgtaactatgggcatgtttaaggcatgaagaaaggaaaaaatgggcagtgccaaccgcatatactccttttatcagaaatacaaaatctttcctgggaatccctgtaagataccctcttatgtctctatcctaaactggaccatatggttctgccttaattttccagcaaagc

SEQ ID NO: 159793 - DNA, 452 bp, Homo sapiens
ttctagagtctaacttggagattcaataacagagcacggagacaaaagacagctggaagtatgatccaggcgctacagcttcttagatcttccaaataaaaaccaatattcctttggattacatgaattaaatrgaaagacaaagcttggaaattctgacataggttctgacaatattttctttcttaaatgaaataaccattttagagacaagatcaatatgacccattttaatatggggtctgaatccactctttaagcaatggataactatggctacatagtaaataaagggtgatataattttccaagagctttgattcataactgttttagaatcttagaagcattgaaaaaattaatgaaatcatcagcctttaccccatggaaaaataataatcattttacaattttgtacattctgcggaggttaataatcctctgaaatctta

SEQ ID NO: 159794 - DNA, 578 bp, Homo sapiens
gtgtgtgtgtgtgtgtgwgagagagagagagagagagagagagagggaaacttactcattaaatttttcttgatttgctctggaatggtttctacccaaactaaaattgatatattgtattagtctgttaacacactgctataaataactacctgggaatgggtaatttatgaagaaaagaggtttaattgactcacagttctgtaggcttagtaggaagcatggctaggaggcctcaggaaacttacaatcatggcagaaggcaaaggggaggcaactacatcttaccatggcagagaaggagagagagagtgaaggggaaagtgccacacactttcaaataaccagatctcatgagaacacactctctatcaagagaagagcaagggagaagtccgctcctgtgattcaatcacctcccaccaagcccctccactgacatgtggggattacaattagagatgagatttgggtggtgacacagattacaattagagatgagatttgggtggtgacacagagccaaaccatatcacctatggattggttttataagtggagagtgatgttcgactaat

SEQ ID NO: 159795 - DNA, 619 bp, Homo sapiens
ttggatgagtaatgatatcagaagcaggagacttagacttagtgtaccgtattaagaaaagatattaatcccttgtattagttccctgaatctttcctgccttatctgtaaaactggcctaggaatatttcatctgctttatttagaatcagacaaaatattaaatttttattctaacaattatattcataatcctatgaaaatacaattctgaaatgaaaaaacacaagtacactttaatatgctctgtataggttttctaagcagtaattttatattttttgccatgtgtcaggagacttagcaaggtcatgggccaaatttggtattcacagtttctcacatccctctctttcagctttattgccttatatttttgtattggctaaaaaatgacactgtattctccacttccctatctataagaaaatcaagatgggtaatgggaatacttaacctgtgagaaaaatctcatccagagtcaaatcaatyagaaaatatttgaaatgcagatggtaacctagaggtggatttcaccctggagaattttgcccttgattgagcccttgctttgtacatgatccatcaattttataaagaatgttcaacatcattatta

SEQ ID NO: 159796 - DNA, 443 bp, Homo sapiens
tgtcagggccttgccacactgctgcacgaggtgcacacgcaggggctgggacatayagctctggccttgcctccaagtctgtctccaaaacaatgagctggggaagagaaactctgtacggtcctccctactcccttgcccggccggggttgtggtcaggccaccctgggaaagaggagcagcccagggcagctacagaggctcctcctcccacctggggagaggaatccgccttcagggagcagcccatgccctccctggcttctcctgtctggcatcacggctgcggcagagtctaagagaaaggctctcagccgggcaggaccaccaggcacacaagggggggatgggagttagaggtgccagccctgctcctgacctccctgacctccagcacataacagggaggccaggtccttgtctgacacacccagagaatcatc

SEQ ID NO: 159797 - DNA, 514 bp, Homo sapiens
ggctgacgctgccggcttctggggccacccttcggacgtggtctcagtcacacccaggctgacgctgccggcttctggggccaccattcggatgtggtctcagtcacacccaggctgacactgccggcttctggggccaccattgggatgtggtctccgtcacacctgggctgacactgccggcttctggggccaccattcggacatggtctcaataatcttcccgagctcggccagctcacmggagctcaagcttacaagtagttggtgtgtaatttgcatggtcagtagagacaaagaaaggcttcaaagccactgcacactcctgctgctctccagagataaagcgaggagagggtgacgatagccaatcagggcccacgccagtttcccagataggaaccatggccgataaacccgagaccacaggtgttccatccctgctactcagcccaaagcaacaaggaagcctgaggtgacaccacaaaatgcaaatttatctccaacgctgtca

SEQ ID NO: 159798 - DNA, 514 bp, Homo sapiens
ggctgacgctgccggcttctggggccacccttcggacgtggtctcagtcacacccaggctgacgctgccggcttctggggccaccattcggatgtggtctcagtcacacccaggctgacactgccggcttctggggccaccattgggatgtggtctccgtcacacctgggctgacactgccggcttctggggccaccattcggacatggtctcaataatcttcccgagctcggccagctcacaggagctcaagcttacaagtagttggtgtgtaatttgcatggtcagtagagacaaagaaaggcttcaaagccactgcacactcctgctgctctccagakataaagcgaggagagggtgacgatagccaatcagggcccacgccagtttcccagataggaaccatggccgataaacccgagaccacaggtgttccatccctgctactcagcccaaagcaacaaggaagcctgaggtgacaccacaaaatgcaaatttatctccaacgctgtca

SEQ ID NO: 159799 - DNA, 606 bp, Homo sapiens
gatagttaccttgtatactgcaatgagctactacttgttggaacgtagaaaactcccttaaggaaatttaagttttattctgtatatgaaaggctctgaaaatcaatttaactaccaatgatggctcccagctatcacataggatttatacacaaaagcataaaatagaatacaaagtgaatgtttatatttgtgaatagctttgaagaaacatatcatgaatgtcactagtctaatatgattagatcatgtaaaatatcattaaggtaataaatgtttatggtgattagctatgtaaaaagagcaatgtaaggattaccagaaatccttatcaattaaaaatcaattctacgtaacgcataacatgtaaaacatatatgcagccgaaaatcttaatgaaactttgacacattcttgggctactgtttagtgtgtggtcttaagatcatccgtttttctgtctctataaatatgccatactctattttaagttttcaatgtcatttgaatagagcattaytgctttgagacagcaaatcagatattctcataaagggtgcatttctaaaaaacaggcttattccaggttactacaagtcaaattga

SEQ ID NO: 159800 - DNA, 440 bp, Homo sapiens
ccacatcagaggaattaacaaaagacgatytgatggagatgaatgcttccaaatcagtgcccaaagatgaggaagaagatgtagaagaagcaatgccaagaaacaaattgacacaagataatctggcagaaaggttccaattattcaaaaacacttttgacttcttttaccacatggacctttctatgatttgggcactgaaactgaagaaaatggtggaagaatgattggtattatatacaatatttttagtgaaatgaaaaagcaaaaatgtaaaacataaattaggatgtattttcatagttacattgagtgtgtctacctctcctgactccccttccacttcttctgcttctgccagtcctgagacagtaagaccaactcctccctcccctttctcttccacagtctgctcaatgtgagggtggtgaggatgaaga

SEQ ID NO: 159801 - DNA, 390 bp, Homo sapiens
tctcccacagagtttccagaagaaacacatcccagctgatactttaattttagcttagtgtgacccattttggacttctcacttctggaactataagagaataaatttgtgttattttaagccactaagtttgtaataatttcttataacagcaataggaaactaaacaatatcttcagataatacttattgtaaattaatacctcagtatcatattatgactaggaactkgccccttaattgaaaaccaggaagaaatcaaaactaataatttaatcttcttcatttatagttttattgtgtttttctttctcctgctacatttcacttcttaattcaagttttttgtttcattaatcatacataaggaatgtgttttccacattgtta

SEQ ID NO: 159802 - DNA, 390 bp, Homo sapiens
tctcccacagagtttccagaagaaacacatcccagctgatactttaattttagcttagtgtgacccattttggacttctcacttctggaactataagagaataaatttgtgttattttaagccactaagtttgtaataatttcttataacagcaataggaaactaaacaatatcttcagataatacttattgtaaattaatacctcagtatcatattatgactaggaacttgccccttaattgaaaaccaggaagaaatcaaaactaataatttaatcttcttcatttatagttttattgtgtttttctttctcctgctacwtttcacttcttaattcaagttttttgtttcattaatcatacataaggaatgtgttttccacattgtta

SEQ ID NO: 159803 - DNA, 585 bp, Homo sapiens
tcagcaagaactcactggaagactaacattatggcagaagcaaagttaattttatgttagtttaatatgaataagccatggcttatctaccttttccatttttcctttaaagttcatatccgtacacacacacaactatcacattgtaagcgtaactccaacagagacctttgttggagactctacaataaaaaatactactttttaatgtaaagtattatgtttccacagttttccaacctgtcccttataacagttgcatcatggaggtrgtattaacatagttgtagccattcctcatgttaaaacacttagttatttccaattttatgccagtaagaatatgaaatctgttaaatatagatacagatggttacatatagaaatatttgtagatatatatgcatatgcaggttagtatacacacatttcgttctttactctgttggccaagagaaccaagaaatggcaccccagaagcaacgagcacgcctagctccaagacactggtttctaataccattctccagtaaaaggaaccagagctctttgggaaacagccgattctaagattgtggcaggaaa

SEQ ID NO: 159804 - DNA, 676 bp, Homo sapiens
gataggatggaaatagcacttcaccctgtggtccttctccacaaaacttgtaactcaagatgaaacctgagaaaagcattgcacaaattccagtagagggattcctatcatacacctggcccagcatgcctcaagaccttcaaggtcatcaaagacaggaaaagtctgagaaaatgtcccagccaagagaaggctaaggaggcatgacaatggaataggatttggatcctggaacagagacacggcatgaggttaaagctaaagagatgcaaataaagtgtggactttaataaaaacatatcartattgactcatgaactctaagaaatgtaccatactaatgaaagaggtaaattaacaggggagagggtgggcatggtggctcacacctgtaatcccagcactttgggaggctgaggtgggtggatcatttgaggtcaggagtttgagaccagcctgggcaacatggtgaaacaacgtttctaccaaaaataaaaaaaattagccggtggcacactcctgtagtcccagctatttgggaggctgaggggcaagaatcgcttgagtctgggaggcggaggttgcaagagccaagattgcaccattgcactccagcctgggtgacagagtgagaccctgtcacaaaaacaaacaaacaaaaaccaaaacacacaca

SEQ ID NO: 159805 - DNA, 676 bp, Homo sapiens
gataggatggaaatagcacttcaccctgtggtccttctccacaaaacttgtaactcaagatgaaacctgagaaaagcattgcacaaattccagtagagggattcctatcatacacctggcccagcatgcctcaagaccttcaaggtcatcaaagacaggaaaagtctgagaaaatgtcccagccaagagaaggctaaggaggcatgacaatggaataggatttggatcctggaacagagacacggcatgaggttaaagctaaagagatgcaaataaagtgtggactttaataaaaacatatcaatattgactcatgaactctaagaaatgtaccayactaatgaaagaggtaaattaacaggggagagggtgggcatggtggctcacacctgtaatcccagcactttgggaggctgaggtgggtggatcatttgaggtcaggagtttgagaccagcctgggcaacatggtgaaacaacgtttctaccaaaaataaaaaaaattagccggtggcacactcctgtagtcccagctatttgggaggctgaggggcaagaatcgcttgagtctgggaggcggaggttgcaagagccaagattgcaccattgcactccagcctgggtgacagagtgagaccctgtcacaaaaacaaacaaacaaaaaccaaaacacacaca

SEQ ID NO: 159806 - DNA, 615 bp, Homo sapiens
ttttgtgtctcgcttttttctttttgagagaaggtctgkctctatcgtctaagctggagtgcagtggagtgatcttggctcactgcaacctccacctctcgggctcaaaccacccttccacctcagcctcctgagtagctaggactacacgcgtgcaaccatgcctggctaatttctgtattttttgtagagatggggttttgccatgcggtccaggctggtcttgaactcatgagctcaactgatgcgcatgcttcagcctctcaaattgctggaattacaggcatgagccaccatgcccagcctggtttctttcactgagaactcaacctttatgttaattctatagacttttaagtaaaagaaaacaggaaatggaaataaaaaccaaatctgagtgtgctttgcactgaagaaatttttggtcattgtctaattcaataaatgtttcgtaacatttttacacatttattttggttgagtgtggttcagaaatacctactgtatgtagatgttaggttttatggagactattatctcgtaagagcaaatggactctttcaatgtttagaatgaacttgaaattgctgagcttaagcttgtaaaaattaagaa

SEQ ID NO: 159807 - DNA, 501 bp, Homo sapiens
tgccagtgattagaggggcctcctccaaggcttgtgaatgaacttggtaaggggagttcatctctcaccacctcctccatttcccgctcctcagagcactgctgtgaaagcactgaaatacaaaacaggtgctaagagcctagtgccatctagtgtgtcgcagcctgaattacaccacgaaacaaaaataaattcctccagcacgcattgctggtgaaaaccaatgcaggaaactagcctcaactaaggaacccatacagagccttggtcctctgaaagcacccagaaatgaaaccaagtgactatacgtaatatacarcactgtctataaaaacaacacacccttccaaatgacagcaacttcaaaaggataaagaaacaccagccctctcagttgaggaggaaccagtgcaggaacccttgcaattcagtaagtcagagtgtctccttacttccaaaggatcgaactagctccccagcaatggatcctaaccagactta

SEQ ID NO: 159808 - DNA, 620 bp, Homo sapiens
ggacatttccactgagttccaagtgtgcaaatcaagctcgacctgtctgtaaactaaacccataatcacycccatctaactcttcctcctgtatcaaccatcccctggaagctgtgaacattcatccagggtctggagacaaaatccagagagctgcttatttctccccgtaaactccaaatctctacacaaaagcaacttccaaagtctattctgtaagcatctcttaaatatgtcctcttttcttcaaacaaactgccaggactgtggttaggagccttttcttcaaacaaactgccaaggctgtgttaggagcttcataatttcttacctggattaccaccacatctaggttttgccctctaatccagtgttagcattcagactaggtgtcctcctccccagctgcaatgttgatcatgcctctcacctgcctaaagcttagcctctggataactgtcaaacattttttttcctcagtactcaggtcaaaaatatttctaataaatttttattgttttgtcttcttactgtatgttttgttccagcaaaagaagagtttctagagaaaggagaggattgatgggttcactggtgctcactggaaactatcaaatttg

SEQ ID NO: 159809 - DNA, 507 bp, Homo sapiens
atgaattctagcctaaaccaacatcaggtataactggagatgacaaaatgatggccctataatggacagcttctccgagctcctgagctgaccctctgctgaaygttaaagaaagggttaaagttggcagtccagtgctaaatgtgagaatgccaccagccacaggaaggtcagcctttcaaggcccttttttgcagggataaaagcaacaaaaataccatttgtccttatcagtgctttgaacatagttaccataagtccctccaatggaaacacaactttgagagttatgcttttcgtctgcctttgatgtaagttatagagtccttttgatccctttcttgtgattaattccaccaccaaagcaattctacattggttaaaagttcattagtgtacaacaatagaagcttgattaaataaattatggtacatccataccatgaatactaggcagccaataaaaatcatgcctccttagactatctaatcacataggaaaaagct

SEQ ID NO: 159810 - DNA, 359 bp, Homo sapiens
gtacattatccgggtgacagataccctaaaagctctgacttcaccactatgcaatctgtgcatgtaacaaaattacacctgtaccccatacatttatacaawaatttttcaataagtaaagattgaccagaagaagatttcaatgaagaagacagagaggggctggcccgagcagtaggagaagaaccagaggagtgtgacaccgaggaactgaaggaggagagtttcgaggaggaaatggtcagcagggtcaagtgccacagatgagaacaaacaaagcattcactgaattatcaccattgagaaatttactcaaataggcattcaacccacttttattgagcaccacaacatgccaa

SEQ ID NO: 159811 - DNA, 603 bp, Homo sapiens
aagcacaaatacctctttcacaattgtcatagttaaaaaacaattagtatacatacagcaccaaagttcggtccttgcagcaaaatctcacattactgtcctctattcaaatgtcactcaatatatctaacttaagtcagctaaataaaagaaattcacttttttatttttatttttttgagatggagtcttgctctgtcgccaaactgaagtgcagtagcgtgatctcggctcactgcaacctccgcctcccaggttcaagcaattcccctgcctcagccttctgagtagcagggactacagtcacacgccaccatgcctggctaattttttttttatattttagtagagacagggtttcaccatgttggccaggatggtcatgatctcctgacctggtgatccgcccgccttggcctcccaaagtgctgggattacaggcatgagcccccatgcccggccgctttcctttcttctttcttcacttatttttggcttttaaattttcttttcttttttcctttttttctattttcctttcttcttcttyttttttttttttcactgcaactgtaatagataaaacttctttcttttttttca

SEQ ID NO: 159812 - DNA, 410 bp, Homo sapiens
cagcaggtgaggtaatgctcccaccacccrccctgagggaatgtgcaggagattgggcgaggctgctgagagaaatgttctatattgccagaggataatgctttttattatttcagaaaccaatgagttttgtctctcaggctatcactctgcttctgttcatcaccaagtaatttcactaaaaatgaactcagaaatgaaaaataaaatggccattaaaaattttattactgtacatgcccagtggctattttaaaataaaatccctttgaaattttattatttacattttttccatcaaatggttgggattgtttgatggattaaatgaaactccactttcgaattatgttgctttttaactgccaaaaaaatgaggtattcgtttttagctctgcttctcatccaaa

SEQ ID NO: 159813 - DNA, 519 bp, Homo sapiens
gagaaacgcccattagtaatttccaagcatgcacacatgttataggttctgagggctcaggaacagttgcatgakgtccagagttcgattatgaagctgaggaatttactaatgtattcattcgttgaatatttcagtgtattttgcaagttggcactgtgtgagtgctacacttggctctacagtggttagcaaatctgacacagtcctcatggatcttacataagaggaaaaaactgacaaccaaatgatcacacaaatgagtaactacacagtatgcaatgctccacaaaaggagggtcatggtgctatcttcacgagaatataagcaccacagtggttttctttattttgttcattgatgtacctagaatggggcctcacacatattaagtgctaaataagtatttgttgaatgaatgaataaataaatgcatgaaagctatgagattacttctgagaggtcggggatgaattcctgaggcagtgttattttggctgatgttaaagagaaaaaaa

SEQ ID NO: 159814 - DNA, 578 bp, Homo sapiens
gattcagcctctagctctgcatcttccagcagctgaccttgggcaaattgcttaagttttctgagctccaggtttccctactggtaaaatgggaataatatttgtaattatcaagcttgtaaccaggattaaatgagatgatgtaaagcatttagcattatgctcatcaaatactatgggttgtggagaaaggacagaaacatacacattagcagtgctcatgatgtacattaaaaatagggaaaatgagcagagaagtagcagggtgttcattaggctctgaggtcccattatccctagagagatcccccagcacagggcacagacacaccatggaaagatcccaagagtgggaaaccatctttgcaaaaattgtatctaaggaaattatgatagtgaaagagaccaggcctaaccaactccaccttgcttctaacctttmagctgtccttgctcattcctggccataggccgaactaaccttgggaaggaatttagtttatggtttgattctgaaacaaaattgttaatagccctttccccacaagactcccttcttgcctggggacccgcctgcc

SEQ ID NO: 159815 - DNA, 544 bp, Homo sapiens
cgctggttgttgaagacctaggtcttttagcctgggtcaccataagtgatcttttttctctgaatttwaaaaaaaaaaaaagcataattacaaagcgtaattcttccctcattctccataatcccacagaaaactgcgtctaggtcagctcaaccttatcaacttatgcctcaactacatgggaaaaaactccccaataataactccccagtaataactcaatcatcttttaaagctgggtaagaaacatgcatcattaacaagctcaatgctcacagaaagacatggctgaggtagagtcctgaagcacgtatggaaaattttaaccccaccagcaaagacaccagcgaggttacccacacacatctctaagggccaggagagtgaccatcagtcccctaaaaaattggaaatggataatatgaatgcaaaattgctttcttcttcctttttggactgtggccattaccacccaaaaggccactggtgacccaaggaatgtcttgtctaaagcctaacactgatactcttgcaaaccgtaact

SEQ ID NO: 159816 - DNA, 341 bp, Homo sapiens
tctaaatggttggagaaaaaaagctgaagaattagtgctccctagcctcaaaatccagaagatgaaagaygcttaataatggtctttcagcacatgaaaaggagtgaggtcagcagctattctccccttccagtgaaggtagaatcagaggaaatgtatttaaattgcaagaaaatcaatttattacttggatctactttttagattttataaaatgactttactctaaagggatcaaggtgctcagattagatgagatagaattttctaaattcagtaataacgtaaaggaatggtccttggtgaaattatagttgctattttcacaattttaaaaaatg

SEQ ID NO: 159817 - DNA, 553 bp, Homo sapiens
tctactaacatgaatcgttttatgcatccaagacccgaatcaacacttagagaattatttcctaatatttgcatgaaggctcacaaaaacattaaaaccagtcatttaacattactttaactcttgctggttttgttattcaatattatttacttaatgctcgtgactttcacactttagttttccacataaacgtgtccttgtggaatactgctccttacaatttatttttatttatttatttatttattttaagatggagtctcccttgtcacccaggctggagtgcagtggtgcaatcttggctccctacaacctccgcctcctgtgttcaagtgcttctcctgcctcaacctcccyggtagctaggattacaggcccctgccaccacgcccagctaatttttttaatgtatttttaatagagatggggtttcaccatgttggccaggctggtctccaactcctgacctcaagtgatccacctgcctcggcctcccaaagtgctgagattacaagtgtgtgccaccactcctggccagctttttgaattc

SEQ ID NO: 159818 - DNA, 553 bp, Homo sapiens
tctactaacatgaatcgttttatgcatccaagacccgaatcaacacttagagaattatttcctaatatttgcatgaaggctcacaaaaacattaaaaccagtcatttaacattactttaactcttgctggttttgttattcaatattatttacttaatgctcgtgactttcacactttagttttccacataaacgtgtccttgtggaatactgctccttacaatttatttttatttatttatttatttattttaagatggagtctcccttgtcacccaggctggagtgcagtggtgcaatcttggctccctacaacctccgcctcctgtgttcaagtgcttctcctgcctcaacctccctggtagctrggattacaggcccctgccaccacgcccagctaatttttttaatgtatttttaatagagatggggtttcaccatgttggccaggctggtctccaactcctgacctcaagtgatccacctgcctcggcctcccaaagtgctgagattacaagtgtgtgccaccactcctggccagctttttgaattc

SEQ ID NO: 159819 - DNA, 510 bp, Homo sapiens
cttatcaagatttagctgtttttcttaatttataaacactccrcaggaacgcacaggcaattttctgaagttctgcgtaaattaatttggacagcttttgccattttagaaatttcttttatgtagtgtgaagttttggaggtcttagtccactatttttactgacatcattatgtttgtttgaaaagtcaatttggaaatagttttaaaatctgctgttatctttagcttgcctcaactggaaggtaacctcatctttggtttttgagggtatttttcctcagtcttcaaggagaactttttagttaaacacttgcattataggaaaacttttatttaagcactttgaagatgtcattccactgtctttttaattcttttatttttgagaagtgaactgacagtgtaactgttgcttttttgaagacaacatgcacccccccaacagcttttaagcttttcctttttagtaggtttgtgttctttttatttattctgtttagagtgtat

SEQ ID NO: 159820 - DNA, 510 bp, Homo sapiens
cttatcaagatttagctgtttttcttaatttataaacactccgcaggaasgcacaggcaattttctgaagttctgcgtaaattaatttggacagcttttgccattttagaaatttcttttatgtagtgtgaagttttggaggtcttagtccactatttttactgacatcattatgtttgtttgaaaagtcaatttggaaatagttttaaaatctgctgttatctttagcttgcctcaactggaaggtaacctcatctttggtttttgagggtatttttcctcagtcttcaaggagaactttttagttaaacacttgcattataggaaaacttttatttaagcactttgaagatgtcattccactgtctttttaattcttttatttttgagaagtgaactgacagtgtaactgttgcttttttgaagacaacatgcacccccccaacagcttttaagcttttcctttttagtaggtttgtgttctttttatttattctgtttagagtgtat

SEQ ID NO: 159821 - DNA, 510 bp, Homo sapiens
cttatcaagatttagctgtttttcttaatttataaacactccgcaggaacscacaggcaattttctgaagttctgcgtaaattaatttggacagcttttgccattttagaaatttcttttatgtagtgtgaagttttggaggtcttagtccactatttttactgacatcattatgtttgtttgaaaagtcaatttggaaatagttttaaaatctgctgttatctttagcttgcctcaactggaaggtaacctcatctttggtttttgagggtatttttcctcagtcttcaaggagaactttttagttaaacacttgcattataggaaaacttttatttaagcactttgaagatgtcattccactgtctttttaattcttttatttttgagaagtgaactgacagtgtaactgttgcttttttgaagacaacatgcacccccccaacagcttttaagcttttcctttttagtaggtttgtgttctttttatttattctgtttagagtgtat

SEQ ID NO: 159822 - DNA, 510 bp, Homo sapiens
cttatcaagatttagctgtttttcttaatttataaacactccgcaggaacgcacaggcaattttctgaagttctgcgtaaattaatttggacagcttttgccattttagaaatttcttttatgtagtgtgaagttttggaggtcttagtccactatttttactgacatcattatgtttgtttgaaaagtcaatttggaaatagttttaaaatctgctgttatctttagcttgcctcaactggaaggtaacctcatctttggtttttgagggtatttttcctcagtcttcaaggagaactttttagttaaacacttgcattataggaaaacttttatttaagcactttraagatgtcattccactgtctttttaattcttttatttttgagaagtgaactgacagtgtaactgttgcttttttgaagacaacatgcacccccccaacagcttttaagcttttcctttttagtaggtttgtgttctttttatttattctgtttagagtgtat

SEQ ID NO: 159823 - DNA, 536 bp, Homo sapiens
cagaagagcactggagtatcaacctgatttcaggcaggtggatccaccagtgctggtaaggaggggtcctaacatctcccctgcttagctctcctgcattttcagaggggtggtgtgggacatggggagcacctggtcacccccaccaggtarggagtgcattgcgggaggttatggactatttccaacacaccagctgtgagtagaccccacgcccagaatttttttttttcccctgagatggagtcttgctctgtcgcccagagctggagtgcaatggtacgatctcagctcactgcaacctctgcctcctgggttcaagcaattctcctgcctcagcctcctaagtagctgggattacaggcatgcaccatcatgcccagctaatttttgtatttttagtagtgacggggtttcaccatgttggccaggctggtcttgaactcccaatctcaagtgatccacccacctgggccttccaaagtgctgggattataggcgtgatccactgtgcccggaccccatgcccagaattc

SEQ ID NO: 159824 - DNA, 536 bp, Homo sapiens
cagaagagcactggagtatcaacctgatttcaggcaggtggatccaccagtgctggtaaggaggggtcctaacatctcccctgcttagctctcctgcattttcagaggggtggtgtgggacatggggagcacctggtcacccccaccaggtaaggagtgcattgcgggaggttatggactatttccaacacaccagcygtgagtagaccccacgcccagaatttttttttttcccctgagatggagtcttgctctgtcgcccagagctggagtgcaatggtacgatctcagctcactgcaacctctgcctcctgggttcaagcaattctcctgcctcagcctcctaagtagctgggattacaggcatgcaccatcatgcccagctaatttttgtatttttagtagtgacggggtttcaccatgttggccaggctggtcttgaactcccaatctcaagtgatccacccacctgggccttccaaagtgctgggattataggcgtgatccactgtgcccggaccccatgcccagaattc

SEQ ID NO: 159825 - DNA, 522 bp, Homo sapiens
agtatcaacctgatttcaggcaggtggatccaccagtgctggtaaggaggggtcctaacatctcccctgcttagctctcctgcattttcagaggggtggtgtgggacatggggagcacctggtcacccccaccaggtaaggagtgcattgcgggaggttatggactatttccaacacaccagctgtgagtagaccccacgcccagaatttttttttttcccctgagatggagtcttgctctgtcgcccagagctggagtgcaatggtacgatctcagctcactgcaacctctgcctcctgggttcaagcaattctcctgcctcagcctcctragtagctgggattacaggcatgcaccatcatgcccagctaatttttgtatttttagtagtgacggggtttcaccatgttggccaggctggtcttgaactcccaatctcaagtgatccacccacctgggccttccaaagtgctgggattataggcgtgatccactgtgcccggaccccatgcccagaattc

SEQ ID NO: 159826 - DNA, 416 bp, Homo sapiens
ttgcatcattactattccccagtgagcatcctggcacactgctgtttttcacactgctgtgggtatttctgaaggataggtgtctgtggaacggctgagcaggggtatacatacttcacacggtgctgcctattacctgcaggttcacacgcacacacacatagcagtgtacagcagttatgggctcaaatgaagaaaggcctttctcataaactgtccctttgcagattggactacctgggttgaatgagtgttcaagaatctggatgattaggatgctgtagcagggatttccaccctgaactcagcttgtgagaagctctggagaaaccccagggcctcctcctaggcggccggtcgccaagcagggcacgcttgtggaggyagtggattctccaggccagcctgagacagca

SEQ ID NO: 159827 - DNA, 450 bp, Homo sapiens
ttcaaaataaatctctggttcttcctacactctaagaaaaccccccaggaaagaggtttttttccccttctttccaaggtcagattattttccttttctcccccaaacccctccccctatacctacttctcttttacatataaaaaattttgttactttataccttttctctrtagtatgtgtgttatgccttctttcctcccatgaaagaaagatagttgatgtgatgatgcttttcattcactaaagaaagtgctaagtcacccagctagagggtctgaaaaggtgacactcctcctatcagaatagccaatggctaataaccatcactctaactttaggtatagattattattattattgagcgtattgcaccttggctgtttgcccagtatgtccttgctaactcagggtcacaaaaaagagtaattctctgccacaactcgataa

SEQ ID NO: 159828 - DNA, 317 bp, Homo sapiens
gacacaatcacctcccaccaagtccctccctggacacatggggattacaatttaagatgagatttgggcggggacaccaagccaaaccatatcagttgactaatgttagttttaatcttttggtataatcctaaactggaacagactaacctctactgttctcaatagggatgtcctatggcctgaactgtgttgcccctaacattcgtatattgaagccctaaccctcaatgtgacartattttagaacaaggttaaatgtggtcaaaaggctggggccctaatctgacaggattaatgtctttacaagaagagac

SEQ ID NO: 159829 - DNA, 317 bp, Homo sapiens
gacacaatcacctcccaccaagtccctccctggacacatggggattacaatttaagatgagatttgggcggggacaccaagccaaaccatatcagttgactaatgttagttttaatcttttggtataatcctaaactggaacagactaacctctactgttctcaatagggatgtcctatggcctgaactgtgttgcccctaacattcgtatattgaagccctaaccctcaatgtgacaatattttagaacaaggttaaatgtggtcaaaaggctggggccctaatctgayaggattaatgtctttacaagaagagac

SEQ ID NO: 159830 - DNA, 616 bp, Homo sapiens
tccatgttcccactctggatcaggagcctaggctcaggatgacagatgagcatgcattgtacaaagctaagatcagrctagtgagagccttaaagcaacttaaaacctcagaattgaacaacaaaccaacagaacttgaagttaatggaagagagtgcctattatatatatcaggtactgcacctattttataagttatatagagtaagatgggcaaatcacagatactgatggttagagaggacaaaaaaggagaaataactaagagaaaaaaaaaatcccagtaggcatttacagacctaggactgaaaataatctccctattaaaagagttattcgcagtggctcagcgaataactttgtgacgacttggagaattgacaaatcaagcctggtgcacgcatcaacaaccaagaagcctgggggtactgaagatgtgaacaggtgcacatctgctatcttctctggttacttaggaagagagccaaaactcagttaatgctcaaaaaggatttctagacagaaatactatactctcagaagtcaggggtctagtgaagggcatctgcatttcaacacaaagccatactcacctgaagcgagggtgcttgtttat

SEQ ID NO: 159831 - DNA, 616 bp, Homo sapiens
tccatgttcccactctggatcaggagcctaggctcaggatgacagatgagcatgcattgtacaaagctaagatcaggctagtgagagccttaaagcaacttaaaacctcagaattgaacaacaaaccaacagaacttgaagttaatggaagagagtgcctattatatatatcaggtactgcacctattttataagttatatagagtaagatgggcaaatcacagatactgatggttagagaggacaaaaaaggagaaataactaagagaaaaaaaaaatcccagtaggcatttacagacctaggactgaaaataatctccctattaaaagagttattcgcagtggctcagcgaataactttgtgacgacttggagaattgacaaatcaagcctggtgcaygcatcaacaaccaagaagcctgggggtactgaagatgtgaacaggtgcacatctgctatcttctctggttacttaggaagagagccaaaactcagttaatgctcaaaaaggatttctagacagaaatactatactctcagaagtcaggggtctagtgaagggcatctgcatttcaacacaaagccatactcacctgaagcgagggtgcttgtttat

SEQ ID NO: 159832 - DNA, 557 bp, Homo sapiens
attacaattctctgtcctgtatgggttaacaataagcctcagcctttttctaacaatatttgctttagatagagataataggtagtcaaataaataagtacttcgagggcagtactttgtgcccagtacgctatcaggaaccatggacattcggaaagaagtcaaagatgtcrtccctgcatttaggaaatgcacacacttgttggagagtaagaatgtatatttctgtatctacacagcattaaaaagatccacagtgggagagaggaatatggaagcaaaatattggacagaatgtgttattgacatagattcaactatctgtaccatagactttagaaaggggaagctaactttaggcagaagttagtcacataaggcttcatggaggaggggggagccttcagacgaaagtggaatttctggagttatattagaaaagggaaagtgttccagggagagaatggcacaagcaaagacactaaaatagtccctcctttattaatccattcagcaaccatttaatgagcacttagctcatatgaagaccagtaacc

SEQ ID NO: 159833 - DNA, 512 bp, Homo sapiens
ttgccattttgccagtaatgaaactaaagcataatcaggttaagcaacttgcccattttttttttcaatccaagacaatcctgatttggctaatcttgactgatattttggtgcttatatataaagagctctggattatttgtcaaaagtcttgagggggtgggcacagtggctcatgcctgtaatcccagcaccttaggagaccaaggcgggaggatcacttgaagccagaagtttcagaccagcttgggcaatatagtgagattcctgtctctgcccaaaaaaataaaaattagctgggcayagtggtgtgtgagtgtagtcccagctactcaggaggctgaggcggaaggattgtttgaacccagggcttcaaggttacagtgagctacaaatgtgccatcgcactccagcccgggcaatagagttagatcctgtctcaaaaaaaaaaaaaaaagaaaagaaaagaaaacaaaagtcttgggttctagtcccactttactgctgattaa

SEQ ID NO: 159834 - DNA, 388 bp, Homo sapiens
ccctgtctcacaaataaataaataaaataaaaataaaaatggaattcctacaagccatacacaaaaggcagatactgtgattccacttatataaggtacctgagtagtcaaattcatagatacagaaaataggatggtgggagctgggggctgggaggtagaaagaatggggaattactgtttaatgggtacacagtttcagtttgggaaaatgaaaaagttctggaggtggatggtagttatggttgcacaacaatgtgaacaccactgaatcatacacacaaaaatagttaaaatggtcaattttatgctacatatattttaacacacacacacacacacacacacacacamaaatctgtagggcatttccaggttggacaaccag

SEQ ID NO: 159835 - DNA, 562 bp, Homo sapiens
ccttggaacgcctcctctctgcctaccgcaacaagtttggcgagatccgagagtaccagcaacgctatggggctgagatagtgaggcggtacagggctggagcggggcccagccctgcaggcgacgatgtcacattccccgagttcctgagatacctggtggatgaggaccctgagcgcatgaatgagcattggatgcccgtgtaccacctgtgccagccttgtgccgtgcactatgactttgtgggctcctatgagaggctggaggctgatgcaaatcaggtgctggagtgggtacgggcaccacctcacgtccgatttccagctcgccaggcctggtaccggccagccagccccgaaagcctgcattaccacttgtgcagtgccccccgggccctgctgcaggatgtgctgcctaagtatatcctggacttctccctctttgcctacccactgcctaatgtcaccaaggaggcgtgtcagcagtgaccatgrgtgtggggccagcagctggtggggactggtttcaacgccagctttctgtgcttctgcctgtcattcgg

SEQ ID NO: 159836 - DNA, 508 bp, Homo sapiens
ggctgccctgcctgcccccaccagtgcccatgtttgccatctggggacttgaggataggtctgccccacccaatgtcaccactgccagtgctccaccatgccatccaggagtatgggggtcaatcctcctctctcactacagccagcacctgcatacaccattggagagcttaatgacagccctgccttgtctgccactgtcaatactcatgcatgttaccaggggcgtggggattgatctgtccttcccaccactacaacaaggcctgaggataggtccaccctaccggccactactgcctacatgcacctccctggggtgcatgggcatgggtcctaccaacaccactgacaccaaaacccacctgyatggccttaccacccacccttatcaccaccaacacccatgcatgctgctcagggacctaagggttgaccctagtgacagtgctactgtcactgctgatgtcatgcatgccactcaggagcctgacggccaacctgacca

SEQ ID NO: 159837 - DNA, 540 bp, Homo sapiens
taaatcttaattccatttttcatcactagctcaacatttactagtatcgtattgttgtatttgtagtatttgctgagtgagtgagattcagagatactgcatgaagtcagtgctccggaaggttaaggagagaggagatccctttagaccaggtaatcagatgtgactttctggggaggctaaaacttgagccggccattgaaggataggtggagcatggagaaaaatagtcattccagagaggcagcagccccagggtcagatttcatttcaggcttctactgcrtcactgaatttgtttccccaaacaaatctgtgctggtttggaattttatccacagtaatgaacattgacaaatgtagtttaagggaccagggtagaaagagaagtcacagtccttgctacaaagagtgtacaatcggaatgagaagatcaagctttcttttttattatttttgagacagtctggctctgtggcttaggttggagtgcagtggcaccatctcggctcactgcaacctctgcctcctgggttcaag

SEQ ID NO: 159838 - DNA, 586 bp, Homo sapiens
aaggatgctttccagagtccccagggtttggccggggaaagctccacctgagcgygaggtcgccagtgagctaccccgcagctgatcgctgaattcaggtgcaaagggtggcagggagaaaggcttgtccaggagtacctggaagctgggcacagcaagtgcctgtcccaccagcaaaggccttcagcagcttctctggcaacaggcaaattcctggagtctgggttgggccctcctccatgtagggctctcgtttcttgcccttcctggttccccctctccagtttctatctcgatgcagatcccctgccctaggggaccagcatgagggactatgtgctgaagagcagcaaggccagaagaagggacatcacaccaagaggcttagtaaggtggaggccaggcaccagccagcccagcatgctccccccaatcccctctgtctcatgtgccccttcccagccaagcccctgtgattcaagctcccatacttggcctgtgagcccagctctctctgcctgggaacctcttccaagagacagcgtttacagcaattaggtctcccttgacttctccgtaagagaac

SEQ ID NO: 159839 - DNA, 586 bp, Homo sapiens
aaggatgctttccagagtccccagggtttggccggggaaagctccacctgagcgtgaggtcgccagtgagctaccccgcagctgatcgctgaattcaggtgcaaagggtgrcagggagaaaggcttgtccaggagtacctggaagctgggcacagcaagtgcctgtcccaccagcaaaggccttcagcagcttctctggcaacaggcaaattcctggagtctgggttgggccctcctccatgtagggctctcgtttcttgcccttcctggttccccctctccagtttctatctcgatgcagatcccctgccctaggggaccagcatgagggactatgtgctgaagagcagcaaggccagaagaagggacatcacaccaagaggcttagtaaggtggaggccaggcaccagccagcccagcatgctccccccaatcccctctgtctcatgtgccccttcccagccaagcccctgtgattcaagctcccatacttggcctgtgagcccagctctctctgcctgggaacctcttccaagagacagcgtttacagcaattaggtctcccttgacttctccgtaagagaac

SEQ ID NO: 159840 - DNA, 586 bp, Homo sapiens
aaggatgctttccagagtccccagggtttggccggggaaagctccacctgagcgtgaggtcgccagtgagctaccccgcagctgatcgctgaattcaggtgcaaagggtggcagggagaaaggcttgtccaggagtasctggaagctgggcacagcaagtgcctgtcccaccagcaaaggccttcagcagcttctctggcaacaggcaaattcctggagtctgggttgggccctcctccatgtagggctctcgtttcttgcccttcctggttccccctctccagtttctatctcgatgcagatcccctgccctaggggaccagcatgagggactatgtgctgaagagcagcaaggccagaagaagggacatcacaccaagaggcttagtaaggtggaggccaggcaccagccagcccagcatgctccccccaatcccctctgtctcatgtgccccttcccagccaagcccctgtgattcaagctcccatacttggcctgtgagcccagctctctctgcctgggaacctcttccaagagacagcgtttacagcaattaggtctcccttgacttctccgtaagagaac

SEQ ID NO: 159841 - DNA, 576 bp, Homo sapiens
ataaaatcagaaatgaaagtaagaacatggccatcaaccctaacaaaatagaaaagattataagaatactatgagcaattgtatgccaacaaattaaataacctggatgaagtggacaaattcctagaaatacacaaattaccaaaactcactcaagaaaaagcagaaaatctgaacagacctataacaagagattgagagggctttcaagatrgttgattacaggcatctcttactcacttccttcactaggaagaactgaaatagtgagtagacaattacagttggaatagatcacccaagagagggcactggaatacaacagggaagtgacaggaaacatgtaaagcaaggaaggagaggaaagtgaggcaacctgcttggccaggatcagctgggagctgggagacttctgattgtgggaaaacggtaaatgagagacactcacctcaacccgcacccaggtgtccatagccaggggagagctctttgaccctagcagaacctgagaccaacacagagagctcccaggaaactacaaggaggtatttctccagaaagagagcttacattgga

SEQ ID NO: 159842 - DNA, 576 bp, Homo sapiens
ataaaatcagaaatgaaagtaagaacatggccatcaaccctaacaaaatagaaaagattataagaatactatgagcaattgtatgccaacaaattaaataacctggatgaagtggacaaattcctagaaatacacaaattaccaaaactcactcaagaaaaagcagaaaatctgaacagacctataacaagagattgagagggctttcaagatggttgattacaggcatctcttactcacttccttcactaggaagaactgaaatagtgagtagacaattacagttggaatagatcacccaagagagggcactggaatacaacagggaagtgacaggaaacatgtaaagcaaggaaggagaggaaagtgaggcaacctgcttggccaggatcagctgggagctgggagacttctgattgtgggaaaacggtaaatgagagacactcacctcaacccgcacccaggtgtccatagccaggggagagctctttgaccctagcagaacctgagaccaacayagagagctcccaggaaactacaaggaggtatttctccagaaagagagcttacattgga

SEQ ID NO: 159843 - DNA, 442 bp, Homo sapiens
cctcgatctctgccttgtcacatgctgttctccctatgtacgtggctctgcatccagctttcctcttcgaataaagacaccagtcacattagattaaggcccatcctaatgacctctttttcactcagtacatctgaaaggaccctatttccaaataaggtcacattctgatttacagggggttgagacttcaacatctgaattctggggggaygcaattcaacccacaacaatgaataagggggtttgctttggagcaatataaatgttttgggaccagaaagaggtagacaaagttataaatgtcctcaacgccataaaattgctcacttgaaaatgaggaattttatattgagtgaattttatctcaatcaattatttcaaaaaaggaagtggagcttgcagtggagcttgaatgatgtgtgacatcgcagagacccag

SEQ ID NO: 159844 - DNA, 520 bp, Homo sapiens
aatcattcactatttagtaaatatgtcccacatgtcaggcactaaccaggctccaactcgcactaatgaacaatacagttgtgctccctgctctcagggagcttacagtctagtggggcagacaggctttaaacaaggagrcacaaaagaaccacaaagtgtgatcgggatttcaaaggaaaagaacgggtctctataggagaggacaacaacagaaaaactgctcaggattagggtgtcatggaagccccttgcagaaatgctacttatcctgagatgtgaagacaagtagggttggtgtgggggagagcgtggctcaaggcaaaaagaccttaaagccaaaaggaggatcctgcccctgaaaggagccgtggaacaaagcatcatttgcaaagagaagagcagcaagagagggggtcaaagaggagtctggaccaccagaatgaagccttggaggccatagcaagggctgcacattttgtcctcgtgcaaagggaagccaaaaagggactctacacag

SEQ ID NO: 159845 - DNA, 520 bp, Homo sapiens
aatcattcactatttagtaaatatgtcccacatgtcaggcactaaccaggctccaactcgcactaatgaacaatacagttgtgctccctgctctcagggagcttacagtctagtggggcagacaggctttaaacaaggaggcacaaaagaaccacaaagtgtgatcgggatttcaaaggaaaagaacgggtctctataggagaggacaacaacagaaaaactgctcaggattagggtgtcatggaagccccttgcagaaatgctacttatcctgagatgtgaagacaagtagggttggtgtgggggaragcgtggctcaaggcaaaaagaccttaaagccaaaaggaggatcctgcccctgaaaggagccgtggaacaaagcatcatttgcaaagagaagagcagcaagagagggggtcaaagaggagtctggaccaccagaatgaagccttggaggccatagcaagggctgcacattttgtcctcgtgcaaagggaagccaaaaagggactctacacag

SEQ ID NO: 159846 - DNA, 637 bp, Homo sapiens
atacgtaattacatatgtatataaatagctgtaaaacatccttttcatattagtctaygattttggctcatccatcagtcatctgtcttagaccagtgtacatggctagtacattctcagtacagggaacgattttgccttacagaaagtcttttccttaacgagacatgttaaggagaacatgcccagaatttttgaaacataccatcagatgaatgcttattaacttacttttataaaatgacaatattctacaaattgtttcaccagcagtgaacctggttttgcccaggcatgaggcacagccacttttagagacttttaagcccctagccaccattagagctgcttctgaaaccaaggcatcactttacttggtgcaaatactttcaaagtaccaagcaatggaatagtaggaagtagaacacaggtctttgtgtctcattagaatccacatcattgtcttctgtgcagtcctcagataattggaagcagaatataagattgcgagtcatgtttctcatatataaaaagatgaaggcacttaatcctgtgcatggaaactgacaaaggcagcttttaaaggatagggcagactccgatggtgtaatgtaagtctttacagatatttctaggt

SEQ ID NO: 159847 - DNA, 467 bp, Homo sapiens
atctttctgacagcctttagtataaggagtgtcttttacgaaattagtgaataagtacacagtgtggcagctgatgcaataggaaacacaagaaatttataaatgaggctatatcatgacagacatattaagcaaaaggaacaacagatatgctatgtcctgggcttttcaagatttargactgccttccttctaatgaagagctcctgcatagaacagataatggttagcttattgtagatggggacaggaataaagaagatttttcctaacctgtgctagaagctagatagttagaaggaagtaattattttttttttcagataagagtaggctggctttatgtataggtcatgcgcttgtctttgtctgccttgtattgctataatggaaaaatacagactggatatttaataaaaaaataaatttattcctcacagttctggaggctgggaagtccaataatc

SEQ ID NO: 159848 - DNA, 615 bp, Homo sapiens
aattaaatttaactacatttaaatagtctatgatagtttgtttcttatccaattctcttccagtcccatacttttgataattcatagatatcctccattaaatactatagcaattcaatacccagaggagaaaaagtgtgacttcctcagaggagaaaaagtgtgacttttcaataggttgtttcacttttacaattccatcctaactaaataytacattaacataaaaaactacaacaacaataattagctttttggatctaaatattggcctaaatatttagaataatacagtgttagtatctgtcttatattgtctgtttctctaggattgtgcctgtttaaactacttttggaaattagtaccaacctaatgctgttaataattatgcatgccatcatgtcatgatacctaatggaatcataagttaaaatctttcattcaattcccattaacatagtctatgcactgtctcatctacctaataagtctttattgccttctgtagtataactttggattttctctactgctaataggaaacaattacttccactaaattcacttacactgttgcattgtataattccagagagcactattgcatcattgct

SEQ ID NO: 159849 - DNA, 615 bp, Homo sapiens
aattaaatttaactacatttaaatagtctatgatagtttgtttcttatccaattctcttccagtcccatacttttgataattcatagatatcctccattaaatactatagcaattcaatacccagaggagaaaaagtgtgacttcctcagaggagaaaaagtgtgacttttcaataggttgtttcacttttacaattccatcctaactaaatattacattaacataaaaaactacaacaacaataattagctttttggatctaaatattggcctaaatatttagaataatacagtgttagtatctgtcttatattgtctgtttctctaggattgtgcctgtttaaactacttttggaaattagtaccaacctaatgctgttaataattatgcatgccatcatgtcatgatacctaatggaatcataagttaaartctttcattcaattcccattaacatagtctatgcactgtctcatctacctaataagtctttattgccttctgtagtataactttggattttctctactgctaataggaaacaattacttccactaaattcacttacactgttgcattgtataattccagagagcactattgcatcattgct

SEQ ID NO: 159850 - DNA, 586 bp, Homo sapiens
tccccccaccaagctccagcatcccaggttgacttcagactgttttgctggcagcaagaatttcaagccagtggatcttagctttctgggctctggcgggggtgggatccgctgagcaagaccacttggctcccttgcttgaggtgttctaggcgcctctgaggtatgaaaaaaaaactcctgcagctagcttggtgtttgcccaaatggccacccagttttgtgcttgaaacccagggcccttgtggtgtatacacccaaggtaatctcctggtctgtgggttgagaagaccatgggaaaagcatagtatctgggccggaatgcaccgttcctcacggcacagtccctcacagcttcccttggctaggggagagagttccccaaccacttgcacttcccgggtaaggtgatgccccatcctgcttttgctcatcctccgtgggctgcacccattgtctaactagtctcaatgagatgaactcggtacctccattggaaatgcagaaatcacccaccttctgcattggtcttgctgggagctgcagaccagacstgttcctattcgacacattctaaagtcaagct

SEQ ID NO: 159851 - DNA, 612 bp, Homo sapiens
cattcattaaacagacatttattgggtgccaaatctgagacagaccccttgctggtttgcatttaaatatatcgtgggtatttaatgaggaaaaaggtatgaaattgccaaaacaacttagagtaagtaacatcaagctgccctcatggcctttctatacttccgcatcttggtggaggaagtattagtgataggggctgtgaagggctgtggtatgggcrtgcctgctccaagcccccagattatctggcagaaaagaacgaagagcaagaattaaaacccctccccaagggatccattcaagtaaatgttttagcaatgagtgagtgagatgatgaggcagtgtgggatattgggaagaacaagagttaggaactggggaaaaaaaaaaaaaaggctcaaatcccatccatggcccctgcaaagctctgtgatgttgagagagttacatcgattttctgaacgactatttcttcattatgaaatggagtttaaaaaatacctactactcaagcttgcacacagtgtcccgcatagtttttggcccatggtaagtaattaataaatatgatgtaattaataaatatgactttccttattactgtattgaca

SEQ ID NO: 159852 - DNA, 612 bp, Homo sapiens
cattcattaaacagacatttattgggtgccaaatctgagacagaccccttgctggtttgcatttaaatatatcgtgggtatttaatgaggaaaaaggtatgaaattgccaaaacaacttagagtaagtaacatcaagctgccctcatggcctttctatacttccgcatcttggtggaggaagtattagtgataggggctgtgaagggctgtggtatgggcgtgcctgctccaagcccccagattatctggcagaaaagaacgaagagcaagaattaaaasccctccccaagggatccattcaagtaaatgttttagcaatgagtgagtgagatgatgaggcagtgtgggatattgggaagaacaagagttaggaactggggaaaaaaaaaaaaaaggctcaaatcccatccatggcccctgcaaagctctgtgatgttgagagagttacatcgattttctgaacgactatttcttcattatgaaatggagtttaaaaaatacctactactcaagcttgcacacagtgtcccgcatagtttttggcccatggtaagtaattaataaatatgatgtaattaataaatatgactttccttattactgtattgaca

SEQ ID NO: 159853 - DNA, 612 bp, Homo sapiens
cattcattaaacagacatttattgggtgccaaatctgagacagaccccttgctggtttgcatttaaatatatcgtgggtatttaatgaggaaaaaggtatgaaattgccaaaacaacttagagtaagtaacatcaagctgccctcatggcctttctatacttccgcatcttggtggaggaagtattagtgataggggctgtgaagggctgtggtatgggcgtgcctgctccaagcccccagattatctggcagaaaagaacgaagagcaagaattaaaacccctccccaagggatccattcaagtaaatgttttagcaatgagtgagtgagatgatgaggcagtgtgggatattgggaagaacaagagttaggaactggggraaaaaaaaaaaaaggctcaaatcccatccatggcccctgcaaagctctgtgatgttgagagagttacatcgattttctgaacgactatttcttcattatgaaatggagtttaaaaaatacctactactcaagcttgcacacagtgtcccgcatagtttttggcccatggtaagtaattaataaatatgatgtaattaataaatatgactttccttattactgtattgaca

SEQ ID NO: 159854 - DNA, 588 bp, Homo sapiens
actccttggtatttatccaaatgaattctcacagaaacctacctactgatatttaaagcagctatatttataattatcaaaatttggaagcaaccaagatatccttcagtagataaatggataaataaactgtaatacagccaaacaatggaatattactcagcactaataaaagagctctcgagccatgaaaagatagggaggaaacttaaattcatattgctaaattaaagaagccaatctgaaaagactacctactgtatgattgaaactatatgacatttgaaaaaggtaaaactatggatacaacaaaaaaatccattgttaccagggkttcaaaggagagagagataaacaggtagagcatggataatttttagggtagtgaaaatactctgtatgatactacaatgttggatacacatcactatacattcttccaaacccatagatgttcaagagcaagagtgaatcctaatgtaaactatggactttgcattattatgatgtgttagtataagtttatcaagtgtaacaaatgtaacattcttatctccccctaaatgttcagcctctttagtagaagag

SEQ ID NO: 159855 - DNA, 625 bp, Homo sapiens
attcctgggactgtacaatgatgctagattaaatcaggaagaaatagaaaccctgaacacaccaataacaaatagcaagattgaatcagtaatttaaaaattgccaaaaacaacaaaaaagcctaggagcagatgaattcacagctgaattctaccagacattcaaagaattgctatcaatcctattgcaactattccaaaagattaagaaaaagggaatcttccctaaatcattctatgaaccaagtatcacactgataccaaarcccagaaaggacacaacaacaacaacaacaacaaaactgcaggccaatatccctgatgaacatagatgcaaatatctgcaacaaaatacaagctaacagaattcaacagcacatcaaaaaggtaatacatcactatcaggtgggtttcatctcagggattcagggataatttagtatacacaactcaataaatgtgatacattccataaacagaattaaaaataaaaatgatataatcatctcaaaagatgcagaaaatgaatttgacaaaatccaacatcctttatgataaaaaccctcaacaaacgaggcatagagaggacttatctcaaaataataaaagtcatttatgacaaacc

SEQ ID NO: 159856 - DNA, 625 bp, Homo sapiens
attcctgggactgtacaatgatgctagattaaatcaggaagaaatagaaaccctgaacacaccaataacaaatagcaagattgaatcagtaatttaaaaattgccaaaaacaacaaaaaagcctaggagcagatgaattcacagctgaattctaccagacattcaaagaattgctatcaatcctattgcaactattccaaaagattaagaaaaagggaatcttccctaaatcattctatgaaccaagtatcacactgataccaaagcccagaaaggacacaacaacaacaacaacaacaaaactgcaggccaatatccctgatgaacatagatgcaaatatctgcaacaaaatacaagctaacagaattcaacagcacatcaaaaaggtaatacatcactatcaggtgggtttcatctcagggattcagggataatttagtatacacaactcaataaatgtgatacattccataaacagaattaaaaataaaaatgatataatcatctcaaaagatgcagaaaatgaatttgacaaaatccaacatcctttaygataaaaaccctcaacaaacgaggcatagagaggacttatctcaaaataataaaagtcatttatgacaaacc

SEQ ID NO: 159857 - DNA, 587 bp, Homo sapiens
caaaaaataaaataaaatacctaggaatatacataaccaaggaggtaaatgatctctacaaggagaactacaaaatatttctgaaagaaataatagayaacagaaacaaatggaaatacaacccatgctcatggataggaaaaaacaatattgtgaaaatggctatactgcccaaacacatctatagattcaatgcaattctcatcaaaacaccatatcacttttcacagagttagaaaaaaaaatcctaaaatttatatgaaaccaaaaagagcctaaacagctaaagcaatcataagcaaaaagaacaaatcaggaggtatcacattaccagacttcaaattatactacaaggctatagttgccaaaacagcaggtaccagtataaaaataggcatatagaccaatggaacagaatagagaacccagaaaaaagccaaatatacttgcagctaactgattttcaacaaagcacacaaaaacttaaattggggaatggacaccctgtgtaataaatggttctgggaaagctggcaaggtacaagtagaagatcctcatatctcatcttatacaaaaataggctcaa

SEQ ID NO: 159858 - DNA, 587 bp, Homo sapiens
caaaaaataaaataaaatacctaggaatatacataaccaaggaggtaaatgatctctacaaggagaactacaaaatatttctgaaagaaataatagacaacagaaacaaatggaaatacaacccatgctcatggataggaaaaaacaatattgtgaaaatggctatactgcccaaacacatctatagattcaatgcaattctcatcaaaacaccatatcacttttcacagagttagaaaaaaaaatcctaaaatttatatgaaaccaaaaagagcctaaacagctaaagcaatcataagcaaaaagaacaaatcaggaggtatcacattaccagacttcaaattatactacaaggctatagttgccaaaacagcaggtaccagtataaaaataggcatatagaccaatggaacagaatagagaacccagaaaaaagccaaatatacttgcagctaactgattttcaacaaagcacacaaaaacttaaattggggaatggacaccctgtgtaataaatggttctgggaaagctggcaagstacaagtagaagatcctcatatctcatcttatacaaaaataggctcaa

SEQ ID NO: 159859 - DNA, 499 bp, Homo sapiens
ctttttttcttgtcaaaagttatacattagcagccagtgccagggagaggccatatcctgatggttcacacctgttgcactaaagtgttaattgaatgcagataccagggaaaagcaacttcccaggcatgtgcattaagagacaaaatggccgagtatgagcttccagggacacacccctgtaaaagggaaagaagcctcagatgggcttgtgtgtaacttcttaaacacactgcatgtgctcacttcccaaggrtaaggagggcaacgtgcatgcgggcagcccaccctaagggaagaatcacgggaaaggggccagcctataaagtcctaggatcaaggttgaacaccacactgggcctttatgtgccctcttcggtctcttccaagcatactttctctttctttccggttctaaaaccctttaaaataaacttccactcctgttctgaaacttccctcggcctgtttttctgccttatgcttctcagacgaattc

SEQ ID NO: 159860 - DNA, 603 bp, Homo sapiens
ctgtgtgtgtgtgtctgtgtgtgtgtgtagataattaaattggtgtccttgtggcagagggtgggggcaatcactggagtcttgtattctgccatatgctccacctctgtcccagccartaattttatatccagccaaactaagtttcataaatgaaggagaataaagtctttttcagacaagtacatgctgagctaatttgtcactaccagaccagtcctacaagaaatgctaaaacgagttctaaagcttaaaacacaagtacaacatgcactagaatagaacctcttgacatcctaaaactcacagggcctataacaaaataacataatgaagaaaacaacatcatggctggatcactacctcacacctcattattaacattgaatgtaaacgctgtaaatgttctacttaaaagatacagattggcagaatggataaaaaaaatcacaaaccatctatttgcgtcttcaacagactcacttaacacataaggattctcttaaactcagggtaaagaggtggcaaaagatatttaatacaaatagaaaccaaaagggagcatgagtagctgcacttacagcaggtaaaactgaatttaaa

SEQ ID NO: 159861 - DNA, 541 bp, Homo sapiens
aagaagatatcacaattctaaatatatatgcacccaactctagagttcccagattcataaaactgttattactagtcctaagaaaagagatagatagcaacacaacatttgggtggtatttcagcacttcactgacaccagtaaactgataatcaagacagaaagtcaacaaagaaacactggacttaaacttcactctagaactaatggattaacagatatttacataaaattctacccgagaaatatggaatatacattattctcatcaacacatggaacagtctacaaattagaccatgtgataggccacaaaacaagtcccaataaattttttaaaaatcagtattatgtcaagtatcttcttacatcacagtggaataaaactggaaatcaactccaaaaggaatcctccaaagtataagagtacatagaacttaaacaatctgatcctgaataatttttgtgttaacaataaaatcaagattaaaattttaaaattatccagaatgaatmataatagtgacataagttatcaaac

SEQ ID NO: 159862 - DNA, 555 bp, Homo sapiens
tatttgtgtacatatgtcccacccattaatgaaggcccaggagagtttatgaagtcactctacagaccaaaaactggcaaccactgagcacatcccaatttatcctccactctgacttccttaattttgttctaaggtttcaggccacactcctctgctcatataaaactaattttactaattttttaccagtaaaattttatgagccatggtgatcaagtacttcagtaagatcccaatatgcagttcatgatgcattttctttattattttggaaatgagtgttgcacagccataaagtttgttgaatataatttgtttggagtaatcctgtgttatttttatctaatgatttatctatcttttcaaagcttgttgatttatacatttttttcattayaatgcaatggaacaattcaggctaattttagatttattagatggtgatttttttggatattattttatttcagacaaggctttatttccgttgttctattttgctgtttttaaacaatccaaaacattttagcatgaatatgagcgaattctcac

SEQ ID NO: 159863 - DNA, 486 bp, Homo sapiens
tgagttaatttttgaatatgctattaagtaagggcygaattcaataattattttgcatgtggatatccagttttctcagcatcattttttgaaaagactgttttttccccattaaattgtgttagcaccgttgccacaaattatttgaccatacatgttagggttaatttctaggctctctatttggtttctttggtttacttgtctatctttatgccagtaccatgcttttctgattactgtagctttgtagtaagtcttaaagtcaggaagtatgagtctttcagctttgttctttatcaaagttgtttcggctattcagagtctgatatatcaagtttggatatttgttccccacaatgccatgttgaaatgtaatccccagtgttggagatgaggcctggtgggaggtgtctgggtcatgggggcagatccctcatggcttggtgctgtcctcaccatagtgagtgaggtctcacgagatct

SEQ ID NO: 159864 - DNA, 560 bp, Homo sapiens
ccaccacgcttggctgatattaacaagacaagtctttaacatgcccaaacctgtctgtaaggactgaaaaaggtgcttgctccttcaaatacaaggctacatggattacatcgaatacaccagatacagaaaaatataaatattgcatggtctcacttatatgtggagtctaaaaaaatcaaattcatagaaacagaaagtaaaacagtggttatggagagcactgagggatgtgggaagatatagatcaaaagatgcaaaactgcagttaygtaggatgcataactctagagatttggtgtacagcatgaagactataattagcaataaaacaataaaaggtacacaataaattttagccaaaaccctaaaagcttttttccattaatagtttgtaatttattacttttataatattctctctaaatacctgtttcctttctgagatctcttaagtgcagggtttttaaaaataactattacattattaatagaataccagcagacagaatcattcagatgattgtttacaagcatcattgtgaacaatacaacattga

SEQ ID NO: 159865 - DNA, 560 bp, Homo sapiens
ccaccacgcttggctgatattaacaagacaagtctttaacatgcccaaacctgtctgtaaggactgaaaaaggtgcttgctccttcaaatacaaggctacatggattacatcgaatacaccagatacagaaaaatataaatattgcatggtctcacttatatgtggagtctaaaaaaatcaaattcatagaaacagaaagtaaaacagtggttatggagagcactgagggatgtgggaagatatagatcaaaagatgcaaaactgcagttacgtaggatgcataactctagagatttggtgtacagcatgaagactrtaattagcaataaaacaataaaaggtacacaataaattttagccaaaaccctaaaagcttttttccattaatagtttgtaatttattacttttataatattctctctaaatacctgtttcctttctgagatctcttaagtgcagggtttttaaaaataactattacattattaatagaataccagcagacagaatcattcagatgattgtttacaagcatcattgtgaacaatacaacattga

SEQ ID NO: 159866 - DNA, 587 bp, Homo sapiens
tagcctctctttcctctgtagttattccgacttttttctctagctgccttgaagatcttttctttgtctttggtgctctctggtttcatatcaatcttttaaagcatagatttcattctatctgtcatgtttgctgttcattatactccttaattctgaagattcatgccctacagaaattctgtgaaatttgcaaccattttttgcctaaatactgcttttctcatactctgcttattctgtttttttagaacttcaattacataaatattagatctactaattttatattcttcatttattagcctatctttgagatttttttacatctctgagttgcattctgagtaatagctatcagtagatagctcaagtaaaatcataacccttatgagatttgtgcaggtggagtagtggtcgtgagagactagatggcatcagctttacccactagtccatcacttctcacaggttctcattgtggtttctctggaccagcagcatcacatcaccacaamgcttgttagaaatgtaactttctagaccctaatccagacctactgagttagaaattctgatagtggagc

SEQ ID NO: 159867 - DNA, 570 bp, Homo sapiens
ttgattattttcatcaggagtcttttgaatattctgtttaacccagtaattcaacctgttagaatctgtcttaaaaaataattagaaatataagtaaagatttatgtataaggaggtttcgctatttttaaaacagtgaaaattcagaaattgtagcttaaatagctctaatagtaagagaatggctaaattatggagctaataatgtagattctaatgattttaatcattatatgactgtttaattattttatataaaattcctatgacaaaatgcaaggtggaaaagcaggatagagtattaatactaagtctataatttatagaacctgatcatcagcatttgggtgtgttttattatcttccattttactataaatatacttgtgtgtctacacagaatcgagayttttatatgtacagtcatctgcctgtattcatggggtattggttccaggacccttgcagataccaaaacttgcagatgttcaaatcccacaggtggccctgtgaagctctcaatataaaagttggcccttcatatccacaggttctgcatcacatgtcaat

SEQ ID NO: 159868 - DNA, 557 bp, Homo sapiens
ccttccccctttgctcttcctattggagcccagatttcaatcaagcacccaccattttccacatagccatatgcttctgaagaggtgagcccttaccccggtygcagagagagaatcacattctaaaagaggcaatgatctcattctttctgccagtgattgaggtcaagtgatgatatttggaaaggaaaatttgttcacacaatacaaattcccataggatggtatttctaattttgttccctgcaatgatgccattacgggctcaggttcgttttatctttcttctctgccactttcaacaggttgactttatcccccgcctggacctgattctttttaagatggcaaactaccagttcctagatgtcacctgcaaataagaaaatggcagacagaaatttttgctaataagttgttaggaaaaagtttttttagtgttattgtaaatgatttatcttgccaatagaaatagatatcacgccaataaaaatagattaaaaaaactatctcctctgcaacattaccctattctttatatgtgacagcaggaacgt

SEQ ID NO: 159869 - DNA, 557 bp, Homo sapiens
ccttccccctttgctcttcctattggagcccagatttcaatcaagcacccaccattttccacatagccatatgcttctgaagaggtgagcccttaccccggtcgcagagagagaatcacattctaaaagaggcaatgatctcattctttctgccagtgattgaggtcaagtgatgatatttggaaaggaaaatttgttcacacaatacaaattcccataggatggtatttctaattttgttccctgcaatgatgccattacgggctcaggttcgttttatctttcttctctgccactttcaacaggttgactttatcccccgcctggacctgmttctttttaagatggcaaactaccagttcctagatgtcacctgcaaataagaaaatggcagacagaaatttttgctaataagttgttaggaaaaagtttttttagtgttattgtaaatgatttatcttgccaatagaaatagatatcacgccaataaaaatagattaaaaaaactatctcctctgcaacattaccctattctttatatgtgacagcaggaacgt

SEQ ID NO: 159870 - DNA, 557 bp, Homo sapiens
ccttccccctttgctcttcctattggagcccagatttcaatcaagcacccaccattttccacatagccatatgcttctgaagaggtgagcccttaccccggtcgcagagagagaatcacattctaaaagaggcaatgatctcattctttctgccagtgattgaggtcaagtgatgatatttggaaaggaaaatttgttcacacaatacaaattcccataggatggtatttctaattttgttccctgcaatgatgccattacgggctcaggttcgttttatctttcttctctgccactttcaacaggttgactttatcccccgcctggacctgattytttttaagatggcaaactaccagttcctagatgtcacctgcaaataagaaaatggcagacagaaatttttgctaataagttgttaggaaaaagtttttttagtgttattgtaaatgatttatcttgccaatagaaatagatatcacgccaataaaaatagattaaaaaaactatctcctctgcaacattaccctattctttatatgtgacagcaggaacgt

SEQ ID NO: 159871 - DNA, 580 bp, Homo sapiens
ctatgaggttttatcagcagggaagggtaggagtcacttcagctcccctgccaggtcatcaggaaagctatccacctctcagattcatttcttccccagtgttctggctattcagattagacaagcacctcttttcatctgtaggaatgttgatgttccaaktaaagaggaattgtgactcagcctctcatgcaagcctgaacctggggggtactcctcctgtgaggatgcagtcactctgaagtgtttcaggaaagatgtctataggtgcatctatgccaagctcccatgcgagaagccccagctatgtctgcagtggtggacaagaggggaaagaagccccttctccacgactgttcacaaacaccaaagctacctggcttttggagaagagctactgactttccctgctaagcctagcaatgaaattgtgtctctgctgaaagtaacttcccacgagtggaaagatctaggactcaaggcctcccatctggattcttttgtcctgtggggtgttcccttgatgtggtgctcttccccttctcctaaaagtaggagttcttgacagccaaattatatg

SEQ ID NO: 159872 - DNA, 580 bp, Homo sapiens
ctatgaggttttatcagcagggaagggtaggagtcacttcagctcccctgccaggtcatcaggaaagctatccacctctcagattcatttcttccccagtgttctggctattcagattagacaagcacctcttttcatctgtaggaatgttgatgttccaattaaagaggaattgtgactcagcctctcatgcaagcctgaacctggggggtactcctcctgtgaggatgcagtcactctgaagtgtttcaggaaagatgtctataggtgcatctatgccaagctcccatgcgagaagccccagctatgtctgcagtggtggacaagaggggaaagaagccccttctccacgactgttcacaaacaccaaagctacctggcttttggagaagagctactgactttcyctgctaagcctagcaatgaaattgtgtctctgctgaaagtaacttcccacgagtggaaagatctaggactcaaggcctcccatctggattcttttgtcctgtggggtgttcccttgatgtggtgctcttccccttctcctaaaagtaggagttcttgacagccaaattatatg

SEQ ID NO: 159873 - DNA, 419 bp, Homo sapiens
cctcctgcattactccaataaaagcacccagctaagctctaagcagcctgagttaagaactccacctgtcccaggccataagctttccctgtggtgatagcaactgtagcaattgtaccattcagggcatgcccctttccatctgtatgcaagtccaggtgcccagttcctgtgctggtggctgcagcacacttctggctcacccctcaggttctggccaagggagtttgtccccacttgatgttatattgcagaattcaattggaagcttctatcaacctgtaacctctgcctgagctagctggctgacttccccaaggtctcctgtgacatataataaggaatggcytccctaggttggcactaaagactgggaatgcctgccaggcattttccaccgccgtttcttcttttatatt

SEQ ID NO: 159874 - DNA, 578 bp, Homo sapiens
tagaacacaaaatcagcaaagaagaatcagtagcatttttgtacaccaatagcaaacaatctgaaaaggaaattaagaaagcaatctcatttaagacagctacaagaaatataatatatctaagaataaatttagccaaagatgtgaaagatctatagaaagaaaactataaaaaggtggttttgaaaattgaagaggacacaaaaaaatgaaaagatagtccatgttcatattcaaataatattgttaaaatgtttatactaccaaaatgatctccaaattcaatgtaattcctatcaaaatacaaatgatgtacttaacagaaatagaaaaaataatttctaaaatttttatggaacaacaaaaaatcctgaatagacaaagcactcctgagcaaaaggaacaaagctgaaaacatcatactacctgacttcaaaaatatattacaacaccaaagtaacgagaagagcatgctactggcataaaaacagacacacagaccaatggaacagaatagggaacctagatacaaatccacatayctacagccaccttattttcaacaaatgtgctgtgtt

SEQ ID NO: 159875 - DNA, 553 bp, Homo sapiens
tagtgagaactcactcatcaacaagaggatggcactaagccactccttatggatcygcccccatgatccaatacctcccactaggccccacctccaatattggagatcacatttcagcatgagatttggaggaacacacatctaaacaatatcagacagtaagaacatacgtttggggaaacagcagtctcgtcaatagatggtgctgagaaaactgattaaccatatgcagaagaatcatgctagacccattttctccctttatacaaacattgaatccaaatggattaaagtcttaaatgtaagctgtaaaactatgaaactactagaaaatagtgagaaaatgcttcaggacattggtcttggcaaaacatttttgagcaaaacctcaaaagtacaggtaaccaaagccaaaatagacaaacaggattacatcaaactaaaaagtttctgcacagcagaaacttgacagtgaaagctgacagttgattggttgtcaccagagactgaggaatatagggtggggtgaagaagagagatgagttgatgggca

SEQ ID NO: 159876 - DNA, 522 bp, Homo sapiens
aaacatcttgaatgtcaaaggtataaacgatatatttgacatgttttartggttcacaattatagatgcacagtgatcttaacttgttagagattattttatagattatcttatctttggaataacacagataaattatctcacagggatgaaagctaggtatagaatacattaaattagagggttcagccacttcgcttactcctcctgagtaaatttgaaggtttattaaaaaataatgaataaaatgcctgactgcattagaaacttcgattgagcagatacattaattaatggtagcatgcttttagtcacaatttctctccaaattaggattagaattattttctaaaaaagaaggatctcaaatcagtaacttactttacattttgaggagctagagaaagaagataaagtaaacctaagtctagcagaatgaagggcacagtagtaataaataaaatacggaatagaaaaacaatagagaaaatcaataaaagcatagcttcattcttttaaaag

SEQ ID NO: 159877 - DNA, 487 bp, Homo sapiens
gggtctcgggggatggcgggctctgggccaatggcctcagtgaggactgccagggtctgaaggttgggcacagagttcccggacgccaaacactaggtcagagaaatggcttttctgtgacccctgaccccacattctratttaagggtggccaaagtaggcctggccctggctggcctggggattgagctgagagcccagaagaaggctgaggcctgaggcctgggggactctgggctcctccaggccgcggctggacatccccctgaggcctggcccaggctggcgagggccggaggctgtgtccggctcctcggcaggcctggtggccggagcgtttctctgggccgctgtgcggtgcctgtggtaatgggctgttggcgttttgcaatgggccgggggtggggaggcggcgcacacatgcttcctgtggtgactgggcgcttcctgttttctcaggcgccggccttgctgctgccgatgtgga

SEQ ID NO: 159878 - DNA, 585 bp, Homo sapiens
ggactaatggaacacagaggtcagatgtccccaaacagaatctctgtttttgctctttactgtacttgaaccaccccaaattcaatactagttgcattcccaaagggaattcactcacactagaagcattaatgagcaacatagattttgttgaaatttttgcracagaatagactttacatcacacaccacaaagcaaaatgctcaaaaatcctcatgtgacaagttatcctaagtctcctcttctcttgccattccctctgggaatttggcctctctcttgcaggatgcccctccaaaacctcaattcttcaccatgttattgggcttttctctcggaagtgtaaatcacaacttaccagagttgtcaacaaataaagagccctcaaaaagtggaagtttttatcctattattttctcacaatttggttcactattgaagtttctaagttttgcacggcttagctataattaagtacatatggcattatttcaacttggcaaccacagctactattttcttgctacttatactcctataatcagcaccaagaagacagtcaggttccattaaatgtatgggtt

SEQ ID NO: 159879 - DNA, 582 bp, Homo sapiens
tgtctttctcaaatatatgcttttaagatttagtcaatgtggcttaatcttaattcaatttcattcattcattttcattgttgtacaccttattttaatgtactacagcatattcacacatttcactctttttttttttttccattttttgagacaaggtctcactctgtcacccaggctagaatgcagtgcacaatctcagcacactgcaacctccacctcccaggttcaagtgattctcttgcctcagcctcccaagtagcagggattacaggcacccgccaacatgcccggctaagttttgtatttttagtagagatggggtttcaccatattgtcaaggctggtccaaactcctgaccacaagtgatctgcccaccttggcctcccaaagtgctgggattacaggcatgagccaccacacccagcctacatatttcactcttaatgaacacgtgggttgtttacaacttgggttttttttttaaaaatgctgctgtgaacatyattcatgaatgtggttttatcttggtcatcaagcaaatgagttttcagggaatatgcttacaagtaaaattgctg

SEQ ID NO: 159880 - DNA, 623 bp, Homo sapiens
ttcagattttacacttccaaggagcagttgaagtccttttaattcaattatattttcaacagcccagagggacaattctaaaaytcttaaaaaatttttttaaatttgtgggtacatagtaggtgtatatatttatgggaaacataagatattttggtataggcatgcaatatgtaataattgcatcaggataaatggggtatccatcatctcgagcatctttcttttgtgttacaagcaatccaattaccctcttaggtatttttaaatgtacaactaaattattaatgactacataaacagaactaaagacaaaaaacacatgattatctcaatagatgcagaaaaggcctttgataaaattcaaaatcgcttcatgttaaaaactctcaataaactacgtattgaaggaacatatctcaaaataataagagctatatatgacaaacacacagccaatatcatactaaatgggcaaaagctagaagctttccccttgaaaaccggcacaagacaagtatgccctctcccaccactcctattcaacatagtattggaagttctggccagagcaatcaggcaagagaaagaaaaaaggggtattcgaataggaagagaagaca

SEQ ID NO: 159881 - DNA, 623 bp, Homo sapiens
ttcagattttacacttccaaggagcagttgaagtccttttaattcaattatattttcaacagcccagagggacaattctaaaactcttaaaaaatttttttaaatttgtgggtacatagtaggtgtatatatttatgggaaacataagatattttggtataggcatgsaatatgtaataattgcatcaggataaatggggtatccatcatctcgagcatctttcttttgtgttacaagcaatccaattaccctcttaggtatttttaaatgtacaactaaattattaatgactacataaacagaactaaagacaaaaaacacatgattatctcaatagatgcagaaaaggcctttgataaaattcaaaatcgcttcatgttaaaaactctcaataaactacgtattgaaggaacatatctcaaaataataagagctatatatgacaaacacacagccaatatcatactaaatgggcaaaagctagaagctttccccttgaaaaccggcacaagacaagtatgccctctcccaccactcctattcaacatagtattggaagttctggccagagcaatcaggcaagagaaagaaaaaaggggtattcgaataggaagagaagaca

SEQ ID NO: 159882 - DNA, 601 bp, Homo sapiens
ataataatgtcttaacttgtgaatttaaaaaatagtatgatgaatcccaaattggacataatagaaaatgatagcatataaaccagggagaatgtgattaggctgttatgttttgtttctgaagaaaatagaaataattaattgtagactttacattaagtatacatattctacttttaagaataacaatgaaaaaatagagtgcataatttccaattcgagggaataaatgaaatttttaaaaatacattattatatcatagaaacagtaacatactgttktataacatatatagaataaaatacatttattatgttaacagtgttatctctgaagccatacaataaagtggttaagaagataggaactggaatcaggcagcctgggttcaaatcttacccccagtactcattagctgtatgttcttgggcacatctgtgttttctgtttctcagccttctcatttgtaaactagagattataacagtatatatcttatagggttgtttcatagttaatgagttaaatgtaaattcttagaacagaaactggtatagagtaaatgctcacaatattgccaagatttttgtaaaaatggaa

SEQ ID NO: 159883 - DNA, 439 bp, Homo sapiens
taaatctcccacagtcctaaaaatgttttactcatataattggsgtcactttgctatggcattaaaacattcttagacgcaaaggtcatatcagcaagaattctttaagcaccatattggtattttgaggtgttcaaataagcagaagccataaacacctctctttagttcacaattttaggtaggaaaagaagatttgttgatataatataatagacttccataggacagtaaatcaaaaatcagttaggattttaataactttggtggttttaaaacttgtctgaagattcttagacactctttatagcacaattaggaggttaatattccttctcttcaatgtgatccagctttaatgacttccttttaatgaacagaatgtggcaggagtgacactgcatgaggctaactctttggaggtgacacatttatcctg

SEQ ID NO: 159884 - DNA, 581 bp, Homo sapiens
attgatcggtggattcaaaaattcaaagaatgtaatattgctgcaactaatttaatattttttcagagaataaagttgcaggacttggaagacctaattctgagctactgtaatcaagaaatgatggagtttgtataaaatatagataattgtaataggaaacagtatccacagagagaccaatcaaattatcattgattgattttctactaaattgcaaaagtctttcaataacctcttcagcaaatgatgttggaacaatttaaaaatgatatgcaaacaatgaatttttgtcccatacatggcaccataaacaaaaattgatttaaaatatgttaaaggctcaataaatgtaaggctaaaactatraaacttttattaaaacccaggagataatatgttatatgagcttggcataaatttcataagtaagacataaaaatattaagaattaaacggcaaaagaaaccaagaaactgacttataaaagtgtgtgactgctcaaaatctaaaatgaaccttgggctcccaaaattttatgggcaagaagaaaacttagaaatcgttgcagccttcaagca

SEQ ID NO: 159885 - DNA, 598 bp, Homo sapiens
ttgtctcctgtgtacaatttctaaacatattttattagtcttacatcctgagttcatattagatgatattataaaacaattttaatataactataattgtttcaacttcataaaaatataattgattttgggggtttgtttttatgrttgatgtttttctcctatattgatatttatgtaatgctaggcttattaaatgtgttgcaaattgttccaaacaattatttttcctctgttttctgaaatagattgtatgagattgaaattatttctgtaagtgtttgataaagtttaccaatgcagcctacatatcttggcatttgctttccagaaagattttatttataaattatttattaagttcagaattattatttattatttctcttttgttcttgagtaaattttagtaatttgagtattttaaagaatttttctacttcatctatgtttattggcataaagttaaatcatattttcttttagtatctttagaatatcttgggatgtcttcttgttcatttgtgatattggtcatttgtgtctttattttcccttgatcaatggagctctaggtttctcatttttatcaatcttt

SEQ ID NO: 159886 - DNA, 562 bp, Homo sapiens
tggcctatctgtactcatttagtaattaactctagaatcagctattgaataacattcacaaattttattagattttaaaagtaatatgaattaattgcagaaataataaaatataaaaatcttttaaaatatagacaaatactgcttacaaagatagccaccattagcatttcagagcatattgtgtttttctttttctttcaacaaaattgttcatatagtatttgtattgtttggcattctactcttgtaactgaactaatcataaatatgtcccaaatatgtcactaaatatctgtaggtaagatgtrttttcatggtaaacctaattatggatgcttaggttgtttgcaacaaaaaagctcacatcatgctaatgaagtaacagtctattttggtaggggaaaaatgacttttactctttgtaaattttgctgggtactgtgagacttacataatatatattcaatacatatacatgtaatatgtactcagtaaataattgttagttagaaagcaggaatatgtggagaatgatatctgctacgttcattttaaaact

SEQ ID NO: 159887 - DNA, 598 bp, Homo sapiens
gacaacattggtggaattggagaacattatgctaagtgaaataagacaaaaatagaaagacaaacactgcatgtctaagttatatgtggaatctaaaacaattgaagccatggaagtatagagtagaatagtgattatgaggggttgggggagggggytgggagaatggggagatgatattcaaagggtacaaagcctcaggtagaaaaatacatatttttagaaaaatagcacagcatgctgaatatagataataattgagtactgcacatttcaacattactgagaataaatttgtaatgtcctcatcacaaaaagtcaaaattgttttattcaaacaaagttttcaatatgatatacaaattaatatattgactagatacattgaagggttaatagatgaagtaagagacccttccaaaaattcagacagatgcagtgccatgggaagtattgccaatatgcaactaatactcacagaaaaagggagcagagaacacacagcaaaaaatatatatatcaaataaacagtaaaagaatggtctaaagaattctgaaacatataaattaggaaagtccaaactttatgtcatagtga

SEQ ID NO: 159888 - DNA, 336 bp, Homo sapiens
tgtacatcaatttcagaagaaatgacaatttactacattgagcctttcaatccatgaatatggtatggctttttatttatttaaatctacattaatattgtttatcagtggttgcaaattatttttttctgttgatttccatgtgttcattaattgtatatagaaatataattgcttttgtatataagtcttctatcatgaaactttgctgaacacacttattagttctatttgctatttactatattactcggtattttctctgaagatgatcatgctatctccttgtakggatagttttattactttctttgatgtgtatcactttatttttgt

SEQ ID NO: 159889 - DNA, 584 bp, Homo sapiens
agaaaagggaatgcttatcattgttggtgggaatgcaaattagtttaacctctgtggaaaacagtatggagatttcttaaagacctaaaaatagaaataccattcaccccagcaatcccactactggatatctacccaaaggaaaataaattggttttctaaaaagacgtctacactgctctgtttatcacagcagtattcacaatagcaaagtaacagaatcagcctaagtgtccaccaacaattgattggaaaaagaaaatatatatatataccatggaatactacacaaccataaaaaagaatgaaatcatgtcctttgcagtaacatgggtgcagctggaggtcgtcgtcctaagataattaactcagaaayggaaaaccaaatactgcatgttctcatttatgagtgggagatcaacagtgggtacacaggtacataaagatggaaacaatagacattgggactccaaaaggcgaggagggagaaaggaaggcaggagtggaaaatttacctattggacactatgttcgctatttgtgtgatgggctcagtagaagcccaaaccccagaattacgcaat

SEQ ID NO: 159890 - DNA, 324 bp, Homo sapiens
atggaatactatgcggtgataaaaaggaacaaaatcatgtcacttggagaaacgtggatgaagctggagggcattctcctgagtgaattaatgcagaaacagaaaatcaaatattgcatgttctcatgtataattgggaactaaacagtgtgtccacatgggcatagcgagtggaataatagacrttatatatttagaatggtgtgacagcaggagtggatgagggataataaatcacctaatgcgtacaatgtacactattaagatagtggttacactaaaagcttggacttcaccactacacaataatacccatgtaagaaa

SEQ ID NO: 159891 - DNA, 499 bp, Homo sapiens
aataacagcaaaggagtaatgataagtatataacaaaatggaatttgggtaaatataaaaataaatattgctaaaaaaactataaaacaatttctatyaaactattatgagagtatttttcaccaacgacatttcaagttacttattttctgccagtaggtaatgagagatgcaatatcacattatacgtgtaatgtaagagtgtaaagtatttctcaaaaatttccatcagtaggtaataaaagcactaaagttatgtccatatcattttgcacagtaattcagtctgaagatacctgtcaaaaagttaataaagatttgacaaaaatacaaagacattatagtattaaaattaaaaattcaagaaatgaaatcattatgacttcaaattataagccttgctgcaaagctgaaatttttctagaatgttttaaaatgcatggaaatataatatagagttaaatgactaattcaaggcatgctgaactactttgtatga

SEQ ID NO: 159892 - DNA, 592 bp, Homo sapiens
catcatactcccattattttattcaaaacaagaatattaattttattttataattctctaaattctcatatcaagaaaatgcttgggtttttgaccttcacttattttggtcaccaaatattatatatcatatataattactatgtgccacacactgtgctaagcactgaacttaatatgtgtacttaattatcaatttcatacacataatttcctatgggaaaaaaaagcagaggaaacaacatcaccaacaaaagtatgtgaaatccttcaataaaaactggaaaatcccaaaattataaaagaccaatcttgctttctatattttgtttgcttaaaatgtggaaccagcccaaatgcccatcaataaaaatgtgataaagaaactgtggtatatatatgatggactactactcagcaataaaaaggaataaattaatggcatttgcagcaacctgaatgggtttggagactattaatctaaatgaaataactcaggaatgaaaaaacraacaacatatgttctcattcaaaagtgggagctaaactacaaggatgcaggatgcaaaggcgtaaaaaataatacaatgga

SEQ ID NO: 159893 - DNA, 569 bp, Homo sapiens
cttccctaaggccacacaagtagtttatggttgagtcaggatttttrtctttattttgatttagtaagaacgagatatgtaatggaattatgttttttcttgcctgggtccagtgtcagaatacctgctttattcaagaataatgttaatggtggcgatgtcaaatgaattatctttcctgaagctctcttacttgttctaaaacttttagtgggcttcaggttttgatttgtgcttttcacatttgatttcaattttcaagcattttacctgataaaaatgattgccactaaggaattttaaaaaatacagagattgaaaatgtcatcaaggtaaggtgggctcaaaattttggagtgtgggcaggaaaatggaatggaagtggtgctttctcttgagcccatgttgccatgggtgttttgctctgttttttgtttgttttgtttcactttagcatcagtaagaatatcaattctttatctactattactgtcttactctcatcttctgattccagaatcagctaacctaaaatatagaactgctacaagaaacaggtgtgttagcaa

SEQ ID NO: 159894 - DNA, 389 bp, Homo sapiens
aaggcagaaataataatgtgaacaacaggagaggaaaggaggtgggcgggtgggtgaaagcacagatatatcgttattgttataatcaaagggagagcggatactggagagaacatttcctattaataaaagatctaaaatgacggaggaaaggacagtagctgagaggcggccttctttgaaaaatatggccactaaaaggaattcacctttccaatttgcactgtaytttacagtttcccaagcgctttttcatctattatttattctgacatcagtgctgtgaagtatggcattatcaactctgtttgacatataaggaggtaggtttcagaaaggaaaggtcctatttgaggtcctgtgactggttagatagagctgggaccaga

SEQ ID NO: 159895 - DNA, 435 bp, Homo sapiens
tcaaatgtttcttcatgttactattgtggctacccttgggaaatctctatcccattaaccattttatcttcttcataaaatctgtaaggtcctggaagcattctgtttgtctgcccgtgggcttgttgacacgtctcgtttgtttctccctactagcatgtctgttctatgaggcaggagctctgcttggtttgcaaggcatccccagctgctagcacagtgctgcacgcacaattggtgccctacacataccaggaagagagagagtgctgctggtgggtcgccgtggattactatgcctggatcctgggtaatagagagggaggaaargaaagccaggttctggtgtgaagggcttaaagcagagtatgaaagtcggatttttattcttggaaattaactctggatactgattggaaaatggactggagtggc

SEQ ID NO: 159896 - DNA, 435 bp, Homo sapiens
tcaaatgtttcttcatgttactrttgtggctacccttgggaaatctctatcccattaaccattttatcttcttcataaaatctgtaaggtcctggaagcattctgtttgtctgcccgtgggcttgttgacacgtctcgtttgtttctccctactagcatgtctgttctatgaggcaggagctctgcttggtttgcaaggcatccccagctgctagcacagtgctgcacgcacaattggtgccctacacataccaggaagagagagagtgctgctggtgggtcgccgtggattactatgcctggatcctgggtaatagagagggaggaaaggaaagccaggttctggtgtgaagggcttaaagcagagtatgaaagtcggatttttattcttggaaattaactctggatactgattggaaaatggactggagtggc

SEQ ID NO: 159897 - DNA, 435 bp, Homo sapiens
tcaaatgtttcttcatgttactattgtggctacccttgggaaatctctatcccattaacsattttatcttcttcataaaatctgtaaggtcctggaagcattctgtttgtctgcccgtgggcttgttgacacgtctcgtttgtttctccctactagcatgtctgttctatgaggcaggagctctgcttggtttgcaaggcatccccagctgctagcacagtgctgcacgcacaattggtgccctacacataccaggaagagagagagtgctgctggtgggtcgccgtggattactatgcctggatcctgggtaatagagagggaggaaaggaaagccaggttctggtgtgaagggcttaaagcagagtatgaaagtcggatttttattcttggaaattaactctggatactgattggaaaatggactggagtggc

SEQ ID NO: 159898 - DNA, 552 bp, Homo sapiens
gagtcaaaactcagcctcaccgctacttggaatgcaaacaaatacaaaagttgtgaaacaatgcttctttatgccaaccatgycatgaaaaatttacatggtgagaaaaacaataaaaaacaaatcactcttttagctgaggtgtatggggagtgagaatttaaaacctactagagtctatgaaacttagcaagtacataaagtaacctgccacttagcaggatatgagaagtaggaactgaaaatgggaaagcagggggtttttgaagactttgtaattatgccaggaagggttttgagagcctataacagaagaatgacttcaggaatggattagaaggagtctacataaaaggcattttgggaaataaaacaatgggacttaacagctaactttatgtacagagcacaggatagtgatgagttgaaatttcatactcaatggggttttaggccaatgagaataggataatattgacattaaaaagttcacatcaataattgacataaaaatgcacacacagcacacatacacagtgagagaggacttaa

SEQ ID NO: 159899 - DNA, 618 bp, Homo sapiens
gaaggttctgggaatttaaccatgtcaatgcaatcaatcattttttacattattaactaaacaaaaatgggtgccctttcaagatstttttaagattaggaaaaaaacaaaaaaaaagttagaagaaccaaatcaggactgtaagtggatgcctaataatttcctatgaaaaactcacaaatttgctcttgtttgatgaaaggaataagaaggagcattgttgtgataaagaaggaatctctggtgaaggtttcccaggggtctttctgctaaagtttttattacctttcgggaaacactctcacaataagtggatgtgatcattctttgaacctccagaaagttaacaagcaaaatgccttgagcattccaaaaaactatttttatgaactctgcttttgactggtctgcttttactttgactggaccacttccttctcttggtagccattgctttgattgtgctttgtcttcaggatagtactgataaagccatgtttcatctcctgttacaattctttcaaaaaaatgcatcaggatctggatcccactttttaaaacttccattgatagctctgcttttgtcttgcagctaatctggacgcaatagttttggca

SEQ ID NO: 159900 - DNA, 618 bp, Homo sapiens
gaaggttctgggaatttaaccatgtcaatgcaatcaatcattttttacattattaactaaacaaaaatgggtgccctttcaagatctttttaagattaggaaamaaacaaaaaaaaagttagaagaaccaaatcaggactgtaagtggatgcctaataatttcctatgaaaaactcacaaatttgctcttgtttgatgaaaggaataagaaggagcattgttgtgataaagaaggaatctctggtgaaggtttcccaggggtctttctgctaaagtttttattacctttcgggaaacactctcacaataagtggatgtgatcattctttgaacctccagaaagttaacaagcaaaatgccttgagcattccaaaaaactatttttatgaactctgcttttgactggtctgcttttactttgactggaccacttccttctcttggtagccattgctttgattgtgctttgtcttcaggatagtactgataaagccatgtttcatctcctgttacaattctttcaaaaaaatgcatcaggatctggatcccactttttaaaacttccattgatagctctgcttttgtcttgcagctaatctggacgcaatagttttggca

SEQ ID NO: 159901 - DNA, 496 bp, Homo sapiens
ttttgactggtctgcttttactttgactggaccacttccttctcttggtagccattgctttgattgtgctttgtcttcaggatagtactgataaagccatgtttcatctcctgttacaattctttcaaaaaaatgcatcaggatctggatcccactttttaaaacttccattgatagctctgcttttgtcttgcagctaatctggacgcaatrgttttggcacccatcaagcggaaagcttgctcaaatttaatttgttttcagtcagaatttcataattctgcagtagttgagacatctatagtattggctattgtgtatgctgttaatcatcagtcattttcaattcaggcaataccaatataaaatttttcctcaaaaattgatgtgcatggtctgtccctttgggcttcatcttcaacagtgtctaataccttcttaaaatgagttatcttcttgtaaagtgcttttattttatttggtgcactgtctccat

SEQ ID NO: 159902 - DNA, 461 bp, Homo sapiens
agagagtaaaaccatgtcaaaactgtctacgacttcttgagtgtttttccagctccctgccacttgcccaccaacacccctcagacctcagttagaacctgacacctgctaaaactgattttgaatttctggcccccagaatcataaacaaatacatttatgttcttttaaaccactcaatttgcggattgttacagcagcaacaggaaactaatatacccttgaaacaattaagcattttttwaaaaaaatctcatgggaccttctttatactaaaggaccaagggtgttgagatttccagcagagcatccaagtcctttggcacctgatacctagctttgctctccaggcatgtggtgaacaaacatcctctgcctcctgctccaaggtgggcttcaaagactccaactactctatttagcagaatcctaatgtgtctcaggagcttattaggagatac

SEQ ID NO: 159903 - DNA, 577 bp, Homo sapiens
atcgtttgttgaaaatgaggcccaaattaaatttagagcataatacaatagagttctataacttcttcctgtgatttgatcatgacaattctaattttaatgctttagagatgaacatctaagcatgataattctagtggaactataacattaagaactatttttcatgtaaataactcttaagtcactgtataagtttatatcctaagcatagaagttgaaaaaatttgagcatataacacatccaaactcaatcatagagtccaagttcaattaaggaaacaaagggggatgtgataacgagatccgcccaaattcacacaactagatagcagctgagccaagaaggcaaagtaagcccagtawctcttccttatgctctactgcttctcctcttgttatttaaaaaaaaaaaaaaaaaaaatcaatatcagtgaatgtaagtcattccaaacaagcctagtgaaaaggagttgtctccgttcccagtgcttggtaccatcactccagctccccggagtccacactttctactgcttctgttgttaaagtcaaatcttccataactataaattat

SEQ ID NO: 159904 - DNA, 409 bp, Homo sapiens
ctgtaagttgtgcttcagaaagaagaaaaataatttgagaaaataattggtataagagtcaatgctacttagggatatgctcaatcaagggcatgttggggagagggagagggagagagagagagagagagaatggaatattaatattatgcacagccttattaaattaaacattatgcagccatattaaagaagaaaatcctgtcatatgttacaacacgaatgaacctggcggacatcatgctaagggaaataaacccatggcaataaaacayatattgcattatttcacttatatgaactatctaaagtagtcaaaatctcagaaatataaagtaaaatgatggactagggaagagggaaaaggagtataacgtttcagtggctagagagtttgttttgcaagatt

SEQ ID NO: 159905 - DNA, 446 bp, Homo sapiens
tcaacatgtgtatttgagattagtgcttccttcacacctctaatgcttcttgttagcaatttctggtccacaaagggcttcagtgcattgtaaaagaatgaagttatgcattcgttaaattatattttctaccatttttaagaataaatgtgtggtatttgtacactgtagcatgttctcagcctacatatggaaatgtgctctcttctaaaacaaataaacatgtcttttagtgcagacattctcaactgaaagtaattgcactcctttaagcagaattttaaaacaagaagtagggccatggttgttaaaatgactgagtggcagtatctggggacaaagtctaaacatcctgcattggcacagaackgtcatgcacagcaagagtcatcctgccccaaacaccaataatgcctatgttgaaaaaccctgttcaggctaatact

SEQ ID NO: 159906 - DNA, 486 bp, Homo sapiens
agattcactcattatcatgagaacagcatgggggaactgctcccataagacaattactttcactcccacctggtcccacccttgacacttggggattattacaatccaaggtgagattcgggtggggacacagagccaaatcatagtagttacagaaatctagttaatctatttctattcatatttaactgtattctctaaccactcctgtatggggaaaatgcattcagaaataccctaagaatgccggaagcacacattctcaccagatgtcctaatttggtcagtgattgatgctgatttgctgtggcagatgttacaggagagtagggctggaggaatggggagaaatggaggaatccgaggatgaagggcatgcagaggmgttaatattgagctgaagggtcagggagaatttggcacaagtcacatgaggtgacagaaaggattgagggctttgaatgtgggttcagggtgtggagaaaa

SEQ ID NO: 159907 - DNA, 632 bp, Homo sapiens
gtgtgtggatacaaatgttgggggagaggaatctcttgaggagaaaaaaacaatttttcttggaaatggcgacagggcaagaacaaaaaagaaaaattgcctctcctctaagctccattcagctcaattagtgcaatgccacaacttgagagcacagagtcggggctagctgaccggcataaaggatacaaatggaagaacaccagcttatataaggcattttatgccacctccaagatagggtgtatgcctgggctttgggattattactatgcagagagaggtaaaatgttttaggggttttgtcttctaaattaaatcctcccaaatagtcctgaggaataaatcactctgcagcccttaattatatggcatgtgatgtttcacatttaaaacaagttcttatccaaggtaaaaccaccaacctcccctcygcatgtaagaacagtacacctgaatgtgctcaatcatggatcggtttgggctgccttccatatggatacccaggaagatgatttcttgctccagtaaagtctggggctcctgccaaagttctacgtccaaagtgagcagcagtctgccaggaatgatcaggcctaggtcaggatcagagagtcgggctggttgaaaag

SEQ ID NO: 159908 - DNA, 219 bp, Homo sapiens
cagacacatttctcatttcaattacttgccttagcatgggcaagtcaccctaaatttctgaaccttagtttctttgtatataaaaggagagagagggcagaaatcagagtcacaggcatgaagcrggttacacagataggtttttagggtaggagtaatgcaattgacagtgatggcacttgtgtgaaattacagctgtcacccctatgcaatatacgt

SEQ ID NO: 159909 - DNA, 424 bp, Homo sapiens
gctggcatgatgagggccggtaaagtgtatgtgcctgtgctaattatgaagtcccttattgcaattmtcatcactatcaaaaggaattaaaatccttttacaattggaatttataacttttattgtaatccataaagcaatataaaaacctgcctcccactggctctttaaaacaaaatcattctacccagcactgcatcacagctggcccgttaatgttcactacagacattaacccaactgcccccagcttccttttgaactgctgctcctgagtttccctttatggttcccaggtgactggctgtggacctcatcggcttgcagtatttgcttttggctctttctggcatgattgtttcattattccatcactggtgtgttaattaacaaatgttaatgatcacctactatatcataaaca

SEQ ID NO: 159910 - DNA, 424 bp, Homo sapiens
gctggcatgatgagggccggtaaagtgtatgtgcctgtgctaattatgaagtcccttattgcaattatcatcactatcaaaaggaattaaaatccttttacaattggaatttataacttttattgtartccataaagcaatataaaaacctgcctcccactggctctttaaaacaaaatcattctacccagcactgcatcacagctggcccgttaatgttcactacagacattaacccaactgcccccagcttccttttgaactgctgctcctgagtttccctttatggttcccaggtgactggctgtggacctcatcggcttgcagtatttgcttttggctctttctggcatgattgtttcattattccatcactggtgtgttaattaacaaatgttaatgatcacctactatatcataaaca

SEQ ID NO: 159911 - DNA, 424 bp, Homo sapiens
gctggcatgatgagggccggtaaagtgtatgtgcctgtgctaattatgaagtcccttattgcaattatcatcactatcaaaaggaattaaaatccttttacaattggaatttataacttttattgtaatccataaagcaatataaaaacctgcctcccactggctctttaaaacaaaatcattctacccagcactgcatcacagctggcccgttaatgttcactacagacattaacccaactgcccccagcttccttttgaactgctgctcctgagtttccctttatggttcccaggygactggctgtggacctcatcggcttgcagtatttgcttttggctctttctggcatgattgtttcattattccatcactggtgtgttaattaacaaatgttaatgatcacctactatatcataaaca

SEQ ID NO: 159912 - DNA, 424 bp, Homo sapiens
gctggcatgatgagggccggtaaagtgtatgtgcctgtgctaattatgaagtcccttattgcaattatcatcactatcaaaaggaattaaaatccttttacaattggaatttataacttttattgtaatccataaagcaatataaaaacctgcctcccactggctctttaaaacaaaatcattctacccagcactgcatcacagctggcccgttaatgttcactacagacattaacccaactgcccccagcttccttttgaactgctgctcctgagtttccctttatggttcccaggtgactggctgtggacctcatyggcttgcagtatttgcttttggctctttctggcatgattgtttcattattccatcactggtgtgttaattaacaaatgttaatgatcacctactatatcataaaca

SEQ ID NO: 159913 - DNA, 644 bp, Homo sapiens
gcataatttgacctactctttctttccttatgccacaaggaccagcaatattcctggctgctcaatcagcccaggtcctggagtgatgaggacttggcrcagagtctccagccaacccaagatagacatgaatagtgagagaccctgtggctttcaaccaccgagactttgaagtaatctgttctgtttgtttctgcaacattaccaattccatcctgatggatcaagcttggcacaacaaagcatcttcagaaggtgaagtaaagaacacaatgaaacaaatatttagaatattttgcgaatatggtgtcctgagaaaatacaattaagctagatcagcagttagcacagtctgaatggcaaatcaaatcaaatgaggatgtgactttgcagaaagttgagcttatatatatatatttcaggaaaatatataatttattatttaaaaaaggactcacaatatggattataaatcaaagtctaaccttatgtcatctgggataaaatattaaatctccatagttcaatttccttgtatgaaaataaaaatgtaacaatatttctcctttctaatttcttataatgctgtgagggtcaaaaaatataagaagtagaattctgtggaaaataattaatatatgatg

SEQ ID NO: 159914 - DNA, 644 bp, Homo sapiens
gcataatttgacctactctttctttccttatgccacaaggaccagcaatattcctggctgctcaatcagcccaggtcctggagtgatgaggacttggcgcagagtctccagccaacccaagatagacatgaatagtgagagaccctgtggctttcaaccaccgagactttgaagtaatctgttctgtttgtttctgcaacattaccaattccatcctgatggatcaagcttggcacaacaaagcatcttcagaaggtgaagtaaagaacacaatgaaacaaatatttagaatattttgcgaatatggtgtcctgagaaaatacaattaagctagatcagcagttagcacagtctgaatggcaaatcaaatcaaatgaggatgtgactttgcagaaagttgagcttatatatatatatttcaggaaaatrtataatttattatttaaaaaaggactcacaatatggattataaatcaaagtctaaccttatgtcatctgggataaaatattaaatctccatagttcaatttccttgtatgaaaataaaaatgtaacaatatttctcctttctaatttcttataatgctgtgagggtcaaaaaatataagaagtagaattctgtggaaaataattaatatatgatg

SEQ ID NO: 159915 - DNA, 265 bp, Homo sapiens
taattgcttcatatctgataatgcctagcttgtttcatctaggagccatggctctctttaggaattttttcttttccttctttccgtttttgtttgtttatttgtttaacaaaacatgatatatagttttcttagcaactgtgcctcaaaataataattcataataatgtaatattcataatatttctaarctatgcatgtatattcataatgtacatgagtagcttagtttaatggtgaatgttgtctgtttaatggtgaatgt

SEQ ID NO: 159916 - DNA, 543 bp, Homo sapiens
aaactcaaggtgagatttgggtggggacacaaccaaaccatatgagatgtttaacattactaacaaaatgttcagaagcaatgtccctttccccactcacacacaaaaggtgacgtttgagtcttgaatgcagccttatttttagcagctgtttgttgttgttgttgttgttgttgcattgctcagtcagcatcatcttttggtggttgtggagtccttgtattcaccactggatagtgggggctggagttcatatcccaaacaggacacactgactgcaaggccaccatcctctgccgggccctgccctttagaccactgcttaaacctcaaagatgaactcctcaccaaaaaggagggaggatgccatctaccgtgccaggtagctaggaggamtgggtgagaaccggttactgtgccaccccgtagaatgaggtccatgggtcgccttgccctgccttcagtgtcctgtcggtgagtctgtccaggaattcctgtggagtgataagaggagaaacacttctccttacctcgaaaggagca

SEQ ID NO: 159917 - DNA, 610 bp, Homo sapiens
cttgcatgtctgagaatttctttccaatacacatgaacattagataggctgagaatggagttcttgggttacaatattttcccctccataccttgtagccatttctcagttgctttgtgccactttgtcatatgaagaaacctaacaccaattaattaatctggttttttgattgtaaaaattaggagatgtttctttatccctgaaataccaaaatgtcatcagaatatgttcaggtgtgtttctatattttcacaaaatatcctgaaagatacttttaatttaaaggccagtcttactttttaagggtgcttgaagggggttttaatttggagagaagacattctactcatcagctcagggaactygtcttagtcttcctgggctgcttagttgttctggaggctgcagagtccaagatcaggtgccagcaaggcagatttcctgctcaggcctcttctcttggcttggaggcagctgccatcttgccctctgtgtactcacatgaccccttcctcgtgtatccatggagagagggagagctctagtatctcttcctcttctatagggaccccagttctataggatcaggactctatccttatgacct

SEQ ID NO: 159918 - DNA, 610 bp, Homo sapiens
cttgcatgtctgagaatttctttccaatacacatgaacattagataggctgagaatggagttcttgggttacaatattttcccctccataccttgtagccatttctcagttgctttgtgccactttgtcatatgaagaaacctaacaccaattaattaatctggttttttgattgtaaaaattaggagatgtttctttatccctgaaataccaaaatgtcatcagaatatgttcaggtgtgtttctatattttcacaaaatatcctgaaagatacttttaatttaaaggccagtcttactttttaagggtgcttgaagggggttttaatttggagagaagacattctactcatcagctcagggaacttgtcttagtcttcctgggmtgcttagttgttctggaggctgcagagtccaagatcaggtgccagcaaggcagatttcctgctcaggcctcttctcttggcttggaggcagctgccatcttgccctctgtgtactcacatgaccccttcctcgtgtatccatggagagagggagagctctagtatctcttcctcttctatagggaccccagttctataggatcaggactctatccttatgacct

SEQ ID NO: 159919 - DNA, 452 bp, Homo sapiens
aagtagtgcttccttggaaaaagatcacatgggacttcatgactgtttcacarattcgtattccaggtaaggagaggctgaaggagagagacccctgagcacagccttttatccagaccaagcatccagcccaaaaagtcacctgtggcagatgccaaacaagttcaggtccacgtctgtgtgtgcttctctgccttcctacctgctgtccaacaggcccagccccagcctgccctgacatcttccagaatccaaacctgccagaatccacagcctgccccctatgcctgccctcggtgccctgtccctgcccccagtgttaactagcggtcagccaggcagaaaggcctggcactgtcaacacgtgggcttccgaagccgtgacactactttgattctcactgcagagcactgcgccggctcggaaggatgccctgtgtccgcctgccgcg

SEQ ID NO: 159920 - DNA, 452 bp, Homo sapiens
aagtagtgcttccttggaaaaagatcacatgggacttcatgactgtttcacagattcgtattccaggtaaggagaggctgaaggagagagaccyctgagcacagccttttatccagaccaagcatccagcccaaaaagtcacctgtggcagatgccaaacaagttcaggtccacgtctgtgtgtgcttctctgccttcctacctgctgtccaacaggcccagccccagcctgccctgacatcttccagaatccaaacctgccagaatccacagcctgccccctatgcctgccctcggtgccctgtccctgcccccagtgttaactagcggtcagccaggcagaaaggcctggcactgtcaacacgtgggcttccgaagccgtgacactactttgattctcactgcagagcactgcgccggctcggaaggatgccctgtgtccgcctgccgcg

SEQ ID NO: 159921 - DNA, 452 bp, Homo sapiens
aagtagtgcttccttggaaaaagatcacatgggacttcatgactgtttcacagattcgtattccaggtaaggagaggctgaaggagagagacccctgagcacagccttttatccagaccaagcatccagcccaaaaagtcacctgtggcagatgccaaacaagttcaggtccacgtctgtgtgtgcttctctgccttcctacctgctgtccaacaggcccagccccagcctgccctgacatcttccagaatccaaacctgccagaatccayagcctgccccctatgcctgccctcggtgccctgtccctgcccccagtgttaactagcggtcagccaggcagaaaggcctggcactgtcaacacgtgggcttccgaagccgtgacactactttgattctcactgcagagcactgcgccggctcggaaggatgccctgtgtccgcctgccgcg

SEQ ID NO: 159922 - DNA, 558 bp, Homo sapiens
gttggttttcaggtttgtttgttttaatgtaatcatcaacatgtggctattcttgttctttaaaaaaaaaaaaaagacagctctctgccatgcttatgaartaatctgcatgtcttatgaactaatgctatctaccatgagctatttttaacgctgtcaccaaaaaaaaaaaaaaaaaagagtctgtttcttgactactacaccttgcctactgaaatcaaacttggatacttaggaagctgttgacaaataatactggaaagctaaatttagtgtctggtgcagtgtggaatggcttttatccctggacttacctctagtgtcctatcccttttaaaaataaccaacgacaagctatatcaggcatcaggaaattcgttaaagtgaaacacagttggatcagattatagctgtgcatgagtaagtcctgcagaaatttatccaatcacaaacaattagtctgagaaaaaataaaatggcaaaatggctatgcttagagaaaggaaagacccaaagagcttcatattggtgggaaaatgaatagtgcaactacagaat

SEQ ID NO: 159923 - DNA, 558 bp, Homo sapiens
gttggttttcaggtttgtttgttttaatgtaatcatcaacatgtggctattcttgttctttaaaaaaaaaaaaaagacagctctctgccatgcttatgaaataatctgcatgtcttatgaactaatgctatctaccatgagctatttttaacgctgtcaccaaaaaaaaaaaaaaaaaagagtctgtttcttgactactacaccttgcctactgaaatcaaacttggatacttaggaagctgttgacaaataatactggaaagctaaatttagygtctggtgcagtgtggaatggcttttatccctggacttacctctagtgtcctatcccttttaaaaataaccaacgacaagctatatcaggcatcaggaaattcgttaaagtgaaacacagttggatcagattatagctgtgcatgagtaagtcctgcagaaatttatccaatcacaaacaattagtctgagaaaaaataaaatggcaaaatggctatgcttagagaaaggaaagacccaaagagcttcatattggtgggaaaatgaatagtgcaactacagaat

SEQ ID NO: 159924 - DNA, 558 bp, Homo sapiens
gttggttttcaggtttgtttgttttaatgtaatcatcaacatgtggctattcttgttctttaaaaaaaaaaaaaagacagctctctgccatgcttatgaaataatctgcatgtcttatgaactaatgctatctaccatgagctatttttaacgctgtcaccaaaaaaaaaaaaaaaaaagagtctgtttcttgactactacaccttgcctactgaaatcaaacttggatacttaggaagctgttgacaaataatactggaaagctaaatttagtgtctggtgcagtgtggaatggcttttatccctggacttacctctagtgtcctatcccttttaaaaataaccaacracaagctatatcaggcatcaggaaattcgttaaagtgaaacacagttggatcagattatagctgtgcatgagtaagtcctgcagaaatttatccaatcacaaacaattagtctgagaaaaaataaaatggcaaaatggctatgcttagagaaaggaaagacccaaagagcttcatattggtgggaaaatgaatagtgcaactacagaat

SEQ ID NO: 159925 - DNA, 529 bp, Homo sapiens
ctaaaagattgcatctcctttgttaactgaagtttttttcccaaaaactgtctgtaatcaggaagtagctccacttatctctggccacctccctccaaacatgctgtgttacaagtgtgtccccttccctgcccctcaatggcatcccaggtacattyttcagctttctggtcacttggcaagtcccattttaatatccaaaagccagtccaggccaaatcaaaactttacactcagggcaaaagcctcgatcagacactttatgaacaacatacaaatggccaataagcaaatgaaaaggtgttcaacatcattaatcatcaaggacatgcaaatgagaccacaaataaatattcaccatttcacatgcattagaatggctaaaaaaaaaaaaaaaaaaaaaaaaaaaaacctgacaacaccaaatgttgacaagatcagggagcaactagaactttcatacatagttttgggtgggtaaaatgatatctctttggaaaactggcagtttcttacaaagttaaataca

SEQ ID NO: 159926 - DNA, 366 bp, Homo sapiens
gaaatgcctgtgataactcaagcggagatcacaagtggacagttacatgagtttctgttcatatcagaaatctggctgcaggtaaaatttgggagttgtcargttcacttatatttagaggcatgggaaaggatgagatcctctactgaaggggtgtggacaaagaagctttcattcctaatgtgcttgaacttttttagtctctcatacattgtggaccacactatagaatgttttcctgcagcagctgggagcaagtcttcacctttgtctttgacagtaccgacagcgaagctacctttctctcctcaccagcagatgtctgcctaacttgatgcttatagagtgctgggctagagcacagtg

SEQ ID NO: 159927 - DNA, 366 bp, Homo sapiens
gaaatgcctgtgataactcaagcggagatcacaagtggacagttacatgagtttctgttcatatcagaaatctggctgcaggtaaaatttgggagttgtcaagttcacttayatttagaggcatgggaaaggatgagatcctctactgaaggggtgtggacaaagaagctttcattcctaatgtgcttgaacttttttagtctctcatacattgtggaccacactatagaatgttttcctgcagcagctgggagcaagtcttcacctttgtctttgacagtaccgacagcgaagctacctttctctcctcaccagcagatgtctgcctaacttgatgcttatagagtgctgggctagagcacagtg

SEQ ID NO: 159928 - DNA, 573 bp, Homo sapiens
tgcatgtgggatttactttccacctctttaactctaatcctaggtctgtttacacattgattaaaaggtccttaaattgttttaggacataawgatgtttttctatttcaaggatggcttggaaatagagatgagcatacaagggaatgtgagagcatgcaggatctgtttattcttctcaactcttctgtttgtttgagtcccagtgtatgctgggtttgataaccaggactcaaggagaactgaaccaccgacagctttgtttactaagggtataccaacatccctctgtggatctgacatttatatgccttatagagaagatttggttgggtttttctgtcccatccgatgtggatcacctgtactaagagctaaatttttctccaagccacctcacaatgggttgagctccatgatgtccaatctatacccagtcgcctttggtttgggtaatgatccctggttcaatcagttattgcagcagaagcaaagttagtttcacttgatatacaaggcgggtccactgcaataagacgcagcctctgctggagacctctagactcagaagcg

SEQ ID NO: 159929 - DNA, 605 bp, Homo sapiens
gtggtgaatttgctggaactaaagggcttccttgccaccccccgacacacacactggccacagtgggtcagacacaggcccacatgctrtctttctgtttcccagggagaaggatggcatccggaaggcccgtgaggtcctgatgcggttgggcctggacccgactcaggaggactgcgtggccactcaccggatctgccagatcgtgtccacacgctccgccagcctgtgcgcagccaccctggccgccgtgctgcagcgcatcaaggagaacaaaggcgaggagcggctgcgctctactattggggtcgacggttccgtctacaagaaacacccccagtgagtcagtgtgcagggcctggagatgcggagttcctggagtacctggggctgagtgactcctcatgccagctccattttgcatttcaggggtggtgtggagggaccatagagctgagggtcttggtggaatgaaagttcccacctgggcaagggggaatgggaggaagtcatatctggtgtgggtggaggtgatttctgaaggctactgatgactcgggctctccgcagagctcctctggctgctggacactctctttgccacc

SEQ ID NO: 159930 - DNA, 517 bp, Homo sapiens
cctttaacaagttaagaacttgttctttatccactccaaaacactctgtcatagtttcatatactcataacattataacccctgaatacaaacctcttttcattttatcatggctcccccaaaatttctctttacctagcatattctttcacgtagcacgttctgttcatgcctcccatgactgcttacatacttaacatgactaagtaaatttctgagcacattttgttaaaatttcaagtgagatacaaggggaataaacctccaaaaacaatattttaatgttccttgccaaatggggacaatggaagcctggagaktatgtgacctgtaaacgggatgctcctattcagttctaggatccttgctaaatggaaatgagatgctgtaaaatcaattctcagtagtttttttaaagaacagaaataaatttgaaaaatccttatttttaaatgtcagcataaaatttttcctttgaaaaaaagtttacttttgctactacttaagccaagtaaaa

SEQ ID NO: 159931 - DNA, 593 bp, Homo sapiens
aatgtgcatggattgtttaactaaaggatacactaagcaattttagactctgtgagaaaaataatatagtccacatatgtattaaaatttatggttaattttttttctgttttttctttttgtttttttttttttttttttgcagttagtttttaaaagaatagaaatacaaatctatagcttccaaaccaggaaacgagaaaaaagaaaaaagcagaagcaaccaagagaaatatcagttcaacagatgtcatgaaaggaggaaaaaaagtgaagaaaaattaactaaacaaaaccacaataaaatggttaaaatgagcccaaagccaggtgtggtggtatgtgcctctagtcccagctacttgggaggttgaggcgggaggatcacttgagcccatgragtttgaggctgcagtgtactatgactgcacctgtgaatagccactgcactccacctgtccaacacagagagatacacttcttaaaaaagaaagagtccaaatgtgtaactataataaattaaattaacttcttaaaggaaaagtactatcagaatggaattagaaaaataaatccagctttatgatgttcag

SEQ ID NO: 159932 - DNA, 456 bp, Homo sapiens
agagagaggaagtaatttgtccaaggtcaggtagctattgagtcgaaaaagcagaatttagtatagctcagtctgcctccaaagctcttgaactttctactagaacacactgccttactgctggaaatttaatagaagtctctgtttgggaaagctgtggcaaatagatgtgacagttctgagacatgacctctgtgttacatggtgggtaggaatctgccaggtgcttcrccaagtgagtagatctgaacttgatcacccagtgaagcttctgtgaggaagcagcgcagtgcactggttacacatttaaatcctggctctgctgcttacctgctggatacatgaattgacctgagcctcagttgcctcatctataaaatggggatgacaatgcttcctgtctcagctagttgatgagatgaaacacacaaagctcttacatggtaacttgcacag

SEQ ID NO: 159933 - DNA, 490 bp, Homo sapiens
tgccaccacacccagataatttttgtatttttagtggagatgaggtttcaccatgttgcccccaggctgatcttgaactcctaacctcaagtgatctacccgcctcagcctcccaaagtgctgggactacaggcatgagccactgcgcccagctgggttcaaagtgttttctaatttcccttatgatttcttctttgacccatgggctatttataagtgtattattttatttattattttattttattttatattatattatattatattatattatattwtattttatttattttaagacagactctctgttgcccacgctgcggtgcaatggtgcgatctcagctcactgccacctgtgccttgcaggctcaagctattctcatgcatcagcctcccgagtaactggggctacaggtgcgtgccaccacgcctggctaatttttgtatttttagtagaggtggggttttgccatgttgcccaagctgg

SEQ ID NO: 159934 - DNA, 598 bp, Homo sapiens
aagcttgcctcccattctaatcaaagtcactgctctgctcactgagacaaatgcatatctgattgcctcctttagagatgcattcatgagaaactcaaaagaatgcatccatttgtctctagtttacctgtgacctgtaagcccctccctgcttcgagttgtccmgccatattgtttcactgagccagactaaggcatacgtgactattcctctaccctcctcttgcatgtaaattgtgccttcagtgaaaggctaatcagaaactcaaaagaatgtaattggttatctcttatctacctatgacctggaagtccactcccctgcttagagtagtcccacctttctggaccaaaccaatgtacatcttacacatactgattgatgtctcatgtctccctaaaatgtataaaaccaaactgtgctctgaccaccttgagcacatattgtcaggacctcctgaggctgtgttgttacaggcacgtgttctcaacctggcaaaatacactttctaaattaactgagacctgtctcaaattttctgggttcacactcacttggcgatccaagatttattttcctttcacactggtcagatgt

SEQ ID NO: 159935 - DNA, 598 bp, Homo sapiens
aagcttgcctcccattctaatcaaagtcactgctctgctcactgagacaaatgcatatctgattgcctcctttagagatgcattcatgagaaactcaaaagaatgcatccatttgtctctagtttacctgtgacctgtaagcccctccctgcttcgagttgtcccgccatattgtttcactgagccagactaaggcatacgtgactattcctctaccctyctcttgcatgtaaattgtgccttcagtgaaaggctaatcagaaactcaaaagaatgtaattggttatctcttatctacctatgacctggaagtccactcccctgcttagagtagtcccacctttctggaccaaaccaatgtacatcttacacatactgattgatgtctcatgtctccctaaaatgtataaaaccaaactgtgctctgaccaccttgagcacatattgtcaggacctcctgaggctgtgttgttacaggcacgtgttctcaacctggcaaaatacactttctaaattaactgagacctgtctcaaattttctgggttcacactcacttggcgatccaagatttattttcctttcacactggtcagatgt

SEQ ID NO: 159936 - DNA, 530 bp, Homo sapiens
aaacaatgcatgagaactgtgagatcagtgtttactatgatacacaatttactggagggatgaactgcacacatggagatgatcagcctcacgtggcgttctgagtggatacttacaacacttgaactccctgcaatagcaacagggggtggctatgaaattatcgcaatagtacagtaggcacagttaactctatgcacttatgacttaatgctgcaaccttactttttttacttttctgttgactacaaatggtgtcatgtatagtctgtgtttgtgtgtataagttttgataaattttaactatttaaaatagatttgtgtccatattatggtagtaaatgataaaataaactagttactgtatatattttatgcattcctgacacactaaactttttcttaattttttcactattgtaggctatgtggtttatctgcaagtcttttcaatttgttgcaaatctccataacattttctaatatatttattgcaacaaatctgccyataaatggaccaacaccattga

SEQ ID NO: 159937 - DNA, 465 bp, Homo sapiens
cttcttatgataatgccaatcagatttacttagggcctactctaaaatggaaaacagcctcgttttaccttaatcacctctttaaaggtctaatctccaaatgtggtcacattctgaaatattgtaggttaggaattcaacatatgaattttggggagatacaattcagtctgtcaccgctacatctcacccccttttagaacttgtttatacttcaaaacatktagataagacattaatcatctttgtttttgtacttacgtatctcttccaaaattcttgtttaatatcagtaatttacacatttaaatggaaaattcctttttaatgttgggaatttacgaaaccttgagctacttttgatattgctcttcaaatggaagatggcacatggaaaatggcaaaaatccaagttttctcaactgaggcttaaccagtttttaaaaaactttttataataaaata

SEQ ID NO: 159938 - DNA, 465 bp, Homo sapiens
cttcttatgataatgccaatcagatttacttagggcctactctaaaatggaaaacagcctcgttttaccttaatcacctctttaaaggtctaatctccaaatgtggtcacattctgaaatattgtaggttaggaattcaacatatgaattttggggagatacaattcagtctgtcaccgctacatctcacccccttttagaacttgtttatacttcaaaacatttagataagacattaatcatctttgtttttgtacttacgtatytcttccaaaattcttgtttaatatcagtaatttacacatttaaatggaaaattcctttttaatgttgggaatttacgaaaccttgagctacttttgatattgctcttcaaatggaagatggcacatggaaaatggcaaaaatccaagttttctcaactgaggcttaaccagtttttaaaaaactttttataataaaata

SEQ ID NO: 159939 - DNA, 535 bp, Homo sapiens
tcagcctatggtcccaatcaagcaattcgacttttttggttatgtcatgatttctttttgcttcttgggagtaattccagcatcattaggggcactctgtagtcccatgactgtattcaagatttacaatattgcaccaaacatgatgaaaaatacagtagagccatgagagatcactttttactctgacatgcaatttattggagagatgaaatgctcaaacagagagtataartgttatatcacatgcacttaagccacacttcagctcactggaatagcaacaggaggtagctacaaaattattacagtagtgtagtatatactataggtaattttatgcagttaagatttaatgctgcctctatatgtttgtatttctttcctgtgctaatgatgcaatgtacactttggaaatgtttgtgtgtggtttaataaattttttattgatttgtgcatattttaaagtaataaataataacatggtatctgcacatggtttctgcagtcatggcatagctttaaaaatttttag

SEQ ID NO: 159940 - DNA, 541 bp, Homo sapiens
aaaacctgcagaatataattctgtccagtgcaacaaatattcyggttgattttctttgtgcagggctgcatttgtctgtttggattgctgtaaaggatacctgaggctgggtaatttataaagaaaagaggtttaattggctcacagtttggcagactttatatgaaacatggtgctagcatctgcttctggtgaggcctcaggaagcttacaatcatgacagaaggtgatggagagctggcatgtcacatggcaagagcaggagcaagagagagacaggggagatggcacatacttttttattttaatttttatttttatttctggggtacatgtggaagatgttcaggtttgttacataggtaaacatatgccatggtagcacatacttttttttttttcctgctctaaaactctttttttttttttatactttaagttctaggatacatgtgcagaacatgcaggtttgtgacataggtatacacgtgccatggtggtttggtgcacccatcattccttcatctacattaggtatttc

SEQ ID NO: 159941 - DNA, 553 bp, Homo sapiens
aggcgctttacgtttctcatctccaagtgaccctccgccacactcgatgtgaaccttggggaagtcacctaggcccccagggtaacgatgggattagtggataatactggaaggcctttacgttgataattttagtggcagtcttccccgccctccgctccccttcgtccctccctccccagtgaactgacttccggcccaacagcttcgggactgtactaaagtgctctaaaaaaagttaacttgatctgtttaatttaaatgtcataatctggtatatagtactgaagggtgtgacaagcagagattttagagagttgattctcagaatttagggttggctttgcgtcccagcagtggattagttgtggcracaggttttcttttttaaaaaaattagtgatgtgaacgtgcctttttaaaaacagctgttacttattgtgggccaaaccctgtacactaactgcccttctttcgttatgtcattggatagtttaaatgacccgaagagacagatggtatcctattttacacataagaaaacagattaaca

SEQ ID NO: 159942 - DNA, 632 bp, Homo sapiens
gaattcttttcccctaaaaccagtcatcaattctgttggaactcaccaaaaattcaaagagactaagagtgacttcctctttttctcattaaaactatttcaatgttctgctgaattatttacacatcactaatcaacacacacacattagaatactgaaatgtaaaagaatgaccataccaattgatatagtttaaaagtttgtcccctccaaatcccatgttgaaattggagatggggccatctgccatcattgttaaagtatttaattacatccctggctgtaattctcctggatagactcaaggagattttgttacaggagatcttcaagaaatcccctgtgcagggtctgggacactgcacgcaaacacacctgcacatacacaaacacatacatgtgcaaacacatactctatcatcaagtaatgyttccttctcatcagacagatgagactcagactctgaatcctgtttcccagcaagatgtaaccaactgcatgcttttcccagacacatcctggcatctgaaacaaggaaagagcaatatgcagtgttcatcgttcttttgatgacaatttacttttacttttgtggttgggccatatccaaggctctttgacagaaagccc

SEQ ID NO: 159943 - DNA, 604 bp, Homo sapiens
aagcttccaagtatgagtgcatctgccatccattccagggacagccaggcctccatcccggctgtgtcttgggttgaggaaagaataggtcagtgtggcaggagactctttgcagaatattccagaagggaaactcagataatgggtaatctcacatttgcttctgcaggccctgaccccatcgtttgtcacctaccctgggtaaagatgtcacyggctctggaccctccggcaaatggactcacccagcaggagcccagcaggggacgagatggcaggaggagagagagctgggaggggtcattctcctgatgccctcggccaggtcaccgggggctggccgcctcattcttcaaaagccacagctcctaccagagagtccctctgtgggcagccgccccctggatcctgctcacggcaggccgggcctctggggtcctccacgctgtctagtttgttccctaagccctgcacacacctgtctcaacagagcccttgttaacatcttctcagcttcccagtgagagtttgacatctgtcttgtgccaggccccgggcatttcatggggagaccttgggttaggctgtgtggtctgtgtgcttg

SEQ ID NO: 159944 - DNA, 604 bp, Homo sapiens
aagcttccaagtatgagtgcatctgccatccattccagggacagccaggcctccatcccggctgtgtcttgggttgaggaaagaataggtcagtgtggcaggagactctttgcagaatattccagaagggaaactcagataatgggtaatctcacatttgcttctgcaggccctgaccccatcgtttgtcacctaccctgggtaaagatgtcaccggctctggaccctccggcaaatggactcacccagcaggagcccagcaggggacgagatggcaggaggagagagagctgggaggggtcattctcctgatgcccycggccaggtcaccgggggctggccgcctcattcttcaaaagccacagctcctaccagagagtccctctgtgggcagccgccccctggatcctgctcacggcaggccgggcctctggggtcctccacgctgtctagtttgttccctaagccctgcacacacctgtctcaacagagcccttgttaacatcttctcagcttcccagtgagagtttgacatctgtcttgtgccaggccccgggcatttcatggggagaccttgggttaggctgtgtggtctgtgtgcttg

SEQ ID NO: 159945 - DNA, 604 bp, Homo sapiens
aagcttccaagtatgagtgcatctgccatccattccagggacagccaggcctccatcccggctgtgtcttgggttgaggaaagaataggtcagtgtggcaggagactctttgcagaatattccagaagggaaactcagataatgggtaatctcacatttgcttctgcaggccctgaccccatcgtttgtcacctaccctgggtaaagatgtcaccggctctggaccctccggcaaatggactcacccagcaggagcccagcaggggacgagatggcaggaggagagagagctgggaggggtcattctcctgatgccctcggccaggtcaccgggggctggccgcctcattcttcaaaagccacagctcctaccagagagtccctctgtgggcagccgccccctggatcctgctcacggcaggccgggcctctggggtcctccacgctgtctagtttgttccctaagccctgcacacacctgtctcaacagagcccttgttaacatcttctcagctkcccagtgagagtttgacatctgtcttgtgccaggccccgggcatttcatggggagaccttgggttaggctgtgtggtctgtgtgcttg

SEQ ID NO: 159946 - DNA, 580 bp, Homo sapiens
agaagttgaaattggtatcttccttgttcctcaatattacttatagacatttgcttctcctccctcttgctaaaacccctgtttctattaggatcacatagtcattatagcttgcctctttttcaatagcattaacctggaaaaatttgaatctaaatgatcagtctcttgcccagcagataagaatcaaacaaccatgtagattagtatctaacaccctacatgtgtgatcatgcaaacaaaattagtactcagaaaatcccagcaatattaacaaatgtctctttaactttgctttcaaactctctgcaattccrttttcttaccttgtttattcttcctaaatatttaaacaaaccatcactgccctatgtctcggattttatagagaaagtagaacttattagacagaaattgcttcatcatcattaaatcagaaaaaacaaaaacaaaaacagaacataggagtgcctgctcccatatttggtttttccctcctattataatagaggaagaagaagcgattccagtaagtacatgaccctcaaaccacagtttccaaaagactatgagacagatt

SEQ ID NO: 159947 - DNA, 580 bp, Homo sapiens
agaagttgaaattggtatcttccttgttcctcaatattacttatagacatttgcttctcctccctcttgctaaaacccctgtttctattaggatcacatagtcattatagcttgcctctttttcaatagcattaacctggaaaaatttgaatctaaatgatcagtctcttgcccagcagataagaatcaaacaaccatgtagattagtatctaacaccctacatgtgtgatcatgcaaacaaaattagtactcagaaaatcccagcaatattaacaaatgtctctttaactttgctttcaaactctctgcaattccgttttcttaccttgtttattcttcctaaatatttaaacaarccatcactgccctatgtctcggattttatagagaaagtagaacttattagacagaaattgcttcatcatcattaaatcagaaaaaacaaaaacaaaaacagaacataggagtgcctgctcccatatttggtttttccctcctattataatagaggaagaagaagcgattccagtaagtacatgaccctcaaaccacagtttccaaaagactatgagacagatt

SEQ ID NO: 159948 - DNA, 580 bp, Homo sapiens
agaagttgaaattggtatcttccttgttcctcaatattacttatagacatttgcttctcctccctcttgctaaaacccctgtttctattaggatcacatagtcattatagcttgcctctttttcaatagcattaacctggaaaaatttgaatctaaatgatcagtctcttgcccagcagataagaatcaaacaaccatgtagattagtatctaacaccctacatgtgtgatcatgcaaacaaaattagtactcagaaaatcccagcaatattaacaaatgtctctttaactttgctttcaaactctctgcaattccgttttcttaccttgtttattcttcctaaatatttaaacaaaccatcactgccctatgtctcrgattttatagagaaagtagaacttattagacagaaattgcttcatcatcattaaatcagaaaaaacaaaaacaaaaacagaacataggagtgcctgctcccatatttggtttttccctcctattataatagaggaagaagaagcgattccagtaagtacatgaccctcaaaccacagtttccaaaagactatgagacagatt

SEQ ID NO: 159949 - DNA, 580 bp, Homo sapiens
agaagttgaaattggtatcttccttgttcctcaatattacttatagacatttgcttctcctccctcttgctaaaacccctgtttctattaggatcacatagtcattatagcttgcctctttttcaatagcattaacctggaaaaatttgaatctaaatgatcagtctcttgcccagcagataagaatcaaacaaccatgtagattagtatctaacaccctacatgtgtgatcatgcaaacaaaattagtactcagaaaatcccagcaatattaacaaatgtctctttaactttgctttcaaactctctgcaattccgttttcttaccttgtttattcttcctaaatatttaaacaaaccatcactgccctatgtctcggattttatagagaaagtagaacttattagayagaaattgcttcatcatcattaaatcagaaaaaacaaaaacaaaaacagaacataggagtgcctgctcccatatttggtttttccctcctattataatagaggaagaagaagcgattccagtaagtacatgaccctcaaaccacagtttccaaaagactatgagacagatt

SEQ ID NO: 159950 - DNA, 484 bp, Homo sapiens
gaaattgatgggaactcttttttcgggtccatagcttttgcaccctgagccttcagataaagaacaaaagcagaataactcagagactcctctccaagcttgaagcagaccctaatgcttatgttgaagaggcagctcatatggccggaagctgcttggctatcccctcacaactgatgttcaaatatattaatgaaagatactggctggagtgtacactggtctaattatccttcttttttttttctgtagccatctaattacattccatttaaaagaatgttttttaccatgccatgtatacccagtattcttaaaaatagctgayactttttggtaaaatcagtcaagagaaataaaattgtttactttcttatagccatcttttttttctcctttgaacattatactttcaaataaaagtatcggctgttaaaccctgtcaaaatctaaagcccatagcatttcttaatagcctctcaac

SEQ ID NO: 159951 - DNA, 646 bp, Homo sapiens
agttaggcagctagtactctttgtgaaacaggaaaataattatagccagcattatggtttataaataagtacaaagattatccagtcaggccaaaaatattctatacctggcaaaaggcaatctttggcaaagaagagaataggttctcctagaattggaacttgatgggccatataaacagtgacattctggtcaacaagtaattggagaattggatcaacaaaaatatcaggattgcagagtgtcaggtgcaaaacttaaagggaaagtgaagactgaaacaggcacagttgttcacaatgtctaaacatttatcgaacttaaatctggacctaccaaaagtggctcacccagcagattaaacaatttcattgacaagatcttataagttctataataaataacaggastaagtcactagcaacaagaatattaaagatattttctctaaacttaggggggaaggccatttatttatgaattagcatttctctaaaaataagcaaagatgccgttatttattgccattttacagatgaggaaactgaggctcaagttagttaagacacttgcaaacattcatacagctatgaagtgacagagcctagattctttgtagtcagaaaactgtattattatctgctg

SEQ ID NO: 159952 - DNA, 610 bp, Homo sapiens
ggcaggcttcatcacctgttaactgaagagcccttggcgcctgaataaccagcagcaatacccaggtgctacattgagggcctcaaatgagactctgagacatgctgacttcagatatcagttcagtcacagcagggaggaatacctagtggattcttggggtccctgattccaggacatggttctggaatggcatttctggacataccctgggccaaaggggagcccaagtccctgaagggtgagttccaggccaggtagcattcaccacaagctgacttaagagcccttgggccttaagggaacattggtgatagtctgacagcactccccttgggactgtagtggtggcggccatggagtgaggctcctctgcctttggaaaggggagggaagagtgagaaagactgcattttgtggctagagtaccaggtcagctgcagtccaatagaacaccaggtagtcatctaaggtttttsactctcccctggctcccagatggcatctctggacccacccagagcctgaggaatctcactgccctgaagagaaggacacaggcctgggctttgccacctgctgattatagagcaccagagccttgagcaaa

SEQ ID NO: 159953 - DNA, 609 bp, Homo sapiens
ttctaccaggtattaacatctctgtaccttgatatttaggtattcaaaacatttttaaaatatgcaaatctttaaaaatgaatccaaatgcaaaaattcagaaaaaaatctgtaatatcaaaattaatgaaaatcacaaagtagataacattttctcatatttaaaaagctttataagaaataccttatctgcattttcctcttcccattttgcagatgaggaagttgacacacagcaggacaaaggtgtttgcccaaggccatatgatataagttctcttaccttctacacttgtgtcatggttgactttggcaacttgtaattctgcaacttcagattcaagaagttgccttgggaaagytttggcaatggtaacacagttttaagtaaaaagtaaggatattgaataatgggaaaacttaaactaagattaaccaattatctcacacagcatgaaaacatggttcttgaatgtctgactctacttaaatttaatgcataaataaataaatgaagataaatgaaaatcatttttcttgggcttagtgtagttaagaaaccatttaataatatgcgtcggtgcaaaaagtgaaagcctgggtacaaag

SEQ ID NO: 159954 - DNA, 609 bp, Homo sapiens
ttctaccaggtattaacatctctgtaccttgatatttaggtattcaaaacatttttaaaatatgcaaatctttaaaaatgaatccaaatgcaaaaattcagaaaaaaatctgtaatatcaaaattaatgaaaatcacaaagtagataacattttctcatatttaaaaagctttataagaaataccttatctgcattttcctcttcccattttgcagatgaggaagttgacacacagcaggacaaaggtgtttgcccaaggccatatgatataagttctcttaccttctacacttgtgtcatggttgactttggcaacttgtaattctgcaacttcagattcaagaagttgccttgggaaagctttggcaatggtaacacagttttaagtaaaaagtaagsatattgaataatgggaaaacttaaactaagattaaccaattatctcacacagcatgaaaacatggttcttgaatgtctgactctacttaaatttaatgcataaataaataaatgaagataaatgaaaatcatttttcttgggcttagtgtagttaagaaaccatttaataatatgcgtcggtgcaaaaagtgaaagcctgggtacaaag

SEQ ID NO: 159955 - DNA, 609 bp, Homo sapiens
ttctaccaggtattaacatctctgtaccttgatatttaggtattcaaaacatttttaaaatatgcaaatctttaaaaatgaatccaaatgcaaaaattcagaaaaaaatctgtaatatcaaaattaatgaaaatcacaaagtagataacattttctcatatttaaaaagctttataagaaataccttatctgcattttcctcttcccattttgcagatgaggaagttgacacacagcaggacaaaggtgtttgcccaaggccatatgatataagttctcttaccttctacacttgtgtcatggttgactttggcaacttgtaattctgcaacttcagattcaagaagttgccttgggaaagctttggcaatggtaacacagttttaagtaaaaagtaaggatattgaataatgggaaaacttaaactaagattaaccaattatctcacacagcatgaaaacatgrttcttgaatgtctgactctacttaaatttaatgcataaataaataaatgaagataaatgaaaatcatttttcttgggcttagtgtagttaagaaaccatttaataatatgcgtcggtgcaaaaagtgaaagcctgggtacaaag

SEQ ID NO: 159956 - DNA, 588 bp, Homo sapiens
tgggagtctaggtgaagaatatgaaaaagttcattgcactattttgctacctgtttataggtttgagatttttcaaaataaaaagataggaaagaattcaaaaaccagacaaagctaatttatattgctaaggagtacaaacatgggtagtaaaacaataaagaaaataattatcaaaattcagaatagtgccaactctgggaagaaggatgaacttttgctgagggagaccctagtgagaggcttctgatgcttgcagtttctttgcctgagtgtaaatatatgagctttcctttataattatttattaaactatccatgtagagtctatgcattttatgcatgcatatttcacaaaagagaaacggtattaatgaaaacratgtgatgaggtatataaaaatacttgcaaagaaaatgtactagatgattgttaaacaatattattttttaaatatcctgcttttgcttggtaacaagcaaacctaagtaaggggggcttttgctatgtgagtcctttactcaagatcatttatcaaaaggtgcttataaggaccaagttttgaggctaacaatatgataacattt

SEQ ID NO: 159957 - DNA, 544 bp, Homo sapiens
atatacatttgctagtcaaaatctctggcagaatattttgcgtagaaaaaactcccacaaaacattttcttttttttaattaatttttttttcttgagacagagtctcactttttgtgtcccagctggagtgcagtggctcaatcacagctcattgcagcctcgacctccctaggctcaagtgatccacgtgcttcagcctcccgagtagctgggactacaggcacatgccaccatgcctgtttttttttctttttttttttttctagagactgggtcttgccctgttgcccaggttggtctcaaactcctgggctcaagtgatcctcccaccttaaccttccaaagtgctgagattacaggcatttgtacccagccaagaatgttttcgtttattgatgacattcattgagggtgataagtcttttgtctcttctaaccactctagatagatcttcctccctttcagcaactgaaattattctctgaggttcartcatttgtcacttttgcttttctaatttgtcctagtcactggtctccat

SEQ ID NO: 159958 - DNA, 567 bp, Homo sapiens
caggaatgatgattgatgcagtggaacaggctggtggrggatgtcagttgattcacccagatgcaaccaccaaaggggcaaaactagggtatagctctgtgcctcttctgtctcacccgtaggtgaagaattggtggatttctggatccttgctgagaacatcctgagcatagatgagatggacctggaagtgagagactactacctgtccctcctcctcatgctgagggccactcatctgcaggagggctccagggtggtaaccctctgtaacatgaacatcagtaagaattataaagcatctttttggggggatgcaacaaaaaagtaaatccagtgtctgataatcctcagtctccttctttgcaggaaaccccaccttctttccatcttctatgtatcagagaggctagtggcaaccccaacacttaaccaggaaagtattgaaagacacagttgtccttaagctggcacttgcctctctctaagatactacctgccaatgaaggctggctggaaggagcggggaggaattggggcaggatacttgaaaagcacctgtaacat

SEQ ID NO: 159959 - DNA, 371 bp, Homo sapiens
tgcaacaggggtgtggctcatctgttcggctgctgcatgctcaaaccccttatgggaggaggggcacgcagacaggcaggttcaggagccagggcaagtgcttttgggctccggcccacggtagcttctacaggtgggtgcctgygattctcaaagccccagtgtgtgtgccacagtgctgttttagctctaccatccacagacagcataagtgttaaccagctcagtgcactctttgtacctgggttcttgtctggtgtccagcaagaatcaggtcacaaacagatttgaaggatggtgaatgcagagattttactggatgatggaggtggctctcagcagaatggatgcggagctgaaaaagggatgga

SEQ ID NO: 159960 - DNA, 623 bp, Homo sapiens
ctggtgtccagcaagaatcaggtcacaaacagatttgaaggatggtgaatgcagagattttactggatgatggaggtggctctcagcagaatggatgcggagctgaaaaagggatggagtggggagatgatcttcccctggagtttggctaccccatggctgatcttctttctgactgtccccagctgaactcctctcaatgttctgatgctccttctctcctctccttctctgccatgccactcttctgctcctctgctcttttgtttgtctgtccatggagcctggggtttggggtttatatgggcacaggacggggtggggcatggcaggccaaagggcaacatttgggcatggaaacaggaatgcctgttcccatttagggttgtrggtttccaggcctaggggtggggcctttgccagggaactgccctcgcctacccagtatttctctgtctactgttgatatcattttccccctctgaagaggcacatctaactgccattagaatatggacgatgaccaacctgagctacttcctgctgacagggggcattgttttggggaaaacagaagtcagattcctccccaatctacctaagggtctctggcaaaacgaagc

SEQ ID NO: 159961 - DNA, 623 bp, Homo sapiens
ctggtgtccagcaagaatcaggtcacaaacagatttgaaggatggtgaatgcagagattttactggatgatggaggtggctctcagcagaatggatgcggagctgaaaaagggatggagtggggagatgatcttcccctggagtttggctaccccatggctgatcttctttctgactgtccccagctgaactcctctcaatgttctgatgctccttctctcctctccttctctgccatgccactcttctgctcctctgctcttttgtttgtctgtccatggagcctggggtttggggtttatatgggcacaggacggggtggggcatggcaggccaaagggcaacatttgggcatggaaacaggaatgcctgttcccatttagggttgtaggtttccaggcctaggggtggggcctttgccagggaactgccctcgcctacccagtatttctctgtctactgttgatatcattttccccctctgaagaggcacatctaactgccattagaatatggacratgaccaacctgagctacttcctgctgacagggggcattgttttggggaaaacagaagtcagattcctccccaatctacctaagggtctctggcaaaacgaagc

SEQ ID NO: 159962 - DNA, 447 bp, Homo sapiens
caaaggggaccattattttctagggcagtattgatttcacattttatttttcttaacactgattaaatatataactacatmatttcagcagtatgccttcagctcttgcaccatcaaacccccatcatactattatactcatctccacaaaattctgaacctcatctcatcttctatgcttcccctaatttcctaacttttctactaggttggtgcaaaagcaattgtggttttggtatttttttttttttaagtaatggcaaaaaccgcaattacttttgcattattgggccatcagaaagtccagtctgtcatcagcaaaacacccaatatcctcaatgtctctgaatattcccttcatctttttgctctaatggaaatgaaatgtggttattccctgaggacactgtccaggctttctggagggcttttcttcctcctacatca

SEQ ID NO: 159963 - DNA, 447 bp, Homo sapiens
caaaggggaccattattttctagggcagtattgatttcacattttatttttcttaacactgattaaatatataactacataatttcagcagtatgccttcagctcttgcaccatcaaacccccatcatactattatactcatctccacaaaattctgaacctcatctcatcttctatgcttcccctaatttcctaacttttctactaggttggtgcaaaagcaattgtggttttggtatttttttttttttaagtaatggcaaaaaccgcaattacttttgcattattgggccatcagaaagtccagtctgtcatcagcaaaacacccaatatcctcaatgtctctgaayattcccttcatctttttgctctaatggaaatgaaatgtggttattccctgaggacactgtccaggctttctggagggcttttcttcctcctacatca

SEQ ID NO: 159964 - DNA, 515 bp, Homo sapiens
acatacatttgccttccatttccttgcaaatcatctttaagtgacagtagaaaagtataatcaggccaggcgcgctgactcacgcttgtaatcccagcactttgggaggccaaggcgggcagatcacctgaggtcgggagttttagaccagcctgaccaacatggtgaaaccccrtttctactaaaaatacaaaaattagccaggtgtggtggcgcacgcctgtaatcccagctacttgcgaagctgaggcatgaaaattgcttgaacccgggaggcggagattgcagtgagcagagatggtgccactgctctccagcctggggtctcaaaaaaaaattttttaaaaaaacattttctggttgacaatggttgagtttgtctaaagacctgggatagatagaaagggaatggtcatgttaagataaagattatggagaccaaacttgttttgaaatcttatagtggctgctcttagagacaataggtgacaaatgtttcctattcagatcttagt

SEQ ID NO: 159965 - DNA, 515 bp, Homo sapiens
acatacatttgccttccatttccttgcaaatcatctttaagtgacagtagaaaagtataatcaggccaggcgcgctgactcacgcttgtaatcccagcactttgggaggccaaggcgggcagatcacctgaggtcgggagttttagaccagcctgaccaacatggtgaaaccccatttctactaaaaatacaaaaattagccaggtgtggtggcgcacgcctgtaatcccagctacttgcgaagctgaggcatgaaaattgcttgaacccgggaggcggagattgcagtgagcagagatggtgccactgctctccagcctggggtctcaaaaaaaaattttttwaaaaaacattttctggttgacaatggttgagtttgtctaaagacctgggatagatagaaagggaatggtcatgttaagataaagattatggagaccaaacttgttttgaaatcttatagtggctgctcttagagacaataggtgacaaatgtttcctattcagatcttagt

SEQ ID NO: 159966 - DNA, 515 bp, Homo sapiens
acatacatttgccttccatttccttgcaaatcatctttaagtgacagtagaaaagtataatcaggccaggcgcgctgactcacgcttgtaatcccagcactttgggaggccaaggcgggcagatcacctgaggtcgggagttttagaccagcctgaccaacatggtgaaaccccatttctactaaaaatacaaaaattagccaggtgtggtggcgcacgcctgtaatcccagctacttgcgaagctgaggcatgaaaattgcttgaacccgggaggcggagattgcagtgagcagagatggtgccactgctctccagcctggggtctcaaaaaaaaattttttawaaaaacattttctggttgacaatggttgagtttgtctaaagacctgggatagatagaaagggaatggtcatgttaagataaagattatggagaccaaacttgttttgaaatcttatagtggctgctcttagagacaataggtgacaaatgtttcctattcagatcttagt

SEQ ID NO: 159967 - DNA, 613 bp, Homo sapiens
agaaggcgctagagtatgtgtacataggcactcagagtgcagttctgaataaagaagggttaaagtagctactccaactgccttcttcctctataatccaaactctgctttctgtttcaattggtagaccatgaccgccacatcaccactgaaataggaaggtgttcaggagaaataacatgattcccagttccaggttggcagggagagtaaggtttccctgtttctcagyagacacttactctatggttggaggccacaccaggatatcactggtgggcaaccaaagatgggaaggagaaaagaacagctgtttaatacttttgtttacagaaaagaaaaccaacagatttggctaagaccacagagcaaaatcatatagctctaatcatgataggcatgtggcaagcagcactatgttgtacaaagaattctgggcttaaggatagaaaaaatcagatctagtcccagaagtgctaccaaactgctatataatcttgactaagtcaatttatctctctctcttaattacctctcatgtgcctactgattcagaattttcataaagtgactactgcatgcaagacactgtgctggaatactgtgaacaaaa

SEQ ID NO: 159968 - DNA, 515 bp, Homo sapiens
acatacatttgccttccatttccttgcaaatcatctttaagtgacagtagaaaagtataatcaggccaggcgcgctgactcacgcttgtaatcccagcactttgggaggccaaggcgggcagatcacctgaggtcgggagttttagaccagcctgaccaacatggtgaaaccccatttctactaaaaatacaaaaattagccaggtgtggtggcgcacgcctgtaatcccagctacttgcgaagctgaggcatgaaaattgcttgaacccgggaggcggagattgcagtgagcagagatggtgccactgctctccagcctggggtctcaaaaaaaaattttttaaaaaaacattttctggttgacaatggttgagtttgtctaaagacctgggatagatagaaagggaatggtcatgttaagataaagattatggagaccaaacttgttttgaartcttatagtggctgctcttagagacaataggtgacaaatgtttcctattcagatcttagt

SEQ ID NO: 159969 - DNA, 214 bp, Homo sapiens
attgtcatgtcttggggaagaggtagccactaccggcatctagcaggcagaggacagggatgcaactaaacatcctatgakgcacaggacagccccatactccccaaagacttatgcggtccaaaatatacacagtaccaagattgagaaattcaaatatagactaaacaaatcaaacaaaagttctctcgtgaactcctctgaactctttaag

SEQ ID NO: 159970 - DNA, 537 bp, Homo sapiens
tctagtgttttttaagtctactctatcctgcttactgttattgagaaaggggtattgaaatctctgactataattttggatttgtctgtttctcattggaaggtcaatgaattttgatttatgttacttgagggtttttttttgtcattttgcagatttattaataaaattgaaaatgtgtatgatcagataccaaaaacacatcaagtatgaataataataataataatttttttttgagactttcactcttgttgcccaggctggagtgcaatgttgccatcttggctcaccgcaacctccacctcctgggttcaagcaattctcctgcctcagcctcccaagsagctgggattacaggcatgcgccaccatgcccagctaattttgtatttttagtagagacggggtttctccatgttggtcaggctggtctcaaactcccgacctcagttgatccgcctgccttggccccacaaagtgctgggattacaggcatgagccactgctcctagcaagtatgaataattatatatta

SEQ ID NO: 159971 - DNA, 477 bp, Homo sapiens
acaggaaatatatgtgctttgtaaactaaagaactttacaaacatgagttgtcattaatataaaaaactgttaggtttctcagcccattcattaagacagagaaactgtggttgaggtgagaaagaggaaagaatcatcttgatttcatgtatctagagatcttgggattgagaaaataaagcgggaaaagaagcttccaacctcacccatcccaactttaaccctatctttgacctagaccacttggctttcygatagcatgggaaatgaggctgacactgcaaaatcccatgtcttggtatagccatcaaagtttcagcacaaatcactggccttttttaaaaaaattatttttaagcagcacctctcattggctccactgagctaatctgagctcaaggcagtaaaacgttccaaacttggagagataaacactgacatagtccaatgttaaaattaactttgctaaactcttc

SEQ ID NO: 159972 - DNA, 462 bp, Homo sapiens
tgactttctagttagagaggcaccactccagaaagctttgaggtgccacaacaaaatccaaaaagaagctggcrcacactaaaattccttgaacttaccactaacacctagcccccacacattataatatataagcacaatagaattaactttcccttctacatctgcctggcctgaaaaaattaaatgcggattgtgatggtcaactttagatgtcaatttgactgagttaaggaatactcacatagctgataaagtgttatttctgggtatgtatttgaggctgtttccagaatagataggcatttgaatcagtgaaccatcctcacccaatgtcgtgggcacctttcaatcagctgagggcccagatagaacaaaaagacagaagaaaggtaaatttgttctcttttctggatctgagatgcccatcttctcctaccttcggacatcagaactccaggt

SEQ ID NO: 159973 - DNA, 462 bp, Homo sapiens
tgactttctagttagagaggcaccactccagaaagctttgaggtgccacaacaaaatccaaaaagaagctggcgcacactaaaattccttgaacttaccactaacacctagcccccacacattataatatataagcacaatagaattaactttcccttctacatctgcctggcctgaaaaaattaaatgcggattgtgatggtcaactttagatgtcaatttgactgagttaaggaatactcacatagctgataaagtgttatttctgggtatgtatttgaggctgtttccagaayagataggcatttgaatcagtgaaccatcctcacccaatgtcgtgggcacctttcaatcagctgagggcccagatagaacaaaaagacagaagaaaggtaaatttgttctcttttctggatctgagatgcccatcttctcctaccttcggacatcagaactccaggt

SEQ ID NO: 159974 - DNA, 462 bp, Homo sapiens
tgactttctagttagagaggcaccactccagaaagctttgaggtgccacaacaaaatccaaaaagaagctggcgcacactaaaattccttgaacttaccactaacacctagcccccacacattataatatataagcacaatagaattaactttcccttctacatctgcctggcctgaaaaaattaaatgcggattgtgatggtcaactttagatgtcaatttgactgagttaaggaatactcacatagctgataaagtgttatttctgggtatgtatttgaggctgtttccagaatagataggcatttgaatcagtgaaccatcctcacccaatgtcgtgggcaccwttcaatcagctgagggcccagatagaacaaaaagacagaagaaaggtaaatttgttctcttttctggatctgagatgcccatcttctcctaccttcggacatcagaactccaggt

SEQ ID NO: 159975 - DNA, 493 bp, Homo sapiens
tccccctccctctgacctcatgatttctattaaccttttggaggattccttctatatgatatgtcacttttttcttgctgccctcaagattttctttttgtctttggctttcaacagcttgactgtgatgtgtctaggtgtgcatctctttgcattaatcttacttagagtttgytgagcttcttctttctgtaatgttttttcatcaaatttgggatgttttcagccatgatttcttcaaatattctcttttctccttcctctttctcctccgcttctgggattcccattatgtgtatgttggtatactcgacagtgtcccctagatctctgaggctctgaatactcttcttcatcctattttctttctgttcatcagactgcataatatcaattgacatgtcttcaagttaactgattctttcttcagccaattcaaattttcttttgggctcctctagaaagtttttcatttccattattgtaattttca

SEQ ID NO: 159976 - DNA, 493 bp, Homo sapiens
tccccctccctctgacctcatgatttctattaaccttttggaggattccttctatatgatatgtcacttttttcttgctgccctcaagattttctttttgtctttggctttcaacagcttgactgtgatgtgtctaggtgtgcatctctttgcattaatcttacttagagtttgttgagcttcttctttctgtaatgttttttcatcaaatttgggatgttttcagccatgatttcttcaaatattctcttttctccttyctctttctcctccgcttctgggattcccattatgtgtatgttggtatactcgacagtgtcccctagatctctgaggctctgaatactcttcttcatcctattttctttctgttcatcagactgcataatatcaattgacatgtcttcaagttaactgattctttcttcagccaattcaaattttcttttgggctcctctagaaagtttttcatttccattattgtaattttca

SEQ ID NO: 159977 - DNA, 594 bp, Homo sapiens
aaaaactattggcatctattttcataaatttctaactctggtagtcaaaaggtagttccatttacaacattccttggtaaaatactgacttgggtcacatgatctacctcaccatagggagaggkatactcactgacctggtcagagccatacacccaaggagataacctttgccactagaagaagtgatgggagttgaccagtaacctgactaacgtacttgacaactaaaaacaaaagctagcacttgcagtatgtgaaaagctgaaaaaatattttatcccaagtctgggcatatatccatagcttcagagccccatctgtgttcccttgtactctcagacaggggttaaggaaataaagaacaggcatgttgtccactagcaccaagaaggacacacaaatattcgtgaatgaagacatgaataaaagtaccaaatgcattgttccctaaccctggaccttccccttaaccactttgttcactctgctcttattcttcatgtgacgaggtcacttagggcagaggagacaggtaggagcagtgtggtcttgcttgtcctgagttgtggctcaaaaataagagaaaaggtt

SEQ ID NO: 159978 - DNA, 594 bp, Homo sapiens
aaaaactattggcatctattttcataaatttctaactctggtagtcaaaaggtagttccatttacaacattccttggtaaaatactgacttgggtcacatgatctacctcaccatagggagagggatwctcactgacctggtcagagccatacacccaaggagataacctttgccactagaagaagtgatgggagttgaccagtaacctgactaacgtacttgacaactaaaaacaaaagctagcacttgcagtatgtgaaaagctgaaaaaatattttatcccaagtctgggcatatatccatagcttcagagccccatctgtgttcccttgtactctcagacaggggttaaggaaataaagaacaggcatgttgtccactagcaccaagaaggacacacaaatattcgtgaatgaagacatgaataaaagtaccaaatgcattgttccctaaccctggaccttccccttaaccactttgttcactctgctcttattcttcatgtgacgaggtcacttagggcagaggagacaggtaggagcagtgtggtcttgcttgtcctgagttgtggctcaaaaataagagaaaaggtt

SEQ ID NO: 159979 - DNA, 313 bp, Homo sapiens
ttttggtaagtgatattttcctagggatttattcattttctctaggttatttaacttgttggcatagacttgttcataacartcccttataatcctttttatttttgaggcatctgttgcaatgtttccatttctatcttattatctgagtattttttctctttgtcttagtctggctaagtgtttatcagttttatttatattttcaaaacattaattttcctattgttttttctattcactaatgtatttctgttctgaccttcattatttccttctttctgccaactttgggtttagttgttcttctttt

SEQ ID NO: 159980 - DNA, 313 bp, Homo sapiens
ttttggtaagtgatattttcctagggatttattcattttctctaggttatttaacttgttggcatagacttgttcataacaatcccttataatcctttttatttttgaggcatctgttgcaatgtttccatttctatcttattatctgagtattttttctctttgtcttagtctggctaagkgtttatcagttttatttatattttcaaaacattaattttcctattgttttttctattcactaatgtatttctgttctgaccttcattatttccttctttctgccaactttgggtttagttgttcttctttt

SEQ ID NO: 159981 - DNA, 645 bp, Homo sapiens
ataggattttggattaaagagacccaggtttgaatcttaactttcagaaygaactctttgaccgtcaataaatcatttgagcttttcaagttttagtttcttcccctgtaaaatggtgataaaaatacacatttataatgctgtttcagagcttaaaagaaaaagaaaaaatagaattaggaatttcagcctcatgacagatccataattgatgttcaaacagtaactatcattaatattagttaactatttctttattatttcattaattattcattaaataatatttctttctaagggaaggaagaacttggacagaacactgggccattactgcttattttgatgggattattgaatttcaatcttactacctgtttgccaattaaaaaagcaatctttcagtcattttgacatatagtgtagtgatacagtataagcatttttctactgtcagaggccaactcctaaaagctggaaacaaacctctctgctccaagaaggtcttgctggccatgaggccacatgctcactgcagcttgttagggaaacccgagcttgttaacctcattggatttagatagcgcaatggcaatgctcctcaacctttccgtcattatcaccccactaatgagatattttaga

SEQ ID NO: 159982 - DNA, 645 bp, Homo sapiens
ataggattttggattaaagagacccaggtttgaatcttaactttcagaatgaactctttgaccgtcaataaatcatttgagcttttcaagttttagtttcttcccctgtaaaatggtgataaaaatacacatttataatgctgtttcagagcttaaaagaaaaagaaaaaatagaattaggaatttcagcctcatgacagatccataattgatgttcaaacagtaactatcattaatattagttaactatttctttattatttcattaattattcwttaaataatatttctttctaagggaaggaagaacttggacagaacactgggccattactgcttattttgatgggattattgaatttcaatcttactacctgtttgccaattaaaaaagcaatctttcagtcattttgacatatagtgtagtgatacagtataagcatttttctactgtcagaggccaactcctaaaagctggaaacaaacctctctgctccaagaaggtcttgctggccatgaggccacatgctcactgcagcttgttagggaaacccgagcttgttaacctcattggatttagatagcgcaatggcaatgctcctcaacctttccgtcattatcaccccactaatgagatattttaga

SEQ ID NO: 159983 - DNA, 645 bp, Homo sapiens
ataggattttggattaaagagacccaggtttgaatcttaactttcagaatgaactctttgaccgtcaataaatcatttgagcttttcaagttttagtttcttcccctgtaaaatggtgataaaaatacacatttataatgctgtttcagagcttaaaagaaaaagaaaaaatagaattaggaatttcagcctcatgacagatccataattgatgttcaaacagtaactatcattaatattagttaactatttctttattatttcattaattattcattaaataatatttctttctaagggaaggaagaacttggacagaacactgggccattactgcttattttgatgggattattgaatttcaatcttactacctgtttgccaattaaaaaagcaatctttcagtcattttgacatatagtgtagtgatacagtataagcatttttctactgtcaraggccaactcctaaaagctggaaacaaacctctctgctccaagaaggtcttgctggccatgaggccacatgctcactgcagcttgttagggaaacccgagcttgttaacctcattggatttagatagcgcaatggcaatgctcctcaacctttccgtcattatcaccccactaatgagatattttaga

SEQ ID NO: 159984 - DNA, 645 bp, Homo sapiens
ataggattttggattaaagagacccaggtttgaatcttaactttcagaatgaactctttgaccgtcaataaatcatttgagcttttcaagttttagtttcttcccctgtaaaatggtgataaaaatacacatttataatgctgtttcagagcttaaaagaaaaagaaaaaatagaattaggaatttcagcctcatgacagatccataattgatgttcaaacagtaactatcattaatattagttaactatttctttattatttcattaattattcattaaataatatttctttctaagggaaggaagaacttggacagaacactgggccattactgcttattttgatgggattattgaatttcaatcttactacctgtttgccaattaaaaaagcaatctttcagtcattttgacatatagtgtagtgatacagtataagcatttttctactgtcagaggccaactcctaamagctggaaacaaacctctctgctccaagaaggtcttgctggccatgaggccacatgctcactgcagcttgttagggaaacccgagcttgttaacctcattggatttagatagcgcaatggcaatgctcctcaacctttccgtcattatcaccccactaatgagatattttaga

SEQ ID NO: 159985 - DNA, 585 bp, Homo sapiens
gatcaatatttttataatacttttctttatccttcaaaaatagatatctattgtcacttgaaatgtaatgttttaacatgcgttttcttagtagagaggacctccaagatggtggaactgcatttgtggaatcatcctaatgattagtgctaattagacttgtgatttcaccatgatatcagagacctaagtaagcaaaatttctttgtaaaaataatcatttgtttgtctatagtcaatatgtttctaatagaagctgtcaggattgttcaagtctgttctgaatgcaggctgtttccttccacatatgataataatctcagatgcccccgcagagtaaagaaaattctcttccaccactgcacattcatgaaaatcatgtcctatgagagtcractaaagaagttacaaagaaaatgtccagagcaaaagataaacatgatggacatagtagagacataaaagcctggatccacgtgcagatcttccttctcagagctgggcaatgtgtgctctgaacttactctgttaccgttaagaaccccgagcaacgggtaagtcacaaagctgctgtggacttcatta

SEQ ID NO: 159986 - DNA, 704 bp, Homo sapiens
agcgccagggagaggtgatcagaacacacaaactcactgcttctgattgctttagaactaaggccctttgtctcattatttcacctcaggtacatttttgaaggttgccaggattcacagaagggtgtagtgggtgaaagggggacacagcactgccctaggggcctccagatgcggtttctagacactcagtaaagtgatggccttggctggtaaatccatccactgggatgtcatcctcacaacaaaacagggtttagaccagcagatctctgacctttgcggctttcagatgagagaccagttgatcatgattgggctgaatgttgctgatttcacttgttcatcattcacttattccatgtgtctctaagcctggaatgtgcgggaragctggggtagcagagatcccatgatgtggctgcagctctagagcagcctccaccacaataaacaaacagacacacaattgattttgatgatgttgatataatgaaggtaactaagtttaacatttatcagaaaagtgtgacttctgcctgccaccttacaatttgaatcatttaggaccatggccgtaagagtccacacccaaaaccacttacacagctgggtacttcgagccaaagtatttcttaacacagctccttctgctcaggaccccaagggaaatcaataaatagttcctcatatgagcaggcaaa

SEQ ID NO: 159987 - DNA, 533 bp, Homo sapiens
gatgaatctttggacagtcacaattatttgacttttagaaactgcttacatttggacatactgctggagaatacaaacaaaattaaaaactaagctaatgttggctcaatttagcaactgtcaagcagcattgttggcaactgagtttggttaattgtcttatcccaagcaacacagctggtgactggtccagaccctgcatctttaagaaaaaggagcccatgatcataccaatacccttcacagcttttaaggttgcaaaaagttatgggagtggtgataatgaggatgatgggagggcatggccggagaagcctggcgtggctgaaatagaggcttcacatcaactcgatgaggccagacgatagaagattgaaagaggaatgaccaaaatctgtctgataactatgaaaatcccatcataatttaaggagctgcccatttttcataccatcctayatattacctattcctttcacacacaaggtgagagtcagtggcacacacaacagtggttctggagagtgttcaga

SEQ ID NO: 159988 - DNA, 614 bp, Homo sapiens
caaacaatttttctgttggaaataaaaagtttaatgtgtaagagtgttgtaaaaataatactgggagttttgtgtgtttatctccttgataaataattcagggaaagagagtttgcagggaaaggtggtttaagaaagctctactagatgttttatggagacagtgtttgcaaaacttttgaaaatagttatttgaaatagccagttattgcttagttgaagtaacaataaayttttatattagaacacaggactcactatccaacttgttttatctgccacagtttctaaggcaggattccatatagttaaatcctgctatgatatagactttctttttcaagccatttctttccttttgagggttttgcaagagttctctttctctctctctcatactgataccttctttatttacaactaagtcgctatacgaaagcaacccagggaatatggggtcctctgtgtggttcattttcaatgtctctgtgttggggcattgcctgatggccatgagctgtgcccatctacacttggcatcttagtcacctacatctccatctgtcacactgacctgctggcatccttctgctctgcaatcaagttgcaaaggc

SEQ ID NO: 159989 - DNA, 569 bp, Homo sapiens
gtgtgtgtgtgaagagatcttgttcttaaatttattgaatataagatgttatgtgtgagatatttacaaaaagaccttgttttaaaatttattaaaaacaaaatgatatatatgtgatatttgcttacccatgtagasgtgatttttgaattctcaatattctaacatatttgcttaatttatttcctgagtttctaagttagatatgattgtgcttttgttaaattctctttgtatttctctcaaattttgtcttaaatattttaattatgttattaactgaagaaaagtaattaccaatagactttcttagaatattgttattttgattaatatatagtattatggtttttttggtcttaaattggagtctgtctatattaatattgttttatttgtttacttttgcttatttgtttttattgatgttttatttgtattatttttcatataaaagatacagaattttgtcatcccacaatctttattattaattaaaaagtaaatataagttaataattgccaacaaaaactgaaaattataaaaaataaagctgtagaataaaata

SEQ ID NO: 159990 - DNA, 569 bp, Homo sapiens
gtgtgtgtgtgaagagatcttgttcttaaatttattgaatataagatgttatgtgtgagatatttacaaaaagaccttgttttaaaatttattaaaaacaaaatgatatatatgtgatatttgcttacccatgtagacgtgatttttgaattctcaatattctaacatatttgcttaatttatttcctgagtttctaagttagatatgattgtgcttttgttaaattctctttgtatttctctcaaatttygtcttaaatattttaattatgttattaactgaagaaaagtaattaccaatagactttcttagaatattgttattttgattaatatatagtattatggtttttttggtcttaaattggagtctgtctatattaatattgttttatttgtttacttttgcttatttgtttttattgatgttttatttgtattatttttcatataaaagatacagaattttgtcatcccacaatctttattattaattaaaaagtaaatataagttaataattgccaacaaaaactgaaaattataaaaaataaagctgtagaataaaata

SEQ ID NO: 159991 - DNA, 569 bp, Homo sapiens
gtgtgtgtgtgaagagatcttgttcttaaatttattgaatataagatgttatgtgtgagatatttacaaaaagaccttgttttaaaatttattaaaaacaaaatgatatatatgtgatatttgcttacccatgtagacgtgatttttgaattctcaatattctaacatatttgcttaatttatttcctgagtttctaagttagatatgattgtgcttttgttaaattctctttgtatttctctcaaattttrtcttaaatattttaattatgttattaactgaagaaaagtaattaccaatagactttcttagaatattgttattttgattaatatatagtattatggtttttttggtcttaaattggagtctgtctatattaatattgttttatttgtttacttttgcttatttgtttttattgatgttttatttgtattatttttcatataaaagatacagaattttgtcatcccacaatctttattattaattaaaaagtaaatataagttaataattgccaacaaaaactgaaaattataaaaaataaagctgtagaataaaata

SEQ ID NO: 159992 - DNA, 572 bp, Homo sapiens
tacaaaaagagtactattccaaaggcctacctagcttctttattattgtatgggcacaactgcacacaaagtctttctttcataatttttgggatttttttttctttaaatttacayaagtcctggcaaaacaacctgcgttccaggtgtctctgcaatagcagtggaccatggctagccaacacgtttatcctggtacattgtaaatctgatcatttggcacttattctatgtttagtaagattgtagtgttcaattccatggggaattgtgttgttatcaattagaagttaggacctgggagggaatggaaggtgctaagagccctgtatttgccatctttggtctagcttatacatgctccaagtcctcattctgccttgtatctccagtgtctagcacagcatatgaaactatggctttgaacagcaaatgctggtgaaatgataacaaaatcaaaattaatttatggtaagagatacttttctaacaatatgaaagactatatgtgtattattctgctcgggctgccataacaaaatatcatacaaactgggtggcttaaataacag

SEQ ID NO: 159993 - DNA, 612 bp, Homo sapiens
ctgctagtttttttccagtctattttttctcttccactcaaactgggtactttctattgctctatgctcaagtgcataactatttcctctgttctctccattctgccrtcaatcccatccattaaaaaaaaaagtttgtcatattgaattttatgtctaaaatttttctatgtttttctttatatcttcaattttttttcctttggcttttaatattatcattggtttcaagcatatttgtcattgctttttgaaacattttcctttgggtatatacccagtaaagtataataaatatatatatatttatatatacacacacacacacacatatatatatatatagaaacattttcttattggctggtttacaatccttgtcagatagtgctaacatctatgttatcccaatgtttgtgtctgatttttttttttatattcacgtttagttcttcctggtccttttcatgagataactttcaatgaactatgaatattttgggtattatgttgtaagactctagttcttatttaaagtgtgttttagtagatcttctctgataccacttcaacagggatagcagtaccttctcaatgctgcctgctgtggct

SEQ ID NO: 159994 - DNA, 612 bp, Homo sapiens
ctgctagtttttttccagtctattttttctcttccactcaaactgggtactttctattgctctatgctcaagtgcataactatttcctctgttctctccattctgccatcaatcccatccattaaaaaaaaaagtttgtcatattgaattttatgtctaaaatttttctatgtttttctttatatcttcaattttttttcctttggcttttaatattatcattggtttcaagcatatttgtcattgctttttgaaacattttcctttgggtatatacccagtaaagtataataaatatatatatatttatatatacacacacacacacacatatatatatatatagaaacattttcwtattggctggtttacaatccttgtcagatagtgctaacatctatgttatcccaatgtttgtgtctgatttttttttttatattcacgtttagttcttcctggtccttttcatgagataactttcaatgaactatgaatattttgggtattatgttgtaagactctagttcttatttaaagtgtgttttagtagatcttctctgataccacttcaacagggatagcagtaccttctcaatgctgcctgctgtggct

SEQ ID NO: 159995 - DNA, 554 bp, Homo sapiens
agctcctcccatctcccttgcaccatgcctttcatggccggtgactctgtgaatatagttttcttgggagagaagctgctgtaagttcctttcttttgctcatttcttccagaggtcctctcctccctaattatcctggggtttgcaatttttgtatgtgtgaaaaaytagaccttggcccatgaccttgaacagtaggataaaaacaactcccacaagcttagcatcccaataatgggactttaggcataaatgggttaaagagcaatctcaagctccttagattttgtgactcctctgatcctccttttacccgatccaagtgttttcatctctgtttaacacctcgttaatctgccccatatttcagtgggtgattttcagagccttctctgataaagtgtggttctcctttaaggagggatgctgtgcctcagaagtgcaagtgaaaatattaagactgacaaagacttgaaagaatgaggataactgatgcaggtgcaaggtgaggaaaccagtgttagagattgattaaatatttaaatgttacatgt

SEQ ID NO: 159996 - DNA, 554 bp, Homo sapiens
agctcctcccatctcccttgcaccatgcctttcatggccggtgactctgtgaatatagttttcttgggagagaagctgctgtaagttcctttcttttgctcatttcttccagaggtcctctcctccctaattatcctggggtttgcaatttttgtatgtgtgaaaaattagaccttggcccatgaccttgaacagtaggataaaaacaactcccacaagcttagcatcccaataatgggactttaggcataaatgggttaaagagcaatctcaagctccttagattttgtgactcctctgatcctccttttacccgatccaagtgttttcatctctgtttaacacctcgttaatctgccccatatttcagtgggtgrttttcagagccttctctgataaagtgtggttctcctttaaggagggatgctgtgcctcagaagtgcaagtgaaaatattaagactgacaaagacttgaaagaatgaggataactgatgcaggtgcaaggtgaggaaaccagtgttagagattgattaaatatttaaatgttacatgt

SEQ ID NO: 159997 - DNA, 464 bp, Homo sapiens
gaattcagcaccttcaactaaaatatccacgttctcacatcaggactgactaggcagacagctggacccatggagaacaaagaaaaggagggtggggtgatgatccaagtgggagaagcatggagccaaaagaacccccacccccagccaagcagagcagtgagagattgtgcaaccccaccagggaaaccacacttctcccactccatatttgtaacctgtggatcaggagatcccctcatgaccccacaccaccagggccttgggttcaatacacagagcygtgtctcaaaagaacagtcactcaggctcgcacagtaacccaggagttttacagactccaccctaggaatcccagcaaggtggaagatccatctgctcactcccctaggagggggactgaatccagggatccaagcaacattgttctgcaggccacacttccacagcacctcacaagttaa

SEQ ID NO: 159998 - DNA, 625 bp, Homo sapiens
tagaagttcactgtaaagtggtcaagtttttaatgattaaggtaccaataaatataaggaatataacatggttcttaattgaggaatataaccatactgggttttaaattgtttttttagggacatggacatagattcctttaaaagccttatatttagtggttaggtaccaggttcatccctaaaacctactaaaactatattgactctgaaatggcactttcaatttccttaagattccatcctcatcctactcccaatggaagccttcaatttattagataattggaaaattgagacttgaggcctactgaaccatgggggagtgaggggtgggtgaatgtgggcccttctgggtttagtagcactcaaattagcataagaatatgctatttctgggagatgacccagaaaatawggccatcaagaacaacaatgttcatatgtctgagtcccaagtattaaatctatgggttagtgactgaaggacttaggtttctttctaatttagttaaattccattagataaaattgataacttggacaaaatttgcttttaagatttcgacgaaagggactcttgtgctactgtagctccttagcccattctgtcatcagaacttgt

SEQ ID NO: 159999 - DNA, 467 bp, Homo sapiens
gagatctgagggaagttggatgttcttggaagagaaaatttcaaagccccttcttaggtggtgaatgttcttggcttgttgaaagaacaggaggggtactggtgtagcagaaattagcaaggaggaaaagtcagacggacaggctagaggtcaagttgtatatagccttataaagccatygtaagacttttaactttgtatgagatgagaagccattggaaagtttgggactgagaaatgacatgatctaacattttaaaataatatataatgacatggaacagttaaaattatcaaaaaaggatcttttataaagtaaacactgataataaaattctggcagtaactaggtacacaaaatctattttttgttggttcacatcttaacaattgtttaatattctggaaactgtaccactgaagaaaggcataaggtaacttactgcaatttgtcttttatctgtttc

SEQ ID NO: 160000 - DNA, 536 bp, Homo sapiens
tgcatagtacacaagatggtccgtaagataacttgttgaccagtcacagtgtctcacacctgtaatcccagcactttgggaggccaaggcaggcagatcacttaagctcaggagttcaagaccaccctgggcaacatggtgaaaccccgtctgtayaaaaaataacaaaaaattagccaggtgtggtggtgcacacctgtagtcccagctactcaggaggctgaggtgggaggatggcttgaaccaggaggcagaggttgcattgagtcaagattgtgccactgcacatcagcctgggtgacagagcaagactctgtctcaaaaacaaaaacttgttcattttagatttttttaagaaagttagatgtagcatggccccagttatataatagcattctcatttacaaaattctgctactgattagaaataagactggcatttctgttaagtatcttagaacataactctgactttatagactggattatttagggtatcaaattcaactagaatatcatgtcttaaaatttatttt

SEQ ID NO: 160001 - DNA, 578 bp, Homo sapiens
tctaacctgatccaggagttcatgatatcatcagggacccagcaaaagtcctctgaaatttggtttgtcctaacccttctcaatgtattgacttcatcctcaggctaacttctctcatggaaggaagcaaacagatagttgcaatagttctgggattcgcatcctyatattattcagtcttgaggaagagagttctatgttccaacatttccagccaaaagtcctgagattcactctgattgttccatctgaggtcacaccatctgaggtcacatagataaccctcaccaaggatgcagaaagatgtgatctgctcagcctgggtagtggttccatgtctggagttgaagaaagagctagtttcctcagaatcacatagttccccatataaactgagaactcgcagaaagagagaagagaagaatgtaaactcaggaggaaccaagaagaattcattacattatgaaacctggccaaccaagaggtgaatccaaataaagaagtacaagatgagtaataaatgtgaaagaacaggtagcaaatatttgacacacatagatttagatctaagactaaac

SEQ ID NO: 160002 - DNA, 620 bp, Homo sapiens
gcaagaagtcgttcttgaaaagaaggaagaaagtggtattagtgccatttatagcggagtgggcagtggcaaccatttctatttggggacctttcatttcccttcccattttggtcatcttccyttaatgccaatattatccaccaaaaagccacatccttggaaaattcatattaatgactgtagggtatttttggggtttggagataagaataatcaaatcctcccacaccaaggctccactgacaacatcaaacctgtttgtactggcagctactgtcatcactccagcaaacacagttatttgctttggatctttattttttgttctctacaattcagggtcacctttggtttctaaggctcccaggaatcttatttcactgttggttagctttgatcactatcctttccacccttacccgaccctcccaggtcagattttagaacagtactgtcctatggaattttctctgatgatggaaatgttctgtactccactgtcaaataaaataaccattagccatatgcgactattcggcacttgaaaagtggatcagtgtgattagaaacttaaattttaatttatataattgtaagtaatttaaacttaaattgtc

SEQ ID NO: 160003 - DNA, 620 bp, Homo sapiens
gcaagaagtcgttcttgaaaagaaggaagaaagtggtattagtgccatttatagcggagtgggcagtggcaaccatttctatttggggacctttcatttcccttcccattttggtcatcttcccttaatgccaatattatccaccaaaaagccacatccttggaaaattcatattaatgactgtagggtatttttggggtttggagataagaataatcaaatcctcccacaccaaggctccactgacaacatcaaacctgtttgtactggcagctactgtcatcactccagcaaacacagttatttgctttggatctttattttttgttctctacaattcagggtcacctttggtttctaaggctcccaggaatcttatttcactgttggttagctttgatcactatcctttccaccyttacccgaccctcccaggtcagattttagaacagtactgtcctatggaattttctctgatgatggaaatgttctgtactccactgtcaaataaaataaccattagccatatgcgactattcggcacttgaaaagtggatcagtgtgattagaaacttaaattttaatttatataattgtaagtaatttaaacttaaattgtc

SEQ ID NO: 160004 - DNA, 442 bp, Homo sapiens
acagcacatagaaaatgcagcaaactcaagtcaagacaatagagagatatgctgagaacttaatactcaagccttaatcaggcaccagatgccaagaaaccttcactctcaacaaacaacacaatccactaattatctgtagaattgttgtagttggtactcttcacattcacttactccttagcaaagattgctcttgaatggaaaggttgmagaaagagccaaagccaatttggaagaagtgagaaacttacaggtttgaggaatggtgaagtcagcgaaggatctagcctccttagatgatgaacaggcaaagtcagagaaggaaccacagtgagagaattggcagatgcccctaataaaatcacacaactcagacacacacacagacacacaaatattcatgcgttatacccattcaagtaactggatatttaattca

SEQ ID NO: 160005 - DNA, 479 bp, Homo sapiens
ctgtctctctttctctttcttctgtgtgctgcggtaaacacctctcactttgactgactcttcagatttcagattcaaagggaactcccctccacctaccccaaatggagctcaactcctacgcaacccccagatctgggctggtctccaacagaagcattttgtttcttggctagccaaaagctgtaagatctctcacctcgtcctcaccagaaacttcctgctttctcctcacygcagacctaggttaccctcagctcccctccttgctgggttctgagttttagggccggggtgtaagccactgactgagtttcattttgtttttatagcacaaatgatacaaaacctgacttactggctaagtcctcgtgtttacgacatagggatttagccggtattttagctaatagctacatgtttggacaccccaagcccaatctcttggggttacaccctctctccttgttgggtcacct

SEQ ID NO: 160006 - DNA, 417 bp, Homo sapiens
tttaatggaatgtatttttgaagaagaaataaggtaggcatctgaggagttgggaggtacrtttaaaagatggtacattcacaagatggtacattcagatgccaatgaagaagtgcagttcattaaactggataaatattgctgaacctaatatgtgctaaccatctgtatatgtgactcatgctcacttaaaaaaacattccatagtctgcccgaagttctgcggcaatggaaaagacaaaccagcatctgagggcatgtaacagggctgagagagcttacagttcccttggaaatagatgttgggaaggaactctctttcaggaaagatgagtgaaaggggcaaggggcaaagactattgcatcccaccaagctgaagcaggggaaatccaacagaacgtgacacatggatattc

SEQ ID NO: 160007 - DNA, 523 bp, Homo sapiens
gagcctgaattccatccctcaggcaaagaaatcgaggaaaagtcttcccctcttccaccatcactacgtccacatccctgttttgaattttggaacagtctataaaaacttagccctaaaacaccaacagaacttcatgagaattatttcattagcatccttgcagcttaagaagcaaataacatctgaattttctcacaaattagacgacctctcctttagaagaagtaaagtttccttttatagagataatcattcaatagcaggaaagctgagtttgtttttagagccttcctatgagaacactagactcgtggcacaccaggtctcatttttccttccagaacagaytttattctgtttctcctggctcactggtttacgtagcaagccctctgtaaaataaaatcatgaaaaacccaccagtattgccagcaactccctaccagaaaggtttttcaagggattaaatccctttcagccaattattcagccatctttccagttgtttggaggaaagctt

SEQ ID NO: 160008 - DNA, 412 bp, Homo sapiens
aatacttactatgtgccagagactgctggccaggtactttacatacatcatctcatttaatactcacagcaatcttggaacatatatgatattatccccttttggaagatgaggaaattgagactcagaaaargttaggtaatttgcccaaggtcacatggttagaagggggtggtgttgagccaggaatccagtctgtcagactggaaatccttatctctttttctgacagtaactactgctctgggcaatgaccgtcatttgtctacatcttcacaagatatttccatttccatttcatgcacttttgaggtaaaacaggatcattgatttatgaagactgtttttatctgacatccatttcttcaggacgactttctgcactgcagacatttgccccctgtgatgatgg

SEQ ID NO: 160009 - DNA, 461 bp, Homo sapiens
tagggaaacgagggggcttttaaattcacagagattagaagtccagacaatgcaggaaattcacagataatatccaaagtagccaacctgccctccaaaataaaattctgatttgacccagtgaggtaagcccaggtaaggtgagcttcacttcctgccagccgtctccaagagtctgttctagtttcatctgtccagtttaaagcaggcttctctttccactcargtgtttggattccagattcaaaagaagttttaaaaatcaggacttacctcatttacctaaagattctgggtgggaaatccaatagctgtggctgttggaggggaggcagcaggctgcaatctcaccagctcctatagggatggggcaccacgggtgttatcaagtctgagccctcatcagagtgaagataaatgcatataacaataattttaaatcattttgtaggatgttaagc

SEQ ID NO: 160010 - DNA, 461 bp, Homo sapiens
tagggaaacgagggggcttttaaattcacagagattagaagtccagacaatgcaggaaattcacagataatatccaaagtagccaacctgccctccaaaataaaattctgatttgacccagtgaggtaagcccaggtaaggtgagcttcacttcctgccagccgtctccaagagtctgttctagtttcatctgtccagtttaaagcaggcttctctttccactcaagtgtttggattccagattcaaaagaagttttaaaaatcaggacttacctcatttacctaaagattctgggtgggaaatccaatagctgtggctgttggaggggaggcagcaggctgcaatctcaccagctcctatagggatggggcaccacgggygttatcaagtctgagccctcatcagagtgaagataaatgcatataacaataattttaaatcattttgtaggatgttaagc

SEQ ID NO: 160011 - DNA, 389 bp, Homo sapiens
acaagcttgggtttcacaagtggtggcacaagcaacacccttagctgccccagctggtgtcttcctaggtcacgtgctgccttagtctactggctgtaagtccagccttagcactaggcctcgcctagaaattgyggtacttgtgtcctagactgcatttcaagtttacctagaacccaagagcactttagcctgcagtggcaagttttgctgaaactcaagttccaaccactgggatgggcaatttccctctggctggggctggtccacatgctccttctgtgagtgggtgccagctgaaccaagcaaggttttgctccctgctgtgacagggcagcactgagttcaatgccaagacccctagtcactgtgcttgccctgcctcaagt

SEQ ID NO: 160012 - DNA, 389 bp, Homo sapiens
acaagcttgggtttcacaagtggtggcacaagcaacacccttagctgccccagctggtgtcttcctaggtcacgtgctgccttagtctactggctgtaagtccagccttagcactaggcctcgcctagaaattgcggtacttgtgtcctagactgcatttcaagtttacctagaacccaagagcactttagcctgcagtggcaagttttgctgaaactcaagttccaaccactgggatggrcaatttccctctggctggggctggtccacatgctccttctgtgagtgggtgccagctgaaccaagcaaggttttgctccctgctgtgacagggcagcactgagttcaatgccaagacccctagtcactgtgcttgccctgcctcaagt

SEQ ID NO: 160013 - DNA, 423 bp, Homo sapiens
cattataattcttcctctgggggtatgttaatggcacagtttacacaatggaaaaatctaggcataaattgtctgagacaatgcatcctagatgcatctgtacagatttatggaaatgcattaagagtacctagttttttgcaattttcatcagcamattgaaccacacattgataatgagagatagcactttgaacacatcgcctattgtctgtaatatcaataaaacatttgttatatatatttttctatgtttctagcctttatgaacaccctgtagaagagcacagtacccagagaaaataaataattcctatgttctttttccctccatctctagagtttctcacccaccatgttttaatgcttgctcctaccttatttatatagtgaatatattgaaataaaagaaatgccacgaat

SEQ ID NO: 160014 - DNA, 509 bp, Homo sapiens
acaaaatgcaatagctaacataatactgacctctcactgtggggaagccaagaccagctccttcaatgactgtgcagcattgaacatgttacttggcttctctgggcttcagtatcctcgtttataaactggggataacaatctataacatcgaatttgctgatttaattctgtggactaaattgcatattgtgtatacaagagccttagcttagcacttggygcataatgggtgccccaccctttgtacacatcaagtcatttaatcctcacagcaatcctatgtcctaatgtttcagtctgaaactaatgctcagagaagttcctccactgacccaacatcacacaggtgcctccagcacgcttctcagcttaaacaggggctccttatttctccaggtgttggtgcccatggttcattttcagaaccgagagcatgccagtttcacaaggagattgctggcaggccccacagtctctgttactagaaactgaattgtcagtgaaag

SEQ ID NO: 160015 - DNA, 528 bp, Homo sapiens
acttactcctctgatctaactgcaattttgaatcctttagctaacccttcccacccccaccactcttctctgtgcgtgatttctatttgcatgcaggaccttctcattccttgactttttacttctgaaggaagtttatatttcaaaactaaatttaaaaataggccaacagcatgtaaaaatgcaaatayattcttaactctgaagaaagtgtggtttaaatatagaaagatcgtaggtcttatgaaccacatttctcttcctaaatgttactcttgcctctttttctacctacttatgtgactttggaccatgtagcttttctaaccctttcaaggccctgagcttcattctgcctctgacgtgaaagcatggcctgtctgcctctgacgtgaaagcagattgtattagttgccaaaattgtattagtctgttttcatgctgctgataaagacatacctgagactgggtaatttatgaagaaaaagaggtttaatggactcacagttccatatggctggggaagcc

SEQ ID NO: 160016 - DNA, 534 bp, Homo sapiens
tattatttgcttcagcttttttgtttaattattattattatttttttttttatttttttttttttgagaccaagtctttctctgttgcccaggctggagtggagtgcagtggtgcgaccttggctcactgcaacctccacctctaggttcaagcaattctcatgcctcagcctccygagtagctgggattacaggtgcccaccaccatgcctggctaatttttgtatttttagtagaggtgaggtttcactgtcttggccaggctggtctcaaactcaagtgatccacccaccttggcctttcaaggtgctgggattacaggcgtgagccaccatacccagcctgtttaattctttataattcacttctgttgtgaaaacagcattttatacttaagcttaatgattgcaacagtcaaaattatttattttttaaacttcacttatcatttaggaattattttcccgtaaggaccaaatctacttttattatttaaaaaatttactttttggaggagctaattataactagaat

SEQ ID NO: 160017 - DNA, 534 bp, Homo sapiens
tattatttgcttcagcttttttgtttaattattattattatttttttttttatttttttttttttgagaccaagtctttctctgttgcccaggctggagtggagtgcagtggtgcgaccttggctcactgcaacctccacctctaggttcaagcaattctcatgcctcagcctcctgagtagctgggattacaggtgcccaccaccrtgcctggctaatttttgtatttttagtagaggtgaggtttcactgtcttggccaggctggtctcaaactcaagtgatccacccaccttggcctttcaaggtgctgggattacaggcgtgagccaccatacccagcctgtttaattctttataattcacttctgttgtgaaaacagcattttatacttaagcttaatgattgcaacagtcaaaattatttattttttaaacttcacttatcatttaggaattattttcccgtaaggaccaaatctacttttattatttaaaaaatttactttttggaggagctaattataactagaat

SEQ ID NO: 160018 - DNA, 537 bp, Homo sapiens
tgttgagatttttaatttcaaatgatgtctgaagcactgcctgaaacctctttcaatatcaataaaatgacttatcagataaatttaatagttatcaaataaaaacaatttgaggaagaaactataatgtgttataagttgtgacaaaaacaattacttggagttgagtaacacgtttcacttgagtgaaatctaatattctccctttaaattctttttgtgcatttttccataaatttaccaaatagtgatatctatacttataatatcttaattactcagactaccacagcaaaaataacatatgaaaacatacatagtttacatataaactacacatatagtttacataaacatagtttacataaatacatagtttaatgcaattctactaaataaaatttgaaacaccaactcatctatgtgaaataaataacccaaactgactacaactaaataaagccacactgggatgggggtrgggggtgggtaggacagggagttcattgaatatatttatcctaaatatatgcaatc

SEQ ID NO: 160019 - DNA, 603 bp, Homo sapiens
gtacaacagagcggggtgaaaagacatacggtccagcaaaagcaaacagtaagaccacaaaatgcatttggtgtgaaggacacaactgttccaatggtttctttctagtctttccagttggactcctccccgccctccctcatcctccccttcccacacctctgacacattgtgttcacattcccttccgactttgtcatcatcatccttgtaacagcctgctgttccagtacagtcttctttcttcatctaaatagcactgagtctcaatgcagaagctgatcatttcctctttgtatgccctgtgacaatgcctgtgcatacacaggagggggtcaagacatttaatcaactggttgtcttcagtaaatatgttttgttgttgctatcacggtgttgagtgctgmggacaagttagcagacattctctgtgtgccctgtcacaatgcatgggcaggcagtaggggagtcaagaaatttactcaacactgtctcttcaacttcctcacctctgttatcagccaaaaaaaaaaaaatcaaaaaaaatttttagtatttgttatacaacataatgtatacatctctccttctctttttaagctt

SEQ ID NO: 160020 - DNA, 388 bp, Homo sapiens
ggcttcaccatccacatcatgaagtttcatgttgtccctagactgttagctgcagaaaatgactgacagaatgagagtttgatagccaaattgagattactggcatttaaacaaaatcatacttttaaataacttgggttaatagtgctatctagcatacaatgtgtgtctcacccttgaaatactgagtaactaatgtttacacaatcrttagttttaacattagacttaatcttcaagtcaacattatttattcactaaaaccttcaatgaagaaaatgtgttgtttttcatagtagagcttcctttttcactgacatttaaattttattttaactattggctcttgcagtgccctagcaaaagactttctttcaccttcggggtg

SEQ ID NO: 160021 - DNA, 451 bp, Homo sapiens
aatggcttcaccatccacatcatgaagtttcatgttgtccctagactgttagctgcagaaaatgactgacagaatgagagtttgatagccaaattgagattactggcatttaaacaaaatcatacttttaaataacttgggttaatagtgctatctagcatacaatgtgtgtctcacccttgaaatactgagtaactaatgtttacacaatcattagttttaacattagacttaatcttcaagtcaacattatttattcactaaaaccttcaatgaagaaaatgtrttgtttttcatagtagagcttcctttttcactgacatttaaattttattttaactattggctcttgcagtgccctagcaaaagactttctttcaccttcggggtgttccttggtttaatttgattgttataaagatgcataaaaacagattctagaaatatttta

SEQ ID NO: 160022 - DNA, 536 bp, Homo sapiens
tacaagtgtttggccaggaggacactacaaaatacacaatgaaggagtaagatgcttgtgggactcacagaatctggraaatgaagagggtaacactcaagctctgaacctcaggtgttgccttgacaacaccacatgcactgttgccatctttaaagatgtgacatctctaaatagcaaagacccttgagggagttccaaaccaaatgcagtcttccctcaaaaagtcccaaatattttgtctttgtatgtaaaacagagtcagattctagactcagataattataaacagtgttttttttaacctggggacatttgaaaacgacaggagatgacagataatttttcattgtgtgtggctgtcctgtacattgcaggaaaactagtatctctgctctctcccaaatgtcagcattgactcccaaacattgcaacatccaaaaatattgctataaattcctctgtgggcacgacctaggaagaaagaaggcccactaaccacggctggaggcaagtttctaaaaagacaagcagta

SEQ ID NO: 160023 - DNA, 471 bp, Homo sapiens
gacaaaccaacatccgtggactagaggttatgatggagaaacaagggtaagtggagtccaataataacaagctatttttgtgtccgcttcatcctcaccccaccaaagcttgagcagaaactttatgatgtggtccattcagtttaacctctaacatttgctttccsttttttttttctctagttcactctttgagagagagataaataaacattaaaatgtaaagaaaaaaaaaatcagcaatggaaggaaaaaggaacaaaaagcaatccattggcgtcaagcttgactggaccactccactgctctgctgccgttagtgaacctgaccctgcagcaggagtcacagactcaccactcacctcaagtcctcactccctggaccctcaatctacacatcactttgtcttttatttccctgagaaatacaggccatcagtttgcagatccctcctttccccttaccctgca

SEQ ID NO: 160024 - DNA, 276 bp, Homo sapiens
atctgcctttaaggtaggctgagcctttyaaatctgggaatgagtgactgttatttctgagatgaatagaattagcttttactgggcagagaaagtgaggaacgaagtaaggaagggagagataaggggatggagggaggtttcagaagcccatgcatctactgtgcgattcctcaggatgtttttgccacaaagctactataaacatcttaaacacaaactgcttagatccagtgtcattttgtggaaacctgtaaagagactgggttttgatat

SEQ ID NO: 160025 - DNA, 268 bp, Homo sapiens
gcattatacagtaatccttcagtatccacagtgaatcagtcctaggacatttcamaatactaaattcagtagatgctcaaccatcatatataaaatagcatagtatttgcatataacctacacatatatttgcatatacttgaaatcatctataggttacttataatacctaatcaaagatatgctatgtaaatagtggttatattatatttttatttcttttaaaatttattgttatttttattatacattttaaaaatagtttcaa

SEQ ID NO: 160026 - DNA, 593 bp, Homo sapiens
acctcctttgtttctcatttttctgagttcactctcctatcttgcttttcagatttctacaaaccattgttttgtacattttgttcatattttggttgtttcaggagggatattaaatctgttttattaccgcatctttgctggaactcagyttgctttcatttttttttttatttttaagtcttttttttattatgaaaaacatttatttggttccatagttaaaagcatagtacaaaataattaaaataagtctaaatgcgttcctatgttctcccaccctgtttctttcttccacctaaaggtagtaaacttttagtgtgtggttcatattttcatttttttctttctgaaaagataatcaaaacgatttttttttagcagggatataattggccaacaaaatgtgtttgtatacatagtttcgaaagtatcaaccaagacattaaagatactatgtgcttataaaataaaaatgatatattttaaatgtagctattttttctgttacattttaataaattctttaaactgtagaatattaaatactcttggcttgagaaatacgcattattctttacccaagtagagac

SEQ ID NO: 160027 - DNA, 593 bp, Homo sapiens
acctcctttgtttctcatttttctgagttcactctcctatcttgcttttcagatttctacaaaccattgttttgtacattttgttcatattttggttgtttcaggagggatattaaatctgttttattaccgcatctttgctggaactcagtttgctttcattttttttyttatttttaagtcttttttttattatgaaaaacatttatttggttccatagttaaaagcatagtacaaaataattaaaataagtctaaatgcgttcctatgttctcccaccctgtttctttcttccacctaaaggtagtaaacttttagtgtgtggttcatattttcatttttttctttctgaaaagataatcaaaacgatttttttttagcagggatataattggccaacaaaatgtgtttgtatacatagtttcgaaagtatcaaccaagacattaaagatactatgtgcttataaaataaaaatgatatattttaaatgtagctattttttctgttacattttaataaattctttaaactgtagaatattaaatactcttggcttgagaaatacgcattattctttacccaagtagagac

SEQ ID NO: 160028 - DNA, 605 bp, Homo sapiens
acactttatgtacggtttattgtatgtcatttatactttaataaatttgttttaaaaaacaaactgaaaaaatcctaagtatttatcaagtcaaggacataaccagcagaaaaaaattatctcaagtgacttgaaaacagtgtttcattgygtgtatctaatggctatatcacaaagactaaaacattataaagaaatattaaattgcatttagttgtcttattgaaagtaacactattcacctttaacttcaaaatatcatattgtagagatacaaatataaaatcaaacaactagatataattcctgaaatattttacattaattggaaatacctatatgatctcaggaatttttttcctctctgtgtgtgtcacctatgtataatttcctagatctgtctactaaaaacctttagaagtaacgtcatactagtggcgacaatgttcagattatgatctgtaaatgacattttccaataaatgaaaccagaaccttggagaaatggctgttttaaagtctgaataaggaacatgtaagataatctgtgtacaccttattatatcagacagctggcaaggtatctaggagttctggggtaatgt

SEQ ID NO: 160029 - DNA, 605 bp, Homo sapiens
acactttatgtacggtttattgtatgtcatttatactttaataaatttgttttaaaaaacaaactgaaaaaatcctaagtatttatcaagtcaaggacataaccagcagaaaaaaattatctcaagtgacttgaaaacagtgtttcattgcgtgtatctaatggctatatcacaaagactaaaacattataaagaaatattaaattgcatttagttgtcttattgaaagtaacactattcacctttaacttcaaaatatcatattgtagagatacaaatataaaatcaaacaactagatataattcctgaaatattttacattaattggaaatacctatatgatctcaggaatttttttcctctctgtgtgtgtcacctatgtataatttcctagatctgtctactaaaaacctttagaagtaacrtcatactagtggcgacaatgttcagattatgatctgtaaatgacattttccaataaatgaaaccagaaccttggagaaatggctgttttaaagtctgaataaggaacatgtaagataatctgtgtacaccttattatatcagacagctggcaaggtatctaggagttctggggtaatgt

SEQ ID NO: 160030 - DNA, 537 bp, Homo sapiens
taatatacacattcaggaaagttctacttaaaaactcagttatctcaatatttyacttgtatatacaggccagtggatatctaagcaaaaatattgcagaggataattctatttgtgaatgctaaaaatatataatccatactactgcatactctgtatacaatcaaaaaagtatatatagttttgataatatattccaaaaaatagttttaataaggatatagaagggatgactattgaaatttaacttaaatcacttactcattgtgtagggaaaatggcaaacaagttaactatgaaaactgagaccaggcatcagatttatgttgtttcatactggtatttcaaatgatctttgagatttttcttaagtgtgctaccatgcaattctaattgaattgacctttcttctatatacttacaacaatatttttatgataaccatgcaactaatgcttaattccccatgcaaattttgaaagatattattattaataaaggcatatcaaatcttaaatatttaatatatttcttcta

SEQ ID NO: 160031 - DNA, 592 bp, Homo sapiens
ttgccatgtcctgtatgccatttttcatcttctaaggagcacatggcaggataggactagatgtgaatgaaatttattggtgaaacatcctggaaaaatgaatgttaaatataaaaataatggaagaggaagcatgagtaggcaaaaagagctttaagattgtgattcaagtatgatacctkcaaaagaagagagggaagaaaggattgcatgagaaaatctcatgccacagcacagttcaggtgaagtttcagcaggcttatatagagcccctaagggcaagaatgagccagcattactagcccactgtatttcttcactgacttagagcagcactaggtaagtgtagtttcagaattcattggagtagcagtgtaaactatgatctttgcttcaaattctattgaaagagatctgagtggtgcatctccatgctactgtatataatctcttgagctgcacatttctatttctccgtatatgtttatggagcatctcatccatgtttcctgtcagcctttattactgcagagaaacacagaagggagagctaaatgggacaatctgctgctgtgatctctgtatttagtct

SEQ ID NO: 160032 - DNA, 592 bp, Homo sapiens
ttgccatgtcctgtatgccatttttcatcttctaaggagcacatggcaggataggactagatgtgaatgaaatttattggtgaaacatcctggaaaaatgaatgttaaatataaaaataatggaagaggaagcatgagtaggcaaaaagagctttaagattgtgattcaagtatgatacctgcaaaagaagagagggaagaaaggattgcatgagaaaatctcatgccacagcacagttcwggtgaagtttcagcaggcttatatagagcccctaagggcaagaatgagccagcattactagcccactgtatttcttcactgacttagagcagcactaggtaagtgtagtttcagaattcattggagtagcagtgtaaactatgatctttgcttcaaattctattgaaagagatctgagtggtgcatctccatgctactgtatataatctcttgagctgcacatttctatttctccgtatatgtttatggagcatctcatccatgtttcctgtcagcctttattactgcagagaaacacagaagggagagctaaatgggacaatctgctgctgtgatctctgtatttagtct

SEQ ID NO: 160033 - DNA, 673 bp, Homo sapiens
tagagttttctacagagttttttttaaccattaatcagtggaaatcttttcaagtgttgctgtataaataatctcagtatataaaaaagataaaagtaaaaccttctagaaaacaataaaaaatagaactgattatttttaaagcattttgctttaaggcaaaatacttytaatgttaagtaaagtaaaccatgtaatttttcagcacaacctggaacataataagaaaaatacgtaatactatcacaattattgttagtattattatcattatatcgctctacaaaataagtgaaaataaaattatatccagccatcccttaaaacctcctggatacttccgtcttactcagagcaaacaccaacatccttatatttgtttacaaaatcctacacaattagggctcttttaaatatctgaatgtatctcccagtattctaattctcattctctcagtccatccatacctactgaagttttctcaagcttaacaaacatgtacaattaaagatatttctacttgcagtatcaatgcctgctatgttcatcccaagctgtataatgaacggatggatgaataaattctaaaatctcctttttggatggttctcctgcttatacataaataccttaacaaattagtgtcacaataaactttgaaaaataaaaacg

SEQ ID NO: 160034 - DNA, 673 bp, Homo sapiens
tagagttttctacagagttttttttaaccattaatcagtggaaatcttttcaagtgttgctgtataaataatctcagtatataaaaaagataaaagtaaaaccttctagaaaacaataaaaaatagaactgattatttttaaagcattttgctttaaggcaaaatacttttaatgttaagtaaagtaaaccatgtaatttttcagcacaacctggaacataataagaaaaatacgtaatactatcacaattattgttagtattattatcattatatcgctctacaaaataagtgaaaataaaattatatccagccatcccttaaaacctcctggatacttccgtcttactcagagcaaacaccaacatccttatatttgtttacaaaatcctacacaattagggctcttttaaatatctgaatgtatctcccagtattctaattctcattctctcagtccatccatacctactgaagttttctcaagcttaacaaacatgtacaattaaagatatttctacttgcagtatcaatgcctgctatgttcatcccaagctgtataatgaacggatggatgaataaattctaaaatctcctttttggatggtyctcctgcttatacataaataccttaacaaattagtgtcacaataaactttgaaaaataaaaacg

SEQ ID NO: 160035 - DNA, 599 bp, Homo sapiens
atttattacatgaaatatccaccatacctctttaactgctatttcaatcagaattcttactttcaagcaacaaaaaataattctagatattttaagcaaagaaaaattattgaaaagatgatggatacctcacagaatcactaggaaaacagaaaagtaataaaataaaagaaaataaaaatacaaaccaagtaacaaccaggacctctgtaaaattaatccagagaactaattctgtgctgaagtgttattgcaaccactgctgaacttcagatgacatggtttatataaatarttcttttgtgtttatttcagatggttttcgaacattgatcaagtaactatatataatagtgaccactgtggaaaatcattttgatttaaaattttagtagttaatacatatgattcagttataattttagaaatttttgaggatttatgtctcgagaaacttctctgaagttcaatttacagttaaaagcatcataaaagcgattttaagtgaatgttttatagtgtattttaatatagtagacattataatatgttttaacagaataagtaatgaaaataatgtttttctaactaacacactc

SEQ ID NO: 160036 - DNA, 433 bp, Homo sapiens
acaacttttatgctgtgggtatgtatgtgtgtgcatgtgggtgtgtggctgtgcaaggcctactgcccagaccttctctttatctaatgtttccttacaggaccaagtatcttactgcccatacatatcttttatcccattcctcactgctctacagtttagaagaawgtgttctggagtgcatatttgtatttttcctacccaaactttgaggtcctcaaatcaacaacaatattctttttatttttgtttcttaatagctaacataattcacaggacaccatgtgtgcttagaagctgtccaattaatgagaaaataatgttcaggaaaagtattttaggtgtcaatattattgctagattgtatgctctaataccagcaatcttttgactcattaataaagatttgtttgcatatcaaaacctgtgatat

SEQ ID NO: 160037 - DNA, 530 bp, Homo sapiens
gcccagctatagtcacagaagttttttccctcacatataggaatctttcccttagggctctgtggtctctggggtctcygaagcccagtttcacactgagactctcgagcatatgagattatgcctgtttcctgtgggaactcggctggactaagcacttctgatccaaactctataagctgaagccagggtcctgccatcacatgcattcctgggccctctccctggcatgaacacctttcacatcacttctcctcaggagctatattgtgggtaagagatttctgccttccagacattattgtgtgacaaagccttgtcttgttctagccagtttgtgtcatcataaggatcaaagacactgacttgcagaaaatgttgttggtgatttcttagtctgagaaaattaggaagagtatgttcattccacattcaaagcagagatagtacttgtaagggatatgtgttcttggtggacaaggtacaggttagatgccctcaaaatctcctttagaatttaaggaactcct

SEQ ID NO: 160038 - DNA, 530 bp, Homo sapiens
gcccagctatagtcacagaagttttttccctcacatataggaatctttcccttagggctctgtggtctctggggtctccgaagcccagtttcacactgagactctcgagcatatgagattatgcctgtttcctgtgggaactcggctggactaagcacttctgatccaaactctataagctgaagccagggtcctgccatcacatgcattcctgggccctctccctggcatgaacacctttcacatcacttctcmtcaggagctatattgtgggtaagagatttctgccttccagacattattgtgtgacaaagccttgtcttgttctagccagtttgtgtcatcataaggatcaaagacactgacttgcagaaaatgttgttggtgatttcttagtctgagaaaattaggaagagtatgttcattccacattcaaagcagagatagtacttgtaagggatatgtgttcttggtggacaaggtacaggttagatgccctcaaaatctcctttagaatttaaggaactcct

SEQ ID NO: 160039 - DNA, 293 bp, Homo sapiens
ggcagaataggagtattgcaaggagaattagtggtaattaggatgtgttgttgtagaagccgaataataatgggttttagtcctcgacggtgctctaaggaaatggggaactgaggtsgggcagggaacttgagtgggtcctttaacttaataaggactggcttatggtgtgtggcaacaacgggagtgttggtgtcccaaactttggggtcaacgggggtagggaagactaatggcagggttggagaggcctgggctgctgtatcggctgagaggaggggtaggagaagagc

SEQ ID NO: 160040 - DNA, 575 bp, Homo sapiens
gaggattccgaagactaggctcggggattctgggacatgcctggtcatagggatgctctcactcactataaagttgcctccactttaccaagcaggcttgttgctcagaggcttcaaggggaacctaatcacggtctttaagaacctggactcatgctccaattctgctccaagtgagggctgggagaagaaatattacagaggtaagaaygcttgtgcaggagaagtgaaaagatacacaggagagaagaagagggcaaatgaggatagagaggccagattcttccacttttctgaggaattatcctaagcaccattgcaccattttcttcacagaggaacacaacagagcacatgggattggtgagggcagtggtgtaccaattagtaatgcacagaatttctgtctgtgtatctctctctctcccccctttctctctgcccctctctcttacacacacatacactcatacacacacattctcacagagtacactgttcacagccgaaacaccacaaatacagtcatatagtagcatggccatacttgttgtcaataagacaaaaggatgtta

SEQ ID NO: 160041 - DNA, 557 bp, Homo sapiens
gaagttgcaatttatttggaggtactcacagagcccgtggtgacctgcaggtcacctgcaatgaaggagcaggtgggaaccagaataaatatctcgacctcactcacttccccctcacctgctggtgcttcctattttctgaacccaagcagattctatgggacaaaagaggctattgatacagtacatagtcatgaatctcttaggacacrgagtatagaatggacctagagaggccgaaaggagatctccagcacattggcccacataaacaaagggctggaggaaaattctgaacaaacatgaggcggccaatatttttatatattctcctttcaattactattgtgtgctatttatttcagtatttatttatttgtagcattagatactctcctttttgttctcagaatcctcttagaatcattttgaatttttttgtattcttttagacagcccaagaattataatgctgataaaaaatcatttggactaatatactgtgaaatataatctagtatgtttgcactgagaattgaaatgagaataaaaaagta

SEQ ID NO: 160042 - DNA, 557 bp, Homo sapiens
gaagttgcaatttatttggaggtactcacagagcccgtggtgacctgcaggtcacctgcaatgaaggagcaggtgggaaccagaataaatatctcgacctcactcacttccccctcacctgctggtgcttcctattttctgaacccaagcagattctatgggacaaaagaggctattgatacagtacatagtcatgaatctcttaggacacagagtatagaatggacctagagaggccgaaaggagatctccagcacattggcccacataaacaaagggctggaggaaaattctgaacaaacatgaggyggccaatatttttatatattctcctttcaattactattgtgtgctatttatttcagtatttatttatttgtagcattagatactctcctttttgttctcagaatcctcttagaatcattttgaatttttttgtattcttttagacagcccaagaattataatgctgataaaaaatcatttggactaatatactgtgaaatataatctagtatgtttgcactgagaattgaaatgagaataaaaaagta

SEQ ID NO: 160043 - DNA, 557 bp, Homo sapiens
gaagttgcaatttatttggaggtactcacagagcccgtggtgacctgcaggtcacctgcaatgaaggagcaggtgggaaccagaataaatatctcgacctcactcacttccccctcacctgctggtgcttcctattttctgaacccaagcagattctatgggacaaaagaggctattgatacagtacatagtcatgaatctcttaggacacagagtatagaatggacctagagaggccgaaaggagatctccagcacattggcccacataaacaaagggctggaggaaaattctgaacaaacatgaggcggccaatatttttatatattctcctttcarttactattgtgtgctatttatttcagtatttatttatttgtagcattagatactctcctttttgttctcagaatcctcttagaatcattttgaatttttttgtattcttttagacagcccaagaattataatgctgataaaaaatcatttggactaatatactgtgaaatataatctagtatgtttgcactgagaattgaaatgagaataaaaaagta

SEQ ID NO: 160044 - DNA, 385 bp, Homo sapiens
taataataattaaaaaaaacagtaatgagaccatgtcctttgcagggatatggacggagctggaagccattataaaaaaaaaaaaaaaaaattaagaaaaagcatcccagagactgaaaggagaaattaarcatcagagtagcaaaaaagtgattacctaagtgttcagcattacatccacagacataattgggaaggccacttaccttaaaaggtaagggaggataagtagcatgccttgttaaaagaagtaattcaacatgttttagattctacccaccatgccccatccccaacacaattaccaacctaaccagcaaaaagaaagcaggatgaacttgaaaagtagttatttatcgcagcgatctccaacctttttggcacc

SEQ ID NO: 160045 - DNA, 471 bp, Homo sapiens
attaccctttaacaagctgaaaaaaataagaacaaattaaacccaaaccaagtagaagaaagaaaacagtaaagaatggaaatcaagaaattagaaaattacaaaaccaatatagaaaatttagaaaaaacccaaaggtaattgttggaaaacaaaaatgaaattgataaacttctggctagacttaacaagaaaaaaaaagaggccaggcgcagtggctcacaactrtaatctcagcactttgggagtctgacgtgggaggattacttgagcccaggagttccagacagcctgggcaacatgacaaaaccctgtctctatcaaaaaatacaaaaattagctgggcatggtggtgcacgcctgtattcccagctactcagaagactgaagtagaagaatcacttgagcctgagagttaggggcttcagcgagccatgattgtaccactgcactccagcctgggcaacagca

SEQ ID NO: 160046 - DNA, 605 bp, Homo sapiens
aagcaatgagccaactagaaattgattcaacagattgagaaaaataaaagktaaaccagcagtggtgaaaatacagaagcaagccaactggttccacagaactccagaaagtcttggaattgagggaatgagctacctctgggagtggagatatgagtgggctgaaaagagattgggtaaaagtctatgcaaggaaatatcatatttccttcccacaccatgtatacccaatatggtttggctgtgttcccacccaaatctcatcttgaattgtaactcccacaattcccacgtgtcatgggaggaacatgatgggaggtgattgaatcatgggggtgagtctttcctgtgctgttctgatagtgaataagtctcatgagatctgatggttttaaaaatgggagtttccccatactagctctctcttgtctgccaccatgtgagacatgtctttcaccttccaccatgattgtgaggccttcccagccacatggaactgtaagtccattaacgctctttcttttgtaaatttcccagtctcaggtatgtttattagcagtgtgaaaatggactaatataatacccaggcagtattcctccccaga

SEQ ID NO: 160047 - DNA, 605 bp, Homo sapiens
aagcaatgagccaactagaaattgattcaacagattgagaaaaataaaagttaaaccagcagtggtgaaaatacagaagcaagccaactggttccacagaactccagaaagtcttggaattgagggaatgagctacctctgggagtggagatatgagtgggctgaraagagattgggtaaaagtctatgcaaggaaatatcatatttccttcccacaccatgtatacccaatatggtttggctgtgttcccacccaaatctcatcttgaattgtaactcccacaattcccacgtgtcatgggaggaacatgatgggaggtgattgaatcatgggggtgagtctttcctgtgctgttctgatagtgaataagtctcatgagatctgatggttttaaaaatgggagtttccccatactagctctctcttgtctgccaccatgtgagacatgtctttcaccttccaccatgattgtgaggccttcccagccacatggaactgtaagtccattaacgctctttcttttgtaaatttcccagtctcaggtatgtttattagcagtgtgaaaatggactaatataatacccaggcagtattcctccccaga

SEQ ID NO: 160048 - DNA, 578 bp, Homo sapiens
ctcactgttagtgtctctatgattgtgactctctcaataattaatacagtatcatctttcatggatattatgtttataatagatttattaagttgttttgccaaagaaggagagaacagcatatgtttatttgaatttccttttccatccacttaatttcttctttgctttggtagtttaaatatttaagctgctggcttcttattagattaattgagatactgtctaattaatcccgcagaggacagaaatattattctcctcttcatttttataattaaaaatagtaaacaaaaatgaaagagttcaaaactagtctgatataaaaaaggcattacagtcttaactgagacatgcttctcyttccgtctttcataaattgaggtagaaattatatgctgtagcacatccatgtatcatttttaaaaacttttttcatggcaagctcttgctatctattaattatcttaatttgtgttctcttagattgtgataatttatattcctaagatattgaagtttgagcctggagagacttaacatttgatttggatggacaaccacaatttatgatgttt

SEQ ID NO: 160049 - DNA, 419 bp, Homo sapiens
taactgggcttcaatacaaggcagttcataaagcacgaaaacaagtgaggtatgctcccatctaacatggrgagtaaaacaaacaaacaaaacaaacaaaccaacaaaaaaactagactgtcactaaagaacaaatctctgcaagaaatcagtgctcccaaaggaaaccaagtggttttcacttatgatgaaagaaaaggttgcaaattcagttggaaaattacattaaaatgactttccccctatgcccactcctgccgtgagtagatactgtactgctctgagatacttttaattctaagatcattgagcttctcacattctggtaatgttgggttatttgcacttgttacatggcagctgacttaagaattaagaagtggaagatgctaggccattaaatggttatatctgcaact

SEQ ID NO: 160050 - DNA, 632 bp, Homo sapiens
ttctgtggtttccatatactctaacctcaccttcataaatagtgyctttattaaatcctcaaattaccttaatttgagcataccatttgcttcctgctgggatcttgactcatacaccaaatatgacttaaaattttgatcagaccatgtgtggtggctaagatctgtaatcccactactttgtgaggctgaggcaggacgactgtttgaacctaggagttcaagactagcctgggcgacacagtaacaccccatctctacaaaaataaaaataaaaaattttccaggcctggtggagtgtgactgtagttccagctactcggaagacaggagagaggatcgcttgatcccaggtggttgaggctgcagtaagccatgattactccaccgcactccagcttgggttactgaataagacctcatctcatttaaaaaaaataaaggagaagaaaaaagattttgatcttgggtggccctaaggataggtgatgttattagctgagataaggaatataaggagccagatgtggtggctcatgcctgtcataaataatgcctttatcaaaacctcacattatcttaacttgagcatatcctttgcttcctgatggaatcctgactcatacaccaaa

SEQ ID NO: 160051 - DNA, 580 bp, Homo sapiens
ctatcaaagaccacagaaacctactttgtgtaaggctagatagagtatgacagacctgatcttgacggtatggacttataccgagtgaactctcataattttctacatggggaaagttgttttataaaagtcttagttgaaactcactttgttttgttcaccaaaatgcatgatcacattcaattagaattttaatgtgaaaagattgtttttcaaaaccattgccttccatgtgagattttaaataaaataattaaaagtttaaagtaaaaaaatagctggcatatgatttctaagtattaaaaattaaaacatcataaaggtttttagcaatcaagaaaatctgtacgacacatataacactaagacatcttcaaagtattcacaatgaggtagtatttgaatatgcatagaccatttcattcactgggctacttcaatcaccaccgttaactgaatatttaacatgtccmagacattatgttaaactctcaggcaatattatctcatttattcttcagaacaaacccccaaaataggtattattatttttatcatacagctgaggaaattgaaggtt

SEQ ID NO: 160052 - DNA, 547 bp, Homo sapiens
tctcaaaactctgctttgtgtagtctgaaaacaggaaaaacctttaaaagacctcattatctcagcattctgttcatgaaaaaccactgtaaacattgataaatctcctagttttagaaatattacttgttagttgcacttatagagaacaaatgggtcttgtagtagcatactgatatctctattcaacacccttttgtcttccygactctagccctagggagaaatgctcctatccagtagcttctggtaagtattgaacaacctactctcaggaaaataaaacatccctggtctgtagcatatgctttttttctgttgtgtaaatatttccaccatctggagttggacaaaagatacagtcaactccagcaagctggaactggcccatcactactcatattccctagcaaacatgtgactcttgtggggttgacatttgcagtacttgagacagaatgccagacacaggaaagagacacgaacaatcctgtgcccaatccctttgcctcaggtattggtccaaaagtggacatgtgacccagtt

SEQ ID NO: 160053 - DNA, 577 bp, Homo sapiens
aatccacaggatcatctcagcccatctaacactatttgtttttaaaaatatgagtggataccataatagataatggctttttgatgctttccttcactagagtaaggttagagcaaaaatgtattttttatatatttccataagatgcctctagcatggatactggtaataactagtactctctggtgttacaatgtatcatttctgctgaagtcacttccctatctctatgtattatagaatttcaaagtactctgttcytgtggactttacagaggtagaaacagtttttttttttaaattaaaacagttttaggcaatatactgaaacttgcctgaaggattcctttgaaatattatttcttattttcttagaaggtagatattgtgattttctggagaatttaagactggcatcctgaaaaatgtgaccaatgagtgctatgttgatgtcaagccacagtaactcagttgcttgtgaatgtttgtatgtccatcccggcctcccatgggttttggataaaatttctgcatatgctgttaatggtgactggctcttcagtatatttcaatggtc

SEQ ID NO: 160054 - DNA, 577 bp, Homo sapiens
aatccacaggatcatctcagcccatctaacactatttgtttttaaaaatatgagtggataccataatagataatggctttttgatgctttccttcactagagtaaggttagagcaaaaatgtattttttatatatttccataagatgcctctagcatggatactggtaataactagtactctctggtgttacaatgtatcatttctgctgaagtcacttccctatctctatgtattatagaatttcaaagtactctgttcttgtggactttacagaggtagaaacagtttttttttttaaattaaaacagttttaggcaatatactgaaacttgcctgaaggattcctttgaaatattatttcttattttcttagaaggtagatattgtgattttctggagaatttaagactggcatcctgaaaaatgtgaccaatgagtgctatgttgatgtcaagccacagtaactcasttgcttgtgaatgtttgtatgtccatcccggcctcccatgggttttggataaaatttctgcatatgctgttaatggtgactggctcttcagtatatttcaatggtc

SEQ ID NO: 160055 - DNA, 577 bp, Homo sapiens
aatccacaggatcatctcagcccatctaacactatttgtttttaaaaatatgagtggataccataatagataatggctttttgatgctttccttcactagagtaaggttagagcaaaaatgtattttttatatatttccataagatgcctctagcatggatactggtaataactagtactctctggtgttacaatgtatcatttctgctgaagtcacttccctatctctatgtattatagaatttcaaagtactctgttcttgtggactttacagaggtagaaacagtttttttttttaaattaaaacagttttaggcaatatactgaaacttgcctgaaggattcctttgaaatattatttcttattttcttagaaggtagatattgtgattttctggagaatttaagactggcatcctgaaaaatgtgaccaatgagtgctatgttgatgtcaagccacagtaactcagwtgcttgtgaatgtttgtatgtccatcccggcctcccatgggttttggataaaatttctgcatatgctgttaatggtgactggctcttcagtatatttcaatggtc

SEQ ID NO: 160056 - DNA, 577 bp, Homo sapiens
aatccacaggatcatctcagcccatctaacactatttgtttttaaaaatatgagtggataccataatagataatggctttttgatgctttccttcactagagtaaggttagagcaaaaatgtattttttatatatttccataagatgcctctagcatggatactggtaataactagtactctctggtgttacaatgtatcatttctgctgaagtcacttccctatctctatgtattatagaatttcaaagtactctgttcttgtggactttacagaggtagaaacagtttttttttttaaattaaaacagttttaggcaatatactgaaacttgcctgaaggattcctttgaaatattatttcttattttcttagaaggtagatattgtgattttctggagaatttaagactggcatcctgaaaaatgtgaccaatgagtgctatgttgatgtcaagccacagtaactcagttgcttgtgaatgtttgtatgtccatcccggcctcccatgggttttggataaaatttctgcatatgmtgttaatggtgactggctcttcagtatatttcaatggtc

SEQ ID NO: 160057 - DNA, 544 bp, Homo sapiens
gtttttaaaaaaaattaaaagttgggagacagattaagatggtggacaggaggcaggactagcttgcagctcccacttggatggtcagagcagtgtgtggagactcacatcgttaacttttgctccaagaactactgcaggaacataccaggaaagctgagagaatccacaaacsctttgaaggaactggatcactgctgcaggctccctgagacaccaaaaaatggtgagtctgcttcctttctcaatggggaagctcatggtctggggcaagttctcagccctggtcatttgctgcctggaaatacactcagagttgttgtgggggcatggtgggagtgagactggcctttaggactgcaggctatgtggaagcagggtgaggcctgtgactgctggctttcccccactttccttgtgacctgtatgactcagcagaagcagccataatcccgataggaatataactccattggactgggaaccacaccccatgtcccacagcagctgcagtaagccccacccaaggaaaggctgagctcag

SEQ ID NO: 160058 - DNA, 544 bp, Homo sapiens
gtttttaaaaaaaattaaaagttgggagacagattaagatggtggacaggaggcaggactagcttgcagctcccacttggatggtcagagcagtgtgtggagactcacatcgttaacttttgctccaagaactactgcaggaacataccaggaaagctgagagaatccacaaacgctttgaaggaactggatcactgctgcaggctccctgagacaccaaaaaatggtgagtctgcttcctttctcaatggggaagctcatggtctggggcaagttctcagccctggtcatttgctgcctggaaatacactcagwgttgttgtgggggcatggtgggagtgagactggcctttaggactgcaggctatgtggaagcagggtgaggcctgtgactgctggctttcccccactttccttgtgacctgtatgactcagcagaagcagccataatcccgataggaatataactccattggactgggaaccacaccccatgtcccacagcagctgcagtaagccccacccaaggaaaggctgagctcag

SEQ ID NO: 160059 - DNA, 595 bp, Homo sapiens
atcatcatcatcatcaccattaccatcatctctaccattttgctttccctggcactgaacaaagtgacatattgtggcatattgtagaagctcaacaaatattttccaaatacaaattaaatgctatcctgattttagaacactaaacaaatcttaaagayaaatttgactactcctaattaacttgaattaaactatttcaagcaaaggcaacaaaagtagcagtgaacttcacttgatttttatttcttcagacttgccagaaaaatggtaaaagtaagctcaaggaagtgcctttcatctttttgatgctctttagcctcctctagtttccccatacagaatactcacttaccaggcagtatttctgctgcagaaacacagaactaagctgtttaaccagccaggggcgccagttattcttgcttcccaacagttcagtaccgaatcagtggttagattcagtgctttgaggcatgtatgactgttgctggctagggtcaaggggtatcctcgtgaacttaaaactgtaattccttacattcttccacataaaagacggacctcagcaaagagatcagaataaaaatgaaaa

SEQ ID NO: 160060 - DNA, 547 bp, Homo sapiens
gcaaaaatcacaggaccccttgtccttagcagattgtctcaagcaccacttacttaaatgggtagagtcaagttccccataaacagcaaacagtgatatggcctggtgttcacatttgaggaattattattttatactagtagcagcgataagtttttgagtataagtagtgatgatcacattctaattgagccacaatttcagtttttgaaaatggaaattgtggtgtggggacagagtttctttatcttcaaaggagagaaatctttgcaaaagtcaagtcatagatgactatcatccagtaacaagaaaaaggaagcaatcttcctgaacttccccttctgcctgccaatgttaacaagaatagcaggagagccgtgtttgagctcatggtgaccctgcacatgacaaccaacgttgcatttaaccttcacagtcccatgaggtagatcagaaaagtctgaatttatgggtaaagaagtcgagctctgcgcaggctcacagcattttttaaggttakaccgtgagtctgtttcagacgaagtga

SEQ ID NO: 160061 - DNA, 406 bp, Homo sapiens
atcttatggaaaaagcaaggacttgatgtagttgtggaaacaggtctgctgaaaggtagttcacttttatcaagtgcacttttaaattattcataataaacctataaatataatatccatctcttgcgctgccctgggatrcatgtgtactttctgtaagctgccttgacccttttcctccatgtattgggaaacattaacctccaccttctcccattactttctgcacttctaatgcagaggttgtcacatgacgttagtgacatagtttgtctatgatttgttgccacccaaatctcatgtgaattgtaatcctcattgctggaggtggaacctggtgggaggtgtttttttggatcatgggggtggattcctcatggcttggtgctgtctttacgacagtgag

SEQ ID NO: 160062 - DNA, 602 bp, Homo sapiens
tctggtaccagttaatttcttaaaataagaagctgaagccaaacgtttttgagtaaaatgatgacatgatgaaatttctattttaaaaaagtagcaattataccaaagagaaagggagaggataatgcttattgggatgatgtttagtggatagaattatcgatttaattgagggtgagggaattggaggwattcagaatgacaatgagaattttagcagaaaattttgtatacaaagcggaaaatcccaaaataagagcaagtttcatttggtagaggagatgactgtgattggaaaaatctcaaaaatggatacaaatttcctttctaccaccttttctgatcttgtcactttggcttagggagatgattatactacatgctgttgagtgtctgagatgtttcacaagcaaacattttgactaaaattatccaacattgcaacaaaatcattaaatttccacttagaaatctgcagaacaaattccattaagtcatttaaattctgaatcagtgttctatacaggtcactcaagctgttttaaatattttccactttcattttcactgggatccattattttccctgtaaatttttacaa

SEQ ID NO: 160063 - DNA, 502 bp, Homo sapiens
atttcagtcctgtgttttaatttatatagtagatatccagcccacacttgagtaaatcattggaaaaaggagacagagtttaaaatataggtgccagaagttaccagtggtaaattttccacggaggaatggattcttctggtcatgcgtcaggaagtctgaggtgattcttagactgtttctaaagtaaatcattctctgtcaaaaacatcagaatgaataaattctgaatatctattatacagcatgtgactatagttaataattatgtatcatatacttgaaaattaccaagagagtagatcttaaacattctcaccacacacatacacataaagataactatgygaataaattgatatgtcaattagcttgattatggtaatcatttcacaatgtatacatgtatcaaaacatcacattgtaccataaatatgtaaaattttcatttttcaattatacctcaataaagttgaataaatatatgtgtatatatatatat

SEQ ID NO: 160064 - DNA, 562 bp, Homo sapiens
gctataggaccaggcagtgagtgggactaagggctcaagaaaaggctgggagttcggggaggcaattttgtcaatacgttcaactaaagtgtcatggaaatcagaaaatacacttaatgaattgatagatttgcctaagatgatttaaaggcagattgttaaaactttcaatggcttcttttagctgtgtatgataagataaaaaagaaagagatgagctaaaaatgaatctttcaagtttcagaaaaaaaaattaaaggaaatagaaaagayccagaattttctgcattcaaaaataaaactattattttcctagtttctcccagaataatattctcaaagtaagaaagggcctagaccaaaggtcaaattgagggtgatgccaacagggtaaagacaaaccaagtatgtgattagaaaacccttttgacaagacctcagcaagatttaaattggtgcttatagactcttaagaagtcttaagaagatctaaagatgtctttccatctttctgcatgcctcataagccctctcagtaaagcgcttataaattataagacta

SEQ ID NO: 160065 - DNA, 569 bp, Homo sapiens
aggccaaagaaccaagagtttaatgttcaagggcaggaagcatccagcatgggagaaagatgaaagggggaagactcaacacaagccagcttagcccaccttcttcggcctgctttgttggagccactctagcagcagattggatggtgcccaccctcactgagggtgggtctttctctcccagtccactgactcaaatgttatctcctctaacaacaccctcacagacacacccagaaacaatactttgcatcattcaatccaatcaagttgacactcaatattaactaacacagcaatgcttatctcatgataaatattatgtaaattttgaatactatttctatcatgatttgcatccaatatatttttgttgaatgaayaaatgaataaatagataaatattgacattaatcaaggaggcagcagaatggtgaatgaatttgaacagtcgaacagaagggaatttcttagaggttttcatgtggaggggcgattagatgcattctgtttggaaacaaggagtgaaaaaagaaccagtaagtagaaaatatgctcagtgtaagaaa

SEQ ID NO: 160066 - DNA, 569 bp, Homo sapiens
aggccaaagaaccaagagtttaatgttcaagggcaggaagcatccagcatgggagaaagatgaaagggggaagactcaacacaagccagcttagcccaccttcttcggcctgctttgttggagccactctagcagcagattggatggtgcccaccctcactgagggtgggtctttctctcccagtccactgactcaaatgttatctcctctaacaacaccctcacagacacacccagaaacaatactttgcatcattcaatccaatcaagttgacactcaatattaactaacacagcaatgcttatctcatgataaatattatgtaaattttgaatactatttctatcatgatttgcatccaatatatttttgttgaatgaataaatgaataaatagataaatattgacattaatcaaggaggcagcagaatggtgaatgartttgaacagtcgaacagaagggaatttcttagaggttttcatgtggaggggcgattagatgcattctgtttggaaacaaggagtgaaaaaagaaccagtaagtagaaaatatgctcagtgtaagaaa

SEQ ID NO: 160067 - DNA, 569 bp, Homo sapiens
aggccaaagaaccaagagtttaatgttcaagggcaggaagcatccagcatgggagaaagatgaaagggggaagactcaacacaagccagcttagcccaccttcttcggcctgctttgttggagccactctagcagcagattggatggtgcccaccctcactgagggtgggtctttctctcccagtccactgactcaaatgttatctcctctaacaacaccctcacagacacacccagaaacaatactttgcatcattcaatccaatcaagttgacactcaatattaactaacacagcaatgcttatctcatgataaatattatgtaaattttgaatactatttctatcatgatttgcatccaatatatttttgttgaatgaataaatgaataaatagataaatattgacattaatcaaggaggcagcagaatggtgaatgaatttgaacagtygaacagaagggaatttcttagaggttttcatgtggaggggcgattagatgcattctgtttggaaacaaggagtgaaaaaagaaccagtaagtagaaaatatgctcagtgtaagaaa

SEQ ID NO: 160068 - DNA, 606 bp, Homo sapiens
attatatatgtttacatccaaagatgaacaaggaaacagaactattttcatttaatgaactattaccagttaatgaaaataaagcaactatagctaatattatctacgctaacttacataaacatgtacagttcacccatgaacaactcagatgtaaactttcaagtccatttatacgcagattttcttctgctctgccacctctgagacagcaagaccaatccctcttcctcctcctcctcagactactcaacatgaagacaatgagaatgaagacctttatgatgatccatttccacttaataagtagtaaatayattttcttttccttatgattgtcttaataacattttcttttctatcacttacattattgtaaaaatacagtatataatacatataacatacaaagtatgtgctaattggccacctatattatcaataaggcttctgatcaacagtacactattagtaattaagttttgggggagttaaatattatatgcaaattttcacctgcccaggggagttggtactcctaatcctcacattgtttaagggttaactgcatgttacacaaagaaatgtgtatacacacacatacaa

SEQ ID NO: 160069 - DNA, 370 bp, Homo sapiens
attgacgcactgattaccccttatgtatcaggcactaggctactccctttacatacttgtgagatgtgggctactggtcccattttatggatgaagaaactgaggctcaaagagtttaaggatttttcatctcagaaaatgtcacmattttcccttcagttgctcaagccagaacactgagaatccttcttaactcccttctactcatcactgattattttcccttggcccacaaattaggtctcgaatccacatgaatccctgtatccctacagccactgccctggtctaggccacggtcactcaacaagcaattactgattgtctggtatgtaccaatctctgttccaagaaactgggatgctcaaag

SEQ ID NO: 160070 - DNA, 370 bp, Homo sapiens
attgacgcactgattaccccttatgtatcaggcactaggctactccctttacatacttgtgagatgtgggctactggtcccattttatggatgaagaaactgaggctcaaagagtttaaggatttttcatctcagaaaatgtcacaattttcccttcagttgctcaagccagaacactgagaatccttcttaactcccttctactcatcactgattattttcccttggcccacaaattaggtctcraatccacatgaatccctgtatccctacagccactgccctggtctaggccacggtcactcaacaagcaattactgattgtctggtatgtaccaatctctgttccaagaaactgggatgctcaaag

SEQ ID NO: 160071 - DNA, 618 bp, Homo sapiens
gtggttcaagttctactggtaagatgattttgggtggcacattttcattactttgtatttcttctaacagttgtatatgtattcatatgcaggaaaacatataactaggagaacatcaaccatgtgattccttggatatgatattcttttttaataacagatgttttttttccgagcaattttattttacagaaaaactggaaagaacaaagaattcccatatatcctcttctgcttcccctcatagtttcccctattatttatattttgcattagtgtagtactaattgttagtgtagtagtaatcgttataatcaatgagccaatatggacacattcgtattaactaaagtgaatagtttacatctcggttcgctcttggtgttgtacattctaagaattttgacaaatgttgaygacatgtatctaccattacagtattatatagagcagtttcactgcctgaaacatcctctgtgctccacctactcatccctccatccacccacgcccagcaaccactaatcttttacctgcccccatagttttgccttttccagaatgtgctatagccggaatcatactagacatacctttttcagattggcttctttcacc

SEQ ID NO: 160072 - DNA, 618 bp, Homo sapiens
gtggttcaagttctactggtaagatgattttgggtggcacattttcattactttgtatttcttctaacagttgtatatgtattcatatgcaggaaaacatataactaggagaacatcaaccatgtgattccttggatatgatattcttttttaataacagatgttttttttccgagcaattttattttacagaaaaactggaaagaacaaagaattcccatatatcctcttctgcttcccctcatagtttcccctattatttatattttgcattagtgtagtactaattgttagtgtagtagtaatcgttataatcaatgagccaatatggacacattcgtattaactaaagtgaatagtttacatctcggttcgctcttggtgttgtacattctaagaattttgacaaatgttgacgacatgtatctaccattacagtattatatagagcagtttcactgccygaaacatcctctgtgctccacctactcatccctccatccacccacgcccagcaaccactaatcttttacctgcccccatagttttgccttttccagaatgtgctatagccggaatcatactagacatacctttttcagattggcttctttcacc

SEQ ID NO: 160073 - DNA, 526 bp, Homo sapiens
agatctaaattggcctctgtgggtaccacgtctggcttcctgaggataaggtcaatgaatgaaaggcttctcttcagggtgatcctatcttccatttggctactttcctgaaggtatcactttgcccagccacacacgcrcacacacacacacacacacacacacacacacatgcacatgcatgcatgcatgcacgcatgcacacacacacatatgcatgcacatatacaaacacacaaaattattatcctcccaagggaggaaccggaactttgttgaattctgtgtgcacatctttgacagatgccccgagaagccacagggactgctcaaggctgtgtctgtccactagcaagtttggtaaactgcagcagagcaactgagctggaaagcaaactttgcacaaagctggccatggacacatcactgggcaaactgaagaccctagcaggaaatccaggtgttcagggcagattccagaggatttatgatgcttgggaccacccaagacagactccaaggtgga

SEQ ID NO: 160074 - DNA, 531 bp, Homo sapiens
ctctgtgggtaccacgtctggcttcctgaggataaggtcaatgaatgaaaggcttctcttcagggtgatcctatcttccatttggctactttcctgaaggtatcactttgcccagccacacacgcacacacacacacacacacacacacacacacacatgcacatgcatgcatgmatgcacgcatgcacacacacacatatgcatgcacatatacaaacacacaaaattattatcctcccaagggaggaaccggaactttgttgaattctgtgtgcacatctttgacagatgccccgagaagccacagggactgctcaaggctgtgtctgtccactagcaagtttggtaaactgcagcagagcaactgagctggaaagcaaactttgcacaaagctggccatggacacatcactgggcaaactgaagaccctagcaggaaatccaggtgttcagggcagattccagaggatttatgatgcttgggaccacccaagacagactccaaggtggaggacctgagttgtgccagg

SEQ ID NO: 160075 - DNA, 628 bp, Homo sapiens
gtgtgttgttcccttctatgtacctatgtgttctcattatttagctcccacttataagtgagagcatgcggtatttaattttctgttcctgagttagtttgctaagggtaatggcactcactgatcattagagaaatgcaaatcaaaactgcaatgagataccatctaaaccagtcagaatggctattattaaaaggtaagaaaataataaatgctggcaaggttgtggagaaaaaggaatggtctggcgcartggctcatgcctgtaatcccagcactttgggaggccgaggtggtaggatcatgaggtcaggagatcgagaccatcctggctaacacagtgaaactccgtctctactaaaaatacaaaaaattagccaggcatggtggcgggagcctgtagtcccagctacttgggaggctgaggcaggagaatggcatgaacctgggaggcggagcttgcagtgagccaagatcacgccactgcactccagcctgggtgacagtgtgagactccatctcaaaaaaaaaaaaaaaaaaaaaagaaaaagaaaaaaaaaaaggaacacttatacactgttggtgggagcataaattagtctagccattgtggaagacagtatggtga

SEQ ID NO: 160076 - DNA, 628 bp, Homo sapiens
gtgtgttgttcccttctatgtacctatgtgttctcattatttagctcccacttataagtgagagcatgcggtatttaattttctgttcctgagttagtttgctaagggtaatggcactcactgatcattagagaaatgcaaatcaaaactgcaatgagataccatctaaaccagtcagaatggctattattaaaaggtaagaaaataataaatgctggcaaggttgtggagaaaaaggaatggtctggcgcagtggctcatgcctgtaatcccagcactttgggaggccgaggtggtaggatcatgaggtcaggagatcgagaccatcctggctaacacagtgaaactycgtctctactaaaaatacaaaaaattagccaggcatggtggcgggagcctgtagtcccagctacttgggaggctgaggcaggagaatggcatgaacctgggaggcggagcttgcagtgagccaagatcacgccactgcactccagcctgggtgacagtgtgagactccatctcaaaaaaaaaaaaaaaaaaaaaagaaaaagaaaaaaaaaaaggaacacttatacactgttggtgggagcataaattagtctagccattgtggaagacagtatggtga

SEQ ID NO: 160077 - DNA, 553 bp, Homo sapiens
ataaaacaaattgtctggaagtgatgacttaaactgcccattggcagaatggtatattcacatgaaagaagtgtaatttttctttgagctgaggcaatagcctctccctttatgaatgtgctgcttggactatgtgcctgagggcaggaagagtttaaaatgcttaaagtagtctgaaattggttgttaaagagctcattgaaaatgtgtgaaagggtttggctttccctaaggccccagrttgcatcttctctaacaagggtcatttaatgccctgaggctgtcctgcccaaccttgggggcaattacaaccacctggaaatcactttaaaactccaagtcccctacctaatagcagggattctaacttaaatgaactggagtaagacctcagcatcagaatatattaaaatctcttccaagtgattctaatttgcagttaggggtgagaaccaccaccctcaggactctatctttaggtaccaaaaatcgcccaaagcagtcattgtaaaatgatgggggctcctgagcttcaatcacaggaggtttggtt

SEQ ID NO: 160078 - DNA, 551 bp, Homo sapiens
tgaaactcttagttgccatcttttcctgctgaaaggaaaggccttgctggcctccaatgcacaggttcaagagtacaatgtcttaaatcagacatacctgggctcaaatcccacagctgcatcacttgcaaagcatgtggcctcaagcaagttacctaacttccctgagcttcaggactgtcatctaagaaaggcaaatgaaaatgktactgatctcaaaggttgtttgtgcagaggaagtgagaagaaccacatgtcacctaggcacaaagtctggcaaatagaaaatatgcaccaaattttcattgttactattattgtcattttcagccccactattggactagtttcatggaccttattttttcctaatcttttctatgagttttctcactgcttcaacttaaagttggaaaaatacacatttgagacttagccacttggcagcatgaggcaaagctaattttcgtaactagaagagtgttggaacacttttatttcaaaccaattccaacatggcagaaatccaggccaggtccaggctattgtta

SEQ ID NO: 160079 - DNA, 618 bp, Homo sapiens
cttccctaggagccacttctggactttggcattgggataggtcctttagtctggttatttgctcctgggaatttgcagagtgtcccacagctgtgcttcccctggtccagggtggctcaaccttggcactgccaacattttgggtttgacagtttgttgtagggagaatgtccggtgcattttagaatgtttggcagcctgcctgttctctacmtactatatgtcagtagcagtccccagttgtgacaaacaagtgtcctgagacacggccaaatgtcccctggggcaaaatctcccagttgagaaaggctctagtccaacggcctctctaagaccaacacccttctctcagttcattttgtgttgcaggaatacctgaaactgggcaatttatgaagaaaagaggtttatttggctcttggttctgtaggcagcacaggaagcatggtgctggcatctgcttgtagtgagggctttagggagcttccagtcatggtggaagaagaaggggagcaggtgtgtcctatagtgagagaggaggaggtgccactctctttttaaacagccagctcttgtgtgaactaatagagtgagaactcattcattactgtggggagg

SEQ ID NO: 160080 - DNA, 618 bp, Homo sapiens
cttccctaggagccacttctggactttggcattgggataggtcctttagtctggttatttgctcctgggaatttgcagagtgtcccacagctgtgcttcccctggtccagggtggctcaaccttggcactgccaacattttgggtttgacagtttgttgtagggagaatgtccggtgcattttagaatgtttggcagcctgcctgttctctacctactatatgtcagtagcagtccccagttgtgacaaacaagtgtcctgagacacggccaaatgtcccctggggcaaaatctcccagttgagaaaggctctagtccaacggcctctctaagaccaacacccttctctcagttcattttgtgttgcaggaatacctgaaactgggcaatttatgaagaaaagaggtttatttggctcttggttctgtaggcagcacaggaagcatggtgctggcatctgcttgtagtgagggctttagggagcttccagtcatggtggaagaagaaggggagcaggtgtgtccyatagtgagagaggaggaggtgccactctctttttaaacagccagctcttgtgtgaactaatagagtgagaactcattcattactgtggggagg

SEQ ID NO: 160081 - DNA, 608 bp, Homo sapiens
agtgtttgcatcagcagactgagtaaagaagatggccctcagcaatgtgggtgggcatggcgtaatccgctgaaggcccagatagaagaaaaaggcggaaaaagggtgagttctctgtcttgttgagctgctacattcatctcccacccttggagactggagctcctggttctcagggctacaggctctgggacttacaccagtggcctccccagttcttggtcttyggacttggactgaatgacatcactggcttcctgggttcttcagcttgcagatggcagatcatgggacctctgggccaccacaatcatgtaagctaattcccataataaatctttgcctatatatactgtattgattctgtttctctggagaaccttgagcaatacagtcattttgctcctatgcagttatactgtagaataaatttctagaagggaatttgctgggtcaaaagttatgtgcttttataattctgatagctatcgacaaatttctcatcacagagatcataccaatttgttcctcaatcaataatgtataaaagagctttgtcctcctacacagggtatgatcaaactttacaattcttggcactctgataa

SEQ ID NO: 160082 - DNA, 608 bp, Homo sapiens
agtgtttgcatcagcagactgagtaaagaagatggccctcagcaatgtgggtgggcatggcgtaatccgctgaaggcccagatagaagaaaaaggcggaaaaagggtgagttctctgtcttgttgagctgctacattcatctcccacccttggagactggagctcctggttctcagggctacaggctctgggacttacaccagtggcctccccagttcttggtcttcggacttggactgaatgacatcactggcttcctgggttcttcagcttgcagatggcagatcatgggacctctgggccaccacaatcatgtaagctaattcccataataaatctttgcctatatatactgtattgattctstttctctggagaaccttgagcaatacagtcattttgctcctatgcagttatactgtagaataaatttctagaagggaatttgctgggtcaaaagttatgtgcttttataattctgatagctatcgacaaatttctcatcacagagatcataccaatttgttcctcaatcaataatgtataaaagagctttgtcctcctacacagggtatgatcaaactttacaattcttggcactctgataa

SEQ ID NO: 160083 - DNA, 608 bp, Homo sapiens
agtgtttgcatcagcagactgagtaaagaagatggccctcagcaatgtgggtgggcatggcgtaatccgctgaaggcccagatagaagaaaaaggcggaaaaagggtgagttctctgtcttgttgagctgctacattcatctcccacccttggagactggagctcctggttctcagggctacaggctctgggacttacaccagtggcctccccagttcttggtcttcggacttggactgaatgacatcactggcttcctgggttcttcagcttgcagatggcagatcatgggacctctgggccaccacaatcatgtaagctaattcccataataaatctttgcctatatatactgtattgattctgtttctctggagaaccttgagcaatacagtcattttgctcctatgcagttatactgtagaataaatttctagaagggaatttgctgggtcaaaagttatgtgcttttataattctgatagctatcgacaaatttctcatcacagagatcataccaatttgttcctcaatcartaatgtataaaagagctttgtcctcctacacagggtatgatcaaactttacaattcttggcactctgataa

SEQ ID NO: 160084 - DNA, 553 bp, Homo sapiens
gctctctcagtggtcattttcagcactaggcttatatacaacctaattaacaagcccataaaaatgtgcctcttctttattagtttttggaaaagcctcagcattgactccactcatgtagttgcccgcccctgagcaaccactctggtcaggggttgaatatgttggttggcgaggcctgcatcagggagcggagtccatcttatcagcatctcatgaccacatgagccgagtggggaaggatatgtggtgggctgattaaggtccccsaaagatgtccatgtctgaacccctggaagctgtgactatgttaacttatggagcaaaagggactttgaagatgcgattaaggatcttgagatgaggaggttatcttggattatttgggtgggcccaatgtaatcacaagggtccttttaagaaggagcaaggagggtcatagatagagaaggtgacatgataatggaagcagagggacctagaaagagatctgaaggtgctctgctgctgattttggagatggaggatggggctatgagccaaggaaatgcag

SEQ ID NO: 160085 - DNA, 621 bp, Homo sapiens
aaaaacaaatcaagtagtttaccaaattcacaaactaaaaaagaaaaaaaaattatctcaatagatgcaaaaaactcgtttgcaaatatttaacaacattcgtttctaataaaaattttcagcaatgtagaacctgaagagaacattttcaactatgtagcatcttcaaataacctatagcaaacatcataatgaaagaataagtgctttcctctgaggataagaacaagrcaagtatgttcactatcactgcttctattcaacattgtactaaaggttctaaccagtgcagtagtgcaaagaaaaaagtggcattcagataggaaagaagtaaaactccctttcttcacagatgatgtggtcatctatgcagaatatctgatagaagcaacaaataagctactagaaccaataattgagtttagtgaagttgcaggatacaatctcaagatacaaaaacctattatatatctatatgatgccaataaacaaccagaaattgaaattaataaacaataccattcacaataacatcaaaaatattaaatacttagagataaatctggcaaaagatgtgaaaaacttatactatgaaaattactaactactgccaagagaagt

SEQ ID NO: 160086 - DNA, 621 bp, Homo sapiens
aaaaacaaatcaagtagtttaccaaattcacaaactaaaaaagaaaaaaaaattatctcaatagatgcaaaaaactcgtttgcaaatatttaacaacattcgtttctaataaaaattttcagcaatgtagaacctgaagagaacattttcaactatgtagcatcttcaaataacctatagcaaacatcataatgaaagaataagtgctttcctctgaggataagaacaagacaagtatgttcactatcactgcttctattcaacattgtactaaaggttctaaccagtgcagtagtgcaaagaaaaaagtggcattcagataggaaagaagtaaaactcyctttcttcacagatgatgtggtcatctatgcagaatatctgatagaagcaacaaataagctactagaaccaataattgagtttagtgaagttgcaggatacaatctcaagatacaaaaacctattatatatctatatgatgccaataaacaaccagaaattgaaattaataaacaataccattcacaataacatcaaaaatattaaatacttagagataaatctggcaaaagatgtgaaaaacttatactatgaaaattactaactactgccaagagaagt

SEQ ID NO: 160087 - DNA, 362 bp, Homo sapiens
agatggaaaacaagtggattgagggtctgccaatgaaagcgacccatactgaagtccactggctctggttgagacccagaagagtcatgcatcagaataaaggtggacaggaaataccctggcctttgtagggactgagcctgcaccgacgacytcaattgcagcctgtatggaggacccctgaccatcccccagaagtagactcccatctcttctgcagcaagataacatgctactaggcctcaattcattgctaaacattttttaacaagtatctcacatttaacaaaaaaagatcagtcatatggcagcaaaatacaatgtcatatgaccaaaacatgaaagactgtgaaaatgaatct

SEQ ID NO: 160088 - DNA, 362 bp, Homo sapiens
agatggaaaacaagtggattgagggtctgccaatgaaagcgacccatactgaagtccactggctctggttgagacccagaagagtcatgcatcagaataaaggtggacaggaaataccctggcctttgtagggactgagcctgcaccgacgacttcaattgcagcctgtatggaggacccctgaccatcccccagaagtagactcccatctcttctgcagcaagataacatgctactaggcctcaattcattgctaaayattttttaacaagtatctcacatttaacaaaaaaagatcagtcatatggcagcaaaatacaatgtcatatgaccaaaacatgaaagactgtgaaaatgaatct

SEQ ID NO: 160089 - DNA, 574 bp, Homo sapiens
attgaagttccttctgggcatgcgtttcactgtaggaggccaatcagggctaatgtgacccacattttttttttctgagttgatgaaggaacttgattccccagtgtgatttccagggccttttgtaaggaatgatgcctgcctagaacactcagatctgarcattatgcagcaccattaataaaacaagcggagttctgatggcttgaactaaaccctcgtgattcctttttctccccagctggattaactaaggcagagctccggatgcttgacaaggatttgatgccatatttccagccatcagcaataaaatgccttcctgatgagatattcaaagtaggtgctcagttcttcaaggagaaatgggagcttgaccccatttcaaatcacacagggaaacaggtgatgggccttggaatttagaggcttgtgaccaggctctgctgatggggtcagaggagatctgtgtgagtttaggtgtttttaaaaaacattttttcttaaaattacaatatgtagtttaattatatttatttttacggtcatcttctcttcttctagcaggtggtac

SEQ ID NO: 160090 - DNA, 258 bp, Homo sapiens
aaaacaagcggagttctgatggcttgaactaaacccycgtgattcctttttctccccagctggattaactaaggcagagctccggatgcttgacaaggatttgatgccatatttccagccatcagcaataaaatgccttcctgatgagatattcaaagtaggtgctcagttcttcaaggagaaatgggagcttgaccccatttcaaatcacacagggaaacaggtgatgggccttggaatttagaggcttgtgaccag

SEQ ID NO: 160091 - DNA, 597 bp, Homo sapiens
cacatgactgtacttattgtgaactgatatcgtattacaatatttgtatgcttgcttgtttattttaagccttgttcctccagagaagagaattgtctcttttgttcactgctatatccccagtgcctagcacagtaaatgctcaaatatttgttgaataaatgaattatgtattttttacttccttttcttttatctccatctaaatggcctaattcattcatatatttgttcaactaatgtttgttgagcacctacaacaagccaggcattgtgctgagtgctggctcttataaggattatatgatgatatgtataaaattgtaatgctcacttaaaatttaaggtgcaacytggtaatagtgtccaagacagttgttgaaaagaattgtatttgtgtctttttggtagactaaataggaagataagtatcttgcatttaatgacaaaatgattatccacaattgcttaacctcctcctctggattaactatttacactctattacatcctggaccttgtcatgcctgtaccatctctgatcataacttctggtctttccaaagcagaggctgctgactgtccatcactgctaat

SEQ ID NO: 160092 - DNA, 522 bp, Homo sapiens
agcctgggcaacatagcgaggccccctatctacacaaaaaaaccttgaaatttagctgggcacagtggcatgtgcctgtagtccaagctacttgggaggctgaggtggaagaatcgcttgagctcaggaattcgagactgcagtgagctatgatcacagccactgcactactccagccttagcgacagagtgagaccctgtctcaaaacaaaaaaaacaagtgatctacattatctcaattaattctyacaacagcactaggaggctgaatccaggttgcctgggtttaaatcatcacccttacaagctaggtaagtgtagtcaggcatcaccatccctttgtgtctcagttgccccatgagtaaaatgggggaagcaatattatcaacctcataagggtattgtaaagattaaattagttactacacataaagtgcttagagccatgtctggcacataataaacattaattaatgttatctactattactcatcatcattaagcagaggtctgaagagaag

SEQ ID NO: 160093 - DNA, 382 bp, Homo sapiens
cctggtgtgcacaatctgtgcaatctcctcctctccagtgctgcacaattagaggatgtgatggaatagccctgccctgactgggctactagttagttgattttgagttaatcaaaagrgagagcatctgggtgggcctgacctaatcaggtgcacctttaaaagggactaggcccttcctgaagtcagagatgctcaaagtgtgagaaagcctatggagaggccacagggcaaggacctaggtttgtctttaggaggtgagagaggtctctggtcgatagccagcaagaaaaaagacctcagtcatattgatgcagggtagatgaactccaaactggggcttagcctgtgagggttcttggccttgccaggaaagaattca

SEQ ID NO: 160094 - DNA, 382 bp, Homo sapiens
ccctggtgtgcacaatctgtgcaatctcctcctctccagtgctgcacaattagaggatgtgatggaatagccctgccctgactgggctactagttagttgattttgagttaatcaaaagggagarcatctgggtgggcctgacctaatcaggtgcacctttaaaagggactaggcccttcctgaagtcagagatgctcaaagtgtgagaaagcctatggagaggccacagggcaaggacctaggtttgtctttaggaggtgagagaggtctctggtcgatagccagcaagaaaaaagacctcagtcatattgatgcagggtagatgaactccaaactggggcttagcctgtgagggttcttggccttgccaggaaagaattc

SEQ ID NO: 160095 - DNA, 382 bp, Homo sapiens
ccctggtgtgcacaatctgtgcaatctcctcctctccagtgctgcacaattagaggatgtgatggaatagccctgccctgactgggctactagttagttgattttgagttaatcaaaagggagagcatctgggtgggcctgacctaatcaggtgcacctttaaaagggactaggcccttcctgaagtcagagatgctcaaagtgtgagaaagcctatggagaggccacagggcaaggacctaggtttgtctttaggaggtragagaggtctctggtcgatagccagcaagaaaaaagacctcagtcatattgatgcagggtagatgaactccaaactggggcttagcctgtgagggttcttggccttgccaggaaagaattc

SEQ ID NO: 160096 - DNA, 561 bp, Homo sapiens
taatatctgtatatattttgtgtggttgtgacatacctaactttgtcttaatatttttgatatttctaggttatgtagtttatttgtgaattgttctcaaattgttacagatctctaaaatattttccactgtacttattgaaaagaaattcatgtataagtggagctgcatagttcaaawccatgttgttcaagggtcaactgtacagagaaatgacagaattttcttaatttagcatatcttcaaatcccatgtatttgtaaaacagtaacacaagaaattaagacattttaggtggtatcatactaattatgcttatttactgtctttgtccccaaagacagcacgatagttatctaaaaaattttcagtaaagtttcatgattgtatatatgaaagacacaaattaactcaacattgatgattcaaggttttatatttagccagcttcatgactgaaaataatagtgtttctttttcttttctgggaataaacccatttccttctcattcctttttctcagcagatggcaccaagcagatccatggaagtgagtggg

SEQ ID NO: 160097 - DNA, 483 bp, Homo sapiens
gtgtgttgtatagattattttgtcacccagatactaaacctggtacccawtagttattttttctgttcctctccttcctctcaccctacaccctcattaggacctggtgtctgttgttcccttgttagtgttcatgaattctcatcatttagctcccacttataggtgagaacatgtggcatttggttttctctttctgtgttactttgctaaacataatggcctccagcttcatccatgttcccacaaaagccataatctcattcttttttcatggttacatagtattccatggtgtatatgtaccacattttctttatccagtctgtctttgatgggcatttagatttcatgtctttgctattgcgagtagtgctgcaatgaacattcgtgtgcatgtgtctttatggtagaatgacttatgttcctctaaggatatactcagtaatgggattgctgggtcaaatggtagttctgttttca

SEQ ID NO: 160098 - DNA, 614 bp, Homo sapiens
acggggaccagcaccatctcccagtggcagaacatcaacacaacagtgatcacctttcacccaagcatttcaccagatgactgaggaccatcccactccctagtcacagctggtgcatgcacaccctgttagggaacctcagagcaagattgcctggtctgggtccacccagttttaataccccctgagattgtaggatctaggcttctggatgtttcacagctcagtccaccacttgagacacctgagtacttttcccagggcacaattttggaacactgctaccagcttggctggctccaacttgcaactgtcatctattggcctggaggctggcttgagcagtccatttcaaccacttccaataaaaaagtacagtgtgtggaaactagaaggacatcttactaccactgactgccaccaccatcacccactatacccaagcaacccaggagcaaaataacccactcccttacccagtacactgctattacaaccagcatcmagaaacatcattcagaggccacagaattgatcttcctggatccaccaacacaggtgttagcatatgcttccccacatcacaaggatagacttgcttaattcaccatcgc

SEQ ID NO: 160099 - DNA, 423 bp, Homo sapiens
actacacagaaacattctcagaaattgtttgtcatgtgtgctttcaaattaccaagttgaacctatcttgtgattgagcagtattgaatctctctttttgtggaatcggcaagtggatatttttagccctttgcggactgtggtggaaaaggaattatcttcaaatccattctacacagaagcattcagacaaacttctctgtgatgagtgcattggtcacacagaattgaacctttcctttgattgagcaattctgaaacactcttttagagggtctgcaagtggacattttagagctttggggcaaytgtggaaaagtaaatatcttcacataaaaactacacggaagcattctgagaaacttctttggaggtgtgcattcaactcacagagttgaacctatcttttcattgagcagtttt

SEQ ID NO: 160100 - DNA, 241 bp, Homo sapiens
actattgtccattagcattagatgataccatttttttaaatttaaaatttttatttttatgtagcgcttcactaaattgcgtgccatcctggtaaaggggccatgctaatctcctctamattgttgcattgttccaattttagtatgtgctgccaaagcaagctatcataccttttttgtccaatcctatttctacatggctgtccacaccttgttgaacctaagcataaaaatgaacatt

SEQ ID NO: 160101 - DNA, 491 bp, Homo sapiens
attagtagccccttaatttatcaggtgcttggcctcatgttgagagttacaccgttggctttcttggtttggaggcctttggacttagactgaaccatgctcaggaagtcaggattctgtgattgttgagcttgcagatgtcacattatgggacttctcagcctccataatctcatgagccagttctcctgataaacccactctcacctacccatctgttaatatctgtccatctattcatctatctgtctatctattcatacatcctcctggttctgtctctctagagaaccccaactaataaagatggtaaacttaatgtcatatgctttttaccacaataaaaaagtatgaaagcaaatagcacataaaggcaaataaactccatatcgaattataartgtttagaattggaagtgctttgatgttcaactcaaaatttatctccctaggattctatgcatcttagagtttgttctctgacagcatct

SEQ ID NO: 160102 - DNA, 617 bp, Homo sapiens
tattcaatgctctggctgggctcggtggctcacgcctgtaatcccagcactttgggaggccacagcaggcagattgcttgtggccaggagtttgagactagcctgcccaaaatgaaaaaccctttctctactaaaaaagcacaaaaattagccaggcgtggtgcacacgcctgtaatcccagctactcaggaggctgaggcaggagagttgtttgaacctgggaggcagaggtttcagtgagctgagatcgtgtcactgcattccagcttgggcaacagagtgagactgtctgaaaaaaaaaaagccttaaagtaagtgatcaaaggtgttaacagatctcttagaaataaattaatgttggagatttccatattgtttatacacatatatgtgatatatcccattgtttgaatatataacaatctctatattattccatattatttgagtatataggtatattaatatacmtatatattcaatcacatcaataaccatgtgtaatcagaaaaaaatagtgaaaatacttaacaaacggatttctttttctttgtctcttcaactgagggttggcagttaagggctatctagtctacatctgactctagaatatatt

SEQ ID NO: 160103 - DNA, 517 bp, Homo sapiens
gatgtgtctccctaaactagttcccaactaccctgttaaaattatttaaatgaacaaaaatctatatattaagatacacatcagagaactccaaatactgcttctcacagtaccctgtcccagccatgctgccttcctcttcacacaaatcttcaattcagcaaccctagggattaattcactaatcaacccacaccttaattcattcaagacagttattgataccctactaaatgtcaggtactggtttacaggtatattcaaggaatattagcgaaaaagaaaaagtmaatattcctaccttctatttgggtgggggggagtaaacaaatgaatatgcaaatacataaacataagtgtacacatgtaaattaaatttaaataaataggtaaaataaacagtatatcagatatgtcctagaaagaaatataatgcagggaagggagttgaagagtgtcagttggtgtgggggttgcaatgtgaaattatgtggaaggtgaaatttaagaagaaaca

SEQ ID NO: 160104 - DNA, 438 bp, Homo sapiens
ttaaaatgtttctactcagacttaaagttggtattaatattaatgctggagaggtatactgaggcatgaccaacccccacttcctgttagggcctgaaccagtctttcaggttaaattttaaaagagctctggctgaggggaaagtccatccagatgactgggcactcttagaattttattttttgcttacattgtgaacatcatagagtgcacttacacagacctagctggtatatcctcctatacacctaggctgtatgcctattgcttctagrctacaaacctttgcagtgtgttactgtactgaatattctagccaattgtaacacaatggcaaatatgtgtgcctgtaaacatatctaaacatggaaaaggtaagaatacagtattagacataaaaaatggcacacctgtatagggcacttaccataaacgga

SEQ ID NO: 160105 - DNA, 348 bp, Homo sapiens
aatagtttccagaacgcagatgtgtccacagttaactaggaaaacagaacaccctaaactgaactcctgcttatgaacatgcaggggtggctccccctgaaatgaggagacatgaatcttcaggaatgattaggcaaacatatacaaagcagggcaattcatttagttattaagttggaaaatactgtagctatgaataatccaccaataaggaattttggtcaattttgctaggtrcacatgaaagggtacatgtggtagaaaaaagtcaaaatacatgttatggtctcagaacaatgagaaattcatgaggattttgtaagaatgtcagcacaccgagaggacacg

SEQ ID NO: 160106 - DNA, 587 bp, Homo sapiens
agaacatgcggtatttggttttctgtttctgtgttaattcactaagaataatggcctccagctgcatccatgttgttgcaaaggatatgatttcattcttttttgtgtaaagccaaattttaactgttaaatttacataagcagatttcaggatcgcaattagtccattaaaatatccattgaatatgagcagaaatttgttttctcagtcagtaagatatagatgatgccataaaaatagcatacgctttcaagtgatactttaaaaatacattgttataaacttttcattcatatataaatgtatatacttacacttatttaggactaaaagattattgattattggtagatcttttatcagacatccagttttttttttttattattatttttaaagagatagtccttgctctgttgcccargctaccacaaactcctaggctcagacgatcctcctgcctcaaccttctgagtagctaggactacaggcatccaccaccataacctggtaatttattgtacaaaccgccatgacctgctgatttattatctttcattttttgtagaaatgggggtctcactat

SEQ ID NO: 160107 - DNA, 622 bp, Homo sapiens
ccaaaactttaaaaactaaattgtgatattatttcacctttctctgttctgccctgaaatttagggttcttgtaggaggaagtagtgtgggtaggcttggcatattactactaatatggatattacaatctcatcaaaccgctgggtttatatcatcctcctctgcctaaaagctgggtttgaacatctttcaccaacctcttttaaagcagtatcaggaccggacaccgtagctcacgcctgtaatcccagcactttgggaggctaatgtgggcagatcgcttgaatccaggagttcaagaccagcctgggcaacagggcgaaaccctatctctacaaaatataccaaaaattagccaggcatggtggcatgtgtctgtggtcccagctactcgggaggctgaggttagaggatcacttgagcctgggaggctgaggctgcagttagccaagayagcaccactgcactccagcttgggtgatggagcgagatcctgtctcaaaaaataaaaataatttttaaaaaagtagttctatgagtgcagtacatgtctgtaatcccagcactttgcaaggccgaggcaggaggatcacctgaggtcaggagttcaagaccagccta

SEQ ID NO: 160108 - DNA, 565 bp, Homo sapiens
acaccgtgttttaatatcaagaatgattaaaataagacatatatgcaattctactttaagtagaaacaacatcataatagactataagcaaaatgaattgttatgtgacccatcttttaagcaaaagatagccagaagtagaaataaatttcaaaatgtaaaatgtatctaggaggtatttgggcagatatctgaggaagcctcctaaacctaaagatgttagttaagcgcataagattgaataatagttaaaagtctggtttgtcaccatttgctgttctgtgtcaartaggtctgaaaatgtcccaagtaagaagctcaatactgacaaatgcaaaaataatatattctggcttgaagacaagggttttagtgtatcctgtagttaaataattcttcagtgccagaatttatactaaggccacaaacaaagggaggtcatattgtaaaacaaattagaaaactagacttataggaaaaaaccaatataaatatttccccaggcaagcttatttaataagttagatgtggttgcctttggaagccttgaaatatgtttagtaaa

SEQ ID NO: 160109 - DNA, 554 bp, Homo sapiens
ttagtaaagtgatgagctgaagatctgtgagcaggctaagaagaacaagaaaaaccaagacatgtataaactcctgatagcaatgactcattgtcatgtgtaatcctgaaggagcaagkgggaggagatggtgtttccagaaccagggaaaactggagatatgaagtgggccagggatcaaccaatgggagctgtaatgactgttgctgtgaagagacacagcctttatataagaacacagctgaagaaaggattaggaaatttatatcctgacttctttttcctcttgccttctcatctcctctggtggctctcatggctgaagtcaaacagaagccactctacaagcctgcggatgcaattgtcagttcacaaggcaaggcagagggtctgcagggaacaagaaggtgacaggcaagggaggaaaacagaatagccagcactttccccactcttaggctttaatccccaagaaggcaggaatcattactgtattcttcatttacttattcctagtgcctaccacagcacctggcacatagcattcaggaaat

SEQ ID NO: 160110 - DNA, 554 bp, Homo sapiens
ttagtaaagtgatgagctgaagatctgtgagcaggctaagaagaacaagaaaaaccaagacatgtataaactcctgatagcaatgactcattgtcatgtgtaatcctgaaggagcaagtgggaggagatrgtgtttccagaaccagggaaaactggagatatgaagtgggccagggatcaaccaatgggagctgtaatgactgttgctgtgaagagacacagcctttatataagaacacagctgaagaaaggattaggaaatttatatcctgacttctttttcctcttgccttctcatctcctctggtggctctcatggctgaagtcaaacagaagccactctacaagcctgcggatgcaattgtcagttcacaaggcaaggcagagggtctgcagggaacaagaaggtgacaggcaagggaggaaaacagaatagccagcactttccccactcttaggctttaatccccaagaaggcaggaatcattactgtattcttcatttacttattcctagtgcctaccacagcacctggcacatagcattcaggaaat

SEQ ID NO: 160111 - DNA, 602 bp, Homo sapiens
cttccactttaatgttataaagatagcttctttccttaaaccttataaaccagcctctgctaggttcaaacttttctcttgcagcttcctcacctctgtcagccttcatagaattgaagacatttagggcctttctgtgagttaggttttggcttcagggaatgttgtggctgrtttgatctacccagaccattaaaactttctttctatcagcaataagcctgttttgctttcttatcatttgtgttttcactggggtagcaattttaatttccttcaaaaactttttttttttcattcacaagtcggctaactgagcacaggcctagctttcagtctgtcttggtttttgacttgccttcctcactaagcttaatttctagcctttgatttaaactgacagatgtgctgctcttcctttcacttgaacacttagaaaccattgtagggttattaattggcttaattttaatattattgtgtctcagggaataagaaatcctgaagagagggagagagatgagggagtggccagttgatggaacagtcagaacacatacatttattattttagtttgctgtcttctatgggcatagttcat

SEQ ID NO: 160112 - DNA, 602 bp, Homo sapiens
cttccactttaatgttataaagatagcttctttccttaaaccttataaaccagcctctgctaggttcaaacttttctcttgcagcttcctcacctctgtcagccttcatagaattgaagacatttagggcctttctgtgagttaggttttggcttcagggaatgttgtggctggtttgatctacccagaccattaaaactttctttctatcagcaataagcctgttttgctttcttatcatttgtgttttcactggrgtagcaattttaatttccttcaaaaactttttttttttcattcacaagtcggctaactgagcacaggcctagctttcagtctgtcttggtttttgacttgccttcctcactaagcttaatttctagcctttgatttaaactgacagatgtgctgctcttcctttcacttgaacacttagaaaccattgtagggttattaattggcttaattttaatattattgtgtctcagggaataagaaatcctgaagagagggagagagatgagggagtggccagttgatggaacagtcagaacacatacatttattattttagtttgctgtcttctatgggcatagttcat

SEQ ID NO: 160113 - DNA, 631 bp, Homo sapiens
gctttgtgtagctcatttcataaatatagtagactaaagtacctcaaagaacctagaaccaaatgcaggtctgcaagctctgaaagccaactatgttctagggactgtcatatcttccaggatttccatagtctctgttctcaaagaaattgcattatatcttcaaatattttgctgaatgtaatattacaccttgagtccrttcttaatcattatgtaaacatacactatggaccttgaccaagctgtcctctaatagccaacctttatctccacagaaattcactattcgcctttttggttccaagtttaaactaagacttaacaacctaacagcaaattttcttcttttgaactctctttggcccttgacatgatctaatgaatcttcgataagccaaattaggaaatttctttgatttttaaagaatcatacattcaaaccgtgttagaatactggttcattgtgatttctcttggaaagtacagttacctttttatgatctgtccttaatggtgttcagtttttgttacttagagcgtgcatattagtgcagctataatgcacagataatttttccatatataagcttatatctttcccatattctttaagaaaaaagaaaacaaa

SEQ ID NO: 160114 - DNA, 631 bp, Homo sapiens
gctttgtgtagctcatttcataaatatagtagactaaagtacctcaaagaacctagaaccaaatgcaggtctgcaagctctgaaagccaactatgttctagggactgtcatatcttccaggatttccatagtctctgttctcaaagaaattgcattatatcttcaaatattttgctgaatgtaatattacaccttgagtccattcttaatcattatgtaaacatacactatggaccttgaccaagctgtcctctaatagccaacctttatctccacagaaattcactattcgcctttttggttccaagtttaaactaagacttaacaacctaacagcaaattttcttcttttgaactctctttggcccttgacatgatctartgaatcttcgataagccaaattaggaaatttctttgatttttaaagaatcatacattcaaaccgtgttagaatactggttcattgtgatttctcttggaaagtacagttacctttttatgatctgtccttaatggtgttcagtttttgttacttagagcgtgcatattagtgcagctataatgcacagataatttttccatatataagcttatatctttcccatattctttaagaaaaaagaaaacaaa

SEQ ID NO: 160115 - DNA, 501 bp, Homo sapiens
taatgttccctgaaaggagagaaatgatctgggtcaggattggaaacgaaaatttaaatattttcttttgctggctgcccatccacacattctcaggctgaatattaagagtagaaggatagaatcaggcagacttaattaactgccttttggcagtgacattattacataacatttcaaacyggttggtggcatatccaggaagtagaaatgatgagtgttgacttttcttgctcagcattcaatctagggaccttaatggaaatggggttattgtggatatttccaaggtcggcttttaaacatcaggtacaatactcttgaaagggattgagagataaaggggtcaagggacaatgcaagcaaggaatcccttaggaccctaataaatatttcatttcagtggttctttctaaatgcagtatataattaaacattggtgatgttttcaactgggtgtgctcagtgtttaagtccagcccatacaagttgttaactaag

SEQ ID NO: 160116 - DNA, 501 bp, Homo sapiens
taatgttccctgaaaggagagaaatgatctgggtcaggattggaaacgaaaatttaaatattttcttttgctggctgcccatccacacattctcaggctgaatattaagagtagaaggatagaatcaggcagacttaattaactgccttttggcagtgacattattacataacatttcaaaccggttggtggcatatccaggaagtagaaatgatgagtgttgacttttcttgctcagcattcaatctaggkaccttaatggaaatggggttattgtggatatttccaaggtcggcttttaaacatcaggtacaatactcttgaaagggattgagagataaaggggtcaagggacaatgcaagcaaggaatcccttaggaccctaataaatatttcatttcagtggttctttctaaatgcagtatataattaaacattggtgatgttttcaactgggtgtgctcagtgtttaagtccagcccatacaagttgttaactaag

SEQ ID NO: 160117 - DNA, 501 bp, Homo sapiens
taatgttccctgaaaggagagaaatgatctgggtcaggattggaaacgaaaatttaaatattttcttttgctggctgcccatccacacattctcaggctgaatattaagagtagaaggatagaatcaggcagacttaattaactgccttttggcagtgacattattacataacatttcaaaccggttggtggcatatccaggaagtagaaatgatgagtgttgacttttcttgctcagcattcaatctagggwccttaatggaaatggggttattgtggatatttccaaggtcggcttttaaacatcaggtacaatactcttgaaagggattgagagataaaggggtcaagggacaatgcaagcaaggaatcccttaggaccctaataaatatttcatttcagtggttctttctaaatgcagtatataattaaacattggtgatgttttcaactgggtgtgctcagtgtttaagtccagcccatacaagttgttaactaag

SEQ ID NO: 160118 - DNA, 579 bp, Homo sapiens
catcagtttatccataatgacaggcctgccagctaatagtgttacaggcagattttctctttttttctctctttttaaaaaattttacatgtttcttatcttgctyttgcagccattaacacacaatcagatctgctctgctcaaaaggccttgaacctgttactgtaataattatgtgaatgacctttgcaaactcatctgaaatcttgtggtgaggtgggagggaagaacacattcaatttcctgccctttttagttcctgcttatctctctttcagatgccatttacaaatagtcttttgttacactccatcaaatgcctattagggaaccagggtattaagtatttttttctctttttatatgtttactgtaaataaaaagccactagttatcaattcataaaattatttttgctgtagtttatgttttcctttcctcaccccttagctaagctgtctcaaatggctgctcttgtgtcccattgtaactgtgagaatgacaaatattcctctgagacttcctacagtgtgcaactggcaaacgttcctgaaagaacctgctctttagttacagat

SEQ ID NO: 160119 - DNA, 579 bp, Homo sapiens
catcagtttatccataatgacaggcctgccagctaatagtgttacaggcagattttctctttttttctctctttttaaaaaattttacatgtttcttatcttgcttttgcagccattaacacacaatcagatctgctctgctcaaaaggccttgaacctgttactgtaataattatgtgaatgacctttgcaaactcatctgaaatcttgtggtgaggtgggagggaagaacacattcaatttcctgccctttttagttcctgcttatctctctttcagatrccatttacaaatagtcttttgttacactccatcaaatgcctattagggaaccagggtattaagtatttttttctctttttatatgtttactgtaaataaaaagccactagttatcaattcataaaattatttttgctgtagtttatgttttcctttcctcaccccttagctaagctgtctcaaatggctgctcttgtgtcccattgtaactgtgagaatgacaaatattcctctgagacttcctacagtgtgcaactggcaaacgttcctgaaagaacctgctctttagttacagat

SEQ ID NO: 160120 - DNA, 535 bp, Homo sapiens
taattatgtgaatgacctttgcaaactcatctgaaatcttgtggtgaggtgggagggaagaacacattcaatttcctgccctttttagttcctgcttatctctctttcagatgccatttacaaatagtcttttgttacactccatcaaatgcctattagggaaccagggtattaagtatttttttctctttttatatgtttactgtaaataaaaagccactagttatcaattcataaaattatttttgctgtagtttatgttttcctttcctcaccccttagctaagctgtctcaaatggctgctcttgtgtcccattgtaactgtgagaatgacaaatattcctctgagacttcctacagtgtgcaactggcaaacgttcctgraagaacctgctctttagttacagattgatgatttattaatactgtttatttggagctgccagtcactaagggctgtaggaattaaaaatgaattggagttatgtggtatttgtctatcaaactaaaatcaaattacttaatcattaggtt

SEQ ID NO: 160121 - DNA, 563 bp, Homo sapiens
tacttggattagtttagacttatccaacagctttcttttaagttaatctcccaggaatttccatggaaaagtttcttcctctgggatgatcgtaagatcagcaactatytggatgctgagattcaaaaacaggatgtaaagaattactttattaaaagaatgaagttatgccttttgcagcaacatgtacataactgaaagccattatcctgagtgaaacaactcagaaacaaagagaaataccacatgttctcacttacaaatgggagccaaataatgtgtacacatgggcatatgctgtggagtaatagtcagtggagactcagaagtgtgggagggtgggaaacgggtgacagatgagaaattacttaatgggtataaggtacattagtcagataatgattacactaaaagcccagacttcaccactacacaatatagccatgtaaccaaactgcacttgtaccccataaacttatacaaataataaaaaagacttagtatatccatcagaagtttctaactttattgtatcccatacccctacaagaatcaccaggtac

SEQ ID NO: 160122 - DNA, 563 bp, Homo sapiens
tacttggattagtttagacttatccaacagctttcttttaagttaatctcccaggaatttccatggaaaagtttcttcctctgggatgatcgtaagatcagcaactatttggatgctgagattcaaaaacaggatgtaaagaattactttattaaaagaatgaagttatgccttttgcagcaacatgtacataactgaaagccattatcctgagtgaaacaactcagaaacaaagagaaataccacatgttctcacttacaaatgggagccaaataatgtgtacacatgggcatatgctgtggagtaatagtcartggagactcagaagtgtgggagggtgggaaacgggtgacagatgagaaattacttaatgggtataaggtacattagtcagataatgattacactaaaagcccagacttcaccactacacaatatagccatgtaaccaaactgcacttgtaccccataaacttatacaaataataaaaaagacttagtatatccatcagaagtttctaactttattgtatcccatacccctacaagaatcaccaggtac

SEQ ID NO: 160123 - DNA, 563 bp, Homo sapiens
tacttggattagtttagacttatccaacagctttcttttaagttaatctcccaggaatttccatggaaaagtttcttcctctgggatgatcgtaagatcagcaactatttggatgctgagattcaaaaacaggatgtaaagaattactttattaaaagaatgaagttatgccttttgcagcaacatgtacataactgaaagccattatcctgagtgaaacaactcagaaacaaagagaaataccacatgttctcacttacaaatgggagccaaataatgtgtacacatgggcatatgctgtggagtaatagtcagtggagactcagaagtgtgggagggtgggaaacgggtgacagatgagaaattacttaatgggtataaggtacattagtcagwtaatgattacactaaaagcccagacttcaccactacacaatatagccatgtaaccaaactgcacttgtaccccataaacttatacaaataataaaaaagacttagtatatccatcagaagtttctaactttattgtatcccatacccctacaagaatcaccaggtac

SEQ ID NO: 160124 - DNA, 557 bp, Homo sapiens
agtaattttgaaattgagggttatattgtaaaggaaggctttgtgaaaatgtagaaatagcctcataaaacctataaacctatataaagttattttactatttagaagctatcatttatagatactttctacataaataagtcatttattactattttacttacatatttgactttattatgtacagaaatattcaaaagcttacgttgaagtggtttatttactttggggtatatacccagtaatgggattgctaggttgaatggtaatctagttttagttctttgagaaatgtccaaactgctttccacagagactgagctaatttgcattcccatgaaaaatgtagaagtattcccttttcactgtaacctcaccaatatctgtctatctaatctatctgtctrtctatctatctatctatctatctatctatctatctatctatctatctatctgacagagtcttgctctgttgccaggctggagagcagtggcatgatctcagctcactgcaacctccacctcctggcttcaagcgattcccctgcctcagc

SEQ ID NO: 160125 - DNA, 589 bp, Homo sapiens
cttttgggttaatggtagaattaattaagaatttgggggactgttgtgaaggcatgactgcttttgaaatgtgaaagggatatgagatttgtttggggctaggggaagaatgatatgtttagggtttgtgtccccacccaaatctcctctttaattgtaatccccttaatccccatgtgtcaagggagagacctggtgaaggtaactgaatcattgaggaccatttccttcawgccgttctcatgatagtgagtaagttcttatgagatctgagggttttataaggggctcttcccactttgctccacacttcttcttcctgacgcctggtgaagaagatgctttgcttcttcttcactttccaccaagatagtaagtttcctgaaacctccccagctttgagtcaattaaaccactttcctttataaattgcctagtctcaggaagttctttatagcactgtgagaatggactaatacagacagcaattactagattgtatggttatagtatgtttacttttgtaagaaactggcaaactgatttccaaaatgactgtactattttgcattttcaccagcaatgaatg

SEQ ID NO: 160126 - DNA, 571 bp, Homo sapiens
tgactcacctacctataagggggacaatttataaaacacttatttgtttctgttagtattcagactgcaataaatcttcaaattttcaccataaaatctgcataacatgaaattaaaagaagttaagcatttttaaaaattcatagtgaaaaaatgttgagtgttttaaatacctgccttatgaattttcttttgcttttaattcatagagctaagttaaaatttaattattcgtgttatgtataaatgacaattatcctttggataaaaggtaatattttactaagtaaaacacaggaatataagaaaactttattttgctaaccgaggtcttaattttccttcatttggaatactgtccaagattaaacctttctacgcatcaaacactgtcatctwgtggactgccattgatttcagaaaatacaggctaatttaaaaattattatctgtgcgacttttcatggtaaaatatttggacaactctgtaaatcttaatgtaagtggagatgaggaatagtatccttgtttgtaactgtgcaataatgaagcttttacatttatgaacatc

SEQ ID NO: 160127 - DNA, 571 bp, Homo sapiens
tgactcacctacctataagggggacaatttataaaacacttatttgtttctgttagtattcagactgcaataaatcttcaaattttcaccataaaatctgcataacatgaaattaaaagaagttaagcatttttaaaaattcatagtgaaaaaatgttgagtgttttaaatacctgccttatgaattttcttttgcttttaattcatagagctaagttaaaatttaattattcgtgttatgtataaatgacaattatcctttggataaaaggtaatattttactaagtaaaacacaggaatataagaaaactttattttgctaaccgaggtcttaattttccttcatttggaatactgtccaagattaaacctttctacgcatcaaacactgtcatcttrtggactgccattgatttcagaaaatacaggctaatttaaaaattattatctgtgcgacttttcatggtaaaatatttggacaactctgtaaatcttaatgtaagtggagatgaggaatagtatccttgtttgtaactgtgcaataatgaagcttttacatttatgaacatc

SEQ ID NO: 160128 - DNA, 556 bp, Homo sapiens
tagattaaataaaaataagtttttagaaagtaattaacaactgtgctgggaactcaaatgagtggaaaaatgaaggtacaaaattgccaagtaagacagaggtagtaagaccctgaagggagactggaagcaacactgttacagggagaggcacaggtgtttgaggaagaaattatagctgttgaggaattacggctcggaaaaattagatgtggttaatggggagtgttcaataaattctgctgttttgtggaacgcaagcgcctcatacattaccctccaagacattaataaacatctgtattactcataaatccttttggagttggtcttgtttttagtgcaataatagtgagcttggcctcatcaggatgctgaacaaggacaggcaaatcccagagtgcgcggttacagacagaatctgtgtcagtttttatgggaatatcctacctcataytggattggaagctacacaaggatagttacgtttgcttcaccctccattgtatcccctgtacctaacaaaatacctgatacataataggcagacaataca

SEQ ID NO: 160129 - DNA, 515 bp, Homo sapiens
gttaaaaatcaaatttatttctatyaatatcactaaatgcccacaggagaaagctggaaagatctaaagttgacactctaacatcacaattaaaagaactagagaagcaaaagcaaacaaattcaaaagctagcagaagacaagaaataactaacatcagaacagaactgaaggagatacagacacaaaaaacccttcaaaaacctcaatgaatctaggagctgtttttttgaaaagattaacaaaatagaccactagccagattaataaagaagaaaagagagaagaatcaaatagacacaataaaaaatggcaaagtggatatcaccactgatcccacagaaatacaaactaccatcagagaatactataaacacctctatgcaaataaactagaaaatctggacatatacacccttccaagactaaagaagaaagaagtcaaacctctgaatagaccagtaacaaactctgaaattgaggcagtaattaatagcctaccaaccaaaaaaaag

SEQ ID NO: 160130 - DNA, 520 bp, Homo sapiens
ggtcctgaacaaccatccataaggaaatgtgaggagtttccttacggatgttggtcgcatggcatagggatagctcagctcagtgaaagttacagagtattctagacagtagcaactatgcatcacaaaactggaaaaaaatgagaaagcttatttgatgcctttcagcaggagatgatatgtagtatttcactcattattcctaattttgtgctagtattaaattatcaatgtccagcctggagagttcttctaactctccagggttagagtgttaattaaagcatataaaaatctgttgaacttttgtgatttccttttatggtgtgaaaaatcactacaaaaatgaccttatataacagtgcttatacaattaagtcaatattttyaacacttatgtaaaatatgggaaggctgatttattcattgagtcatttattttgcaaatgtgtattgtctattatgtatttcatatatatatatcctttaaaaaaggtacaccagagtgtacagactttta

SEQ ID NO: 160131 - DNA, 564 bp, Homo sapiens
tcaactcctctgtgcaaatgcttctaagggccctgtggagttcagttcctgtcctatttgtacctctgaaatatgatacctctttactcttcacacattgtggcatgacttcttttgacaggatcattaacttgtctatctcctctactagatcatgagttcttcgagagtcaaagggcatgccattcttgaatccccagcaccaaaagaaaaaagaaaacgaaatgaaacaaaaatctgtgcatgccagattctttacacttataattattctaatctttacatcaatttcaaaaggagagagaaacagtgttacgtgaatcaagaatctaaagtttagagagagtgggtcacatagttaaagcggggcagaactgggatagcaacctaattaagcctacctcaaaagctctctgcctgaccttatagaaaaacacaaatakatttctttaaatgatgccaaagccctctgatgatgatcatcacaattctatcctacctctcttcccatataaaccaacttcctttcctctttgggaagctgtctcagtacaatgttaaatg

SEQ ID NO: 160132 - DNA, 625 bp, Homo sapiens
ttttcagcttctcttggttgtgacagtttctcatacttcccttttatttgcagttttggtcagttattttgcaaaatgtccctcaattggcaatggtctgatttttttyccccattatcttactggggatattggtttgagagagaaagatcacagaggtaaagtgccatttcaaacacagcttatccaggattcatattatcaccatgacatgttgatgttgatttttatcccttagtcgagattgtgtttgccaggcttcccctctataaaattattccttttccctttttccgtgctgattctttggaaggaaatctctaagtacatgccacacttaagcagtgggtggtttggtttttgtctccatgagggcggagtatcttcaaaaattatttggaactctgaatgggaaatttgtctattctctccttttagtaattctttcaatcatatatgtatatatacacacacacatgtctatttcaatcatatatgtatgtatacatacatgtatgtttcagtcatatatgtatatagacttacattattgaatacatatgtacatattcaacattgaatatatcttatatataatccaatattacacaaaatataaaataag

SEQ ID NO: 160133 - DNA, 529 bp, Homo sapiens
catatcccaccactgtggaatgttgttgttgtttctgagaactttcatacattcttccactttattgcttttttattcaattcttcatgtcaaatatattgcccattgaggggaaacccaacataagtttctgatttcctgtccatgagtaataatttatttggtccatgacaaataagcactatgagaaaacatatgtgattaactaagatctctaattgtagtcctttttgtgacaatgaaaaaggtgatcttatcgaggtgaagataaaataaatcagtatgtagaatataatttttaaaaataatttttagataagttattttctgtagcaaaaacacctcaatagtattttggaagtataagaatgtctagaccaggcatggtggctcatgcttctaatcccagcactctgggagaccaaggcaggcagatcacytgaggtcaggagatcgagaccagcctgcccagctggccaagatggtgaaacccagtatctattaaaaatattttaaaaattagctggac

SEQ ID NO: 160134 - DNA, 598 bp, Homo sapiens
ttcacttgagtgagctcctcttccttgcaactatcaagaacactcactcacattactttttatttgtaaagttttatcattcttcagaaggaatgttccctccaaagagtttcttactcatagctggctaccaatctacacagtaattaccaagaaataaagggacctaaaatatcctggaggaattagttctgccagcacagttgatcagctgcctggttgcataactctgggmaaaaaacgtgacaaatgagttgttttaaaccattgttaatagtttattttcacactttaatctgcacagattgttttctcactgtagtcttcttgtggagaatgccagcattcctgctgttaccactcatatttgagatacaagatgtggcagctcctgatttgctctgtagacaattcacaacatatttcattttacaaactcttgtggatttcaaagcctctgtgtatgatatggttcaaaggagaaatgttttcagagggggaatgctgattatcatagcttcatcacagggatttttgtgcattaaagactctagatgtaaagtggatgggaataaacattaactgaacatctgctaca

SEQ ID NO: 160135 - DNA, 414 bp, Homo sapiens
gctttgcaaggcaaaaggcaaaattgagggtataatgtaggtactgttatatgattttaacatgtgatgaagtgttattctttcggatttttcaaacatttaaaaatgttaaaaaaaaaaaaaaaaactccttagcttgcgggctgtacaaaaacagaggagtagatccacgctctggttcactaaaattagcaggagtagaaaaggttactaatcttctactattaraaagtcaatgacttttccgtattgccagttcatgtcattgtggtgggaggtcaagttatttacacatctgcaatgtataaaagcttgacctctagaatcagaaagacatggatttgaattacatctcttccacttattaaccatgtaaccttagataaacctcaatttccttacttgtgtaacagg

SEQ ID NO: 160136 - DNA, 366 bp, Homo sapiens
aataagtgagcttattgaagcaggaactatgctatttatcttacgtcttcaggttttctagtttgtgtacatcaaggtgatcatactagtctctgatgatctttttttgtttttctggtatcagttgtgatgtcaycttaatcatttccaattgtacttatttgaatcttctctcttttttttccttaggctagctagcattctatcaatttcctttatcctttcaaagaaccaaccttttatttcattgatcctttgtatcattttttggcctcaaactcatttagttctgctctagtattttttcttctgctacatttaggtttgatttgttcttgtttttcttattctttgagatgcagcatt

SEQ ID NO: 160137 - DNA, 487 bp, Homo sapiens
acaaaataaaagtaaagaatatgaagttgcaatattttaactttacagcaaattgctttacaataaaattattacagagatagataaaagttatgttacttgtatgatatgggcataggagatgtttttgaaaaatgtaattcagataacagcctttccctgtaatttcaccctcccttctcccgtatctatggcatttgttttcaagttgtatgatgcactgagagggatattccaaaggtaaacatrgacttttgtctctgattacttatttggtgagaacataaataaattgtatatatggtcttctgtgttctgcctgttaaaagcatcagagacataagagaaagttttctcatattacaactctctggcaagggatactaaaaacaaataaatatgatgtatcatgtacatgtcagaataaattctgaattgggaagaacaagaatgaactagaatgaatggaattaagtatttgtagaaa

SEQ ID NO: 160138 - DNA, 624 bp, Homo sapiens
tttctgacatcatataattataattctagattagaaactataagtatgtgcctaacaaggataggattcctattgaataatctaaaggaaatcatcaacaccttatgtaattaattttaaaaaaagcctatgcttttggaaattttaatatagggtcatgaaactaatactaaaaaattttatcatgtaaaatatttgtattgttttttaaaattaagtgtcttgaaaaagtacagaataataacaatcacaacaataaaattagtttttccgtaccaccacccagagaagagatgcttgtaatcttgctgatgtgtgctaaatatacaagaatattttgagaaaagaactgcaatccatgaatktgcagtaccttgttagttacagaccacagggaagtgtgtgcactttgctcttactctgtgcttataggccaccagatttttaattagtcctgtttccactgagggcatttcttacatgaatgggccaccagtgatggttattagcaagttatcacagtttgtttttcattagagtgactttggtaaggcaactcaacatgctagaacccaagtagaaaaattgtttctgaaatttgggcataccagcacagatattact

SEQ ID NO: 160139 - DNA, 534 bp, Homo sapiens
tagactggaaagtaattgagggagttagccttttagagtaggacattatattggtgataattcccttctatgtcctcagtaaactgattagaaaaatgaaacccagagttttctgatctgtcagagatggtacagactagacattcagtgaagccaggtctagaagccaaatctttgtgataaaaactttagtgacatttttttctcctttgccaaaaaattaaaaaaaaaaacaataaataccacaaagagcaaagataacctttctgtcttatgtgagattaaacattttccatctaaacttatccatatgctttcttcaaaacytatttcaaaacctacataacaaataaatagataaatattaaacacataaaatggttttctcgccaaaggtagccctttttttccctttgcatgtccagtgtatatgaccttcatatcttaaagaatttatcttactctatttggatttcttcttctttcctctcattccacatacatatgcaaaataattgtacagagaactacata

SEQ ID NO: 160140 - DNA, 441 bp, Homo sapiens
tgagcctgggaagtggaggttgcagtgagccgagatcacagcactgcactccagcctgggcgacagagcaaggccctgtctgaaaataataattgtagtagtaataatagtactatcacctgtgcatggtgactcacacctgtaatcccagcactttaggaggcggaggcgggtggatcactcgaggccaggagttcgagacccacctggccaatctggtgaaatcccctctctactaaaaattagctggtcgtactggcgggcacctgtaatcccagctactcgggagactgaggcacgagaatcgtttgaacctgggaggtggaggttgtggtgggctgaggtcrtaccactggactccagcctgggggacagagagaggctctgtctcaaaataataataataataataatactatcaatcaaccaatcaatcaatga

SEQ ID NO: 160141 - DNA, 452 bp, Homo sapiens
atatttcaagacaaaaactgtaaaaagtgacaaagaaggtcatcatataatgataaaggagtcaattcagcaagaggttataacagttgtgaytatgtatgtatccaacactggagcatccagatatagaaagcaaatatttttagaactaaagagagagggagatccaaatacagtagtacctgggggcttcaaaatcccattttcaatattagacagattatccacacaaaaaaacatctataaagaaactttggatttaatctgtattatagaccaaataaacctaatagaaatttatagtacatttcatccagcaactgtagaattcatattcttctcatccgcatatggaacactatcaaggatataccatatgttagggcacaaaacaagtctcaaaaattcaaagaaaaatcaaaatcatatgaagtatcttgatatagtttgga

SEQ ID NO: 160142 - DNA, 583 bp, Homo sapiens
tttgtaacaaacttgcacatataccaactgaatctaaaacaaaatttgaaaaatagcaataaaataaaaaataaaataagctttaggaggaaaaaaggtatctttatacttgggaagtgatacacaaagctgaaaatcttccctggtctctgccagtatttgctaaaagaaaagtatctgcacataattcaaaactctactaataaacaatggaattatagtaccaaatcattctttttttttttttttcctgacagagcctcactctgtcacccagggtggagtgcagtggcaccatcgtggcttactgcaacctccacttkctggattcaagtgattctcatacctcagcctcccaattagctgggattacacgcctggctaatttctgtatttttagtagaggcaggttttcaccatgttggccaggctggtctcatactcctgacctcaggttatctgcccacctcggcctcccaaagtgctgtgattacaggtatgagccaacacacccagccccaaatcattcttaaagtgtcatcatctgtcagtacatcctcatacctgttaaagtatgccccta

SEQ ID NO: 160143 - DNA, 620 bp, Homo sapiens
catttgtgtgaacaacttgctctttgtggggcacacatgcttctcagatatcctctcacttcagttttgtgaggacgtgtactttggttacacctgaagggacaccttcataaggtgagtgctgtggggaacctgggttctaagggaatggtccctgactggccaccatcaggtatttccacagctcacrctctgaccaaccaccgtcaggtaccctggtggtttttcaaatttgaaatttaaagattaaggctagataaaaattgacctgagagatccatccaaattgctctagttacacatgaaattagaacaaagaagagtatgaacttctcaaaaataacttcttgtctcagccctcccacttgagtgacagtcctgagtattgttcagcctgtcactcacactccatgacaatgaggaagccttccctcagcccctacggttttggttttgttgctgtgagcaggattccaaagctactctgctctttcagaagccacagtgaagggaacttaggacctggcaagccagtagaagagcaggaatcccttcccagtcaggctctcagcctgtctgtgaaatccagttgaaaagagaggtaaatcgctgtttgtctc

SEQ ID NO: 160144 - DNA, 428 bp, Homo sapiens
ggaattcagttcaagtcctctgccttgcaggacctggctgtcaccaccctctccagagtgatatttcaggctttcctcctctcccyctgcggcagccccactggccttgagttatttgaacacacaaagcttgctcttcctccaagccttgccccagacctttgcaggactgcctcgccctcttcatttgggtccactgggctgtcctcgtctcatgtggtcctgcccaacaagctcattagaacaccacacactgtgacccgccatcccctcacccatcacatcccctgcctcttggaccctccctcggcttcactattttcccaagccctcatcactggctgacatgcacagacagttcccaacttaccattgtttgacttaggatttttgactttgcaatggtacaaaaccatctcaatttccac

SEQ ID NO: 160145 - DNA, 420 bp, Homo sapiens
ttgcaggacctggctgtcaccaccctctccagagtgatatttcaggctttcctcctctccccctgyggcagccccactggccttgagttatttgaacacacaaagcttgctcttcctccaagccttgccccagacctttgcaggactgcctcgccctcttcatttgggtccactgggctgtcctcgtctcatgtggtcctgcccaacaagctcattagaacaccacacactgtgacccgccatcccctcacccatcacatcccctgcctcttggaccctccctcggcttcactattttcccaagccctcatcactggctgacatgcacagacagttcccaacttaccattgtttgacttaggatttttgactttgcaatggtacaaaaccatctcaatttccacacaatatgcagaattc

SEQ ID NO: 160146 - DNA, 564 bp, Homo sapiens
tagaaattctgtgagttcctgagtgccttggactatagaatcatgacctggacaactcttctatcttgtattagtcagggttctctatagggacagaactaataggatatatgtatacatgaagcrtagtttattaaggagtattgactcacacgatcacaaggtgaagtcccaaaataggctatccccaagctgaggagcagggaagccagtctgagtccccaaatctcaaaagtagggaagccgacaatgtagccttcagtctgtggtcgaagacctgagagcctctggcaaaccactggtgtaagttcaagagtccaaaagctgaagaacttggagtctgatgttcgagggctggaagcatccatcatgggagaaagatggaggccagaagactcagccagtctagtccttccacattcttctgcatgctttatcctcaccatgctggcagcagattggatggtgcctacccagactgagggtggttctgcctctctcagtccactgactcaaatggtaattttcttttgtcaccaccctcacagacacacccaggaacaa

SEQ ID NO: 160147 - DNA, 522 bp, Homo sapiens
tttgggtttggctccagaccaccacaataaagtragtatcataataaaatgagtcatacacaattttcttacttgttttgcagtgcatacaaaagttatgtttactctatactatagtttaagtgtgcatcatgtctaaaaaataatatatgtaccttaactaaaaatgctttattgctaaataatgctgacacagagacatgaagtgagcacatgctgttggaaaaatggtgccagttgacttgctcaatgcaggcttttcacaaaccttcaatttgttaaaaaaaaaaaaaaagcagtatctatgaagcacaataatggaaaatgcaataaaacaaggtatacatgtactttcagcttacaacgggcttatcaggatgtagacacaccataagtcgaggagcatctgcactgatatattcctgtatcctgatggcatcacctgcatgctcatttgcttaccgtctactttcctcagtggcatttaggtcataagatgtgagggatttgtctatcttgttc

SEQ ID NO: 160148 - DNA, 428 bp, Homo sapiens
ctgggagatggtccctctttggggtgtttggccaataggagccttcagagagtgcctgcctgcaaaagggagaggagcagcagtgtgccctgaaatggcaacaaccagcctctggaaaaagtaccaccaccaccatctgagttgtagtggttgccagtttccataatgccaacaacstccaccatgagcaatattgtgcaatcaaaatggcatcactgaatgtggagttggggaaagacatacggttggttcttacatgtcagcgtgagtcagtgcaccatcagcggagcaaactcaaaacattgccctgaagagatttgaccgggaaaaggattgaactcagaaacttctgatgaaagacacatacaacagaagtcatcgatctctgggcagagcgtaactgtgcccttcacaaacaaaatgttgaa

SEQ ID NO: 160149 - DNA, 415 bp, Homo sapiens
gccaccagtaacagaactgtcccctgggaggctggagagccccaggactacacatatcagcagttgatgtaaatccagggtacaaattaccttgagagttactctatatttacagtgtcatccaggccacaaagagtgcgatctacgcatggctatggagttctcgacaactcgaaccagaatgccttcacgtggaaaagatctgaaccgtgcgacaccgtcagcttctccggcctctcagttggaacttgaggcaaaagaaggcagaaaaagttccttgaaaagtaacctgaagatgaccttgtcccagaatctctgcttcagtaacagagagcaagggtagcttccaagcatgctcagatggcaaygagctgaaacagcagcagttctctcaggatgttctcagccagaattc

SEQ ID NO: 160150 - DNA, 535 bp, Homo sapiens
agatcttttgtttgcaattgctctaatctctcaagaattatgaagtgaggtacttcattctgcagggggaaaaaagaaggcagkctcactcaatggaccataaaaactgtgtccaaggtcctgtttgcaccttttcctgctgtcttttcagatggcaccttcccagtgagttcagcctgggccgcagccatgactccgtgcatcacccactcctctgaggcagccaccatgtgcccttcctcctcgtcccagctgggtacaaacagctttgtctgattgactggagttgactgtgcatttatggctgagcccataatgcgtactctcttgtctctgaacagctgttaaaattctttattctcattatgttcaaaatggaaataatgaaccttagtgatattcagatatacaattttagattggcttttcgattaaatcactaaaaacactgataatttttcttagagaaatgactctcgaatagctgtctacaaatggcaactgtaaaaagaggaacttctgatgttttaggaac

SEQ ID NO: 160151 - DNA, 593 bp, Homo sapiens
atgagaaataataaaattgaaaatgagcagacttttattataaatttccttaaaaataataaagttcatccatttttaaacaagttattctctggaatgggcaaaactcctagtagactatggaagctgaaagtggctttgaaagattacacttgattttcaaaattgtgctaacttgtcacattacctgaatggctatttgtgccaacaagttaacttcttgttattaaattaatcctaatggattttgtgaataattttaattttcattgtcgtgggaggaaaaatgattcacaccccccaaaccatgacagacaaacatttccagacagataccctttattattcagccaaaacattattttcttatgaactggatcaccttttcttaagagaaagcaacaaaatgggaaacagcattaaggaaaggaaagagtggattaaccagattctgaggcaaagcccttgtgtattaagmctttaagtaacagagtttgttttagcatgttcttttcacttactacgtgaaatcatttgcgtttgaataatcggtaatctctcaaaccaattgaaagtacatttttaaaagtaga

SEQ ID NO: 160152 - DNA, 552 bp, Homo sapiens
gtgggatggccacacagtgatatcccacctggctttcacaagcaaccacctacaaagctacacagaaacattattataatattgaggactgttatatgyaaaacaaatgtctaagatgttgctcatttttttttttttttttttgagacagagtctcgctctgtcggccaggctggagtgcaatggcatgatctcgactcactgcaacctctgcctcctgggctcaagcaattctcctgcctcagccttccgagtagctgggattacaggggagtgccaccaagcctggctaatttttgtattttttttttttagtagagatgggatttcaccttattggccaggctggtcttgaactcctcacctcaggtgatccacccgcctcggcctcccaaagtgctgggattataggcgtgagccaccacacctggccaagatgctgctccttgaaagaagccatgacactggaacttaaaaggtctctaatgtaccagagaagtgaggcttagagcacttaaatcacctgcacagggtcccacagctggcaaaaag

SEQ ID NO: 160153 - DNA, 465 bp, Homo sapiens
gtgagaagaagccagttccgcctcgtyacggtgtcccgcctggccggtgccgaggaggtgctggtaagggggaggctgggggaggtctgagccccctcccaggaccgcatgtccccgcacctggcgcacctgacctggctcccccaacctggcgcccctcacccacctggcctccccctccatgacctgccccccactgaaccccgcctgaccccccacaacttggcccctctaacctggtgccctgcaggaggcgcactgcgggcccaccacatccccgaggaccctggccacctggagctgtgccggctgcccccttcctctcaggcctgtgacgcctgggctgggggcaaggctgggagtgctgtgatctcggaggagggcagaagcccgggtccggcgaggccacgccagaggcctgggtcatccgggctctgccgcgggcccaggaggtcctgaagatct

SEQ ID NO: 160154 - DNA, 453 bp, Homo sapiens
ggtgagaagaagccagttccgcctcgtcacggtgtcccgcctggccggtgccgaggaggtgctggtaagggggaggctgggggaggtctgagccccctcccaggaccgcatgtccccgcacctggcgcacctgacctggctcccccaacctggcgcccctcacccacctggcctccccctccatgacctgccccccactgaaccccgccygaccccccacaacttggcccctctaacctggtgccctgcaggaggcgcactgcgggcccaccacatccccgaggaccctggccacctggagctgtgccggctgcccccttcctctcaggcctgtgacgcctgggctgggggcaaggctgggagtgctgtgatctcggaggagggcagaagcccgggtccggcgaggccacgccagaggcctgggtcatccgggctctgccgcgggcccaggag

SEQ ID NO: 160155 - DNA, 499 bp, Homo sapiens
ttgaaagatcttttcactgggcagataattctaggttgatattttttttcttttagcacattgaagatatcattccactgtcttgagccttaaattgttgttgttgacaagtaagtcctcagtctaattaccttattttattttattttattttattttattttattttattttattttatttttgagactgagtttcactcttgttgcccaggctagagtgcaatggcacgatcttggcttaccgcaacctccgcctcccgggttcaagcgattctcttgcctcagcctcctgagtagctgggattacaggcatgtgccaccacgcccrgctaagttttttgtatttttagtagagacgggatttctccatgttggtcaggctggtctcgaactcctgacctcaggtgatctgcctgcctcggcctcccaaagtgctgggattataggtgtgagccaccatgcccagagaattaccattttttttttcatttttttga

SEQ ID NO: 160156 - DNA, 438 bp, Homo sapiens
gtgcaggctccccttcatgcagtrggcatgcagtcacgcagtggctgtgacttcagtagagtacccctggtcactgtattttggtcttcccttatttagagactttgtttttccccctctttgaagaatattttcacaggctctcctgggatcagggagggcgttagcccagggatgcagaatggagaaggatcaggggaactaattcttaatgatttctaaccactcatccttgatcttactcacctgcccaccccatcacgtctatttcaaggaatacattttgtatcagccgctgagctcttagagatgatgcagtgtaaatcatgttatttttcagttcacaccccttccgcccacccttctgcccatgggcttttactaagtgagtgaatcctcacccccagtgttttccatcttccaaaatactgttgctgt

SEQ ID NO: 160157 - DNA, 571 bp, Homo sapiens
cctctatgcaacctttcttgtcactgctctaggaatattgttccatctctacctgagccccacacatactcctcaacagacttttatgtgattagctccttttttggatgaaatagtttaaatatatgctgagactatataattaggttcttttatgggaaatatttcaaatgtagatataagtacagaaaataaccaattctcatgcacccagaaatcatatttaacaattagagatatttgccatttttggctcaggtctttaaactattattaatattttaataataatgttattattgctaaggacatagactatactatgtgccacttctcattaccattccttccatccattggtagaggtaaccaggattcttctgaacaatgttctatacatttgctattaatttatacacccatcaaaatgtattacatataaatacacaccaatttatataaatgtctacatgttaaacaaatttatatatattgtcaattttttaagtttttttaaattaaaacaaatggtatcayagtgctcatatacttttactacttgtttatttct

SEQ ID NO: 160158 - DNA, 490 bp, Homo sapiens
attgtaatccccaatgttggargtgtggcagggtgggaggctattggctcatgggggagatttcttataaacagcttagcaccattcactgggtgatagtgaatgaattatcatgagatctgttgtttaaaagtgtgtagcaccttctccctctctgtctttctcctgttccagccatgtgagacgccttgctcccctttgctttccaccatgagtgtaagctccctgaggacccagtcaaaatttattgactgtctttgatcttcaaggtgttgtggtggaatctaaggatacaagaaactttgatacaagtatttgtcctcaagagtcttcattttgtgaagccacatttttcttaaaattacccatggggaataataaaataatgaaaattgcagctacaacttctggaatgctattgtatgccaaacacagttctaaacacatggcttatggtatctttttattcctcgttagatttatggcgtgc

SEQ ID NO: 160159 - DNA, 595 bp, Homo sapiens
gtgaggagggggaataataaagcttgagaggatgtgagtctctttagcatgaagtataggacatcaggaggagattcctggagagatgactgacaggttgagataagtttagaacatagggcaggtattggactttactgtgttgatagctaaggatgtttmttcactgtgaagcaacactatcaggtatggtggaggaagacaactttgctgctgatataggggatattctagagaaaggatggccagtgggaaggcttgggcattacagaatacaagggagatcctcttgaataagctggccctctctctcgccattgcatactgcctcagagcctggaatattttctctgggtcatgacatttgttttgtttgtagatgtgagctccatgaaagcagaggcattggctatgtagtctcagaatccagcaaacgaaaggtggacagtatgcatttagtaagacatgctggctggctgcaactaacaaccttatcacatcacagaacaggtggactcagaggcagaacatggagccctgccccctcacaatccagaaaagctttccacctgattgtctttatgccggtaaacag

SEQ ID NO: 160160 - DNA, 595 bp, Homo sapiens
gtgaggagggggaataataaagcttgagaggatgtgagtctctttagcatgaagtataggacatcaggaggagattcctggagagatgactgacaggttgagataagtttagaacatagggcaggtattggactttactgtgttgatagctaaggatgtttattcactgtgaagcaacactatcaggtatggtggaggaagacaactttgctgctgatataggggatattctagagaaaggatggccagtgggaaggcttgggcattacagaatacaagggagatcctcttgaataagctggccctctctctcgccattgcatactgcctcagagcctggaatattttctctgggtcatgacatttgttttgtttgtagatgtgagctcyatgaaagcagaggcattggctatgtagtctcagaatccagcaaacgaaaggtggacagtatgcatttagtaagacatgctggctggctgcaactaacaaccttatcacatcacagaacaggtggactcagaggcagaacatggagccctgccccctcacaatccagaaaagctttccacctgattgtctttatgccggtaaacag

SEQ ID NO: 160161 - DNA, 556 bp, Homo sapiens
aaacatctacaaacatgagaaggacatcatcagtgtccctgctcacattgttctttggtgcccttatcacactaaagagttgtacaggcagacctatggatgagtcaccactctgacacctcaccagttaggtgaccttagagaagtccctgaacacytctgaaccacaggatgcccatttgtaatagccacagaaccatggagggcattgtatagactgagcacagtatatgtgaaatgccaagcaagtttctgctgccaagtaggtatctggtgcatggtgatgagttgctgtcattattctcactgatgcagttgctaactgcaacatagggctggccatgagtgacagttctgattttttttttctttttttttttttgagacggagttttactcttgtttcccaggctgaagtgcaatggcgggatctcggctcacttcagcctctgcctcctggttcaagcgattctccttcctcagcctcccaagtagctgggattacagatgcataccaccatgccaggctaatttttgtatttttagtagagatggg

SEQ ID NO: 160162 - DNA, 373 bp, Homo sapiens
gaattcttggctttatgttaactgtatcatcagyagtgttagttccttttgttctagtgtcatttttcaaagagaaacatattgtatagctttctgaagattattctctgcatggcaaaccatagaaacaaacaacaattcaatgttctgtggccttttcccctactggtcagggtttggagtcactgcttggggccactggcactgtcaacattttgatacaaccacacctatttgccattgcatttgttttctgtaactacttttaaaaaacctttaaattccacacttaaaattttatccctactgctttggaaagtttattcctaaattaaacttagagagacaaagtttcctcttcaggttttgactg

SEQ ID NO: 160163 - DNA, 556 bp, Homo sapiens
tattctcatctagaggcttaactgggaaattatccacttctgttggcagaatttattttctaatgtttgtagaactcagaatgtcttgttccttcaacctcagtataattatgactccttttatgtgttttacttattcagttaagccctctaataatgtcttacttttacttaatgaaggttsaatggatttggaaccttaattgcgtttgtgtaatcccttctcttttcccatattctgttggctagaatagccacatgttctgacactcaaggaggaacataacaccaaggaacagaaattatagggccatcttaaattctgactacagtatggctcaacaaatatttgttgaaaagtgaattaattaatacaaaagaaagccagattctatactataatgggcctgtatattacactattgattctcaggtttatcttgtcaccttagcaagtacttaaaaagtatgaagtagcaaagaaaatatcaaatcagattcatattttggaacattagtttaacagcagttatgtaattgttggtagaaagtttgc

SEQ ID NO: 160164 - DNA, 568 bp, Homo sapiens
aagtacacataaaaaatgagaaacaaggaatctattattaaaaataattgcttgagagaaatcataattttcttgtaaaggtctcactataccaacatggttctgttatctaattaacattctaaatatataggtagaatatatcaagttggttattatcagtgttattaacagattttatcaatttagtatttattaaatactatcctttgaagcatttctatttgtcaaggaatttcagcatttctgtgtattgttttgctgtattttaaaacacacttaaatgtttttaatgcaaattatttttttcataaaagatgatatgcaatcttgaaattgttttacctttgagacaatattttttctcccatttggratttcaaaataggaaggcagaaaggagagttgaaggcagaaaggagagtttcaggcagaaattaaagaaaggaagaagtacaaaaaagaaaaataaagaataaaaaaccctgaactgtcaacatttactattgcttgcatctatgaatttaaacaacatgactaaattgagttaatttctacataattcctg

SEQ ID NO: 160165 - DNA, 519 bp, Homo sapiens
ttccctttcttttatttcactttaatttttccttcctttcagtttcttacagtgcaggctgaagttactgattttagacttttcagtaaatgacatttaartcaagatagttgataatgtcattcatgttttatatatccttactagttgtttgtctacttgtatcaattattgagagaggggtattgacatttctgactatagttttggatttatctatttccccctttgtagttaaatgttttatataatagatagagattatcaaaattatagtttcaaatatttaggattcttaagccctcttgatatattgaagattttcttttatttcacttttaattttaggttcagggatttacctgtacagggttgttacatgagaaaattttgtgtcactgaagcttggtgtaagaatgatcctgtcaccaaatagagagcatatcgagccttccaacccacatggcactccccacccttccacctcaagcagtctccagtgtctgttgttcccttctt

SEQ ID NO: 160166 - DNA, 584 bp, Homo sapiens
ttctgactatagttttggatttatctatttccccctttgtagttaaatgttttatataatagatagagattatcaaaattatagtttcaaatatttaggattcttaagccctcttgatatattgaagattttcttttatttcacttttaattttaggttcagggatttacctgtacagggttgttacatgagaaaattttgtgtcactgaagcttggtgtaagaatgatcctgtcaccaaatagagagcatatcgagccttccaacccacatggcactccccacccttccacctcaagcagtctccagtgtctgttgttcccttctttgtatccatgtgtattcagtgtttagctcccacttacaagtgagaacatgtggtatttggttttctgtttctgtgttagtttgcttaagataatggcctccagctacattcatgttgctgcaaaggacatgatcttgttctttttatgactgcatagtattccatggtgtgtatgtaccacattttctttttacagttctctgttsatgggcatctaagttgttttatttctgtgctattgcaaatagtgctatcat

SEQ ID NO: 160167 - DNA, 538 bp, Homo sapiens
tacttaagcacaatggctgtaggtaggcttttacttagcacatggcttctctgtatttcctcatgttttcagccatgcttcctctcagtgatatgagaacttgrgccactcaagtgctggccacagatctcagcttggcactcccagactttatcacagccctgggtgagcctatcctttttgttcttttcccagcttggggtcagtatgtgcagagcctttggcaatgacaatggtagagggcctttcacttgtctcttggggattcaccccagaggaacagagagacactgccaattgcaacattcagcctggaatggagcaactacatattgggcccaaggccaggggccctgcttggtgaagagcaaaggatgaagggacctaatggggaagacagtctggcctcttctctatagggctgctgcagtgtactagaggtgcaagtaaagtactaagcctctttgttccttccctagcctggtaacagtaagggcaagtacagctgcagtggcaatggcagaggcgttgtcagtcg

SEQ ID NO: 160168 - DNA, 630 bp, Homo sapiens
atggtcacacaatactttttaatgaatctaaaacctggatgttgttctccacatttatctgatttctttttaagaaaatatctaaatgccttggttattcccctcatagaaagacaaacttaatcatgtagaaatcatgaatacaatctaattttattgtagtgattctataattttatccttcacaatattcttacttccaggccaagaaaactcaacttgactgattgatatgagggtatattttgttgtaactacctttctgctgatctgagaacccagggagtagggtgccctagcaatctatccagggaaaaacattttatgtgtttaatatggtttggctctatgtctccacctaaatctcatcttgaattgtaatccccataatctccatgtatcaagggcaaaacctggtcagaggtgattggatgatgggggtggtttcccccatgctattcacatgataatgagygagttctcatgagatctgatggttttataagtgtttgacagttcctcttatacatgcattctccctcttgcctgcagccatgtaagaggtgcctacttttccttctaccatgattgtaagtttcctgaggcctccgcagccatgtggaactgtga

SEQ ID NO: 160169 - DNA, 587 bp, Homo sapiens
gaagtgcttggagccccaaagtaaggcagctttgcttacattatttaaatgtcattctccatggatttttcaaaggggtcttctcacagctagcttattcccattgaataacattactggtggttctgttgcaacaaaaaaagtaacrtacagagaaatttccataatagatttttttataccaggggttttacaatagagttggatgaagaacggggtatattagggtattattagaggccatggactccctctccatcaaaaaggtagaaattaacttacacactatcatttgtaaattatttcaagtgatttgtcaaaaccaatatacatgtatgaatattctagatgctcctcaaccttcatttaacaaacctgtcctattccagtcacattctttagtctagtgaattaaatttgattaaaagaaaggctgatcaaatattttaaatggtgcaaaagaagagatcaattttcactttcctttaactatattcacaagggtttacaatggcatgtcttgcatcttttcacagtttcccaaaccaaatataaattcaattactattttctgagtgaataacaaa

SEQ ID NO: 160170 - DNA, 587 bp, Homo sapiens
gaagtgcttggagccccaaagtaaggcagctttgcttacattatttaaatgtcattctccatggatttttcaaaggggtcttctcacagctagcttattcccattgaataacattactggtggttctgttgcaacaaaaaaagtaacatacagagaaatttccataatagatttttttataccaggggttttacaatagagttggatgaagaacggggtatattagggtattattagaggccatggactccctctccatcaaaaaggtagaaattaacttacacactatcrtttgtaaattatttcaagtgatttgtcaaaaccaatatacatgtatgaatattctagatgctcctcaaccttcatttaacaaacctgtcctattccagtcacattctttagtctagtgaattaaatttgattaaaagaaaggctgatcaaatattttaaatggtgcaaaagaagagatcaattttcactttcctttaactatattcacaagggtttacaatggcatgtcttgcatcttttcacagtttcccaaaccaaatataaattcaattactattttctgagtgaataacaaa

SEQ ID NO: 160171 - DNA, 391 bp, Homo sapiens
tcaatgtcttataaaaattgcctacactttctattattatcctccatatattttcttcctaaaacaattatttttttgtttgtatttattaaggctacccatagtctctttgtagatttagaaactgctgtacagagtacttgaaagtgtatgtcagttattgatgatgtgtcctttaaaatccattgaccttcttgtgttttgggtcatctattaaatgttgatattcatattttcttatttatacacaatattgagtatctataaaaataaataatagaataatttgttcattcattcatccaacaatgtattcagcactaatattaaacatatatattgctagtcagcataatacagttaggaawaatttgtccaatgccaaattaaa

SEQ ID NO: 160172 - DNA, 518 bp, Homo sapiens
aagcctgaaatctggtagtgtaattttagcaccaatacgcagccatgtctatctgaagtcaacactatcattttraattttcagaatgacaattcctaaattccttgcattgctttgttactcctgctgctgcaattatttaagacactttgcaatttaaatatagatgttattgtgcacatgtaccctaaaacttaaagtataataataataaaataaaatttaataaataaataaataaaaacaactgcatcctctggggatgaccaagcaaaataaataaataaataaataaataaataaatataggtgttttactactctgtctttgttttcaaacaaactttcgtgaagttttatttgctgggaactgatgcttgtaacctagaattaagataattcagaaagaatattatatgtacatatatgcttccaaaacataaataaaaggattgcctttcccttccaatttgcctctctttagtcatctgccaacatatctggaaatgaaacagata

SEQ ID NO: 160173 - DNA, 544 bp, Homo sapiens
aaggcatcttcaataatagcaaattgctgacttctcatcagaaactatagaggccataagactgtaaaatgatatactcaatggacctaaaagaaaatggttgtcaactaagaattctatacccagcaaaaccatccttcacaaatggagaaataaacactctctcagattaaaaaaaggcctagagaatgtatcaccaacagacttgtactgaaagctaatgaattgtaggatactagatgataaattgaattcaaataaggaaataaagatcataagcaaatgtaattatatgagtaaatatgaaagacagcatacatacaattttgtttttaacctttattaccctcactaccatagaatacaaaattaaataaagtsaagtaaaaaaagtaactttctgaattcgagcagaaagtaacatatttctagaaatacaacatgctattcttaggtccatccactaaacaattatagaaacaattaaatctcaactgtattaataccataatactgagcattctgagtagccatggtaaagttt

SEQ ID NO: 160174 - DNA, 579 bp, Homo sapiens
ttaagtaatgtttcaggatacaaaatcagcatactaaaatcagttgcatttctattttctaatatcaaattatttgaaaaggaaattttaaaaaattccatttacaaaagataaaaattctagaaataattttaaccaaggaggtgaaaggtctctacaacaaaaactataaaacccccatgaaaaaaattgaagaagatacaaaaaaggaaaagttatcttgtgttcatgaatttaaataacattgttgaatatctctactacctaaagtaatataaaagtaaatgcactccctatcaaaataccaatgaatttattcatgaaaacagaaaaaatattctaaaattggtctggaaccacacaacatcttgaagagccaaagcaatcctgagcaaaaagaacaaagctggaggcatcacattacctgacttcaaaatgtactaggaagccattgtaacmaaaaacagcatggtactggcatgaaaacagacatacagattaatagattagaatagagaacacaatatgtgttcactgagaacatacattggagaaaggacagtgtcttcagtaaattgt

SEQ ID NO: 160175 - DNA, 447 bp, Homo sapiens
actagtatatttacctcacagagatgttatgagaactaaaccattagtatatgcaaagtgtttgaaaaaattccagatatgtaagtgcttactctgataattatcttttttyattactttcatcttttcagtttcaatatgtcagacatcctttctcagcttcaaattcttctgagcgactctgctgcccgtagaacaaacaaaatcactatcttcattttttttaaacagggaatacaagttgacaaacttagaaataatttaaactttctgaaagctgcaaactgaaagcagtccctagacatttcctcctagtcttgaaaatagtatcagtttctcctctttttaggactgagagttgatcaaatggatagccagcctggggaaaattaggcctcgacccctaaaaacatcagtaatatcaggaaaagtttagagggtagagca

SEQ ID NO: 160176 - DNA, 447 bp, Homo sapiens
actagtatatttacctcacagagatgttatgagaactaaaccattagtatatgcaaagtgtttgaaaaaattccagatatgtaagtgcttactctgataattatctttttttattactttcatcttttcagtttcaatatgtcagacatcctttctcagcttcaaattcttctgagcgactctgctgcccgtagaacaaacaaaatcactatcttcattttttttaaacagggaatacaagttgacaaacttagaaataatttaaactttctgaaagctgcaaactgaaagcagtccctagayatttcctcctagtcttgaaaatagtatcagtttctcctctttttaggactgagagttgatcaaatggatagccagcctggggaaaattaggcctcgacccctaaaaacatcagtaatatcaggaaaagtttagagggtagagca

SEQ ID NO: 160177 - DNA, 447 bp, Homo sapiens
actagtatatttacctcacagagatgttatgagaactaaaccattagtatatgcaaagtgtttgaaaaaattccagatatgtaagtgcttactctgataattatctttttttattactttcatcttttcagtttcaatatgtcagacatcctttctcagcttcaaattcttctgagcgactctgctgcccgtagaacaaacaaaatcactatcttcattttttttaaacagggaatacaagttgacaaacttagaaataatttaaactttctgaaagctgcaaactgaaagcagtccctagacatttcctcctagtcttgaaaatagtatcagtttctcctctttttaggactgagagttgrtcaaatggatagccagcctggggaaaattaggcctcgacccctaaaaacatcagtaatatcaggaaaagtttagagggtagagca

SEQ ID NO: 160178 - DNA, 528 bp, Homo sapiens
acagctaacatcatactgaatgggcaaaagttggaagcatcttcttgagaactggaacaacacaaggatgcccattctcatcacccctatttgatatagtactagaagcccttgccagagcaatcagccaagagaaagaaattaaaggcatccaaatagaaaaagaagaaktcaaactctctctcttcattgacaatatgattctatacctagaaaatcctaaacactttgtcagaagtcataaatgacttcagtaaagtcagtatacaaaatcaatgtacaagtatcagtaacattcctatacacaacattcaggataagcataaaccaataccacaatcccactttcaatagccaccaagaaaatgaaataactatgaatataactaaccatagaggtgaaagatctatacaagtagaactacaaaacactgaagaaaaaatcagagataacacaaacaaatggaaaacattccatactcatagataagaagaaccaatattgctaaaatggccatactacccaaa

SEQ ID NO: 160179 - DNA, 623 bp, Homo sapiens
cagagaatagctgttcagtgctcatgcagcttatttgttttaaactgtgagaaggatttgggaaataaggagtcacctgcatcctgggaactcaagctgcctayggaagtttggcttgtcctattacagcagtaatatattggaaacaagaagacatgaacagcttattaaatagccaggtagctgggcagaatgagaaaatgcaaccctagacaattgagccatttgggcaaatatgagagtctggagtgagctctgggagaggcccaacactaaataaagggtcagctttctcagagataaggccatgattgaccccagaatagacgattccaagatgtgtgctatgtgggagcctccaagtggcaacaaaaacatctgggttgcttgcattgccagtagtggcagcactagtgtgttatattggactccatggccttggcgagagatgtagccttagcctggaggatggccagagatccagaaggtagaaacagttttgggaagtctgccattctactatcatccagctttttactcaagtgtacgaattaatttcccacctggaaatcaatgtatgattagattaaaaatagaacaaacacacaaatgaaaatatagtt

SEQ ID NO: 160180 - DNA, 623 bp, Homo sapiens
cagagaatagctgttcagtgctcatgcagcttatttgttttaaactgtgagaaggatttgggaaataaggagtcacctgcatcctgggaactcaagctgcctacggaagtttggcttgtcctattacagcagtaatatattggaaacaagaagacatgaacagcttattaaatagccaggtagctgggcagaatgagaaaatgcaaccctagacaattgagccatttgggcaaatatgagagtctggagtgagctctgggagaggcccaacactaaataaagggtcagctttctcagagataaggccatgattgaccccagaatagacgattccaagatgtgtgctatgtgggarcctccaagtggcaacaaaaacatctgggttgcttgcattgccagtagtggcagcactagtgtgttatattggactccatggccttggcgagagatgtagccttagcctggaggatggccagagatccagaaggtagaaacagttttgggaagtctgccattctactatcatccagctttttactcaagtgtacgaattaatttcccacctggaaatcaatgtatgattagattaaaaatagaacaaacacacaaatgaaaatatagtt

SEQ ID NO: 160181 - DNA, 623 bp, Homo sapiens
cagagaatagctgttcagtgctcatgcagcttatttgttttaaactgtgagaaggatttgggaaataaggagtcacctgcatcctgggaactcaagctgcctacggaagtttggcttgtcctattacagcagtaatatattggaaacaagaagacatgaacagcttattaaatagccaggtagctgggcagaatgagaaaatgcaaccctagacaattgagccatttgggcaaatatgagagtctggagtgagctctgggagaggcccaacactaaataaagggtcagctttctcagagataaggccatgattgaccccagaatagacgattccaagatgtgtgctatgtgggagcctccaagtggcaacamaaacatctgggttgcttgcattgccagtagtggcagcactagtgtgttatattggactccatggccttggcgagagatgtagccttagcctggaggatggccagagatccagaaggtagaaacagttttgggaagtctgccattctactatcatccagctttttactcaagtgtacgaattaatttcccacctggaaatcaatgtatgattagattaaaaatagaacaaacacacaaatgaaaatatagtt

SEQ ID NO: 160182 - DNA, 623 bp, Homo sapiens
cagagaatagctgttcagtgctcatgcagcttatttgttttaaactgtgagaaggatttgggaaataaggagtcacctgcatcctgggaactcaagctgcctacggaagtttggcttgtcctattacagcagtaatatattggaaacaagaagacatgaacagcttattaaatagccaggtagctgggcagaatgagaaaatgcaaccctagacaattgagccatttgggcaaatatgagagtctggagtgagctctgggagaggcccaacactaaataaagggtcagctttctcagagataaggccatgattgaccccagaatagacgattccaagatgtgtgctatgtgggagcctccaagtggcaacaaaaacatctgggttgcttgcattrccagtagtggcagcactagtgtgttatattggactccatggccttggcgagagatgtagccttagcctggaggatggccagagatccagaaggtagaaacagttttgggaagtctgccattctactatcatccagctttttactcaagtgtacgaattaatttcccacctggaaatcaatgtatgattagattaaaaatagaacaaacacacaaatgaaaatatagtt

SEQ ID NO: 160183 - DNA, 527 bp, Homo sapiens
gttatgatgcagagcagctggaactctcattcattgctggtgggaatgcaaaatggcacagccactttgaaagacagtttggcattttcttccaaaggtaagtgttgtcttaccatacaagccatcagtcatatttttaggtatttaggaactgttagaaaatttatgtccacaaaaatacctccacatgtatgtctatagcagctttatttatgattgcaaraatttgaaagcaaacaatatgccctcaataggtgagtgtataaacaaactggtacatccacgcaatggaatattattgaataatgaaaagaattaagcttttaagccacaaaaagacatgaataaatcttaaatgcatattgctaaatgaaagaagccaatcagcaaaaaccacatactgtctgactccaattatatgatattctggaaaagtcaaaactatagaaatgataaatgattattgattgtcaggggttttctgggagaaagtgttgagtgggtgaattactggatttttttttaga

SEQ ID NO: 160184 - DNA, 527 bp, Homo sapiens
gttatgatgcagagcagctggaactctcattcattgctggtgggaatgcaaaatggcacagccactttgaaagacagtttggcattttcttccaaaggtaagtgttgtcttaccatacaagccatcagtcatatttttaggtatttaggaactgttagaaaatttatgtccacaaaaatacctccacatgtatgtctatagcagctttatttatgattgcaaaaatttgaaagcaaacaatatgccctcmataggtgagtgtataaacaaactggtacatccacgcaatggaatattattgaataatgaaaagaattaagcttttaagccacaaaaagacatgaataaatcttaaatgcatattgctaaatgaaagaagccaatcagcaaaaaccacatactgtctgactccaattatatgatattctggaaaagtcaaaactatagaaatgataaatgattattgattgtcaggggttttctgggagaaagtgttgagtgggtgaattactggatttttttttaga

SEQ ID NO: 160185 - DNA, 445 bp, Homo sapiens
atctctgatatgtataccagagagttagcttgcatcttattgattttctaggaacatcagagttgtgattatatttcctatctaagtgtgcccagtgaaaaaattttcaggttttacaaaaaatatactatctgacctgcacactgaacctaatacattcagaacctctgaagttttagctaaaatatctatgttcaaaaaaatctatataaaaatttacatgtcatttaaaatctctcagaatagtgaagcaatacaaaatcctagccccaaggcactgggttgcctttttttctctctacttctggaaagtagagtccatttgtccatccgtccatctgtccatccatccrtctatccactcatccatctatctgtacacccatacagtagggcgctatatattgtatcttatgagtacagcctgtgaagtcttactgggttc

SEQ ID NO: 160186 - DNA, 594 bp, Homo sapiens
tctcccaaatactcagggtctcactctctctgtgctgatccacctggaactggtgtgcacagtgggagtaaggcaagcaccccgtggccaccaccactggtactgaactgggtcagacttgatgccagcagagcactgggttttgcccaaggctttttccttcaggatgagtgagtcccccaggccctgggtatgtccccagatgctgtctaggagccaggaattggagtcaaaagccttacctgatgttctgttctactgcagctaagctggcactcaaagcacaatacaaagtccttcccactcttccctcccttaccaaaggcagaggagcctctttctgtggccaccaccaccaccagtccatggggggttctgccaggccactgctgatgtttgcttaaaccccaaggactcttctatcagtttgtggtgaatactgccaagcttgggactcaccctttagggcagtggcctcccttatagcccagggcaggcccagatatgctgtccaagagcctaggcctggacttgggcctrcttgttgctatatctcactgtaaccaagctggtaactagggtgcaataaaaagt

SEQ ID NO: 160187 - DNA, 571 bp, Homo sapiens
tccacttacaactgataggtttttcaaacttatcaaacctaaaaaaggtaactagatttcccctatcatcctctagtcttatayatttcagtaactatcatgatcaagccaaaatcctgagaattgtctttgtattttccatttccctctgttccttccctccaattcatcagtaaacctggattctatctacaaaatacacttcaaatacattctctttatttttttcatcatcaccttattctgagacaccaatatctttttcctggatgactaagttagcctcctaacttgtagaaagcatcaggaacatgtttgtgaacatctaagcttttaataccctttgatcagccttccctcaatattatctaaataaaacacccaggactgtgttggagtgaaagctccttgtctctgaacaccactggcttccaccttgcaatgcctctctgttgataggagcccagagaaatggctccctattatgtttgtctcgatggaattatgttgtactattagtgaaaaaatattcaccttgcctagaaaagcatggtgaatgtaaaaaagtatt

SEQ ID NO: 160188 - DNA, 630 bp, Homo sapiens
gcaaggaaggcagaatccaagcaaatctttgacaaatgcagccttccctttggagaaacatattcttgtctgctgccagtaaatatttccatacaaccaaaagaaactctgtattttcccccyatagagaatgtcacgctgctttaatacaagtagggaaaaataagtaccattgaaggccaggaaggaaaacacaagaagcatttaattaagaaaaaatatgtaattctccatctctttcagtgtatcccagctccatttgcttgccgtcctcagctgtatgaagcaaatgaatgcaatcacaggcttttagctcccactcaagtctgacatttcccctaaatcttccctcctccctccactcccaccctctctgtgatgcaacacaattcattcattatactttgaaggttacagtcgattgctccaagacaagaatgcaaaatggataggaccagacttcctgcatttcaaaggttcatcttgatttcggttccgcaggctctctgcaaatgtattacccaaaagactgctaaattttgctttgactgggcctttgaatttcctcctttcatttaaagatgagagttgtggttactttgcgaattatagattttaatatttcttata

SEQ ID NO: 160189 - DNA, 544 bp, Homo sapiens
ctttttttattaaacttttaagttcacgagtacatgtgcaggtttgttatacaggtaaactgcatgtcaagggggttcgttgtacagattatttcatcacccaggtactaagcatagtacccattattttccctgatcctgtccctcctcccaccctctaccctcagggaggccccagtgtctattgttccccccttagtgtccatgtgttctcataatttagttcccacttgtgagtgagaacatgtagtatttcgttttccatccatgtgytagtttgctaaggataatgtcctccagctccatccatgtttctgcaaaggacatgatctcattcttttttttatggcttcatagtattccatggtgtgtatacatcacattttctttattcaatctgtcattgatgggcatttaggttgattccacgtctttactattgtgaataatgctgcaatgaacatacatatgcatgtgtgtttatgatagaacaatttatatttctttgggtatatccccagtaatgggatcgctgggttgaata

SEQ ID NO: 160190 - DNA, 544 bp, Homo sapiens
ctttttttattaaacttttaagttcacgagtacatgtgcaggtttgttatacaggtaaactgcatgtcaagggggttcgttgtacagattatttcatcacccaggtactaagcatagtacccattattttccctgatcctgtccctcctcccaccctctaccctcagggaggccccagtgtctattgttccccccttagtgtccatgtgttctcataatttagttcccacttgtgagtgagaacatgtagtatttcgttttccatccatgtgctagtttgctraggataatgtcctccagctccatccatgtttctgcaaaggacatgatctcattcttttttttatggcttcatagtattccatggtgtgtatacatcacattttctttattcaatctgtcattgatgggcatttaggttgattccacgtctttactattgtgaataatgctgcaatgaacatacatatgcatgtgtgtttatgatagaacaatttatatttctttgggtatatccccagtaatgggatcgctgggttgaata

SEQ ID NO: 160191 - DNA, 544 bp, Homo sapiens
ctttttttattaaacttttaagttcacgagtacatgtgcaggtttgttatacaggtaaactgcatgtcaagggggttcgttgtacagattatttcatcacccaggtactaagcatagtacccattattttccctgatcctgtccctcctcccaccctctaccctcagggaggccccagtgtctattgttccccccttagtgtccatgtgttctcataatttagttcccacttgtgagtgagaacatgtagtatttcgttttccatccatgtgctagtttgctaaggataatgtcctccagctccatccatgtttctgcaaaggacatgatctcattcttttttttatggcttcatagtattccatggtgtgtatacatcacattttctttattcaatctgtcattgatgggcatttaggttgattccacgtctttrctattgtgaataatgctgcaatgaacatacatatgcatgtgtgtttatgatagaacaatttatatttctttgggtatatccccagtaatgggatcgctgggttgaata

SEQ ID NO: 160192 - DNA, 544 bp, Homo sapiens
ctttttttattaaacttttaagttcacgagtacatgtgcaggtttgttatacaggtaaactgcatgtcaagggggttcgttgtacagattatttcatcacccaggtactaagcatagtacccattattttccctgatcctgtccctcctcccaccctctaccctcagggaggccccagtgtctattgttccccccttagtgtccatgtgttctcataatttagttcccacttgtgagtgagaacatgtagtatttcgttttccatccatgtgctagtttgctaaggataatgtcctccagctccatccatgtttctgcaaaggacatgatctcattcttttttttatggcttcatagtattccatggtgtgtatacatcacattttctttattcaatctgtcattgatgggcatttaggttgattccacgtctttactattgtgaataatgctgcaatgaacatacatatgcatgtgtgtttatgatagaacaatttatatttctttgggtatatccscagtaatgggatcgctgggttgaata

SEQ ID NO: 160193 - DNA, 642 bp, Homo sapiens
tctgtgcatatttgtgtctttccacaatgtcaggctttattgatgctatttcaatcacaaaagtcacgagctgcatggagtttcaaaggaggcaattcttagtacttcccattcactcagtggtcagagccatgggcacttcaccagtcagtcaatattgcaaaccatacataatagtatgtgtaaaatataaatgttatagattaagtattccayaacaaagtaacttttaacatcaagaggaaaaagatataggagaaagttaattaaccagtccaggggagcaaagaagacaaaaagagttctggtctaggctgtttcgcaaagaagagtctttgatgtggcagagccctaggcagcagatgcttaattcttatgagtggctgcaagatgatgtcagttaagatggcagttttgagctgaaggcctgctctcttacagtcatggagtcctctggtgagaactggtggaagagtgtgcttgtttgtgttcttattggttggatgcagtctttatgtttttatttgtttattaagtaaaatgtcttatgcttattggcaaagtactctctgaaatataaaatgaagcctttttctaaaatacagttagttatgtcaagggtgctctatccaagtacagact

SEQ ID NO: 160194 - DNA, 580 bp, Homo sapiens
ctcattggcagggacaagggcataaaattaccattatatttgttctttaatccaaggcctagcagaaaaccacagacaaaatggtcatcatggctcaaggaaacttatracccaggcatgaaataccagttgaacactgggctccgtccctttgtacaggtcggtgccattttcgtatgtactacatgtcatgtctggtctgattttctgagtgtctgtgatgtcagcaagttttttctggcattaagatgtttgctggtacccaactattcatttcatcctccttaagtctctagtggtgacttccagaaagaaaaaatcaaaagcaagttacattatttaaagcccagcacctataattgttagtagcattatttatactttcctaagttggaatcaagtagtttgttgacatattagtgtaaatactactcatagtactgaacagctgaggtgcagggataggtaacaggttggaagtgagctcatctgcaaggactcaaaaaacctggttagctgagaatggccagtctggaagtatgaattgttacacaaaatggtcaggccactatgcaaagac

SEQ ID NO: 160195 - DNA, 529 bp, Homo sapiens
taactgctagaagcttggaagaaggagggaaggattcttccttccacccttcagagggatcatggccccagtgatgccttgatttcagactcctagcctccagaactgtgagagaacatagtcatggactgtataatgacttttaggtcaacaacagaccacatatatgacagaaatcctataagattaaaatggaactgaaaaactcctatcacctagtgatgtcatagccatcatacatcatagcccaatcattttattttaaaataaattttgtgtagcctaagtgtayagcacatcctcaaataacatcgttttgttcaaagtcattttgttataacattgatgagaaaaaaataaagtctattcccagctcaggccactgtctgtgaggagttctcacattcgccccacgtctgcatgggttttctccgggtaccccagtttcttctcacatcccaaagatgtgaatgttaggtgaagtggtgtgtctaaatggtaccaataaaatctacagtcgtgtacagtt

SEQ ID NO: 160196 - DNA, 389 bp, Homo sapiens
tgaatttgctgtggcaccctggggtgcctcagtgtacagtttgggatctgtgggacatggattctgttctcctgtttttttatagtctgatagagaagagatgtcatataaataaggaaggatagattaggtgctataaaaaattcaacaggttagagcaggggttcatttgtgatatcatgagccaacagaataacaaaataaaatggtagtgactatggagggtgcctttttttttgagtcagggtctcackctgttgtccaggctgcggtgcagtggtgcaatcatggctcactgcatcctcaacttcctaggctcaaatgatcctcctacctcagcctcccaggtagctgggactataaccatgtgccaccacagctggaaaatt

SEQ ID NO: 160197 - DNA, 563 bp, Homo sapiens
aatctccttctttggagactaatgaatgagttacagtaatgatccttatgttctggcaacaatgaaaaagaactactttttcaattagcacattgattagaggtttcataagtacatttattctccttttatcagctaataggttttcttattgggaaaacaattctgtcatggtcttacctattataatgtkttattaagactcgttacattttgaaataataaaaagaaaatagcacaaaaaaaatgattcaaaaagtaaccttattttgaacaaatttgcttgaccaatgtataaactcacaacaaagaagagaaaggggagaccataaacactcaatatttcattcaagatttcaatagatttttagaaaaatggaaatcatatgcaggagttgtgaatgatccaagtggaaaaaacaatagtcaagaataggtagagataggtgagtgatatggtttggttgtgatctgccacaagaaaactcatgttgaaatttgactcccaaggtggcagtgttgggaggtggggcctagtgggagatgtttgggttatgggacag

SEQ ID NO: 160198 - DNA, 611 bp, Homo sapiens
taatgtgtatcatgtaaaggactttgcagagataattttatttaattctcgcagcagctctggaaggaaagtattgtataacaaactggatgaaagataacaacagtgcttgggggtgatatggggcttgttcatggtaccatgattttgttggtgcaaattttttgttttggctggatatagggtattatgattatttagcatggcaaaaatttaaatcagatttattgagctcatattctttccactcttattaagtttattattattatcatcatmttattattattatcatcacaaaagggatgcttactgactatagaaaattttttaaaataacaagaaaccttacccataacccattataaacatgtttgtcttttttagttttttttcttttctaaccatttttcccctatttttgcatggctatgaatacactgcaaaggtaattttgtatcatttggaaagatttaaattattttaggagaaaagagtttaaaagatatgagaggggctgaaagtaggagggaacgtaagcaggaagaagtggaaagagatatgaagaactaagaaactttgcaaactcaagaatatgtcaatcataactt

SEQ ID NO: 160199 - DNA, 603 bp, Homo sapiens
aagcttcatatcttcatgtttggtaggccttttgaatttggagacagtctattcatacctggggatattgctttgactggatgactgctgctagccttacttactttctgatatcctatatatacatatatataaaatatgtttacatatgataatgtggggaaaagtaagtctaagtagcacaagagtggactgtaggtgagggtgtcaatgctcccccatgcccatatgtcttttgcaatcaatatctccatggatgcttacagctgccaactgcaaacaacagtgattttgtatgcaggttttctctgtccataaaagtatgttaagcctatacttgcggcaggcaaagtgctagagagtcagtatgcctatgagcagccctttaaccaatgatagaatagattggacatcaataacctaacttctttacctcttagaacaactcttaggcatggttgaaactgtgttccagaggacccagacagaatctaggttgttcacaatgataacatgctcatatatgcatcctakattggtcttttcctcttgcctaccttatttccattttcaataatggtgcttcagaggtcaggaaagaaa

SEQ ID NO: 160200 - DNA, 479 bp, Homo sapiens
agaatctgattatatgccttggggatgatcttctcatggagtatctgactggggttctctgcatttctggaatttgaagttgacctgtctagctaggttggggaacttctcatggatgatatcctgaaatatgtttttcaaattagttctattctctccatctctttcagatacaccaatcagtcgtagatttgatctctttacataatcccgtacaaaaaaattttttttcattcgttttcattcatttttcctctattcttgtctgcctggcttatttcagaaacaccatcttcatgctctgagattctttctttcacttggtctattttgctatttatacttgtgattgcattatgaaattcttstattgtgtttttcagctctttcaggttggttacattcttctctatactggttattttgtctgtcagctctttcagtgttttatcacaatttttagcttctttgcattttat

SEQ ID NO: 160201 - DNA, 526 bp, Homo sapiens
ctctttacataatcccgtacaaaaaaattttttttcattcgttttcattcatttttcctctattcttgtctgcctggcttatttcagaaacaccatcttcatgctctgagattctttctttcacttggtctattttgctatttatacttgtgattgcattatgaaattcttctattgtgtttttcagctctttcaggttggttacattcttctctatactggttattttgtctgtcagctctttcagtgttttatcacaatttttagcttctttgcattttatacagtgttcaaacccggcagcagacaataacatcctagcagaattctaaaaactgtttatcgtactaaagaagctccactcatttatctcagcagccaacttctcaccccagcagtggttagtgartgaaccgaccattttctcatttccagccatctccagcctcagcccagttctaaacccttgctggagaggtgaggtggtcatttggtggaaagagggcactctggctttttgagtttt

SEQ ID NO: 160202 - DNA, 609 bp, Homo sapiens
ggaagttctaatgagatgtacccaaggaggttggggtacagcttgctttcatatattttagggacacagaatacatctatcaatacatgtaagatttacagtggtttgatctggaaaggcaggacaactcaaaggtggggggcttccaggtcatacataaatttaaaattkttctgattggcaattggttgaaagagttatgatcaatagaaaggaatgtatgtgttacagtaagttattacagaggcaaagggtttatcatgcagatgaagcctccaagtagcaggcttctgagagagtagattgtaaatgcttcttatcatacttagggtctgcattgatgttaatgctgattggattttcctgaatttcaaaagagaggaggttttaatgaggaatgttggacccctccttccatcatgacctgagctaggtttttcagtttaactttggagtccccttggctgagaggggaggtctattcagatagttagggggccctaaaatttaatttgggtttacactatggtaagccaaaataaatgaataaaaagacaaaataaatgctaaccattttactagtgttataaactttctcaaacagaaaag

SEQ ID NO: 160203 - DNA, 561 bp, Homo sapiens
actaatatgattaattatttagttttttttaacttttataaactttttgaaataggaataaataatactatcaacttaatttatttcataaagatacattaatactaaaagtcagatagtctgactttcaaataaaaatttcattaatctacatggcttcccataaatattaaaatccaaaacaatgcttatattaaccatttaaccatattatagtattcacagtgttgttcaacgagtagaatgatccatttcatttaaaaggggaggtgatataatagccaaaactgaaacacattaagaaatgccagagaagagaagaagaataacaataatcataacacattaatatatcacacatttcaagtatttatggcaagaaaatcataactaataaaaaaagtaaatttcctaagtaaaggaggagtaaaagaagaaagacagtattccccagatgcatgtatatatgtatatgtatatatatgcatgtatatatatstataaactgtaaggttggagatgaaatcctcttaggagtttaccttgactctggatgacagc

SEQ ID NO: 160204 - DNA, 561 bp, Homo sapiens
cttgtgttgattgctgtacccaccaaccacatctctgcctaccccctcctcagccattatgacttagccacacacttccacttttgagtaattcaagttgtcctactctctatctgctttgagaaaagaaaatgggaagaatctaaaaacttccaaacatctcattgatactttaatgtaaatgagtttaccagtgttaacttacacatcttttgtaaagtttaagtctttggttgtgggctaaaatgtcttcaaaagcaaggtttagcaagcagatttttttttttttttcagaatttagatagggtgtyctaaatgatatggaatattctatgttggaataatatggccaatgaacttcttaatcaacccaggcaattcctttctctcaggaagccaggatgggtttacctggccttggggctctgtacaggatgacactgtaccatgcaggggtactgaaaggctggcttcttatccctgctttgcttctccatgttttgcctcttctcttggctgcctctctccttcattctttatcttagcatttcttttatttgc

SEQ ID NO: 160205 - DNA, 556 bp, Homo sapiens
gagagagaggaagaacgagacaagagactccaagacacccctctgaggtggatgccatttgcaccaatacatkagtccaggaaattttggcaccctgctctggactcatctacttctggcaatagttatgccaccatttgggaggttatatttcagaaggttcacctactgcattattggaaacagtttcaataaatcatgattttaaaaactgttagcaaagatattgaagtaggatggaagaacaatgtgaggatgctgacatgagtgaggggctcacaaggaatcaatcagaggagtcacaactgacagcagggggtagtattcctgcagcaacttagcactcaacccagagcagagggcatgatagagaaaagtagagtgaaacctagactcagaaattacatatctgcaagtgcagttttctaacacctagttcagtgcttccagccatctggaaacaagaataaaatgcctgcaattaactaaactgggctatatagatacaaacaggatatcttgagttaaaaaaaaatagtgtaggaatggaaattaa

SEQ ID NO: 160206 - DNA, 556 bp, Homo sapiens
gagagagaggaagaacgagacaagagactccaagacacccctctgaggtggatgccatttgcaccaatacatgagtccaggaaattttggcaccctgctctggactcatctacttctggcaatagttatgccaccatttgggaggttatatttcagaaggttcacctactgcattattggaaacagtttcaataaatcatgrttttaaaaactgttagcaaagatattgaagtaggatggaagaacaatgtgaggatgctgacatgagtgaggggctcacaaggaatcaatcagaggagtcacaactgacagcagggggtagtattcctgcagcaacttagcactcaacccagagcagagggcatgatagagaaaagtagagtgaaacctagactcagaaattacatatctgcaagtgcagttttctaacacctagttcagtgcttccagccatctggaaacaagaataaaatgcctgcaattaactaaactgggctatatagatacaaacaggatatcttgagttaaaaaaaaatagtgtaggaatggaaattaa

SEQ ID NO: 160207 - DNA, 556 bp, Homo sapiens
gagagagaggaagaacgagacaagagactccaagacacccctctgaggtggatgccatttgcaccaatacatgagtccaggaaattttggcaccctgctctggactcatctacttctggcaatagttatgccaccatttgggaggttatatttcagaaggttcacctactgcattattggaaacagtttcaataaatcatgattttaaaaactgttagcaaagatattgaagtaggatggaagaacaatgtsaggatgctgacatgagtgaggggctcacaaggaatcaatcagaggagtcacaactgacagcagggggtagtattcctgcagcaacttagcactcaacccagagcagagggcatgatagagaaaagtagagtgaaacctagactcagaaattacatatctgcaagtgcagttttctaacacctagttcagtgcttccagccatctggaaacaagaataaaatgcctgcaattaactaaactgggctatatagatacaaacaggatatcttgagttaaaaaaaaatagtgtaggaatggaaattaa

SEQ ID NO: 160208 - DNA, 450 bp, Homo sapiens
tatttcaaaatcatgatgaaaaatctcaaatagttatcatcactgccaatcttaccacatttctttagtaaaatcattttttgaatttctgttttataacacctcctatctccaataagccaactgccttcatcactctgctgaaaacctcatcaacttcctgtatctgaaaccacatattatgccttcatttctagtagaatggagtaatgagtagttttcccaatcaaaataaagcctctctatttattcctgcaacccatcccktattacctgtaaaagcaaaatataatgaaacaaaataaaacacaagcctcaatcctgcccttgtatcagccttcttcttcatgaccactttttcctttctattgtatcattactatcatcattgtcataaaattatcattatcataaaatattccttagtgattatcacccaccgaaagaaaa

SEQ ID NO: 160209 - DNA, 631 bp, Homo sapiens
ggtacaacctataggatatatatttcatcacaactaattattttgccattttttttctcccagagttatagttaatatgttacattttatctttccttatttttctttgttggtttttgcttctaggtataagtttttcttctccacatgagatgagaattttaaacattttgtatgtgtgtatgagtatttatgttaaccaaagttaccaatagtagttcatatttttaaaaatataaaagatatatacaggaaaatgtaataatttcattgatgaagtgatgataatttagttagggtgtgttctgtagacctacaaagggaaaccgcatgcagatatttggtataagttagcattcttccaatatcaaactataattgattttgagcctsaaaagaatcagcttctccaatcttgtaaagatatacaactaatgtaggcttctgaatttatttttaaaagatcatttaaaattgaaacatgtaatttctaacttgagcttttattaaagtggtaggaatatcagaaactctgctcaataaatattgtgatgtttcttcattatttagcttggataatttttttcaaccagttcctgagctccttttcctacctgcttccttgcttgtc

SEQ ID NO: 160210 - DNA, 583 bp, Homo sapiens
accccatcacatgatataagcctaaataaattaaaatccataaataggcttcttaattgagaagctaacaatatccacatctaatacacacacctgtaaagaggtagccacaaaaggataaatcataatagaaacctagaggaatagatgtatccaatataatgatagaattttgccaaaamtttgataaagataatgagcataatccagtttagtatcaataaataatcaaaggtctgccagcaaataataatcaacccaagggacaatacactgtattcaaatagaaatgttaaacatgattcttttgctacactacacattagcagtaaaaatactaccagcagcaataacactaatatgaagagtagcagtagcatcaggaggaggaagagaataaagcggaaaagaaagaggaaagtgggaacaaatagatataatagcaacagaagtactgttaattgtagtcataattaaagtaaaatatgggcacaaatagaattctagccaaaagtaatagctcattggtctttagtagcttggatactactgggtaatatctttaattctttcttttgacttc

SEQ ID NO: 160211 - DNA, 553 bp, Homo sapiens
aggacctgagttcagtttttcatttttgttttttttttgttttgttttgtttttcacatatttaatgactgcaatgaagtttccagatttagaactggagccagattttaccatttttaaaatgtctaattaaaaaamcatatccaaatccaggaacagaggaattgcaacaaagagctgtgtgtgtgtgtgtgtgtgtgtgtgtgtgtgtgtaaacatgtgtataaatatatcagcaaaattcaggaaatatatgtaggaataaatactaactctattagcccaggaaagaagaacatatgaaccaggctgaatcttaaccttgtttacaagccttttgcaacgagctaaatgtggttttaattatttgcctgttaggtgactgaaacctggactcaataagtggcctactgtcatatcaacagaatgaaggacaaaaaacatatgactatttcaactgatgctgaaaaagcatttgacaaagttcaacatctcttcatgataaaaaatactaaaacaaaaattgagagcatacctcagcataacaaaagcc

SEQ ID NO: 160212 - DNA, 524 bp, Homo sapiens
gtaaagttagttatatgtgatcatttctcacggttcattctctaatcgcatgttccccctttacctagtcctcatttctgttgcagtcttttttaattgttatttatttgtttggcccctccccackttcctttttggattgcttttcctgtttcttttcctggaatattcttccttcacatatttttatattaatattttctctcttccttcaagtttaaaagaggatccttattacttgcccccaggaaaatcctgattcatttatcctgttctatttttttaatcaaagaataattatctgaaataatatattctttatttgagtatatatgaattttatttttcctcactgaatgcaagctctataagaaaataaagtcttattcaataaaatattaccagcaataatacatgatgcaactttataatatttgtttttacattaaaaggaatcttaattcagtattttaataacaatgtatcatatattaaatgtataattgaaaataaatgaatgtaat

SEQ ID NO: 160213 - DNA, 517 bp, Homo sapiens
tttgatttataaagcctaaattctgcatgagctcataaaatgatatcggtttgtatttcccttttatttgttttccagcaaaggttgtataagattgtcatcattatttcaaacaaatattaggaagaattgaccagtaaagacatctgggcctggaaattctttgcaggtttttggctatagttcaaacttatataagagataygtaacaatatagcttttctatctctttatgtattgttttgccaagttggatttgttaaggacttggttgtcttcagctaaattgtgaaatttatgagttgtaatgaagctgcccatcgtatcttctcaccagctttttaacatgtaagatccacgttggtggttttgtctcattcctgatattgatagtttgtggttttttttttttaatcttgagcaattttctagggttttattattttattattttttaataaactaacttttgttttttaagtttctttctcatgttttatttatcttacaaacttgg

SEQ ID NO: 160214 - DNA, 593 bp, Homo sapiens
ccacaaaactggaaggtggtacactatcagttgttgctagtacagtgagccctctggctagttctactccttggcaatgactatccctgaagtgggtgtcataactatagatgcacaagttactgctcttgtagatgacaccgctcgggctctgaatcacacttgactggccctcctcctgttaatggatgaggttgatcagatcagaaaggtggtgttgcaaaaccaatggccttaggcataataactgctgcccaaggaggctcctgtgcccttttaggaacacaatgttgtacctttatctctgacaatcagcagaacataacagcagccctgcaaggggtctcatgggagattaaggtggtcgagagycttattgacaaccccctgcagagatggtgggcatccctagactctggactacgctgagccctatagtcacaagtagcatagctgggatcctagtagtaagctctgctctctgtatagttagttgttgtgggttatggaatcagggctctgctctatgggcatgagtcgctgcctggatgaggccctcagcccaggggatggagtgtaagggaaatggctgc

SEQ ID NO: 160215 - DNA, 484 bp, Homo sapiens
agttagttgttgtgggttatggaatcagggctctgctctatgggcatgagtcgctgcctggatgaggccctcagcccaggggatggagtgtaagggaaatggctgcactttggtctggagtargctgaggagctctttcaccataacatgactcagcaggtttggagggcagacacacaaccccgcgcattatgtaaccatgccatgtgaggtgcattaggtgatcacccacgtgagcttgtgcttggctcagagccactattgtctgtaaaggtataattatcctgctagtgctgtacatatggctcactctatgcccagagaaagagtaaagccacgtggaaactgtctacgattcctcgagtgtttttgcagctacctgccactcacccgccaactcctcttggacctcagaacctgacaggcacacatggagatgtgtcacccaggtccccctttaagggtattctgtccatctgtagga

SEQ ID NO: 160216 - DNA, 522 bp, Homo sapiens
tcattcttctgcatatggatatcgagtttccctaccaccatttatcgaagaaactgtcttttctccagtgtatgttcttggcatctttgtcaaaagtaagttcactgtaggcatgtggatttgtttccgggttctctattctgttccattggcgtatatgtctgtttttatgctagyaccatgctgtttcagctactataactctgcagtgtaatttgaagtcaggtaatgtgattcctccagttttgttctttttgatacctttggctactctgagccttttgtggctccaaaaaattttaaggttgttttttctatttctgtaaagaatatcattggtattttgataggaattgcactgaatctgtagattgctttgggtagtgtggacattttaacaatattgattcttccaatccatgaacatggaatattttttcattttttggtgtcctcttcaatttctttcattactgtttaatagttttcattataatgatctttcacttctttggttaagtt

SEQ ID NO: 160217 - DNA, 522 bp, Homo sapiens
tcattcttctgcatatggatatcgagtttccctaccaccatttatcgaagaaactgtcttttctccagtgtatgttcttggcatctttgtcaaaagtaagttcactgtaggcatgtggatttgtttccgggttctctattctgttccattggcgtatatgtctgtttttatgctagcaccatgctgtttcagctactataactctgcagtgtaatttgaagtcaggtaatgtgattcctccagttttgttctttttgatacctttggctactctgagccttttgtggctccaaaaaattttaaggttgttttttctatttcygtaaagaatatcattggtattttgataggaattgcactgaatctgtagattgctttgggtagtgtggacattttaacaatattgattcttccaatccatgaacatggaatattttttcattttttggtgtcctcttcaatttctttcattactgtttaatagttttcattataatgatctttcacttctttggttaagtt

SEQ ID NO: 160218 - DNA, 470 bp, Homo sapiens
agcggcggtaggaaggaaatcttatatcaaactgactgaatatctaaaacraagatagggcagggagcctggtgagaaacgctgggagagggcggcctggcaaatggctgtagagtgtttctaacagcctcctggtgaaaaccgtgaaggccatcttgagaacctttcagtaaacattgagaacaatgaatcactgaaaacaagcagcagggttcacaaggaataactcatgtcagccaatttgacagccttttaaaaatagaattattaggttggtgaataaaagagccattatgatcctctgcatttgcagttcagtgggactgtctcaagaacccctctcatatcattttttcaaacgagctggtgctggtgacatccgtgtggattcagagacaggtggaaggtactcatttacatactctggatgcaaagatgcacacaaggatgctcatcacagcattgtgtgg

SEQ ID NO: 160219 - DNA, 592 bp, Homo sapiens
gaaaacaagcagcagggttcacaaggaataactcatgtcagccaatttgacagccttttaaaaatagaattattaggttggtgaataaaagagccattatgatcctctgcatttgcagttcagtgggactgtctcaagaacccctctcatatcattttttcaaacgagctggtgctggtgacatcmgtgtggattcagagacaggtggaaggtactcatttacatactctggatgcaaagatgcacacaaggatgctcatcacagcattgtgtggaataggaagaagctggaaacaatctaaatatcaccaatgggggattatttaaaagtactttggaatatccacgaaatgggctattacctagctgtttaaatcaggggttggcaatctatgacccatgggccaaacccaccccaagagttaagaatgatttttatagttttaaatggtttaaaaaattcaagaggaatattttacaacatgtgaaaattataggaaattcaaaatcctgccttcataaatacagggtttttttggtaacacagcctggctattcatcagcatcttatctcaggctgctttcatgctgc

SEQ ID NO: 160220 - DNA, 592 bp, Homo sapiens
gaaaacaagcagcagggttcacaaggaataactcatgtcagccaatttgacagccttttaaaaatagaattattaggttggtgaataaaagagccattatgatcctctgcatttgcagttcagtgggactgtctcaagaacccctctcatatcattttttcaaacgagctggtgctggtgacatccgtgtggattcagagacaggtggaaggtactcatttacatactctggatgcaaagatgcacacaaggatgctcatcacagcattgtgtggaataggaagaagctggaaacaatctaaatatcaccaatgggggattatttaaaagtactttggaatatccacgaaatgggctattacstagctgtttaaatcaggggttggcaatctatgacccatgggccaaacccaccccaagagttaagaatgatttttatagttttaaatggtttaaaaaattcaagaggaatattttacaacatgtgaaaattataggaaattcaaaatcctgccttcataaatacagggtttttttggtaacacagcctggctattcatcagcatcttatctcaggctgctttcatgctgc

SEQ ID NO: 160221 - DNA, 356 bp, Homo sapiens
tgtgttatatccatacaatggactactattcagcaataaaaagggatgaactatggatacacacaccacaaacggatctcaagataatttatgtgagtgaaagaagctagccaaaaagaatacatactgtattattccatttatataaaattgtcaaaaatgcaaatttagagtgatcaaagcagatcactggttgcccaggaatggagacacaaggaggaataaaaaggcataaggaaacttttggaggctatggaaatatctttctttattgtgatagtttcacgggtgaatacatatgtcaaaacggaktcaactgtacacttcaaacatatgcgatttagtgtattttaatt

SEQ ID NO: 160222 - DNA, 565 bp, Homo sapiens
aaatatgtaatctttctgagaattagtttttcatctttgataagaaaaaygaaactaacttcacagactggtggtgaggattcatctacacaaatagccgagaataatacatcatacatagtaatgcttgaatgttttctctcttcttatattttttctttgtttcataaagaatttgaagttacttataaaaataatttcacaaaatgttacctatcttcctccttcctctggtccaataaagacaaatttttgcagcaagttgaacactggagacctatagggctccagaaataaatacttttgaaatatctgggcttgccaatagaggacaatttagcaatatctaacaacttacaaatgcaaatgctgcttgatctagcaatttcacctgtgggaatttatcctagagataattgatttatgtataagcctattcattgcagcattaattttaataggaaaagattttttaaaatctaaatgtccatcagtataggattggttatataaattatggttcatggtattccatataaggaaataatatgcagcttgaaaaaat

SEQ ID NO: 160223 - DNA, 565 bp, Homo sapiens
aaatatgtaatctttctgagaattagtttttcatctttgataagaaaaacgaaactaacttcacagactggtggtgaggattcatctacacaaatagccgagaataatacatcatacatagtaatgcttgaatgttttctctcttcttatattttttctttgtttcataaagaatttgaagttacttataaaaataatttcacaaaatgttacctatcttcctccttcctctggtccaataaagacaaatttttgcagcaagttgaacactggagacctatagggctccagaaataaatacttttgaaatatctgggcttgccaatagaggacaatttagcaatatctaacaacttacaaatgcaaatgctgcttgatctagcaatttcacctgtgggaatttatcctagagataawtgatttatgtataagcctattcattgcagcattaattttaataggaaaagattttttaaaatctaaatgtccatcagtataggattggttatataaattatggttcatggtattccatataaggaaataatatgcagcttgaaaaaat

SEQ ID NO: 160224 - DNA, 538 bp, Homo sapiens
atgataaatattagaagtgaggtttcatgctaaaatgactagtgttcaagatatgcagattggctaaaatattttacagatacttcccaatattgcacaaatagcacataaaactctagtgagctttttrcccttcgactttcaaagtggtgcctaaggcttgattctaatatagtcctgcctccatctactaacttagatgattctggttgcctgattctggctaagaggttaactgaattctgcttcaagaatgtcgttgtgtctgtatcaagagaatgtttaatgcaaagaatggttggagtatatagaaggatagagtgctgggatttcattgagcttggaggttatatgactgtttttgtgattgcttgctaataaatgcttatttaataaatgtttgtgtgacagaatttggtactagactcacttttattgcagcaagtttaggggaggtagtttacagtgacctacctctaactatgtattaaacaattatttagcaactactttgtgccttcttgcaatttatattcta

SEQ ID NO: 160225 - DNA, 558 bp, Homo sapiens
cactttgctatgggtagatctagtatggatgtatcattttcataactgtggttaagcatttcatgtcaaaactgcttttgaggacacaaaataaattgccagtacacaaaataatggcagaaagataagcaaaaacatgtattgtagaacactctcaactcagagtgtagtgaatggtagaatgcagtaataggggactcccattcattggctgagagcagctggtatacaggtatacagggctggttacaggtacactacaccaaactgttaatgtttattagctatatgcctacaaaacactcaagaatttggaaaattttaatttataatacactgaaatagatcattattacatatgtatttgcatatttttaaagaaactatggtagagataaatagcttcttgaagaatcagtgctgaatagagcattgttcaacatggtatgtgtgatagaaactaagtcctatttgtatttaaaactgtgcaagttatcatcccctctaggaaatctcttcygacacttaatttcctctgggcctccttatatatgattg

SEQ ID NO: 160226 - DNA, 600 bp, Homo sapiens
agtgatctgggagaaatgctctaaatacaagcaaagcttttgacaaatgacagtactgcctagttaaactagttaacagctgaaaaagaaaaaaaaaaactcataaaggggatgacataatagcgcttagcaagaaaatgatgtgtatactgaaggaagaaacacgggaaaattgaccaatactgatttttttctcaaaatgacctttattatgaacttgctgctaaacttaaacattaagtgaaagatgccattatcatactaccataaaatttgtgttgaaagattatacctcccaaactcctattcattcttcatcttcaacattagttaataattgtaattataacctrtataattattgataatattaaaataggggttaaaaactaatttagtttaattttttaagctgagttctaatcaagtcttttgtcccactatttacttgaacaagtggcccctgtattaaatggcttcactctcagtgacctttgcataaagaagacttctactcctgaatccatctatttctcccaccagctctgtcactgccgtaattcagaccaccatccttactcacttagattactactacaa

SEQ ID NO: 160227 - DNA, 604 bp, Homo sapiens
tatacatatgtccaaactatgaaaattaattttatttatttatttatttatttagagacagagtcttgctctgttgcccaggctggagtgcagtggcactgtcttggctcacttcaacctctgcctcctgggttcaagcaatgctcctatctcagtctcccgagtagctgggattacaggcatgtactactgtgccccgctaatttttgtgttttcagtagagacagagtttcgccatgttggctaggctggtctcaaactcgtgacctcaagtgatctgcctgcctcggcctcccaaagtgctgggattacactgtgccaacctcaaactgaattttaaatatgtcaattataccttaacaaagctatgaaagaaagagagaaaggaagaaggaagcaaacaaggaagaaaggaaagaaggaaggaaggaacccaagagaagcagagacgaacagcacctgggtcatgctaacagcagagctctagaaaagtgattcccattgaggaggccacaggrtaaccaaccagatggctagatcctccttggatcctgaataagccacagttcaatgctggtgaagactgacaatcaagctgactaat

SEQ ID NO: 160228 - DNA, 541 bp, Homo sapiens
aataattttgcaaaaaataagaaatacatctttttcattaagcttatgaataaaatagaaaagcttattcattcctttcttctccagagatttgcataatgtgtagctataatagatgctcactaaatctgttaattggatgatagaatgaattaatacagaaaaaaaccctcactgttcatgagttgagtctcaatttctaagaattcatttattcgtgacatcttatcacaccaccatctgagatagaaggtaatatttgcttcaacaaatttctattgagtatctaatatatactcaacacagacttctaaacaaatacttgtcagtgttaggtaataaatrcaacaaaaatattatttacttggcactaaaataatataggcggtaggatttattttttccatagggtcaagaaattcttgtacctaaaaataaaattgaagctggttttgaagaatgagtgtgagtagtgaaagccagaaaatggagggcctttcaggagctaggaaggttgtgcaccaaggtttagccattcaaa

SEQ ID NO: 160229 - DNA, 562 bp, Homo sapiens
tgtctatttttctttagtctttgattacaaacaggcaaacatttcccgggagcgttgatagcacaagtgtggcttgcagagtagaaaggatttttcatgttagcatggggacacctgagtgtgaaaaaatataacctttccctccccttagctcttaagataagtgcagagcttgaagccttttatctgtggccatttatttatttttatatgtcttttaaaaactacaacttgcttcattttcttccatgacaatttcatgaaaggcwgtgtctttaaagcagcggtgtctttactgcagtgtgagttttcacggcggtggacggactccttgctggacgtcagccctgcccctggcatgcgtagccccgagcctgggctcctgccccacagagacaggcagtggaatgacagcggcaccaccagggctcaggactctgagagacccctgcgtccagatcccgactcccctgcttcagaggacgaacatggctccaactttcttgcaactgagaaaatgttagccaattgcctaacacacagaggtgaactgttgatgatt

SEQ ID NO: 160230 - DNA, 562 bp, Homo sapiens
tgtctatttttctttagtctttgattacaaacaggcaaacatttcccgggagcgttgatagcacaagtgtggcttgcagagtagaaaggatttttcatgttagcatggggacacctgagtgtgaaaaaatataacctttccctccccttagctcttaagataagtgcagagcttgaagccttttatctgtggccatttatttatttttatatgtcttttaaaaactacaacttgcttcattttcttccatgacaatttcatgaaaggctgtgtctttaaagcagcggtgtctttactgcagtgtgagttttcacggcggtggacggactccttgctggacgtcagccctgcccctggcatgcgtagccccgagcctgggctcctgccccacagagacaggcagtggaatgacagcggcaccaccagggctcaggactctgagagacccctgcgtccagatcccgactcccctgcttcagaggacgaacatggctccaactttcttgcaactgagaaaatgttagccaattgcctaacacacaraggtgaactgttgatgatt

SEQ ID NO: 160231 - DNA, 235 bp, Homo sapiens
gctcctaagagaaacaaatgctgccgctggtctgaaaggagagggagctcaggcggtcctgctcacaggcctgctgctcacctcctgctgtgtggcccgggtcctaataggccatggacctgcatcggtccacggccagggagttggggaccctggttttaaagaacatgytttattcacttttgtgtgtgtgttaactttagcctgctgtgggtttttgttgttgttattgttg

SEQ ID NO: 160232 - DNA, 608 bp, Homo sapiens
actttttggattttaaaatctgacttccaggttaatcatgacatacaagcatatcctgtgaatatccctggtgacagtcctattgatacattcagtagaacattttgatacatagtttttcttgtatcacctcccacttttgaatagggccccatcctagaaacactctgttgtcttggtttctagtccaccacacacytggttttgctccgattcctaaagctgcctgtttcagactctggtatgggctgaggagtcctcacctgctagtcctcccccgactgtgctccagccacgtcattctggttgcattacccctgcctcctcctgtggatctccaaagactgtttttacctctgatctagatcctttacctgagcttcagaatttatcttcagttgctttctggactctccatttgattcctcatcccacagacatgcaaaattcttaatgtccaaaactgaacctatgattttccataacaagtccatatctcctgtcatacccccattttaatgaataacacttccatcaaccaagttctgctctgggtccatggatgccattcttcacttcactacattgaagtacacttaaaatttaat

SEQ ID NO: 160233 - DNA, 561 bp, Homo sapiens
gatcataaaagtaggcatgtaaatctcagttgttgccaaatggtctgaaggtaatgatgtgtgtacgtgtatgagagagagaaattttccagtaatcaagaattgaaaaactcaagatttgtaaatgaacttcccaattataactggtactcagaaggtaacaagcaggacaagatactgagtatgtaggtctggtacaacatgctcygaaatgcagaggattttaatcaggcctgggatatattttctattaaaagtatgccttcagtaaagcttacttattcagtgtttcttcctttacttactgatatttagtacataggattagatataatttccttttgacacatatctctgccctagaactagactattttgcatttgtcctgttctttagaaaatctaattgcttaagaagatcacaatggaaaaaaaaaaacaggtatataaaactagtcatttggaaatacatgtaatagagagaaaaagttttttaaagaagagaatacatgtcttgctgatcacatttataatagcaaatgtacacattcaaattccctc

SEQ ID NO: 160234 - DNA, 564 bp, Homo sapiens
agaaaattttctgtgtttcctaggtttcaaaatgctggcacattttttcataatagtctgttatcatattagtctttattatatgcagtgataattcccattttcatttctagtattggttatttgcacattttctctttatttttactttgaccatcattgccagaggtttgtccatcttattacactttcaaaacaaagaatctggcactgtgaatgatctcaattgtatctttgttttctattttatgaatctctgctttcatacttattacttcwtttttcctgcatctttgagtttattccgcggctattttgcttacttcctgtaccggatgcctgactcattaatttttagtcattcttatttacccatataactatgtttgctttaaatatacccttaaggcactctttagttttatccccgcttttttggtgtgtagcacttatattattatgtgccttaaagtatattttatttcaattgctttacatataatatatgatatttggaagcatgtttttaaatttgtgagtgcgtatttaagagctatagttctt

SEQ ID NO: 160235 - DNA, 566 bp, Homo sapiens
cacattggtgtccctgaaagagatgggaagagtgtaagcaacttggaaaacatatttcaggataacaaccatgaaaacttccccaacttagcttgagaggacaacattgaaattcaggaaatttagagaaccccggcaagatactccacaagaatatcccaaagataaataatcatcagattctccaaggtcaaaatgaatgaaaaaatgttaaaggttaggtcacctacaaaggggtgcccatcagactaacagcagarccctacaagccagtaaaaattaagacccaatattcaaccttcttaaagaaaagaaattccaaccctgaatttcatatccagccaaactaagctttacaagtaaaggaaaagtaagattgttttcagagaaggaaatgctgaagggattcattgcttcattactaaagtaactgccttacaagagctcctgaaggaggcactagatatgaaaaggaaagaacattacgagccacttaagtatataaaccagtgacactataaagcaaccacataaacaaatatgaatagtatccagctaacaacatg

SEQ ID NO: 160236 - DNA, 518 bp, Homo sapiens
aacggaaaaagggcaaaacatattctaaaaactataaaatgtaattgaaagaaattgaggactatgtatataattagaaaagcttcctatgttcattgatcacaagacttaacattgttaagatggtattattcctcaaactgagctacagattcaataaaattctcatcagtatctcagctgacttctttataaaaattgacaagctgattctaaagctcatatgggatttcagggaaattagccaaaacaatctttacaaaggaaaaccaaatagaagtagttatatttcacgatttcaaactacttcaaatctgtagtaactaagttagggtgaaactgacaaaaagtcaatcacatagaacaatggaataaaactgaaagcaccccagaagaaaatctatgtatttatggtcaartgataatccataagagtacaaaattattcaatgaggaaagaatagccttttcaaaaaatggtgctggaacaactgtatagcaacatgcaagtggatgaa

SEQ ID NO: 160237 - DNA, 413 bp, Homo sapiens
agatctgcatcccagaacattcagactagagctcagcgcttgtgtgacgtctcttgactgtcccaggtgtgtgggtcacccaatctggaccctgcccagaacacagggccccctctagcaaaaatatttaggtaccagttccatccatgcccggcttatatcattgtcttatttccccgaaattggaatatacctcaatccaaattctgctcgtgctggcttctgggttcctctcagtgtcttccagcctgcagggcccaggttggtctggtctrtggcggcctagcacagtgctgtaaaacagacatctttctcctggtatctgctttgacagcaaaagctttttactccctgtgtgtttaattttaatttgctttgtagtatcaaggcattctgggcacctgtcaggtcag

SEQ ID NO: 160238 - DNA, 467 bp, Homo sapiens
caattctctttcagaaaacagaagtatgactactttacaacttacttagtgatgccattattgcactaatattataagatatattacaagaaaatgaaagaaacttcagatcaatattcctcataaacatacttgcaaaaatccataacaaaatattaacaaattaaacmcaacaatatataacaattataatacactatgaccaagtagatttttttctcagcaatgcaaagttgatttaacattatactaacgtctctacaggcagaaaaatcacttgacaaaaatttcacacttagcacaaagtattgggttgtcaattcagactcatattgatcagaaatctaatccagtatcaagcttaattaataacttgaagaatatgaacaatcaaagcaggagtaataccgaaacatggagtatagtttcacagatcctattttttcttttctgatatgtgatgtcag

SEQ ID NO: 160239 - DNA, 467 bp, Homo sapiens
caattctctttcagaaaacagaagtatgactactttacaacttacttagtgatgccattattgcactaatattataagatatattacaagaaaatgaaagaaacttcagatcaatattcctcataaacatacttgcaaaaatccataacaaaatattaacaaattaaacacaacaatatataacaattataatacactatgaccaagtagatttttttctcagcaatgcaaagttgatttaacattatactaacrtctctacaggcagaaaaatcacttgacaaaaatttcacacttagcacaaagtattgggttgtcaattcagactcatattgatcagaaatctaatccagtatcaagcttaattaataacttgaagaatatgaacaatcaaagcaggagtaataccgaaacatggagtatagtttcacagatcctattttttcttttctgatatgtgatgtcag

SEQ ID NO: 160240 - DNA, 614 bp, Homo sapiens
actcaggggctcatgtctgtagtcccagcacttttggatgctgaggaaggaggattaattgagcccaggagattgagaccagcctgggcaatactgtaagacctcatctctacagaaaatttaaaaattagccaagcatagtggcacagtgcctgtattcccagctactccagaggctgaggtgggaggattgcttgagcctaaaagttggtggctgcartgtgtcaagactgtgccactgcagtccagcctgagcaacggagcaagaccctgtctgaaagtaataataatagtaatgataataattttttctagttttccaggggagacagtcaagggagatcaccctgttgctgtgctggaagttgatgtcttggcaattatttcctggaggacccaagtgacacatccctccaccattgctttttttcatgtgggctttgacaaacattgaacacatatttgcatgcatgggaaaatatttccatagtagttgctgtcagttcacctgactatgtaagaatcttccttaagcagcagtctgcctttatagagaaacagcattaactgagtggctcattcttcacagctcttgacagccccagggctgagcc

SEQ ID NO: 160241 - DNA, 614 bp, Homo sapiens
actcaggggctcatgtctgtagtcccagcacttttggatgctgaggaaggaggattaattgagcccaggagattgagaccagcctgggcaatactgtaagacctcatctctacagaaaatttaaaaattagccaagcatagtggcacagtgcctgtattcccagctactccagaggctgaggtgggaggattgcttgagcctaaaagttggtggctgcaatgtgtcaagactgtgccactgcagtccagcctgagcaacggagcaagaccctgtctgaaagtaataataatagtaatgataataattttttctagttttccaggggagacagtcaagggagatcaccctgttgctgtgctggaagttgatgtcttggcaattatttcctggaggacccaagtgacacatccctccaccattgctttttttcatgtgggctttgacaaacattgaacacatatttgcatgcawgggaaaatatttccatagtagttgctgtcagttcacctgactatgtaagaatcttccttaagcagcagtctgcctttatagagaaacagcattaactgagtggctcattcttcacagctcttgacagccccagggctgagcc

SEQ ID NO: 160242 - DNA, 621 bp, Homo sapiens
aattttttctagttttccaggggagacagtcaagggagatcaccctgttgctgtgctggaagttgatgtcttggcaattatttcctggaggacccaagtgacacatccctccaccattgctttttttcatgtgggctttgacaaacattgaacacatatttgcatgcatgggaaaatatttccatagtagttgctgtcagttcacctgactatgtaagaatcttccttaagcagcagtctgcctttatagagaaacagcattaactgagtggctcattcttcacagctcttgacagccccagggctgagccactctattttaatactgctctgtagataatgatcttcattttggcagaacctcaaaatgaccttgatgtttacaatagcagggcaaagcagtgaactggctgacwgcattaaaacagacaattaacagcaagagagaagggaactccctgttcttctaatgtacacatattttctagtaaaagtaaaactccataatctcttgcttaaataaattgtatactattttcaacttttcatctcaattttgtaaaactggagagagtattgtcaggttgttttaaacatgtaaatcatactcttctttctgaa

SEQ ID NO: 160243 - DNA, 492 bp, Homo sapiens
tcctgtgtctctcctgatttggccatgtaagacatgcttgcttctcctttgccctccatmaggattgtaagtttcctgaagcctcctcagaagctgctgtcttttctgtacagccttcagaactgtaagccaattaaacctgctttatttagaaattactcagactcaggtatttttatattagtatgataactgactaatacagaacattaatactaaggagtgaggcattgctctaaagatatctgaaaatgtgaaagcagccttggaactgggtaacgggcagaagttggaacagtttggagggctcagaagaaggacagaaagatgaggaaaagtttgcagctccctagagattggttgagtggttgtgacacaaatgctgaaagagaaggccaagctgagggaggtcacagatggaaataatgaacttattgggaactggagtaaaggtcacttttttatgtgttagcaaaaaggttggaggcattg

SEQ ID NO: 160244 - DNA, 434 bp, Homo sapiens
gattgtaagtttcctgaagcctcctcagaagctgctgtcttttctgtacagccttcagaactgtaagccaattaaacctgctttatttagaaattactcagactcaggtatttttatattagtatgataactgactaatacagaacattaatactaaggagtgaggcattgytctaaagatatctgaaaatgtgaaagcagccttggaactgggtaacgggcagaagttggaacagtttggagggctcagaagaaggacagaaagatgaggaaaagtttgcagctccctagagattggttgagtggttgtgacacaaatgctgaaagagaaggccaagctgagggaggtcacagatggaaataatgaacttattgggaactggagtaaaggtcacttttttatgtgttagcaaaaaggttggaggcattgcacc

SEQ ID NO: 160245 - DNA, 492 bp, Homo sapiens
tcctgtgtctctcctgatttggccatgtaagacatgcttgcttctcctttgccctccataaggattgtaagtttcctgaagcctcctcagaagctgctgtcttttctgtacagccttcagaactgtaagccaattaaacctgctttatttagaaattactcagactcaggtatttttatattagtatgataactgactaatacagaacattaatactaaggagtgaggcattgctctaaagatatctgaaaatgtgaaagcagccttggaactgggtaaygggcagaagttggaacagtttggagggctcagaagaaggacagaaagatgaggaaaagtttgcagctccctagagattggttgagtggttgtgacacaaatgctgaaagagaaggccaagctgagggaggtcacagatggaaataatgaacttattgggaactggagtaaaggtcacttttttatgtgttagcaaaaaggttggaggcattg

SEQ ID NO: 160246 - DNA, 517 bp, Homo sapiens
aaagtatggaatttcctcctgtgtctctcctgatttggccatgtaagacatgcttgcttctcctttgccctccataaggattgtaagtttcctgaagcctcctcagaagctgctgtcttttctgtacagccttcagaactgtaagccaattaaacctgctttatttagaaattactcagactcaggtatttttatattagtatgataactgactaatacagaacattaatactaaggagtgaggcattgctctaaagatatctgaaaatgtgaaagcagccttggaactgggtaacgggcagaagttggaacagtttggagggctcagaagaaggacagaaagatgaggaaaagtttgcagctccctagagattggttgagtggttgtgacacaaatgctgaaagagaagrccaagctgagggaggtcacagatggaaataatgaacttattgggaactggagtaaaggtcacttttttatgtgttagcaaaaaggttggaggcattgcacccctgt

SEQ ID NO: 160247 - DNA, 615 bp, Homo sapiens
actattggaatgatagcttggcactttatgtaatcaaaatattctaggttaaaatagatttgaggattaaaaattaaaaaagcgaagttccccacctgtctcctattgtgttccgacatgattaacaaaccagcatttcttttcataacatcacatgaaaactatttgacttagaaaagtttttaagagatcttctattcaataatgcctgatggtttggtgatataaattaaatattctacagttatattttgatcttttttagtagtaaaaatatagaagaaaatcaagaatagcattgcagtgttagaagagggttaatgtttgctaaatcagtactattttttttrgagataatatagtgctgtctatatttggctaaaaattaaaatatcaaaactataaaataggacatcaccatcaccttaaacaactgttagtaaatttcaagtgaaaatagtaaatatttatgataaaaattacaaagaaagttagaggtaagaaggtctagtagtaaatgtttaaccaggtgcacttcaggaagctgtatggaattaattggatgggtctattgtatttataacataaaaaatagacacttttgagaacagaagg

SEQ ID NO: 160248 - DNA, 367 bp, Homo sapiens
aacagcatcttcatgttacagagcaggaaatattgtttggagatattacattttttttctaaattcacaaagtaagtagtaagcctggaagtccaattttagggtctctgacttcaggtcttcagatcccttgcttttagcattgcactatgatctccttttcctacatgactccattaatctcacaattctccatgagtaaaatttctaacrcactctttcagtttttttttttgtggtattacagcaaaatacctgagactgggtaatttataatgaacagaaatctattggctcacaattctggagcctagaaagtccaagatcagttgccagcatctggcaaagggtaagagatggcaagaag

SEQ ID NO: 160249 - DNA, 569 bp, Homo sapiens
caagggttaggttgaaaactacacgataagtggtaggacttaggtgcaatggaaataattgagaatgttgatggtggcagaaaaggctagattactggtatctcctcctaaccttgtcttccctgattcctggcagggtcaccaaatttagtttttatatcatcacggcctggcatagtaccttgcagacaatacagactcagtaactgttgaattcagtggaaaccaacctaccccaagtattttcatcaatttgtactccagttaaaaaaagcattcagtgcctccccattaccagctacatcaggacacatcctgctgcctggcttttgaagtcattcaccatctggtcctccctggttatccaatctcattgcctgctgtacttcaacccagtgatttctgcctttatctggagcatctccgcaaaggccaccaacttggcccagtgctcatgccttctcatgatctcccttgctgtcttcaaccaaagggaaggggctcagttaaagttcaacttctaagaagcttttcmccactccatcaagcctcaccaactgcctacatta

SEQ ID NO: 160250 - DNA, 571 bp, Homo sapiens
caagggttaggttgaaaactacacgataagtggtaggacttaggtgcaatggaaataattgagaatgttgatggtggcagaaaaggctagattactggtatctcctcctaaccttgtcttccctgattcctggcagggtcaccaaatttagtttttatatcatcacggcctggcatagtaccttgcagacaatacagactcagtaactgttgaattcagtggaaaccaacctaccccaagtattttcatcaatttgtactccagttaaaaaaagcattcagtgcctccccattaccagctacatcaggacacatcctgctgcctggcttttgaagtcattcaccatctggtcctccctggttatccaatctcattgcctgctgtacttcaacccagtgatttctgcctttatctggagcatctccgcaaaggccaccaacttggcccagtgctcatgccttctcatgatctcccttgctgtcttcaaccaaagggaaggggctcagttaaagttcaacttctaagaagcttttccccacyccatcaagcctcaccaactgcctacattagt

SEQ ID NO: 160251 - DNA, 468 bp, Homo sapiens
atccagcttcaaaaattagcatctcatggccagtgttttctcatctatactttcactcatttcccttcctttcatgttactaaaaaactttctatatctcwtgttaattccttagtaactattttaatatttacttcttaaaaattatcaaaacactatattaagactttaattataatttctaatattattaaatatctagtcaattatcacatttcaaattgtctcataaatgtcatattttttggttgtttgcctaagtattcaagtaaaactcgtatgtttggtttgttatgttgtttgtatctctttgtctatggacttccaccctatctcttttttttccttgcaatgtatttgttgaaataactaagacatgtgattaacaatgtttcctacagtttaaattgtactgattgtgtctctgaattgattggtgatatgattaatatgttctaacatatgatc

SEQ ID NO: 160252 - DNA, 563 bp, Homo sapiens
tttctactgctcctcctctctctttccatgtatgtgacatgcagaggtgtagaagaaggttcttttgggccttcctccatgagttttagttttttgcccaagatcgcaatcaataccataaaggaaactcttttaaggacccaagcttgggggactttttccttctcagccacaaatctaacccagtgcmtaatctgtggggttcttcccttgccagtgcttttaactctgagaggggcatgtgtcttcttccttcaacatagatcaaataccccattttcattatcctttcattgttacactataatatgcatatttgaaatacactgaatgtgttaattaagaatgtttctggttttctgatgactcctaatttcacacaataaaataataaggtacaatgaggaagggcaaaactaagacacaactaaggcacaaattgcaggattggattttgcaacttgcaaatttggcagatttccaggtaatggaggctaattgtaaagccaggcattgaactccttactaaaaacatttaaatgcatgcattttgtatttaacat

SEQ ID NO: 160253 - DNA, 563 bp, Homo sapiens
tttctactgctcctcctctctctttccatgtatgtgacatgcagaggtgtagaagaaggttcttttgggccttcctccatgagttttagttttttgcccaagatcgcaatcaataccataaaggaaactcttttaaggacccaagcttgggggactttttccttctcagccacaaatctaacccagtgcctaatctgtgggsttcttcccttgccagtgcttttaactctgagaggggcatgtgtcttcttccttcaacatagatcaaataccccattttcattatcctttcattgttacactataatatgcatatttgaaatacactgaatgtgttaattaagaatgtttctggttttctgatgactcctaatttcacacaataaaataataaggtacaatgaggaagggcaaaactaagacacaactaaggcacaaattgcaggattggattttgcaacttgcaaatttggcagatttccaggtaatggaggctaattgtaaagccaggcattgaactccttactaaaaacatttaaatgcatgcattttgtatttaacat

SEQ ID NO: 160254 - DNA, 662 bp, Homo sapiens
gctattgccaaaaaaggaaggaggtagagataccctgttaaaataatccttcaaggtaagtgtgttgtgttgttgagatagagagagagagagagagagagagatactgggaaactgtgtgaatgtgtgttttccattagctgattcataagtgaagtgattgtgtttcagtatcttaaaattatatttcaatatcttaaaacaccacaattatctaaaattttctccagtcatcctctattttatagaagagagaaaatataattcttttgctgcaacctctgcctcctgggttcaagttattctcatggtctgcctcccgagtagctgggactacaggcacataccaccatgcccagctaatttttgtatttttagtagagatggggtttyaccatgttagccagactcgtcttgaactcctaacctcaagtgatttgcctgcctcagcctcccaaagtgtgggattacaggcattgagccaccgcacctggtctgtaattcatttttagtgtgtgatttatattcgttctttcaatgtattttcacaacagacagtaagtattgttagtcacattttaaaaactaggagattgagcttcatggatttcaagtttatacaactagtaaatgacaaaccagatataaaattcatatcatat

SEQ ID NO: 160255 - DNA, 569 bp, Homo sapiens
gactgtagcaggaaatatacaagacaagcatgaagcattttgtagagcctaagagtaagaagggaatggtcaaacacacacacacgcatgcatacacacacacacacactacacaatgtgagtgatggcgataagcacatgggacacaggagckcactgaaagagctggtcagagctggaacaatcagagcaacaatgttaataaggcagaattaaactataactcaaaccacggaaacaaatatccacgagtctatgcggaaataaatcaattattgaataaatggaagagaagaagtaaatctgagcagaagaatttcaaataaatttcaattttagatacttcatcctcaagaaagagagcataactctccacttcttgagtctggtttgcacataaggacttccttccaaagtgtgcagtgtggataaagggaagaagagagtgacttagtgaagaaactggaaaaacactacctcagcctagtgatcaagagaagtcaacatgcactgtgagaagtcatgttgataggatgtcgacttgatatgaagcgatgaaattggcagtt

SEQ ID NO: 160256 - DNA, 643 bp, Homo sapiens
tgttattttaacatttaaatgtgtaattgatgaaagtgtgtcttgataattttgcattaatttagcattctcataattacaggcattattgtgcctgttaccctgagaacacttatgcccagatagagctcttctcttagttcagttaatcagcattaacaaaggtgaattaggcatcactgtctgaaagtgaattaagcattattcgttgactggattttagacattctaacaagttgaatatagtttaaatccttggtgaggactgaagagcttacaatgctatatagaattatgatctctacatcacttctttttaaacaatatatratgtagaggactgaacagcaatatagttacttcaaatttcagtctaaaattactttttactaaacttttaatatatcattttcatataatatggttttcttcttaatgttaagaaaaatcttgattaattgaaaccttggctatgggtttctgctaaccaaagttttactgcatcttctttccaaattcacctttgatgttaattagaaatttaatttttaattcacatacctttgtgactgtagctatcctctttagatattgatgtactttcaatttttaagacatatcattaaaagatcataagctgaaa

SEQ ID NO: 160257 - DNA, 551 bp, Homo sapiens
aaggcaagtgtactgaaatgctagactggtctcatctaagccacaaaatgrtccagactctaagtttggaaatcaagccatgacattttagttctgagtggtcactgacttgttctttcctttgaaattgtattcaccttctccgagagtgttatatataagcaattggtataaaaaatatatctacctatttggtagggttgctatgagtgtttaaaaaatcttatcagtttttgaagttacatgtatgtttttctttgttaattatttaactgatctctattaaagaaagactttgccataaaccatcctagtcaattcatggtagaattgttactcatcaaagaactaggttgatcatcattctaactggtgggagatggtatctcattgtagttttgatttgcatttctctaatcaccagtgatgatgagctttttttcatatgtttgttggccacataaatgtcttcttttgagaagtatctattcatatctttcagccactttttgatggttttttttcttgttaatttatttaagttccttgta

SEQ ID NO: 160258 - DNA, 551 bp, Homo sapiens
aaggcaagtgtactgaaatgctagactggtctcatctaagccacaaaatggtccagactctaagtttggaaatcaagccatgacattttagttctgagtggtcactgacttgttctttcctttgaaattgtattcaccttctccgagagtgttatatataagcaattggtataaaaaatatatctacctatttggtagggttgctatgagtktttaaaaaatcttatcagtttttgaagttacatgtatgtttttctttgttaattatttaactgatctctattaaagaaagactttgccataaaccatcctagtcaattcatggtagaattgttactcatcaaagaactaggttgatcatcattctaactggtgggagatggtatctcattgtagttttgatttgcatttctctaatcaccagtgatgatgagctttttttcatatgtttgttggccacataaatgtcttcttttgagaagtatctattcatatctttcagccactttttgatggttttttttcttgttaatttatttaagttccttgta

SEQ ID NO: 160259 - DNA, 543 bp, Homo sapiens
ccaggtacactggccccagtcttttagggctgtmcctgaatgggattgtactatggtggtggtcccttttaggccaacaccttcatatcaagtcaataaatcagtaggctgagtttgggcttaatactcctccttcagctagttgtagagaacctctcataaagttatacatgtgagcttaaagaggagagtcaatgaaacactggtagattacatgaggatctgtgctactggtttggggagatgacttatgccctctaaccccagaggtaccatttctatctaacaatggaaggtccctggatgtgcctgattttgttgcttggtggatttaacagttctcaggttataaaagacagctctggccacatgatacttcatggtcagatagtttctaccagagcccagttgtatgccaggagctgtgttttgagtagagttctctgccatagatttcatggctttattccataattctagggatttgagctccaatgttggagccagagattccacacagtatctttttgtgatgtgcttagt

SEQ ID NO: 160260 - DNA, 516 bp, Homo sapiens
ttcagttctttataaaagaaaasaaataatcattttctaatattgaattgacattaaaaaagttccatgacaccaaaaatgattatttcatgggatattcataacatttaatcagagaaagccatttaaatgtacagctcaatatgaagttcatgttctacatttagaaaataaaaagtacacaattctgttaataaatgaaaacagaaggtagaagacagtgactagcttgctttgataaattttctcaactggggactacatttcaagctgtgattatactcaccatttcagtatgaaatggctcataccgaagtaattggagttgtgttgataccacttttacattttatttttttgtagaatagatcagtgtgataattttgtgtatgttaatatgaaaaatttatagggagagaaagactgttacgagttaaatctaatccagtgaagagcacaaggtgaaattatacaattaatctaataataaattattttacaaaagaatcatatatg

SEQ ID NO: 160261 - DNA, 510 bp, Homo sapiens
ttttaccactctactgctgagagctctctgatggctttctagggactgcagaatgaaagccatgtgcctcagttggcctccaagggcccttcccactccacacctctggtaactcctgtaacccttatttccaccacctcccctacccttcatagtactcctgactctggccagatcattccatgccctataacatctctaagacttgcttatgtccaaaggtgacctcctactcatatgttaaagcccagctcaaatgtcacagactccccttgggtctcccacttctcttgggccccaagagrttgggcaatgagtggtacattgcatttgggaagatggtatgggggattgttggcagggtaactcggttcctgaggatgggggtcctcagaatggtgggtggtcaccaatgtctagcacaatgctaggcacaggatagacacttagcagtagcttgtagaagggagggaataagaaggaaagacaattaccttgtcatttccagga

SEQ ID NO: 160262 - DNA, 567 bp, Homo sapiens
tggcatttatatgacagaaacagcaaatcattgcaaataygcttaatatttggaggacccagtgtagggtaggaaaagagttaacaaacaactgactcatcttataaagtcattcccttgatgtatcactatttgtaccttatgagaaacttctgcagaactatttagcatagaaattagctgatacttagataaatccatgccttttttatgccagtcattttctatcagtattacatctgaaataggttgtattagtccattctcaagctgctatgaagaaattcccaagactgcgtaatttataaagaaaaaagtttcagttgactcctagttccacatggcttgggaggtctcagaaaacttacaatcatggcagaaggcacctcttcacagggtggcaggagagaaaatgagtgtcgagtgaagggggaagccctttataaaaccatcagatcttgtgagagaactcactcactatcaggagaacaacataggggagaccacctccatgattcaattatctccacctggccctgtccttgacatgggaattattacaattca

SEQ ID NO: 160263 - DNA, 588 bp, Homo sapiens
catgatgcttcctgtagaagttgggataatggcttgttaggcagcacaaaatgatcataggcttcagttagttttcaaaatgaataaaagtgtcctgagtgccactttcatcaagcaagataaactacagtatatttactgccttgattctgtttcatagaataagttattattacatgtgtaaagatgaaaaacaccaccaaagatagagcaatattaattgaacttgtgtatgatttgagagttgctctgaggtgtgggagttatgtgtttctttagaaagagtgcttgatcttcctacagattcctgttgtggatacatatctataaagcactaccattgttcctaacctaaaatcatcttataaattctgtagtttttgcacttgtgaaataccacagaatatcctcggacactgggttacaaaatctactggacttgacaaaatgtatgaattacatttacagaaatgatagctgttgctgcaatctrctttagtagtatatgatgaatttgtatcaaccataaaccagtaagtttttttttttaaaaaagccatctgctattgtatttttaattgtgatact

SEQ ID NO: 160264 - DNA, 613 bp, Homo sapiens
ggcatagctggtcctgggatggtctcacccaaatggtgagcctggccctgagagggacagcagagcatctgtgcttttaggwgaaaagaaagtagttgaacgggtcataaccagtttatttttcccaaattgactcatcagataaatcaatcctcctctaatctccagggatgaaacaaaagaaagggtaaaaagaggtgagagttgtaatagagaattccttcattctaaacagcctcttttttttcacattttaatgtctctgagatctaatagtgcctctaataatcaatgatgttttaagattgctgctggacaagcatcaggaatgatagttgtcaatgctttgtcatggttaacttggttgttattttgaacagaataactgcatgattacaactcttcaagtaccatttaaaaagagaatataaatcctgtttgtgtctgaaatgttgtgttgacaccacctggagaaattaaggaaatgccagcactaacatttgcacaatcaatgtaagtggtacggaagaaatcccagggatatggaccactctgaagaaaagtggcattggtaatgtctttgacggctgcaagagaaatatggctgaaaaca

SEQ ID NO: 160265 - DNA, 597 bp, Homo sapiens
agactctgtatctaattaacaaaccaaccgtgataaaaataagtcaaaggaggaaacttctggcctaaaactatgatcctgcctgcaaaagaatggagaaggtgtaacaatagacctctgaccatgacgatatttgcaaatcatgttgtatttctaagaggaactcaaataagcagtcttcatatcctctacagcagagtaaaatccataatcctagaactttctctaacccagcttccccacagaagcacctttgaatcacctagggaacttttaaaccctatcaatgcctaggttctagcactcaaatataatattctgtttagttagtctagcayggaacagagaacagtttacaatacgttcataagtatacctcttcaggtgatcatactatgcagctagggttgaaagacttgaatttctagtctgttaattctgagcaatctggagtcatttaaaaatatatgcattgtattaatcttcatgatattcacttagtatatcctttattttcctcagcattaccttaaatcttgaaagatcactgtgaatctagtgggaagcagtaggtaatggacaaaaagtgcagaggaa

SEQ ID NO: 160266 - DNA, 607 bp, Homo sapiens
aagtcacactccttacccatactcccctgttttataagatgtagtgtctgatttaagcatttgattttatcttgtattttattcactgtggtaaaataatgtattggtgtaacaatttgaaaaatcttgtatttgytcctgtccaggaaggtagccaagggctttgtattatcttctctcagagaatccagcagggagaatagaaacaactgaagttatcagttcttcctgtctttggtactggccaatctttagaagagttgtcacagatgttggaggggagaagcaattgagaaaaaaaaaattaaaagagactgagaaggagagaaaacaatactgtagatctttctaatagagaccctgggtattagcagacagcaccctgagtaatagaagactttagagaggaataggcaccttatgctccaagatagaagatattctttatttgttttatatctatggttttcaggttggaaatggaaatctgtaacttataaaagaaatgctcaaaattcgtaaaattaaaaaagatggaatactattttacttctagtctaaaagtcaaaaaaactgtaaataccatctagcacataatgtttaatga

SEQ ID NO: 160267 - DNA, 383 bp, Homo sapiens
ttggaaaactctttaaatatcaggaagctgtcaatctcatagtggtaaacacagtttttaaaattttaatattttgcttaaagtttttatttttaacgtgggcagctgtttttcttcaaccgcttttttttttttttgaagcaaaaggaatttctttcagttttgagaaaatatctgccaaatagttatggtttgtttctcagtcattctttcaagtaagtgaatttttatgaagaaaagcaaatgttagttttcaactcaaataatrggacaaatgctttttcttgagataatcagtacactttagtatgcagcagaagtgttttatgcatacttcacattgtttcacacagactaagatgtgtaatcaagatcaaaattca

SEQ ID NO: 160268 - DNA, 602 bp, Homo sapiens
tcattcattgcatctattttggaagtcaagctaaggagccttcaaaggaaagtctgttgacttgttcttcatcaaagttccatctgggtaaaatgtccagtgagctgaggcctaagtgggtgaagaattacagcaatagagaagttacttacttttcccttagaactttaaaaatctcaaagataggagtcaaagttctcagcaccctgagcaggtgtcaggctttctctataaggggctcaatgacaagtattttcagttttgtgggccaggtcaggcttctgagctactcagctctgtcactgtaacataaaagtggctacagacaatatatgaccaaagggtagcagccaggatccaacagaactttatttacacaagcaggcagcaggctggattaggcccagggccacaragtgagggcgtggtgtggatccatattactgctagaattaaaaatgaaacaaaacaaaaaacttgcaggaatgagggcacatgtgtttggcatgtcttgtattttgctgttttttttaccaataaattgtggtttgtgtcgctcaatgtcactggctgaaaatacctaatacatcgcatgcttaaat

SEQ ID NO: 160269 - DNA, 605 bp, Homo sapiens
aatcactgttgataggatacaaatgagaacaatcgcttgaaagtgaatatggtagcatctgacgaaggtaacccagtgattcaccgtctaggtktatacccccaggaaaactcttatgcatatatacaaggtaacatgcataaaatagtgtcctgcagaattgcttttaatcacaaaaatccgaaacaagctaaatggccattgataggcaaatgagtagttgtgacatattgagagaatagttttataactcttaaatgaatttttaaatgaatgaatccaaacactcgatttctctttctgtatcaataaaactaaagtggatacatctcaataatctaatggtgaatccaagaaatctatttgcacaatgattcctggagcatgatattattaatataaagtttgaaaatatgaaaaacagagcttcaaattatttgtggtccaatatatatacaggaacaagataaaaacatgtgcagaatgatagctgcccaattcaggatagtgattgactccgaggcagggagggttaaggacacttagaggtaaatacgagccttcaatttcatcactgatgtttaaagattttttaaaatgtaaaa

SEQ ID NO: 160270 - DNA, 424 bp, Homo sapiens
ccactcgcaggtgtcaggctgtactgtgcgcgcccctgctcccttcccttcatacttcacggtttctccaggtgcatttcctgctcatctaatcctgtttgcttcttagaggrccggagcagacacacaggcatcttgggaggatgagctacaattgggtgtgcagcgggcatggctgaggcgctcagtgcccgtccggttcctgtgccgcccccaccctctctctgctcattttttccccacttctgttcctgcccagtcctctgctatttgcctgaaaatctctgccgaagacggctcatttgacttcaacgggtggttaaagggcgagtctgcggcacctggaggagggagggttgatacaagtcgtaccagctggcctgtttctgaagggcagacatcgcagcgtctgagaatatgtatc

SEQ ID NO: 160271 - DNA, 424 bp, Homo sapiens
ccactcgcaggtgtcaggctgtactgtgcgcgcccctgctcccttcccttcatacttcacggtttctccaggtgcatttcctgctcatctaatcctgtttgcttcttagagggccggagcagacacacaggcatcttgggaggatgagctacaattgggtgtgcagcgggcatggctgaggcgctcagtgcccgtccggttcctgtgccgcccccaccctctctctgctcattttttccccacttctgttcctgcccagtcctctgctatttgcctgaaaatctctgcygaagacggctcatttgacttcaacgggtggttaaagggcgagtctgcggcacctggaggagggagggttgatacaagtcgtaccagctggcctgtttctgaagggcagacatcgcagcgtctgagaatatgtatc

SEQ ID NO: 160272 - DNA, 522 bp, Homo sapiens
gcactctgctccaagaggctgcccacctgccaagacagggcaggagtgagtcagatggggaaatctgggcwtcttgtgcctgcccataccaccccttcccaggtgccacagggccccttccactggctcagcccatcctcctgcagcccgaacccaaccctctcaccagctcgagcggccccaacagggtctgcgactccagcgcctccgccagcagcttgtgctgcgtttcactcagcactgggagagagtcaggtaaaagggggtttctgaacgcccaccgggaaagcccacctccctccctcccacccgccacctgcccccagcggccgctcactggtcagtgcccccagcaggtagacaacagggatagcgagttccggcaccagcattccggagacaacaccaggcactccaggacagcacctgctggaccgtccaggggctccaccggcccaaggctctggccctgctccagctgtgggcacgggaagggcaggtgagtctggctggctggggcag

SEQ ID NO: 160273 - DNA, 594 bp, Homo sapiens
ttttgcttttactctcacaaagggaagacttaaggattgggaaagtgtgtatggataagaggccaggtgggctgcckcccacttggggacacttcttgagctcccatcacacctgctctggggcgtcaacacgtctggacgtggctttctgtgcccccgggggcagggcctgtggtgggggaatgctgataactgggaggctggctgctgccgcccttgcctgtgttcctggccctcctgcaccggggtagctatccagggacttatttggaaagtcctgtggttgtgtcagttcactgcagtaggactctagcccattgatgtttcctcttctgcagggaagactatgaatctggcagagcaatggcctctgctcctagtattcttttttcctgttgtcaggcatggggtcctcgagagtgtcagttctgttacgctcagtggagtgactcctttccatctgtaggcaagccagagggcctgtgcggccacttgtcccctctgattcaaacagtgcagaggggatcgttgcgattctcttcagactgagtgacacgtctcagcaaatgactgtggactcagtagaccagcaaa

SEQ ID NO: 160274 - DNA, 598 bp, Homo sapiens
aatttttccagcaccatttgtttaaaggactattttttctccactgaattgctttaacacatttgtcaaaaaccagttgtccatataaagacaaaaagaacatacaattagacatctgggctctgtgaggttcaaasatgttaagacagcacttgaaattttaggtcttaaatatatgcaaacattcatgggcaggtttttatgtggacataagtatttaactcatttaggtaaatacctaagggtgttattgctatatcatagagtaagcctatgtttaactttgtaagaaactgcacactgtcttcaaaattgtctgcatcattttacatttccaccagcaatgattgagagttcctgttgcttcacatccttgtcaacatttggggttgtcactatttttaattgtagtaaattttaatggtctgtagtgggagatcatagttgttttaacttgtcattctctgatgacatatgatgttgaactttttaaaataattttctcctatgttatactctagaagttgtgctgttttgctttttacatttaaatttatggtccattttgatttaattttggggaaagacgtaaggtctg

SEQ ID NO: 160275 - DNA, 597 bp, Homo sapiens
ggagactcacgcttcttctgagatacctccaggggtcctctccactggcagggactacaccgtttgaaagtctgagccatgccctacacatgagggagaagttcattttgtggagtggagaacttggctcagggagtggtacagaaaagtggattccaaaaggaataaaaggaarccctttctggagattattccccttccattttttcatccctcctactttttacattcgaaatggaaggggaggctgagaaagctatttgccagctccttcagactgactctgcaaggcaggcattaggacaactgtcagaagagcaatgaatctggattccacctccataggggtatttgaggaatcccttgggcatgaggggacggggctgccaatgcatttggcactcttcattagttcctttattccatcagttttcagtatgcctccactctcagcagtcactgtgaggtgctggagaccaatgggtgaggaaacctgcggtaaagagtatcaggactaaggacagcaaggaggggagctgaagatcacataagggattcctgaaaaaactcaagggaaaacagtcatgctgtggtgat

SEQ ID NO: 160276 - DNA, 263 bp, Homo sapiens
aacacagttaaccaggtgctggcctttgatgaggtgcaaaggctaaattttctacattcttcattgtgtactcccccaaaggccacagactctacatttttattacatgtcattagggcatctgtagtcaaggacaaaamccctgattaagatgcctttggcaactcatcaagagtggcttttagggacttagcaaattgactatgaagagggattaggacaggggaaaaccagcttttgttaaccctgtgcaccataccaca

SEQ ID NO: 160277 - DNA, 591 bp, Homo sapiens
ccattgttttttgttttctttttttcagtattttcataatgcagttggttgaatccattgatgcaaaaccaaggggtacaaaggcctgactgtattgtgtatgatactgtaatagcagatacatgacactatacaattgtcaaaaatcataaaaccttacagcatgaagactgaactaaatgtatgcgacttaaaagaaaacagaaacaacaaaaaataggaatttaggggctcccaggatgaaatgcacactgaaacagaagaatttgataatgttacaagtgtgtgaagcagtctcgctgaaggagagaccagcagttctagcctaatattactttgcatctctgtgaatctttaagactaaaggcaaaaggaactgccgataaagccctgttctctagttgataaagttgtttcctacaagcgtaggggttaacaattytaaagccatgacacatgtgtactggaattaaacaattaagacaatagatggcaggttgtgggaggcaggtttctcactgttggagtgggagctagtattgaaagaaattagtaaaacccatgtggcaatggattagagagagttgaagg

SEQ ID NO: 160278 - DNA, 602 bp, Homo sapiens
gctacaaataatgaatagatatcagatgaaaactatgtaggcaartagataatttataaggagttatttttaagtatgagagttccatttggataatgcaaaaataaacgtttgatttataagtaagtacatttctagatgaaggaatgtaataatattttcatgctaatttttgtttgacataataaaggttttagaaaagacacaattaaaagttgtactttttaaagaaatgatataaaatgaagaacattaagatgactaacgaattatcaatacttggctgcgtttactccttagaagtctaccagactaaaaaaatggttcctaaatcactcttttaaaaaagcgtgtaggcaaatttagtcttcctgaaagagtttgatgtagtagaagatagaacagatacaatatagtcgtggatagaaattttctaaaatgctttactgtttgtttttaatatagttcaactatttagcccaataaatctattaagattatataaagttaagttaactctattttctcctctataaaacagagattaaggaaaactcttaaatacatcatataacaatataaatatcataggattgttttct

SEQ ID NO: 160279 - DNA, 534 bp, Homo sapiens
aaaacaacctaagtagcatcttcactggatgcaggtattccttratatactcaagtgatccatctacctgcctttttttagaacctgtgtcccaaaaacaatgtcaaaagtgttttcaatttcaaaagcaatgagaaaggggtaggtcatttcagtcacctaaaggaaacattacaatccagatgatactactactctgtacttatattcactagaagatcatttttctgggatgtaataacataaaaatccaaatgctgatttttaaaggctttttaaaatagaaattaaggtatcataaaaattgaagaatgactttctactctgtgagccatgtggtgacagtgttgcaacatcctatctctgcagactgtcacacatggcatataattctgggtaatgacctactacaattacacacatcccagaacggtaaaggcagagaaaggaggagttacagaggctagaataatggtgggggagttgagaagtaccctgcattagatgacaagaatatagaaagactttgacttt

SEQ ID NO: 160280 - DNA, 532 bp, Homo sapiens
ctggatgcaggtattccttgatatactcaagtgatccatctacctgcctttttttagaacctgtgtcccaaaaacaatgtcaaaagtgttttcaatttcaaaagcaatgagaaaggggtaggtcatttcagtcacctaaaggaaacattacaatccakatgatactactactctgtacttatattcactagaagatcatttttctgggatgtaataacataaaaatccaaatgctgatttttaaaggctttttaaaatagaaattaaggtatcataaaaattgaagaatgactttctactctgtgagccatgtggtgacagtgttgcaacatcctatctctgcagactgtcacacatggcatataattctgggtaatgacctactacaattacacacatcccagaacggtaaaggcagagaaaggaggagttacagaggctagaataatggtgggggagttgagaagtaccctgcattagatgacaagaatatagaaagactttgacttttccttgtaatataaatcaacta

SEQ ID NO: 160281 - DNA, 324 bp, Homo sapiens
atttaccttctcaattcccaaataaatcttttttttttctatttggaacctgctttgcactactaccttcttattctatttccaattaactaccctttatacctatccctccatcataactccctaccacttcctatcacaacatyctaaaataataaatatttaataaatgattggcaaaatacctactttctaaaatgataaataaaatactgttcctgcctttgtagggctctcagtctagctagtaaaactgtgctattaatgaaggattataatagaatataataattgttatcacaggagtctatgaaaagatctaac

SEQ ID NO: 160282 - DNA, 535 bp, Homo sapiens
tgttcctttgacttgaattgttgcatcatactaatgaaaatwagtcaaaactgctagaataaccactcaaaagaacacaggttaaggatggctctctaaatcacagcaggaataatgaaaaggtggttgaaagttaggaaggacttctccatcttaaaaataaaatataagagttgccaactctttgaaagagctagaagacttagtgggatagaaaaaaatcttttccattaatttaattgaagttgatttgtgttcatcagtagtttatttagactgattctcagcaaacataatgttaaagttaccttgcaaattacaaaactcttggcacaaataaaacagtgcacaatatctcccaagagaagcccagccttggtaaagttcagttggaaaatctaaaccagactgccttccctgcactagactttggtttctgttggtattctgtcactctgccatgcacctaaaataaaacagcatgagtttttgtgtaacaacaacaacaaaaaagacaacttgagactcgccgata

SEQ ID NO: 160283 - DNA, 535 bp, Homo sapiens
tgttcctttgacttgaattgttgcatcatactaatgaaaattagtcaaaactgctagaataaccactcaaaagaacacaggttaaggatggctctctaaatcacagcaggaataatgaaaaggtggttgaaagttaggaaggacttctccatcttaaaaataaaatataagagttrccaactctttgaaagagctagaagacttagtgggatagaaaaaaatcttttccattaatttaattgaagttgatttgtgttcatcagtagtttatttagactgattctcagcaaacataatgttaaagttaccttgcaaattacaaaactcttggcacaaataaaacagtgcacaatatctcccaagagaagcccagccttggtaaagttcagttggaaaatctaaaccagactgccttccctgcactagactttggtttctgttggtattctgtcactctgccatgcacctaaaataaaacagcatgagtttttgtgtaacaacaacaacaaaaaagacaacttgagactcgccgata

SEQ ID NO: 160284 - DNA, 535 bp, Homo sapiens
tgttcctttgacttgaattgttgcatcatactaatgaaaattagtcaaaactgctagaataaccactcaaaagaacacaggttaaggatggctctctaaatcacagcaggaataatgaaaaggtggttgaaagttaggaaggacttctccatcttaaaaataaaatataagagttgccaactctttgaaagagctagaagacttagtgggatagaaaaaaakcttttccattaatttaattgaagttgatttgtgttcatcagtagtttatttagactgattctcagcaaacataatgttaaagttaccttgcaaattacaaaactcttggcacaaataaaacagtgcacaatatctcccaagagaagcccagccttggtaaagttcagttggaaaatctaaaccagactgccttccctgcactagactttggtttctgttggtattctgtcactctgccatgcacctaaaataaaacagcatgagtttttgtgtaacaacaacaacaaaaaagacaacttgagactcgccgata

SEQ ID NO: 160285 - DNA, 535 bp, Homo sapiens
tgttcctttgacttgaattgttgcatcatactaatgaaaattagtcaaaactgctagaataaccactcaaaagaacacaggttaaggatggctctctaaatcacagcaggaataatgaaaaggtggttgaaagttaggaaggacttctccatcttaaaaataaaatataagagttgccaactctttgaaagagctagaagacttagtgggatagaaaaaaatcttttccattaatttaattgaagttgatttgtgttcatcagtagtttatttagactgattctcagcaaacataatgttaaagttaccttgcaaattacaaaactcttggcacaaataaaacagtgcacaatatctcccaagagaagcccagccttggtaaagttcagttggaaaatctaaaccagactrccttccctgcactagactttggtttctgttggtattctgtcactctgccatgcacctaaaataaaacagcatgagtttttgtgtaacaacaacaacaaaaaagacaacttgagactcgccgata

SEQ ID NO: 160286 - DNA, 574 bp, Homo sapiens
ggctaagggatgtccagatagctgatcacatatttctgggtgtgtctgtgagggtgtttctggaagaaaaaggcctttgaattgttagactgtgtaaagaagatcaccctcagcagygtgggtgggtatcctatctgctgggtgctgggctcaaacacaacaaaaaggctgaggaaggcaatctgctctacttcagctgagacatccatcttctcctgccctcagacgctggtatgcccggtatccaggccttcagactcagactcagactggaacttatgctatcaactcccctgcttctcaggcctttgggtttgcactagaactataacaccagccttccttggcctggaatttctcagccttcagaatggtgtgagccaatccctcacaataaagctctttctacatatctggatatatcctgttggttctgtctctctggagaaccccaacacatactccctttagcaatgtgagagagtctcaatctcaccctaataaaaaaatttgattgggttttacatactaatttgataggaataaggtattatcctaggttagtttgcctttc

SEQ ID NO: 160287 - DNA, 411 bp, Homo sapiens
gaattctggggggttcatctcagttcagtgcattcaagaagagaaagtgcttcccgttgttccttggccataaccatgtgcaggagttcagagagtcagccacaccttgtatgctctggatatggcctaaattcatgctgtcctagcaaatgttgtcatttgtcctccatttgcctgcaggcttcatccctggctggttttctctctctccagagcaaacatttagcaaccactgtgttgagtgcctgtgtgtgtgtctgtgtgtgtgtgtgtgcgtgtgcgtgtgtgtgatctccagtcccctcctgctayttccctgtgactaccaaaaataccattatcttttcatttatttcctttactctgtaagtatcaccctcttccctaattccttctgtcttcagacttccc

SEQ ID NO: 160288 - DNA, 411 bp, Homo sapiens
gaattctggggggttcatctcagttcagtgcattcaagaagagaaagtgcttcccgttgttccttggccataaccatgtgcaggagttcagagagtcagccacaccttgtatgctctggatatggcctaaattcatgctgtcctagcaaatgttgtcatttgtcctccatttgcctgcaggcttcatccctggctggttttctctctctccagagcaaacatttagcaaccactgtgttgagtgcctgtgtgtgtgtctgtgtgtgtgtgtgtgcgtgtgcgtgtgtgtgatctccagtcccctcctgctacttccctgtgactaccaaaaataccattatcttttcatttatttcctttactctgtaagtatcaccctyttccctaattccttctgtcttcagacttccc

SEQ ID NO: 160289 - DNA, 639 bp, Homo sapiens
  misc_feature (1)...(639): n = A,T,C or G
nnnnnnnnnnnnnnnnnnnnnnnnnnnnnngcccattgtaatttactagttctttcaaaatactgcatttcarttttttcaatgtgaagataaactctagttttgaatgggcatggctgacttaaatggacaaacctctttcaaactagctttgtagaggttaagttcagttaggtaaatgcagtttcaacatttaaatgtagctgtgtgaagggtaacaaattgaagttactcagcttcaactgaactgcagagctggttaaaaaaacaatgcaagtagccttgctataggaagttgttaaaacacaacttgttagaggcttaatttgagtttggcagaaatacagggctgacatctgctgtcacatgtttgaagcatgaatatatccttccaagaaacaagtgatgcagattttcttttcatgcaacagttgtaggtacttccactttctgtagtaaaagaatatttctgaaagaatccatagggggaacagtatagatagtctttgaaatgaagtggtttgcaactttagagctacactatacatagtgatctgcattagcacaagaagactgttttgtatcaaatataatttaaatcaaaatgtgtatgttcccatcggtttcatatgggagcca

SEQ ID NO: 160290 - DNA, 472 bp, Homo sapiens
gaaaggaactttgcaagttctataagtttgtcattttaattctcctcagcttggaggtggcctcacgtgcttcagccagacttagatgtactatgtatgtatgtactagaatgcactataagaatgccaggaacaagtgtggtctataaagggagcctcagtgtaacgctgagacaggctcattggcagctccagtaggaaattataagctgaatattttatatatatatatatacacacacacacaatatgcatacacacaatcgcacacacatacatacacacacacacattttaaaagctttctgcaatagccatccaaaatctaaattgaaataaaactgaagctaggacttaacagtgctctcctcctcccctgatacatctctaatttttcttctgggggtttggsttacccagaccctccatttcagataagtctctctgtatttccacaaagtactgaaagaga

SEQ ID NO: 160291 - DNA, 585 bp, Homo sapiens
tcacttcaaacatttatctttatgttgggaacattcggattcttctctagctattttgaaatagaccacaaactattgttaactatagtcactctactgaactattgaacactagatcttgtttcttctgtatttttgagttcattaatcaatctcttcattcccctcaccctcctactctttccaggctctggtaaccacctatctactctctaactccatgagatccatgtttttagcttccacatatgagaacaaaaaatatgttttttaaattagaaaactaatacatacctattgtgaaagtgttgacactatagaaaggaaaaaaagagggaaggaaagaaggaagttatccaaaatctgcattctcacaaaagcagacagatataaatactagtgtgttgactagttttgatggttgtgttctgttatatagaagaaggtccttgkacaacggatacaggaaagtctgcaggagtgatagggcatcatgttaacaggttactcttcaatggtttacacaaaacatccttgcactgttcttgcaatttttctgtgcatttgagatggtttcatttggga

SEQ ID NO: 160292 - DNA, 585 bp, Homo sapiens
tcacttcaaacatttatctttatgttgggaacattcggattcttctctagctattttgaaatagaccacaaactattgttaactatagtcactctactgaactattgaacactagatcttgtttcttctgtatttttgagttcattaatcaatctcttcattcccctcaccctcctactctttccaggctctggtaaccacctatctactctctaactccatgagatccatgtttttagcttccacatatgagaacaaaaaatatgttttttaaattagaaaactaatacatacctattgtgaaagtgttgacactatagaaaggaaaaaaagagggaaggaaagaaggaagttatccaaaatctgcattctcacaaaagcagacagatataaatactagtgtgttgactagttttgatggttgtgttctgttatatagaagaaggtccttggacaacggatacaggaaagtctkcaggagtgatagggcatcatgttaacaggttactcttcaatggtttacacaaaacatccttgcactgttcttgcaatttttctgtgcatttgagatggtttcatttggga

SEQ ID NO: 160293 - DNA, 621 bp, Homo sapiens
tgcattgtactcaaatacaatttaatcaaatataaagacatgctatgtacatgagaaccatggaccaggctgatggacaatctcaactgattactgtgatgttaaaattctggttttctatgtaataacaaaaataataataaacagaagcagcagcattaacactggtgtaatgcaatactttgtatgtgtacttatttggtccatacaacaagcctatgtgagtgctgttgtaayctccattttacaaagaggaaaaatcaggtcacagagagggaaactgacttgctcatggcaacatggctggtgagcaagatggctgggattcaaaccaggcatgctgccttccaagcccacattctcaccatcatgctccactgcctctctgaaacagggggacaccttaggctcacagtgtaattcgtggtaaactcgagagtacttttggaactatttacataaaatatttctgtttcagtagaataactactaactaaagctaattttaggtttgtaccctgccaacaacactcacacacacacacacacacacacgcacaaacacacagactgacagagacacatatttacctctcattgtatacatgatcaatttgggta

SEQ ID NO: 160294 - DNA, 440 bp, Homo sapiens
atcaccacagtcaattttgtaatatttcaaccaccttaaaaagaaactcgataccctttagctatcacttctcattacctgcccctctgcaatgaaaagcaacygctaatctactttctgtttttatagatttgcctattctggaaattttacataagtggaatctaataatatgtatttttatgtgactggcttctttcattaagcatatgcttttaaggtctgtctatgttgtaatattccatcatatagatataccacaatttgtttatccattgatcagttgatgaccatatgggttatttccattttttggttattaggaaaaatgctgctgtaaacatttatgtatatgttattgtgtggacagatgttttcgtttctttttgttatatacataggacatgcattagtttttgaagcatttagctctaactcac

SEQ ID NO: 160295 - DNA, 625 bp, Homo sapiens
agctggggcttccactgactataactggagagaaacataactttagaaatctgtataagatcagtgcaagtgtttctgattcacctctaaacatatcccaaagctgacccttccctggagcctaccctttctatggggccagccctgtcaccatggttactgtgccctmagctgcagtgcagccttcaagctgccaaatacaaaagaatggaggggagatcactgcttaggactccttgcctggccttgttctactcctattattctctcaagtaggagtggggtacttcatagagatatcaagctcaagctgagaaataaagggcacaggcacaagcccaaaccctgagtggatgctggaaaaggtgcccctcctttgggaatttgatgcctgatgaattcactatgcacacctgcccccatccacagagccctttggcctgctgaggaacatggtgtctggccctgcctctcaaacttctttagggacccaggagtgcaggtctcgagggcaactctgggcagccctacctggtttcctgttctgtctgaaaaagtaagtccctatcactctgtgtggttgaagtagggcagggcatgcccccagccaagggaagtagccgag

SEQ ID NO: 160296 - DNA, 619 bp, Homo sapiens
aacactgtgaagtaagggcattgacttgggaagtgaaagccgaagatagagcaaaccccatacggcatatcctaactcgccattttaacagcagaaagactcgaaaatacaaagcaaaggattatccaaagggctttttaaaataatgcttaaaattttaatcttgtaaatatatttcccttcccagtatgaaaataattccgagtataatctttatttactttcccctttttattttagaagagtaaacatagctttaagaattaaaaaaatcagttaataatctgacttttaagtcagctgtaaaaatgtaagtttctagctctgccactttttagtagtgtgactttgggcaaattgctcaaaaactccaaattcttgtttctttacctacaaaaaagggacaataatacatacctcctatgatagtagaaaattacgtgaaaatatactccaagtatctcagagggcttgatttccagaaagcgcccaagctcaatcaatagtgacgtttactatccacgcagccagttctactactgggagttggttggtgctgataaagctttttgtcagacttctcrcaatttccattgtgagaagatgtagcttccaatta

SEQ ID NO: 160297 - DNA, 582 bp, Homo sapiens
tggaggagatgatctcagcctcactgcttctcttatttctcctcttcctccttcacataagtaataactgcagagtaaatagaataaagcaggctttctcattctcaggtttagcatctgtaatagtgataacaatgaaggctacttttctgaagttggattgaaattaaatttagtaagaatatatggaaggcctggcacagtagatgctaaataaatattatcttattccaccttcctgagttccttctggagctctaggcaggtgttttatgagtgcaatgggtacacaagcattaataattgatcttagcagatatccacaagctagatttttccctattaaaaaatcactacttattaacacggaagtatgaactatataacaaatcactgaaaagtgtaatcatactgacttagaaactgcatgaattgggggtgactttccttttgtgcctaggttatctaaaatgaggtagaartttcagagaaattaattaactagactatcaaagattaagtttaaaatgtcagatactacccacatggcttctagccctccctctgaaggtgggctcttaa

SEQ ID NO: 160298 - DNA, 582 bp, Homo sapiens
tggaggagatgatctcagcctcactgcttctcttatttctcctcttcctccttcacataagtaataactgcagagtaaatagaataaagcaggctttctcattctcaggtttagcatctgtaatagtgataacaatgaaggctacttttctgaagttggattgaaattaaatttagtaagaatatatggaaggcctggcacagtagatgctaaataaatattatcttattccaccttcctgagttccttctggagctctaggcaggtgttttatgagtgcaatgggtacacaagcattaataattgatcttagcagatatccacaagctagatttttccctattaaaaaatcactacttattaacacggaagtatgaactatataacaaatcactgaaaagtgtaatcatactgacttagaaactgcatgaattgggggtgactttccttttgtgcctaggttatctaaaatgaggtagaaatttcagagaaattaattaactagactatcaaagattaagtttaaaatgtcagataytacccacatggcttctagccctccctctgaaggtgggctcttaa

SEQ ID NO: 160299 - DNA, 459 bp, Homo sapiens
agtacaaaaagctttaaaacacttgttatgtattcctaggaaaccaggatcatgctcagagcattcaaagagtaaggtgggggraaatggcataaaacccaaatataaaaaacaccaacacaataaaaatactactgaaatagctagaatcaagcaacatacagtgagaattaggtctgtcagccacaataaagtgaatccaagttttcatttatgtcagaataaaaagaaacacataaacctggttgggagactaggtgctggatgtgctggagaataaatgcagaagagggccagctttataagggaggaggccaagttttggcctaaaggaataaggactaaggcttttgcaattagaatgtcatcaaattcaaatgttaagcttgcaaagatgtcccaatagcaatcaagttgcttgtttggtgacaaagaaagatccagtttcagcagtagtat

SEQ ID NO: 160300 - DNA, 473 bp, Homo sapiens
cttgatagtagatcatacctgtaaataaagttatatatttatagatgtattcagttgtaataataagtcatacataaagatgcatttagttatagaaatctaaacatatgtttatataaaatgccaacatatttctagataatggtatctggcgagagtacaaaaagctttaaaacacttgttatgtattcctaggaaaccaggatcatgctcagagcattcaaagagtaaggtgggggaaaatggcataaaacccaaayataaaaaacaccaacacaataaaaatactactgaaatagctagaatcaagcaacatacagtgagaattaggtctgtcagccacaataaagtgaatccaagttttcatttatgtcagaataaaaagaaacacataaacctggttgggagactaggtgctggatgtgctggagaataaatgcagaagagggccagctttataagggaggaggcca

SEQ ID NO: 160301 - DNA, 446 bp, Homo sapiens
gctttaaaacacttgttatgtattcctaggaaaccaggatcatgctcagagcattcaaagagtaaggtgggggaaaatggcataaaacccaaatataaaaaacaccaacacaataaaaatactactgaaatagctagaatcaagcaacatacagtgagaattaggtctgtcagccacaataaagtgaatccaagttttcatttatgtcagaataaaaagaaacacataaacctggttgggagactaggtgytggatgtgctggagaataaatgcagaagagggccagctttataagggaggaggccaagttttggcctaaaggaataaggactaaggcttttgcaattagaatgtcatcaaattcaaatgttaagcttgcaaagatgtcccaatagcaatcaagttgcttgtttggtgacaaagaaagatccagtttcagcagtag

SEQ ID NO: 160302 - DNA, 584 bp, Homo sapiens
tttttctctccttgaaagttggttggtctttatgattgtctcaataagtagaatgttgtggaagtgatggtgcatgacttctcaggttatatcaataaaaggtmacattttgtctagccctttctctctctttaggaatattcaccattaagacccagctgccatgttgtgaggaagctcatgccacatggagaggccacgtgtggatctgggcaacagctctggctgaggtcccagctaactaacacccagtactgatggccaaaccttccaaagatgccagcttccaatctcatgcctaggggggcacagataagttgaccctgccaagtctggccccagttgcagagccatgagcaaaatcaatgttgttgtactaagatactaagttttagggtggtgtgttatgtagcaatataagcaaaataccaagtttatacagttggttagtaaatgattcaggatttgaacttaagatctgtataactgtccacttctcttggctggttccaagagaaccttattccaagagaatccttattctcccaagccttactcctttccttcagcctggaattcagagg

SEQ ID NO: 160303 - DNA, 617 bp, Homo sapiens
gtctcaataagtagaatgttgtggaagtgatggtgcatgacttctcaggttatatcaataaaaggtcacattttgtctagccctttctctctctttaggaatattcaccattaagacccagctgccatgttgtgaggaagctcatgccacatggagaggccacgtgtggatctgggcaacagctctggctgaggtcccagctaactaacacccagtactgatggccaaaccttccaaagatgccagcttccartctcatgcctaggggggcacagataagttgaccctgccaagtctggccccagttgcagagccatgagcaaaatcaatgttgttgtactaagatactaagttttagggtggtgtgttatgtagcaatataagcaaaataccaagtttatacagttggttagtaaatgattcaggatttgaacttaagatctgtataactgtccacttctcttggctggttccaagagaaccttattccaagagaatccttattctcccaagccttactcctttccttcagcctggaattcagaggcattctgcctctccttgctgtaggtgtgcttattgctattcagcccctaattcacatatgtagtcattaa

SEQ ID NO: 160304 - DNA, 584 bp, Homo sapiens
tttttctctccttgaaagttggttggtctttatgattgtctcaataagtagaatgttgtggaagtgatggtgcatgacttctcaggttatatcaataaaaggtcacattttgtctagccctttctctctctttaggaatattcaccattaagacccagctgccatgttgtgaggaagctcatgccacatggagaggccacgtgtggatctgggcaacagctctggctgaggtcccagctaactaacacccagtactgatggccaaaccttccaaagatgccagcttccaatctcatgcctagggggscacagataagttgaccctgccaagtctggccccagttgcagagccatgagcaaaatcaatgttgttgtactaagatactaagttttagggtggtgtgttatgtagcaatataagcaaaataccaagtttatacagttggttagtaaatgattcaggatttgaacttaagatctgtataactgtccacttctcttggctggttccaagagaaccttattccaagagaatccttattctcccaagccttactcctttccttcagcctggaattcagagg

SEQ ID NO: 160305 - DNA, 582 bp, Homo sapiens
aagggaaaacaacccattgcaagatcatgaatcccagaaattccatctgcatatttccagagcctctggtacactgggtcactccttagtggggcagtttactgtatttgcctttagaaatgaaccctcagaaatcactccggggaatgcccagtgaacaactctgcttttccccactctctcttctgctaagtgyctctgaaaagtgcctctctagagacacttgttcctggtaatatccagccccggtaatgcatgagtcctgaatatttttgttgtttacttcatttctcacattcaatatacagtagaaacagagcaggctttggggcctagtgtgagttcatcaaatgtcctgggaactgactctcttaggggctgcctttctctactgcagggacacagcactgttctttctacatggcaagcactctcctatgtgctttacacacattttctcattaggtaggtattacttgtatccctccttgacaaataaagaaactgtggtgcaaaaactaagtaacttccccagaatgatacagggagcaagtgtaggaaatgtgatgtgaacccaaagct

SEQ ID NO: 160306 - DNA, 629 bp, Homo sapiens
tgatgtgcatataaatttgagaaactgtcttagattgagtcctcaaatcagtcaggatgggctaggtatgctgcagtaacatatctcactcacaccaagtcttctgtgggtatcagtaactcccagggaggtgtcctccatgtggtgactcagcgatccaggctgtcctgatcctgtgcccttcattccaacctgaggcttgaatgttcactgtgtcagaagaagggtacttgtctacagagggtgttgtgcaacatattctatgttcctagtcttaagaaaaaagaaattgagaaatactagtgatcaccagtaaagtgtatgttaggtaagctgcgtttgagtctccatgagcatacttcacccttccaagaaaccttaagtttgctctctagttgagtgaaatcttacagcagcagaggagaagggtgtgtaaatcaatatttgcatcttccaagagcactgcagacctccagagaggagagcagagcaaaaggcagtagtcatattcctcactattttcctttctttgtgtttctataccaagaaaactaactagatgtacaartttcatgtaatgttgacaataaggatgctaatatttctatgaaaatccaaaggaagcctca

SEQ ID NO: 160307 - DNA, 635 bp, Homo sapiens
cattttctgctcttctcagcttgtgtaaggtgcattgcttcatgccacatcagccctggggtgtctgtagcatcctaacaatagtgacaacacagtacaccccccacatactctcccatgaatcacagaacctcaaatcccaccaaatgccctcctgcaggtttcccatagatttgcacaaggccacagtagccatgctttcccgctcctggtgcscaaaatctccctggctgcttccactgtgggctcctgggaggatcagctgccaccctgctcttcttggcctccgtgcccattggcacccctttccgttctgctctggctgtcactggggaaggagcaatgggtgagctttcttccctcatccactggggatcccatcactagactgtaaataactctgcactgcatcctcagattttcaggattttaggagactctgggaatgcagcagttctctttggtctcctctttaccacagccatcaatatgacaccatgatctcatcgccaacctcttcagggctgtcctctaacctaggactgggctgtacatactctagaattaggggcccctttgtctgccaataacaaaaacccactgaatcgatttaaacaaaaattgaagtttaccat

SEQ ID NO: 160308 - DNA, 635 bp, Homo sapiens
cattttctgctcttctcagcttgtgtaaggtgcattgcttcatgccacatcagccctggggtgtctgtagcatcctaacaatagtgacaacacagtacaccccccacatactctcccatgaatcacagaacctcaaatcccaccaaatgccctcctgcaggtttcccatagatttgcacaaggccacagtagccatgctttcccgctcctggtgcccaaaatctcccyggctgcttccactgtgggctcctgggaggatcagctgccaccctgctcttcttggcctccgtgcccattggcacccctttccgttctgctctggctgtcactggggaaggagcaatgggtgagctttcttccctcatccactggggatcccatcactagactgtaaataactctgcactgcatcctcagattttcaggattttaggagactctgggaatgcagcagttctctttggtctcctctttaccacagccatcaatatgacaccatgatctcatcgccaacctcttcagggctgtcctctaacctaggactgggctgtacatactctagaattaggggcccctttgtctgccaataacaaaaacccactgaatcgatttaaacaaaaattgaagtttaccat

SEQ ID NO: 160309 - DNA, 460 bp, Homo sapiens
ctacaaaaaaatttaaaaattactcaggtggggtggcatgcacctgtggtcctagctactcaggaggctgaggcggaagatcacttaagcccaggaggtcaagactggagtgagccgtgattgcaccattgcactccagcctgggtgagagaggaaggccctgtctccaaaaacattaagtaaataaataaaattacagatcactgggccctgtctgaggcctgtagaatctgaaaccatkaaggtaggatccagaaatctttctggttaacaagcatcacctctgaattgattcttaggcaacatgaaaacagaatagctgctagtagctacttcttcagtgcctcacattctctcttcttcttgcctttgatgggattgaaaatatgcttccccaaaatatggcaccttgacatgtaacgaaacagcagaagcaagccatagaaactagaaagaattc

SEQ ID NO: 160310 - DNA, 574 bp, Homo sapiens
tgccctactcctctctgcctaactacctacttaatatgtctgttatttttcaatgaaactttagggggctatgacctaggacagagacttgagatagtgaataagaataaccttataagttaaccttatagtctgattttagattgcagttttaggggtctcctttgaagagttaaaatgcaaatattactagcaaggaactcactttaagtccttatcaattaagtgttccataacttcttgctatcaattaataatattagcagagaagaaaggtctccacgcsacagggagtgggaggaaattacagtaaattcaattctggaggaaaaatagccatattaaaggaatatagactgcctgccaaagataggtttagttacctctgttttgttgaaggcctaacctaagagaggatggactaaaccagatgatatttccaaagttagctcaaggccaaattttgtgagaatgaagctcattttctgcccctctcagaaccccatgttgattttatgcctctcttcaaagcctctagagccctcaaactgctccttctaggcctgctatcctg

SEQ ID NO: 160311 - DNA, 568 bp, Homo sapiens
ctctgatttagggtcaaggctccacttgagtaacaaatgctctggggatggcatcacttcatctgaatgctgtcccctgaagttgtgcaaggcagagccctgtcaatcattctctatcataccagggcttggaagtgcaggttctgatctgcctaaaagcagtttatggaatgcaataaataaaaagcagcaataaacctgtcattttcgtgagtatcccagctgcatactctgttctcttagtttccagttttaaatagttccccaaatttcatgtaccagctacaggtttaagctctctcctgttgctatttatagcacgttgctcatgtaaaataagtctcctcattcataaaatgaggatggtaataaaccttgtcctactttcctaaaaatagtttcctatctgcaaaatggggctaataatacctgccctattgatttcacaaggctgttttgagsgtcagatgtgattgtgtaaaagtaagttgaaactcaaagtatgatacatcagaggtattaccgtagttctgactagcattgcaacccaagcatttgtgagaaaagc

SEQ ID NO: 160312 - DNA, 566 bp, Homo sapiens
tccctcatcctccagagtagctaggactacagatatgaaccactgtgcctgacctttttgtgttttttttttttcctttgagatggagtctcgctctgttgcccaggctggagtgcagtggcgagatctaggctcactgcaagctccacctcccgggttcatgccattctcctgcctcagcctcccgagtagctgggactacaggtgcccgccaccatgcccggctaattttttgtatttttagtagagacagggtttcaccgtgttagccaggatggtctcgatctcctgacctcgtgatccacccgccttggcctcccaaagtgctgggattacaggtgtgagccaccgcgcccggccctttttgtctatttttaaattgaattttttttgttttcttgctattgagtggtttgagttccttatatattttgaatattaactcctttaggatgtagggctttggcttacaaatgttttctcccaatctgtaggttgagtcttcacactgttaattgtttctttkgctgtgcagaagctttttagtttgatgacatcacatttgt

SEQ ID NO: 160313 - DNA, 543 bp, Homo sapiens
aagacattacataacaccttctctctgtaatccaaaaatcaggcacactagtgtgaatgggtaggggagtggaagraaaagtattacttagagttcttttattaaatgcggcttttataccttaattttggctattcaagatacttgtcaaattattccacctttacttcaggaaaatgagaaacaaacacactgaatatgtcagcgatacattaaaaagtgtacaataatacagtcttgagatgtgaaatgctacaacttctacagataatactaaaagtaaatgctgcttaaggtacactgtgacagaagacacagtataaaaaacatgcacccaagaatcagcattaagtgcttttaattaaggactttaccatctgaatggtcttctttactatatgacaagtaaaaaaaaaaaaaaaaaaaaaaactacctttgagtcatttatttaactcacttgaaaatttcctaaggcctgcataagaaaattaagcttctatgattaagcaaactccagatccagatgtttcagtggtgaattc

SEQ ID NO: 160314 - DNA, 551 bp, Homo sapiens
agatgggttaaacatgaaggagtcagaagtggtagaactaattctaaatactgagattccatactgagaggtaccaaagctacccaacaaactcttttcctcttgggaaacacatatacacctgacataaaaataaggtagacatttagtttgtagctgtagatctcaatagcattgtgtaatttttcctgttacttttcaagaccaacacatatcacagtatagggaggtcagagactcctgagggcagctctacaattctgaagcagtacrtttcttttatatttttgtaggtaatgatttgttgtaagttatccatagttgtaagtaaccggatcatatgttttccttgatattatggagaatttgacaggttggagaaatacaaggtatgatttcatgattaaacataacaggaaatttaaatgggactttacatatgatctcaatttagctaagaactcaagaccaagctatacagacaccaaattacctccacattctaaagcaaggggctagaccaccttatgtaggacatgctaagagataga

SEQ ID NO: 160315 - DNA, 420 bp, Homo sapiens
tttgtaaatatgctaaaagtcattgaattgtacactgcaaaatgctgtattttatggtagatkaattacatttcaattttaaaaatttactttgctctgtgtcctgtggtttcatgattttaaaaataactttgaagcaaagtgaaaagaaaaataaagatataaaggctgactcctggaagtgctcctgaaaaggactttaacgttattgttccaatgtctcctggttttcatactctttcttttttttttcatacttttgtttaaaagctggatgttagtcttattgcctattcaaaagtaatttttttccttccaaatggttttaagatttctctctttgtttttagctttcggtagttttgctatatttgtacatagatctcattttctttgtatttatcctgcttggagtctaga

SEQ ID NO: 160316 - DNA, 359 bp, Homo sapiens
tttagctggttgtttctttcttatctctaaggagcaagagaactagatcagaatgtcagataaaaatcactctaatagatgaaaattgtctcggctgtgaacaaaggctcacacctgtaaacccagcactttgggaagctgaggtgggagggmtcatttgaggtcagatattcaagagcatcctggccaacgaggtgaaaccaggtctctactaattatacaaaaatcagccaggtgtgtcgacacgtgtctgtaatcccagctactctgtaggctgaagcacaagaatcatttgaaccagggagcaggagtttgcagcgagccgagattgtcccattacaatccagactgggcaacag

SEQ ID NO: 160317 - DNA, 678 bp, Homo sapiens
cactggggattcggtttatacatttaaatttgggaaaggcataaacattcaatccttagcatgacamctcattacaatttggagagagtgaaagtctagatgcctcactcatcctttactgacaaggatgggagagggaccataagtttcctgtggtttgtctggagtagtgcaggcattgtctaaaaattaactctctcattaaactgccttttgccttcttttggctagagatagcaggattttgttagagctttatttgtctacatccattggagtatctagttttatggcttcttcagcatccactttgggatatgtgaggcaaaaaaagaaacacaaggagctcaccactatgttatttttcaggtcccaggctctccagcttgtctgcattttctctaccttcaaaatatcttttatgtttttaaataatatttgtaaagccttaagttattattgtacttattgggaagaatggggaattgtatgtccgcttcattttcacaaaagtagaagttgttttttcattggtttattccactttggaagatttcaacttttgtactgagatatgtgtgtattttaaaattatgctatcacatttttaatctccaagaactcttttttattactgtaaatattccaaatttataatatcctgtttctgtttcataa

SEQ ID NO: 160318 - DNA, 678 bp, Homo sapiens
cactggggattcggtttatacatttaaatttgggaaaggcataaacattcaatccttagcatgacaactcattacaatttggagagagtgaaagtctagatgcctcactcatcctttactgacaaggatgggagagggaccayaagtttcctgtggtttgtctggagtagtgcaggcattgtctaaaaattaactctctcattaaactgccttttgccttcttttggctagagatagcaggattttgttagagctttatttgtctacatccattggagtatctagttttatggcttcttcagcatccactttgggatatgtgaggcaaaaaaagaaacacaaggagctcaccactatgttatttttcaggtcccaggctctccagcttgtctgcattttctctaccttcaaaatatcttttatgtttttaaataatatttgtaaagccttaagttattattgtacttattgggaagaatggggaattgtatgtccgcttcattttcacaaaagtagaagttgttttttcattggtttattccactttggaagatttcaacttttgtactgagatatgtgtgtattttaaaattatgctatcacatttttaatctccaagaactcttttttattactgtaaatattccaaatttataatatcctgtttctgtttcataa

SEQ ID NO: 160319 - DNA, 678 bp, Homo sapiens
cactggggattcggtttatacatttaaatttgggaaaggcataaacattcaatccttagcatgacaactcattacaatttggagagagtgaaagtctagatgcctcactcatcctttactgacaaggatgggagagggaccataagtttcctgtggtttgtctggagtagtgcaggcattgtctaaaaattaactctctcattaaactgccttttgccttcttttggctagagatagcaggattttgttagagctttatttgtctacatccattggagtatctagttttatggcttcttcagcatccactttgggatatgtgaggcaaaaaaagaaacacraggagctcaccactatgttatttttcaggtcccaggctctccagcttgtctgcattttctctaccttcaaaatatcttttatgtttttaaataatatttgtaaagccttaagttattattgtacttattgggaagaatggggaattgtatgtccgcttcattttcacaaaagtagaagttgttttttcattggtttattccactttggaagatttcaacttttgtactgagatatgtgtgtattttaaaattatgctatcacatttttaatctccaagaactcttttttattactgtaaatattccaaatttataatatcctgtttctgtttcataa

SEQ ID NO: 160320 - DNA, 678 bp, Homo sapiens
cactggggattcggtttatacatttaaatttgggaaaggcataaacattcaatccttagcatgacaactcattacaatttggagagagtgaaagtctagatgcctcactcatcctttactgacaaggatgggagagggaccataagtttcctgtggtttgtctggagtagtgcaggcattgtctaaaaattaactctctcattaaactgccttttgccttcttttggctagagatagcaggattttgttagagctttatttgtctacatccattggagtatctagttttatggcttcttcagcatccactttgggatatgtgaggcaaaaaaagaaacacaaggagctcaccactatgttatttttcaggtcccaggctctccagcttgtctgcattttctctaccttcaaaatatcttttatgtttttaaataatatttgtaaagccttaagttattattgtacttattgggaagaatggggaattgtatgtccrcttcattttcacaaaagtagaagttgttttttcattggtttattccactttggaagatttcaacttttgtactgagatatgtgtgtattttaaaattatgctatcacatttttaatctccaagaactcttttttattactgtaaatattccaaatttataatatcctgtttctgtttcataa

SEQ ID NO: 160321 - DNA, 556 bp, Homo sapiens
ttattgtacttattgggaagaatggggaattgtatgtccgcttcattttcacaaaagtagaagttgttttttcattggtttattccactttggaagatttcaacttttgtactgagatatgtgtgtattttaaaattatgctatcacatttttaatctccaagaactcttttttattactgtaaatattccaaatttataatatcctgtttctgtttcataaatgtgttataagtctcttaatatcccagagaacaatttcgttttaagtttttgtctttgtgcgctrttttatttgttttggactattttcaatgattattttggttttactctttaatttaaagggatttcttgtgtatctgcctattctgtagtttctcttcatatttaagatcaagacaacagtaatcgaactgaagatttttgctcagagataagattaattaacataaagctccattttgctgaagtttgaagacttttttcactgtactaatccaatttcacagataaaaatgtcttaatattctatttgcagtatactacattaccgt

SEQ ID NO: 160322 - DNA, 556 bp, Homo sapiens
ttattgtacttattgggaagaatggggaattgtatgtccgcttcattttcacaaaagtagaagttgttttttcattggtttattccactttggaagatttcaacttttgtactgagatatgtgtgtattttaaaattatgctatcacatttttaatctccaagaactcttttttattactgtaaatattccaaatttataatatcctgtttctgtttcataaatgtgttataagtctcttaatatcccagagaacaatttcgttttaagtttttgtctttgtgcgctattttatttgttttggactattttcaatgattattttkgttttactctttaatttaaagggatttcttgtgtatctgcctattctgtagtttctcttcatatttaagatcaagacaacagtaatcgaactgaagatttttgctcagagataagattaattaacataaagctccattttgctgaagtttgaagacttttttcactgtactaatccaatttcacagataaaaatgtcttaatattctatttgcagtatactacattaccgt

SEQ ID NO: 160323 - DNA, 572 bp, Homo sapiens
taagcagagtttattgacattgataagtgaataactaaaaaggaaacattgcagcaaaagcaactgttcatctgaacttaaataattgaaccattgattttctgaacagaaagtgttataaaacttcagccatttaggtgtttgttattcttaaggttatgaaaaacctgatatttataaagctctataaaactcaataagcatatttagatggagagttagaaacaaaaatagaaataagtgggaataatcaaatggaccagtccatgggaggcttgtgtgtggaatctacactagacagttgcaatgaaagatgagaaaaggctcaaggatcaaatgggcacaayagactcaatcatttcattatgggaagtgggtaggagggaacttgagggtcttagtcatgggagtaggtttctgtggtggagttacaatttcaaagtaggtaagagacacaaggcaggaggacagaagatcaggtagaaaagagaattcaaatcaaaatatatttagtgagctccatttacaaagctgacggctggtgctatgggagtaaaaatttaaaaaaaaca

SEQ ID NO: 160324 - DNA, 572 bp, Homo sapiens
taagcagagtttattgacattgataagtgaataactaaaaaggaaacattgcagcaaaagcaactgttcatctgaacttaaataattgaaccattgattttctgaacagaaagtgttataaaacttcagccatttaggtgtttgttattcttaaggttatgaaaaacctgatatttataaagctctataaaactcaataagcatatttagatggagagttagaaacaaaaatagaaataagtgggaataatcaaatggaccagtccatgggaggcttgtgtgtggaatctacactagacagttgcaatgaaagatgagaaaaggctcaaggatcaaatgggcacaacagactmaatcatttcattatgggaagtgggtaggagggaacttgagggtcttagtcatgggagtaggtttctgtggtggagttacaatttcaaagtaggtaagagacacaaggcaggaggacagaagatcaggtagaaaagagaattcaaatcaaaatatatttagtgagctccatttacaaagctgacggctggtgctatgggagtaaaaatttaaaaaaaaca

SEQ ID NO: 160325 - DNA, 572 bp, Homo sapiens
taagcagagtttattgacattgataagtgaataactaaaaaggaaacattgcagcaaaagcaactgttcatctgaacttaaataattgaaccattgattttctgaacagaaagtgttataaaacttcagccatttaggtgtttgttattcttaaggttatgaaaaacctgatatttataaagctctataaaactcaataagcatatttagatggagagttagaaacaaaaatagaaataagtgggaataatcaaatggaccagtccatgggaggcttgtgtgtggaatctacactagacagttgcaatgaaagatgagaaaaggctcaaggatcaaatgggcacaacagactcaatcatttcattatgggaagtgggtaggagggaacttgagggtcttagtcatgggagtaggtttctgtggtggagttacaatttcaaagtaggtaagagacacaaggcaggaggacagaagatcaggtagaaaagagaattcaaatcaaaatatatttagtgagctccatttacaaagctgackgctggtgctatgggagtaaaaatttaaaaaaaaca

SEQ ID NO: 160326 - DNA, 586 bp, Homo sapiens
agggtgcacatttttgtgggccatgtttataatatatgaactcataaacagagataaattcgttagcaagctggtcagggcttggggggtggggaaatggaaaatccagtatcaagaagrtcaaaggtagatgtatatggatgaatatatgaaagtaggcaaaagtggaccagtgaacatccctcaaaaaatatgaactaaccaaccaaattaacaaatgatcagaccagttgacaacagactgtctgttgtgctggcataatggacatgtgaagaaaatggccacagtagcagagacaggacttactggtgcaaattcataccccttgttaccaaggtaaggctttctgctgctacttctagatctctactatcctagcaacagacactaacactatgcctatgatgtgcttcaatgtcttgaagagatccactgtcctcatgatttcagtttgactacattggaactcttcaaccctagaaacagcttttttttttttttttttttagaaaattactctgtggttgagtttgtatgggcctcagttggcactacaacctaatgttttacagagaatttgaaccg

SEQ ID NO: 160327 - DNA, 554 bp, Homo sapiens
tacactgctatgaagaaatattcatgactggataatttataaagaaaagaggtttaattgactcacagttcygcatggctgcgaaggcctcaggaaacttaaaatcatggtggaaggggaaaaggaaacattcttcttgatgaggcggcaggagagagaagtgctgagcaaagggaggaaaagccccttataaaaccattaggccttgtgagaacttactgtcatgagaacagcatgaggttaaccatccctacgattcaatgaactcccaatgggtcccttccatgacacctggggattatgagattggggtggggacataccaaatctcatcatatcaaagcaaatcaatccatccctgccacctcccatatctcatattctcacatttcaagacacaataatgcctttccaacagtctccccaaaccttagcattaacccaaaaattccagcattaacccaaaagtccaaaaccaaagtctaatatgagacaaggcaagtcctttacacctatgagcctgtaaaatcaaaagcaagttagttacctcctag

SEQ ID NO: 160328 - DNA, 554 bp, Homo sapiens
tacactgctatgaagaaatattcatgactggataatttataaagaaaagaggtttaattgactcacagttccgcatggctgcgaaggcctcaggaaacttaaaatcatggtggaaggggaaaaggaaacattcttcttgatgaggcggcaggagagagaagtgctgagcaaagggaggaaaagccccttataaaaccattaggccttgtgagaacttactgtcatgagaacagcatgaggttaaccatccctacgattcaatgaactcccamtgggtcccttccatgacacctggggattatgagattggggtggggacataccaaatctcatcatatcaaagcaaatcaatccatccctgccacctcccatatctcatattctcacatttcaagacacaataatgcctttccaacagtctccccaaaccttagcattaacccaaaaattccagcattaacccaaaagtccaaaaccaaagtctaatatgagacaaggcaagtcctttacacctatgagcctgtaaaatcaaaagcaagttagttacctcctag

SEQ ID NO: 160329 - DNA, 554 bp, Homo sapiens
tacactgctatgaagaaatattcatgactggataatttataaagaaaagaggtttaattgactcacagttccgcatggctgcgaaggcctcaggaaacttaaaatcatggtggaaggggaaaaggaaacattcttcttgatgaggcggcaggagagagaagtgctgagcaaagggaggaaaagccccttataaaaccattaggccttgtgagaacttactgtcatgagaacagcatgaggttaaccatccctacgattcaatgaactcccaatgggtcccttccatgacacctggggattatgagattggggtggggacataccaaatckcatcatatcaaagcaaatcaatccatccctgccacctcccatatctcatattctcacatttcaagacacaataatgcctttccaacagtctccccaaaccttagcattaacccaaaaattccagcattaacccaaaagtccaaaaccaaagtctaatatgagacaaggcaagtcctttacacctatgagcctgtaaaatcaaaagcaagttagttacctcctag

SEQ ID NO: 160330 - DNA, 601 bp, Homo sapiens
atataataatagtttttgagataagggtaggaatattgtttaactctgaatttcatgatatatgaatgttaagtctcatgggcaactactacttgtataatttccaatttgttaaaaaaagaaggaaaggagtaaaagcccacgatcaatggcaataacaatgaaaaaagtaaacagaaaatgcagcatgaagataaagagacaagaaatttaacgaatataccagtaattacaactaggacaattaattacacttccctcctctcaaaacacaaagattttaagactagatgtaaaagagaaagacaaccgtatgctgcatatgagaaacctcgaaatgtcagagtacagatggagtaaaaaaatgatargaaaaagatacaggcagctccactcccttggtaagttgtcaatagtctatgtatttttccgtgatgcatatattgattcaacatgagtttgtgagattcttctatattaacgcagtttgggagatacaatatttaagtgctgtgctgtttaggattgtagaaatatgtgaaaaaattataagtgattaacttattaaaggaattaaaatcaaagatgcctacatctttaa

SEQ ID NO: 160331 - DNA, 443 bp, Homo sapiens
caattagttgatcacaggaaaacccaacacattctgtttagccttttatctgatccccagatggaaatcattacttcttagcagtagaaaacacactcagccattattcaatccaaatggctagtttatgtgaattaggtgcttgctacaattattactcatgaagactatctggtttaaggtaaaaaaatgtttttgagaattaggattaaaatgtttctcactatatttgtaaaaccagaaaaacccccaaagacaaacttggccatgaatcttaatcactggtatttaatttagaaccattatttctatraactccattcacgatttgtttaaatatctgattttagacatgtaaaatattcaaattcatctaaatagaatgaccatgctattcagtagcttgtgtgaataatttaactcaaaggctgtttcacaacatt

SEQ ID NO: 160332 - DNA, 556 bp, Homo sapiens
aatttacttatttatttgttggtgaaaggttaactgtggtgtgaggttatctttatcaccttctacaggcaaagcacgtcttataccttatctcatataagcctcataacaaactagaaagtagatattgctttgagatgaatgtaccaaaggtcaaaaagygacttaacaagctggtcacatagcaagtaattttcagatcttggaaagaaaaaaaatatatttttacagaaaataggtatttttgaaatagactatttcatagatgatgatgatgacagatagatagatggctagagatataggtagatcacctgtgtgtgtggtgtgtatatgtgtttgtatgttgcatatcacataaatattattcacatcccaaattcaggaattacttatagagtggcaatttaccttcatttctgatatcaagaatatgagtcttgtttattcttttaacaaacttttattgggtacttcctctgtgctggcactattctaggtgctgcaaatcttgaaccatactgacaaggtctctgctcttaaaggctaatattct

SEQ ID NO: 160333 - DNA, 423 bp, Homo sapiens
ggtatttttgaaatagactatttcatagatgatgatgatgacagatagatagatggctagagatataggtagatcacctgtgtgtgtggtgtgtatatgtgtttgtatgttgcatatcacataaatattattcacatcccaaattcaggaattacttatagagtggcaatttaccttcatttctgatatcaagaatatgagtcttgtttattcttttaacaaacttttattgggtacttcctctgtgctggcactattctaggtgctgmaaatcttgaaccatactgacaaggtctctgctcttaaaggctaatattcttgggaggaaacacagagataaaaatcatagaattaaaattaaactttgctgttttatgcagacataacaaagggttctttacgtacacacatacacacatacat

SEQ ID NO: 160334 - DNA, 607 bp, Homo sapiens
catgaggctaacatctcattacaggaagccaggcttatgtccctcactttctaaggcaaagtctggtacacaatttctgaagcagaagtaagcctggctsatttccaggattgagaaaaaggtcgattttatttgaacgtagtggtcaaggaaatacaactatctgttttggtgaaatattttatcaagcttgtttttcttaacactggaaaatcaatggaagatgaaatgccagtatcagaaaagttactagtgggcaaaagaagaacactacaaatttgcattttctctatatacaattcatatttcttttgatatggaagagaaaaaaataaagtttcatgctgtagttatgcctatccagatgcaacctaacagttaagcttagagaaatctttttgtgtctataatatgatagcctttataggaaaaagtgcataagaaaatacagcaaataatgaaaagagataacaacatggccattactagagtagtcaatatatatatatttctgaagaagaaaaaggatgagaaaaagttgatttctttggcctaggtttggacatggacaatattagaaacatcaagaaactatcccttttttaaa

SEQ ID NO: 160335 - DNA, 546 bp, Homo sapiens
aagtttcatgctgtagttatgcctatccagatgcaacctaacagttaagcttagagaaatctttttgtgtctataatatgatagcctttataggaaaaagtgcataagaaaatacagsaaataatgaaaagagataacaacatggccattactagagtagtcaatatatatatatttctgaagaagaaaaaggatgagaaaaagttgatttctttggcctaggtttggacatggacaatattagaaacatcaagaaactatcccttttttaaatcaatttgaatttgctacagacttttatttagtacataaagaacaatctttgcaccaacgatgccactatctaaatatgaacactaaagatatacacataataaatattttggtattattcccctaaaacagtagtgaatggagactgaaaagaataggaagagaactgataggtattttcctgagaaatagtggagacagttaaagctttgagatggagaaaatcatacatatataatgacttgagaaacgaaaagaaaatagtagctgtga

SEQ ID NO: 160336 - DNA, 607 bp, Homo sapiens
catgaggctaacatctcattacaggaagccaggcttatgtccctcactttctaaggcaaagtctggtacacaatttctgaagcagaagtaagcctggctcatttccaggattgagaaaaaggtcgattttatttgaacgtagtggtcaaggaaatacaactatctgttttggtgaaatattttatcaagcttgtttttcttaacactggaaaatcaatggaagatgaaatgccagtatcagaaaagttactagtgggcaaaagaagaacactacaaatttgcattttctctatatacaattcatatttcttttgatatggaagagaaaaaaataaagtttcatgctgtagttatgcctatccagatgcaacctaacagttaagcttagagaaatctttttgtgtctataatatgatagcctttataggaaaaagtgcataagaaaatacagcaaataatgaaaagagataacaacatggccattactagagtagtcaatatatatatatttctgaagaagaaaaaggatgagaaaaagttgatttmtttggcctaggtttggacatggacaatattagaaacatcaagaaactatcccttttttaaa

SEQ ID NO: 160337 - DNA, 591 bp, Homo sapiens
taattattttagattctcccctaatgtttaaacatgtttttattttgaaatacacttcaaaatgattgtatataatatcaaggaatactaataagggaatcaaatagatttccataatacatcgctcagcttaatggagagaaaataattactrctatagtaactgtgaagtatgaagggtgctctttctcatttgcattaacttctatccctttaggaagaaacacacttctaaattgtatgtgtttctctcattcttctatttataattttccacatataaacattaagtgaaacatcaattagttttttatttatgtatgttatgtaaaataactcatattgtgtatttattccttcgtattgtattcactcaaaaatattttatgagattcatccatgttcatgtatatacttgcaattcattcatattcactcatactgtgtagtcgttatatgcatatacaagaatatatcagttcaattaatgatgaacatgttgattttgaaattctatttttgttttaagtaataatttatattattattatttataaccttactctgtattttacagatattaactcattt

SEQ ID NO: 160338 - DNA, 591 bp, Homo sapiens
taattattttagattctcccctaatgtttaaacatgtttttattttgaaatacacttcaaaatgattgtatataatatcaaggaatactaataagggaatcaaatagatttccataatacatcgctcagcttaatggagagaaaataattactgctatagtaactgtgaagtatgaagggtgctctttctcatttgcattaacttctatccctttaggaagaaacacacttctaaattgtatgtgtttctctcattcttctatttataattttccacatataaacattaagtgaaacatcaattagttttttatttatgtatgttatgtaaaataactcatattgtgtatttattccttcgtattgtattcactcaaaaatattttatgagattcatccatgttcatgtatatacttgcaattcattcatattcactcatactgtgtagtcgttatatgcatatacaagaatatatcagttcaattaatgatgaacatgttgattttgaaattctatttttgttttaartaataatttatattattattatttataaccttactctgtattttacagatattaactcattt

SEQ ID NO: 160339 - DNA, 591 bp, Homo sapiens
taattattttagattctcccctaatgtttaaacatgtttttattttgaaatacacttcaaaatgattgtatataatatcaaggaatactaataagggaatcaaatagatttccataatacatcgctcagcttaatggagagaaaataattactgctatagtaactgtgaagtatgaagggtgctctttctcatttgcattaacttctatccctttaggaagaaacacacttctaaattgtatgtgtttctctcattcttctatttataattttccacatataaacattaagtgaaacatcaattagttttttatttatgtatgttatgtaaaataactcatattgtgtatttattccttcgtattgtattcactcaaaaatattttatgagattcatccatgttcatgtatatacttgcaattcattcatattcactcatactgtgtagtcgttatatgcatatacaagaatatatcagttcaattaatgatgaacatgttgattttgaaattctatttttgttttaagtaataatttatattattattawttataaccttactctgtattttacagatattaactcattt

SEQ ID NO: 160340 - DNA, 536 bp, Homo sapiens
tctgactccaagctaaagtcttatgtctgatttttcaggctttaacataggcaattacaaacgcctgtcctggcgtgcttcatgggggaagctccacactccatttgggcacacagctaggaccttagagtctgtgaaggagttgagtaagtacttagtctctccatccctgccattctccgaagtatatctgtgttgctagccaagatgcctccatttggctagtttgacgccttcctcmgttacctcttctgagacctcattgtgggagaggcaggagtgctctgaagtcttctccactctaactcagtgctcagtacatttccactcctaccccctttctcctctccctgccctactgcctgtgcaagaaatgacaggagcctttgttcaaggtccccctgtggtgagatgatttccccgtctgtgttgatgcactttactgaaactcagtatgtttccatggtgtggagaggggcaggggggaatggaatattgtgtcggtagtgactttccggcctcttattcccactaat

SEQ ID NO: 160341 - DNA, 444 bp, Homo sapiens
gtaatgcattcccctaggatttatttgtctggaaagaattttatttctccttttcttatgaagtttagtttggctgaatattcaattcttggttggattttcttctcttaaggatgttgaatcttggcccttaatttcttttggcttgtagtrcttatgctgaaaggtctcctgttaccctaacaggtttccttttttaggtaggtgactagccccttctctttatttccctttaagattttttattttgcactgaatttggagaatctgattactatgtgtcttcatgatgatcctcttgtgtagtatcttgcaagggttctctgaattttctgaatttgagtgttgacctctctaggaaggttgaggaaatttttgtggacaatatcttcaaaaatgttttccatttgcttgttctctctctttttgagggacaccagtgag

SEQ ID NO: 160342 - DNA, 646 bp, Homo sapiens
caggctggagtgcaacatcccgatcttgtctcactacaacctctgcctcctgggttcaarctattctcctgtctctgcctcccaagtagctgggattttaggcaccccccaaccatgcctgactaattttctgtatttttagtagagatgggttcccgccacgttgaccaggctggtctcaaactcctgacctcaggtgatctgcccaccttggcctcccaaagtgctgggattacaggcatgagccaccacatcctgctcttctgagtcttgatgatctttgttgctatccagattatgaattggatgtctgtcattttaaccattttagtctgtttaagaaacattgctgggaagctagtgcagtcatttgaaagtaagaagacactctggctttttgagttgctgtaatttttggaatgtttttttctcatctgtgtagcctgatattcctttaatgctggaaatcactctatttggatggggcttttctgcttttgtaatcttttcacgcccttgcaagtttgactattgtataaattgagttcatttgactggttttatttctgcatgatttcaggggacgatggcttagctcagcactgcatgcctcagctcagcagtgttagagcatatcctcagtggc

SEQ ID NO: 160343 - DNA, 646 bp, Homo sapiens
caggctggagtgcaacatcccgatcttgtctcactacaacctctgcctcctgggttcaaactattctcctgtctctgcctcccaagtagctgggattttaggcaccccccwaccatgcctgactaattttctgtatttttagtagagatgggttcccgccacgttgaccaggctggtctcaaactcctgacctcaggtgatctgcccaccttggcctcccaaagtgctgggattacaggcatgagccaccacatcctgctcttctgagtcttgatgatctttgttgctatccagattatgaattggatgtctgtcattttaaccattttagtctgtttaagaaacattgctgggaagctagtgcagtcatttgaaagtaagaagacactctggctttttgagttgctgtaatttttggaatgtttttttctcatctgtgtagcctgatattcctttaatgctggaaatcactctatttggatggggcttttctgcttttgtaatcttttcacgcccttgcaagtttgactattgtataaattgagttcatttgactggttttatttctgcatgatttcaggggacgatggcttagctcagcactgcatgcctcagctcagcagtgttagagcatatcctcagtggc

SEQ ID NO: 160344 - DNA, 646 bp, Homo sapiens
caggctggagtgcaacatcccgatcttgtctcactacaacctctgcctcctgggttcaaactattctcctgtctctgcctcccaagtagctgggattttaggcaccccccaaccatgcctgactaattttctgtatttttagtagagatgggttcccgccacgttgaccaggctggtctcaaactcctgacctcaggtgatctgcccaccttggcctcccaaagtgctgggattacaggcatgagccaccacatcctgctcttctgagtcttgatgatctttgttgctatccagattatgaattggatgtctgtcattttaaccattttagtctgtttaagaaacattgctgggaagctagtgcagtcatttgaaagtaagaagacactctggctttttgagttgctgtaatttttggaatgtttttttctcatctgtgtagcctgatattcctttaatgctggaamtcactctatttggatggggcttttctgcttttgtaatcttttcacgcccttgcaagtttgactattgtataaattgagttcatttgactggttttatttctgcatgatttcaggggacgatggcttagctcagcactgcatgcctcagctcagcagtgttagagcatatcctcagtggc

SEQ ID NO: 160345 - DNA, 562 bp, Homo sapiens
tctggtctctcctgatgggagaagctcttcctggctgcttctagttggccatcttggcctaatacttctgcctatttttattgcttttttttgtaaattaatgttatatattctgaacataaaaaatgatggtttgaatatttttggtggcaataatatattatttagccatattggaattttaaaacatttaaaatgtatggtacgcatataaaaatatgaatactcacaattgcaaacataaacaaaaaakaatataaaataatactctcattattctgtaacatgtaaatcaaaagtttaatacaaacagaagctttggagattccttctggtgattgtgtcagtccattttgtattgctgtaaagtaatacctgagatgtagtaatttctaagtaaaagaggtctatttgtctcacagttctgcaggctgtacacaaagcacagtttcagaatctgcttctggtgagggtcttgggaggcttacagtcatggtggcagtcaataaaggaggtagcatgacacatggcgagagagagagagagagagagagggaaaaag

SEQ ID NO: 160346 - DNA, 562 bp, Homo sapiens
tctggtctctcctgatgggagaagctcttcctggctgcttctagttggccatcttggcctaatacttctgcctatttttattgcttttttttgtaaattaatgttatatattctgaacataaaaaatgatggtttgaatatttttggtggcaataatatattatttagccatattggaattttaaaacatttaaaatgtatggtacgcatataaaaatatgaatactcacaattgcaaacataaacaaaaaataatataaaataatactctcattattctgtracatgtaaatcaaaagtttaatacaaacagaagctttggagattccttctggtgattgtgtcagtccattttgtattgctgtaaagtaatacctgagatgtagtaatttctaagtaaaagaggtctatttgtctcacagttctgcaggctgtacacaaagcacagtttcagaatctgcttctggtgagggtcttgggaggcttacagtcatggtggcagtcaataaaggaggtagcatgacacatggcgagagagagagagagagagagagggaaaaag

SEQ ID NO: 160347 - DNA, 562 bp, Homo sapiens
tctggtctctcctgatgggagaagctcttcctggctgcttctagttggccatcttggcctaatacttctgcctatttttattgcttttttttgtaaattaatgttatatattctgaacataaaaaatgatggtttgaatatttttggtggcaataatatattatttagccatattggaattttaaaacatttaaaatgtatggtacgcatataaaaatatgaatactcacaattgcaaacataaacaaaaaataatataaaataatactctcattattctgtaacatgtaaatcaaaagtttaatacaaacagaagctttggagattccttctggtgattgtgtcagtccattttgtattkctgtaaagtaatacctgagatgtagtaatttctaagtaaaagaggtctatttgtctcacagttctgcaggctgtacacaaagcacagtttcagaatctgcttctggtgagggtcttgggaggcttacagtcatggtggcagtcaataaaggaggtagcatgacacatggcgagagagagagagagagagagagggaaaaag

SEQ ID NO: 160348 - DNA, 562 bp, Homo sapiens
tctggtctctcctgatgggagaagctcttcctggctgcttctagttggccatcttggcctaatacttctgcctatttttattgcttttttttgtaaattaatgttatatattctgaacataaaaaatgatggtttgaatatttttggtggcaataatatattatttagccatattggaattttaaaacatttaaaatgtatggtacgcatataaaaatatgaatactcacaattgcaaacataaacaaaaaataatataaaataatactctcattattctgtaacatgtaaatcaaaagtttaatacaaacagaagctttggagattccttctggtgattgtgtcagtccattttgtattgctgtaaagtaatacctgagatgtagtaatttctaagkaaaagaggtctatttgtctcacagttctgcaggctgtacacaaagcacagtttcagaatctgcttctggtgagggtcttgggaggcttacagtcatggtggcagtcaataaaggaggtagcatgacacatggcgagagagagagagagagagagagggaaaaag

SEQ ID NO: 160349 - DNA, 565 bp, Homo sapiens
ctgagcactatggtctagccaagttgagaaatacaattcatcatagaaagcaataaacaaccaatcagttgttgaatacattgtttggcaaaaactattgagrttgtgtttctatggtctgaaataaaatctcaattatatagatttgattgatattacacaaaaatttacctttatttccttagattcagtttatttctacagtgttgaaaaaactagcactttccaatttattaaaactgacctttagaaacaatgcttttaatatataagccatataaaataaggtattatgttttatcctattatattcaactcagcctcccttggatagatttcctcatttacaccatatacatatacatttattttaaccatttgatgatactgatcacatactgaccaataatgggacttttaggaaataattatatttaaatgaggtcctgatgtgggcttctcataataggattagtgaccttataaaatgagaccagagagcttcgtctttctccccacatgcaatgaggaatggagagaaccatttccagacactgtgttgtta

SEQ ID NO: 160350 - DNA, 549 bp, Homo sapiens
ggttatccacccatcttgcactcccaaagtgctgggattacaggactgagcaaccacacctggccaaccttgcctcatttctaccttacaattctgatatctgtattgaattcagtttcatggtctgcatatgtggcatgaccccaagccagcattacttgcacgccaggtgaatatcagtctcaaacagctgtgatcacctttgtttcactaacagctttttgactcactaaccaaaccaacactagttcctatagataatgtttgtaaaaaatattttcatgacaacggtaacacataatgttaaaaaatcaaacactacaaaaacatacaaattaaaaactaaaagacagtccactaccctatcgaacacccctgaagtkacaacttttgctaattgggtgttttaattcttctgaaagttaagcccataaccctaactaatattaaaagtaatatctttttcaatttaatcaatcttagtaaatatctatggactctgctttaaaagatgatgatggctttattttccatccatagtttttagca

SEQ ID NO: 160351 - DNA, 557 bp, Homo sapiens
gtggcagctgctgaacaggcaagccacaaccctgtgtcacatcctgccaaggggatcagggaactctcccgtatcataaacatataacatgaatgtatgtaaacaaatatcttagtgtatctcctgggtttaagaaatgcaccatgatttggttacactattttttaatattttaagaatattattgttattttacactagccttgagaagtaataatagtggtggtggaaactttagcatccttagtaataatagtagtaacctattttaaagaagcagaaattgagaagaacataattaaattacttcagaatatacagctaagaatagccagatacataaaggatatatctagatgtatatggataatgaattcactgtcttacaytccgtatctctggatttgaactgcaacatcaaataaattcaattttcattaaagcgtgtaaagatttcagagggacatttatatctctgaaaaatgctttcctggtttgggttatatataatatttagagtctattttggacactgaacagttgtaaataaacggttg

SEQ ID NO: 160352 - DNA, 359 bp, Homo sapiens
tgtaattatctaaatcttgagcttctcataaaatttctttaaaaaaaacattttttaacttttaaackgtaacttcataaaagtagagaaacttcgtagctttaacttagctcttgctacactaacatatttttataaagttgaattttagaaatcataaacacagagacctaaaaattatcctattattttcttaaaacaaagaatgataatccagttttagctgatgaccaaagtaagatttcattgtaaaattttagataaatcagagaatatgaaaaatggggaacactaggagttactttatgattctaaacttggcatttacataggattaaacagaatttaaattattcttt

SEQ ID NO: 160353 - DNA, 359 bp, Homo sapiens
tgtaattatctaaatcttgagcttctcataaaatttctttaaaaaaaacattttttaacttttaaactgtaacttcataaaagtagagaaacttcgtagctttaacttagctcttgctacactaacatatttttataaagttgaattttagaaatcataaacacagagacctraaaattatcctattattttcttaaaacaaagaatgataatccagttttagctgatgaccaaagtaagatttcattgtaaaattttagataaatcagagaatatgaaaaatggggaacactaggagttactttatgattctaaacttggcatttacataggattaaacagaatttaaattattcttt

SEQ ID NO: 160354 - DNA, 520 bp, Homo sapiens
tagtatgttttacactcctttgtgttttccactttgtgtgttttcataaaggtagatattgtcctttcacttccagatttggattcccttagttcttgtaggactggtctaggtgtgatgaattccctcaatatttgtttgtctgaagaagactttatttcttcttcatctctgaagaatagctttgctgtgtatagtatttttgtctagtagtttttttttatatatatataacactttgaatactttgaatgtatcatcccattctctcctgaactgaacagtttctgctgagaaatctcttggtagtctgatggggattttcatatatrtgacttgacgcttttctctggctgattttagaattctctctttgtcaattctctgtctttgccttttgacagtttgactaaaatgtgcctcagagaggacctttttgagttgaatgtatttgggaagttttgagcttcctctatctagatatctatttctttcccaagacttgagaagttttcagcta

SEQ ID NO: 160355 - DNA, 520 bp, Homo sapiens
tagtatgttttacactcctttgtgttttccactttgtgtgttttcataaaggtagatattgtcctttcacttccagatttggattcccttagttcttgtaggactggtctaggtgtgatgaattccctcaatatttgtttgtctgaagaagactttatttcttcttcatctctgaagaatagctttgctgtgtatagtatttttgtctagtagtttttttttatatatatataacactttgaatactttgaatgtatcatcccattctctcctgaactgaacagtttctgctgagaaatctcttggtagtctgatggggattttcatatatgtgacttgaygcttttctctggctgattttagaattctctctttgtcaattctctgtctttgccttttgacagtttgactaaaatgtgcctcagagaggacctttttgagttgaatgtatttgggaagttttgagcttcctctatctagatatctatttctttcccaagacttgagaagttttcagcta

SEQ ID NO: 160356 - DNA, 520 bp, Homo sapiens
tagtatgttttacactcctttgtgttttccactttgtgtgttttcataaaggtagatattgtcctttcacttccagatttggattcccttagttcttgtaggactggtctaggtgtgatgaattccctcaatatttgtttgtctgaagaagactttatttcttcttcatctctgaagaatagctttgctgtgtatagtatttttgtctagtagtttttttttatatatatataacactttgaatactttgaatgtatcatcccattctctcctgaactgaacagtttctgctgagaaatctcttggtagtctgatggggattttcatatatgtgacttgacgcttttctctggctgattttagaattctctctttgtcaattctctgtctttgycttttgacagtttgactaaaatgtgcctcagagaggacctttttgagttgaatgtatttgggaagttttgagcttcctctatctagatatctatttctttcccaagacttgagaagttttcagcta

SEQ ID NO: 160357 - DNA, 584 bp, Homo sapiens
tacccaacgcaaataccttctagcctttaaagtggggaaagagaaatacccaactccaattgcctcttagctgaggattgrggaggagagtaagctgacaagtactaataaatatcacagctcaggcgcacaagctcacagagcctaagacttaatcataaaattatagaacagtgcccgtccccatacatcttactattacatcagtagggcttctgtatagtaataagggattatagctgaaaataactgcaaggctcagactttataggaaggagtctctagggaaacccaaagcatggtttggctctgtgcccccactcaaatctcatgtagaattgtaattcccaatgttgggggagggaccttgtgggtggtgattgaattgtgagggcagatctcccttttgctattctcatgattgtgagtgtgttctcatgagatctggctgtatacaagtgtgtagcacttccccctttgtgcttgctctctctctgtctcattctctctctctcacttcaccatgtgaagaaggtacttgcttccccttcacccttctatgattgttaagtttcctgaggtct

SEQ ID NO: 160358 - DNA, 584 bp, Homo sapiens
tacccaacgcaaataccttctagcctttaaagtggggaaagagaaatacccaactccaattgcctcttagctgaggattgaggaggagagtaagctgacaagtactaataaatatcacagctcaggcrcacaagctcacagagcctaagacttaatcataaaattatagaacagtgcccgtccccatacatcttactattacatcagtagggcttctgtatagtaataagggattatagctgaaaataactgcaaggctcagactttataggaaggagtctctagggaaacccaaagcatggtttggctctgtgcccccactcaaatctcatgtagaattgtaattcccaatgttgggggagggaccttgtgggtggtgattgaattgtgagggcagatctcccttttgctattctcatgattgtgagtgtgttctcatgagatctggctgtatacaagtgtgtagcacttccccctttgtgcttgctctctctctgtctcattctctctctctcacttcaccatgtgaagaaggtacttgcttccccttcacccttctatgattgttaagtttcctgaggtct

SEQ ID NO: 160359 - DNA, 548 bp, Homo sapiens
gttagtagactcaaattaacatgtgatatttttcctcctgaagctcctacaataaagttacattttcatttatagcacaactatatactgataattttttaaagtgaaaaataattcattgaattatattagcttcattattttaccaaaaatatgtaaaactcctttgggtgccttgagtaactttaaaaattttacctacagggaaaatattatattttatagtaaatgaaatgaggaaaataaatatttggaaatagagaaaatataaaatgcatattttaattatatttacatatcattttaaaattttctgggtatctctcattttaattagaaattgataattttatatgaataaaaaacaataatgagttaaaaaggacatcatggargaagagtacatgagtttgtattttcaaagaaaaatagtggatgaaattttgttagaagaaataatttaagttaattttctaataattatatggaaaatttccaaatattgtaagtttcatagcaaatatcaagattactttgcaaatattttt

SEQ ID NO: 160360 - DNA, 351 bp, Homo sapiens
attaaattctggctctactactgaatgttttctgtacttatgtaagtcatctaactcttttggattttgcctttttgataaaataattraaataaatggtcattctaccaagtcttctacaaagactacaaatgtagtctactaccttctacaaagtaattctacctttatgggagtcaaataaacatgagctttggaaacttaaggcattgtgcaaatgtgtgatccctatttttattaatacccatttagcaatcaataaataatatgggacttaatagtgcattcccatactagggcaaaattttgaagacacaaagtatactagaatacatactctgtcactggagg

SEQ ID NO: 160361 - DNA, 579 bp, Homo sapiens
  misc_feature (1)...(579): n = A,T,C or G
gttaagtaatttattcaaagtaactcagtaagtcaggagtagagtccatatataaatctatacagtccaacttcagagtccctggtcttaatcactactcctcagcaattaagagaaaaatacagtagtctttcttatacatggggaatacattctaagatacccaggagatgcctgaaacatagtatatatggtactgaaccttatatattaccatgttttttcttatacatacatagctataataaagattaatttataaattaggcacagtaagaaattaacaataactaataaaaaacagaacmattatactgtaataaatatactgtaataaagattatgtgaatgtggtctctctctttctcaaaatatattaatatttttggaccagagttgactgtgaataactgaaaccacagaaattgaacctgttgataaaggaggactattgtatatacaaatatacacctcaaacattacgtagattcctataaatataattctggacttcaccatttatcttgccttacagagcattgaannnnnnnnnnnnnnnnnnnnnnnnnnnnnnnnnnn

SEQ ID NO: 160362 - DNA, 584 bp, Homo sapiens
ctggaatttaaaaatgcaattatcttactgaaaaatccaccagcgtcctttaatagcagaattgatcaagcagaggaaagaattagtgaccrtgaagaaagattatttgaaaatgcacactcagtagagacaaaagaaaaaatagtaaaaaacaataaagcacatctacaggatctaggaaagagcttcaaaaaggcaaatctaagagttattggccttaaaaagcagatagaaaaagagatggggtagaaagtttattcaaaaggataacaacagcaaacctcccaaatctagagaaagatgtcaatatacaagtacaagaaggttatagaacaccaagcagatttgacccaaagaagactacctcaaggcatttaatgatcaaactctcaaaggtcaaggataaaaaaaggattctagaagcagcaagagaaagaaacaaataacatacaatagagctccagtacatctggcagcagacatttcagtggaaaacttacaggccagaagttagtggtgtaacatatttcaagtgctgaaggaaaataacttttaccctagaatagtatatccagtgaaaataa

SEQ ID NO: 160363 - DNA, 447 bp, Homo sapiens
cacacttcatgtgtgtgtgtgtgtgtgtgtgtgtaatatattgacatatattacatatatacatatatatgttattaggtatcccctggccatgcattggaaacctggaagtaaatgtaagagcacggagaatatcccaagagacttactctattattggctcagtgagtgaacgaaggaacaccaaagctcaggcgaggtttggaatatatccacttttttctcttattttctccattctttcgtgctgtgttggtgattgcaactgatggcagtgagagactgaaagagaaaaaatttgtggaaggaaaacctttccctgtcaattttacagaaatgtgtttccaagatggtgaatccaacctctattctgttttgctttagttttttctctctctctttgttattccasttggatgtgggagccattgtagaaatacatggcag

SEQ ID NO: 160364 - DNA, 504 bp, Homo sapiens
tattttatgaatcctatactccagtgttgggtgaatatatatttaggataattaaatcttcttgtgaattgaaaactttatcataatgaaatgccattctttgtcctttcggattgtttttggtttagagtctgctttgtctgaaatcagagtaccaacttctaccctcttgtttttttttttccatttgcttgatagatatttcctcatcccttttctttgggcctgtgggtgtcaytgcatttgagatgactctcttgaaaatggcatactattagagcttacttctttatccaacttgtcactttgtaccttttaaggggggcatttatcccatttacattcaaggttaatattgagaggtgaatgcttgattatggcattgtgttgttagctgattggtatgtagacctgattgtataattgctttatagtgacagtgggatatgttgttaagtgtgttttaatggtggcaggtagtagtcttttattttcaggtttagc

SEQ ID NO: 160365 - DNA, 514 bp, Homo sapiens
ctatactccagtgttgggtgaatatatatttaggataattaaatcttcttgtgaattgaaaactttatcataatgaaatgccattctttgtcctttcggattgtttttggtttagagtctgctttgtctgaaatcagagtaccaacttctaccctcttgtttttttttttccatttgcttgatagatatttcctcatcccttttctttgggcctgtgggtgtcattgcatttgagatgactctcttgaaaatggcatactattagagcttacttctttatccaacttgtcactttgtaccttttaaggggggcatttatcccatttacattcaaggttaatattgagaggtgaatgcttgattatggcaytgtgttgttagctgattggtatgtagacctgattgtataattgctttatagtgacagtgggatatgttgttaagtgtgttttaatggtggcaggtagtagtcttttattttcaggtttagcattgtcttaagaaccttttgttt

SEQ ID NO: 160366 - DNA, 577 bp, Homo sapiens
tatttggagaagcaaataacctatattagctaaaataatcttacaaataaaaaaatgtttgcagtacttacagtaattgaggtcaagacctattttagagctgtaataatcaagatattgtgttacagaagaaacagaggagtccagaattaatccacacaagtatggatcagtccattttgacaatgttcccccagaaaaaaaaaaaacttgatccctaacaatcatgtcatcaatataatatggatcatagagctaaatattaaacatgaataggacaatagttactagaggaaaatttatgagaaaatcctattaaattggagtaaggttttgtgagagaggacaaaatatmccctatggccaaaagaaaaatgaataaattggagttcatcatattaaaaaatctcctcctggtcaagcactcacaactgcccacttcttacccccggttttgtcatgactcaaattcagtcaggctttctcctccctatgggcctctgaacactgcttgcctccagcctaagaaaacactaagggaaacatggccccttattaacttatctcaagaatttgc

SEQ ID NO: 160367 - DNA, 577 bp, Homo sapiens
tatttggagaagcaaataacctatattagctaaaataatcttacaaataaaaaaatgtttgcagtacttacagtaattgaggtcaagacctattttagagctgtaataatcaagatattgtgttacagaagaaacagaggagtccagaattaatccacacaagtatggatcagtccattttgacaatgttcccccagaaaaaaaaaaaacttgatccctaacaatcatgtcatcaatataatatggatcatagagctaaatattaaacatgaataggacaatagttactagaggaaaatttatgagaaaatcctattaaattggagtaaggttttgtgagagaggacaaaatatcccctatggmcaaaagaaaaatgaataaattggagttcatcatattaaaaaatctcctcctggtcaagcactcacaactgcccacttcttacccccggttttgtcatgactcaaattcagtcaggctttctcctccctatgggcctctgaacactgcttgcctccagcctaagaaaacactaagggaaacatggccccttattaacttatctcaagaatttgc

SEQ ID NO: 160368 - DNA, 408 bp, Homo sapiens
ctaaaagtaatttcccatcaaaattttctgcttgctttaaaactctagacttcgagcagaaataactacttagacttcacccgaggttagatcataaactgcctaaaatttaaaattaaagtatgacccaaataatttatttattackatatcaacgtacctgtcccctgaatcccttaaggaacctaagttcaagttcactgtgttaacgtagtccaaacaagaaagccacaaagttttatttattttaattgagaaaacttttctttaaaaataaaaaaagtgttaagggggtacagtgcaggttttgttgcttgatgctgaggtttgggcttctattgatcccattgcccaaggaatgaacatagcacccaataggtagtttccaacacttgcatctctcccctg

SEQ ID NO: 160369 - DNA, 590 bp, Homo sapiens
aagaagcagtatcagtgtccaaaaataggaaaaaaaatcaaatcaaatatggcataggatgatttgaagaatatttattaacactgaaaaatactgtgaaacaatgttatgcttttcaratgatacaaaactatttataaatattatcctaatgttttaagtatatatttatgtgtatgtgtttacatatgtgctgatttatagcatatatacaaataaaatctaagaatagaaggaaaaacatgattttcattttcttcaacattgcctgtaattcctaaattatctacaatgaacacagattgaagttaaaattagaaaaagaacgtttttaaagtacattaaaaataacaagatcaaatatcctgaggagtttaaaaatcatacatcttggagaaaaataaatccatctgcactagatgggttttcttaaatcaatattaaaaagttaatgttttagtttataaaggaatagcttataagtagaaaagattccatctatttttttaattgaaaaaaatgacaatttacatttacatagcataagaaaatctgaaagtgctatttcaaagaccgctattcactcacca

SEQ ID NO: 160370 - DNA, 322 bp, Homo sapiens
tgtgtagcacctcccctttctctttcttcctcctgttccaggcatgtaagacgtgcttgcctccccttcaccttccaccatgattgtaagtttcytgaggcctcctcaaccatgcttcctgtacaccctgtgaatctgtgagctaactaaacctcttttatctataaattacccagtctcaggtatttctttatagcagtgtgggaacagactaatacaccttgtaagaagaaacagaagaacttgcttactctatttgctctctgccatgtcagggtacgatgagaagatggtcatctgcaaaccaagaagtgggcccaca

SEQ ID NO: 160371 - DNA, 535 bp, Homo sapiens
tgcaccctttggaatagggattcaactagactgtggggacctgaaagagaaggagtcataaaataaatatctaaaacttactctctttcggccctttgaacttttcctggtgcctcccattgcctaaacccactggaagccaaagtacagtgatgaaaccaaaaataggtaacgatcctagggtacagagaaggttggaaagtatggagagggacaaacgaaaaatatctagcacagatgytatatctctagttttaactgctcttctgagatcttgaccaaaatttccattttcatctccaatctacttgcattacacctatgggtcttaaaattaatttgcccacttcttctgtttttcttatggaaactttttcatttagtgatgcaaatattttctctcaatccaaagaccatggaatgtccttgattttccttctcctatagctctcccattgaggtctggcaagtattttttcatagaaacatttttttgaattctgagctctccttttcaattccattcctctaatca

SEQ ID NO: 160372 - DNA, 552 bp, Homo sapiens
ctgggaaagagctgcaccctttggaatagggattcaactagactgtggggacctgaaagagaaggagtcataaaataaatatctaaaacttactctctttcggccctttgaacttttcctggtgcctcccattgcctaaacccactggaagccaaagtacagtgatgaaaccaaaaataggtaacgatcctagggtacagagaaggttggaaagtatggagagggacaaacgaaaaatatctagcacagatgttatatctctagttttaactgctcttctgagatcttgaccaaaatttccattttcatctccaatctacttgcattacayctatgggtcttaaaattaatttgcccacttcttctgtttttcttatggaaactttttcatttagtgatgcaaatattttctctcaatccaaagaccatggaatgtccttgattttccttctcctatagctctcccattgaggtctggcaagtattttttcatagaaacatttttttgaattctgagctctccttttcaattccattcctctaatcaatatc

SEQ ID NO: 160373 - DNA, 510 bp, Homo sapiens
tagggattcaactagactgtggggacctgaaagagaaggagtcataaaataaatatctaaaacttactctctttcggccctttgaacttttcctggtgcctcccattgcctaaacccactggaagccaaagtacagtgatgaaaccaaaaataggtaacgatcctagggtacagagaaggttggaaagtatggagagggacaaacgaaaaatatctagcacagatgttatatctctagttttaactgctcttctgagatcttgaccaaaatttccattttcatctccaatctacttgcattacacctatgggtcttaaaattaatttgcccacttcttctgtttttcttatggaaactttttcatttagtgatgcaaatattttcyctcaatccaaagaccatggaatgtccttgattttccttctcctatagctctcccattgaggtctggcaagtattttttcatagaaacatttttttgaattctgagctctccttttcaattccat

SEQ ID NO: 160374 - DNA, 510 bp, Homo sapiens
tagggattcaactagactgtggggacctgaaagagaaggagtcataaaataaatatctaaaacttactctctttcggccctttgaacttttcctggtgcctcccattgcctaaacccactggaagccaaagtacagtgatgaaaccaaaaataggtaacgatcctagggtacagagaaggttggaaagtatggagagggacaaacgaaaaatatctagcacagatgttatatctctagttttaactgctcttctgagatcttgaccaaaatttccattttcatctccaatctacttgcattacacctatgggtcttaaaattaatttgcccacttcttctgtttttcttatggaaactttttcatttagtgatgcaaatattttctytcaatccaaagaccatggaatgtccttgattttccttctcctatagctctcccattgaggtctggcaagtattttttcatagaaacatttttttgaattctgagctctccttttcaattccat

SEQ ID NO: 160375 - DNA, 552 bp, Homo sapiens
ctgggaaagagctgcaccctttggaatagggattcaactagactgtggggacctgaaagagaaggagtcataaaataaatatctaaaacttactctctttcggccctttgaacttttcctggtgcctcccattgcctaaacccactggaagccaaagtacagtgatgaaaccaaaaataggtaacgatcctagggtacagagaaggttggaaagtatggagagggacaaacgaaaaatatctagcacagatgttatatctctagttttaactgctcttctgagatcttgaccaaaatttccattttcatctccaatctacttgcattacacctatgggtcttaaaattaatttgcccacttcttctgtttttcttatggaaactttttcatttagtgatgcaaatattttctctcaatccaaagaccrtggaatgtccttgattttccttctcctatagctctcccattgaggtctggcaagtattttttcatagaaacatttttttgaattctgagctctccttttcaattccattcctctaatcaatatc

SEQ ID NO: 160376 - DNA, 573 bp, Homo sapiens
cacagaatgaggtagtgccagagagaccagaacaaaaggcttttctttgtcgagagacagacagagagagagactaagatgtatttccaaactaaaatcattttacaagtattcgtaagtgtatttttaaaaagcagtagaaaaatattttcaaggttctatttttagattgctaagctctgtgtaccagaatgttataaaatatacataactatcatcttggcaaaataaattcaaatatgggctattctattttctgctttttagagtgaagaaaagtttcaaacatcaggaaaaaaaaacagcgcattgcaaaacatattagactgaacctatcgatgacaaaatrcaactgtgaaatgttgagactgttcatcaaagctggacataagcaggatccattccattttcaaagaggtagagtgactgtctgaaaaaacaaaagtaactagaaaattgataaaactgaccgagtcatctatgcagaaagttgcttatatagacccataatataatacatttgtgatcataaagcacaattttgattttggaattgcaatcatagttcaaggc

SEQ ID NO: 160377 - DNA, 620 bp, Homo sapiens
ttgcatgtgtcaagtgcacatagtggtgtgtaactcccctcttcagggtggaaccaagcattgaagcagaaggcaagctgcccaattttaagatcacacccgaactggtcctttcagccccacatattccraaggttttaacatctgtagcagaaaatctgtcttccaataacattttgttgaaacagctttaaaaccagatatataattactgatcatgaaatagtgtttacctacacttagttactaaaagtcctatctctatgatttaaatattaccaaaaaaaaagtttaaccaatttgcagcaaaccaaggcatctattaatatctcacaaatgcagtttttaaaataatgtttaatgttgcctccctaccacagaaactgtgctaaataaatggacaataactcttttttcagggttctctgttttactcagccttttgtagtgattcctccaactctacagtaagtataagtcccttccaaagacaaggaagaattttacctctttattctgataaaaagcatgagtttcaatgatataataggagagtaggagcttatatgatacagaaagaaacacaggaagaaaataaaaataaatagcaaataagtttc

SEQ ID NO: 160378 - DNA, 619 bp, Homo sapiens
ggtggacatactcaaacaataacagatggagcgccgttttcaacaggaaatggctaaaccaccaaaataaagattcatatactagttgtctccctcagtgaaaaaagaaaaaaaagcttttttttttcattttcatggttaatcatattgatacactttggatttttattgttgttattattttacttttaaataccctacaacttcactgaggtcccatcttgaccactcatttctgtgtagaaagtttcttataatataaagaagaggttaaaacacactttmatgggtcccatttccagagattctggttcaataaagcagaatggagcccataaatttgcattttttaaatggggtgtttctgtgttgcccaggctggtctcaaactcctgggctgaactgatcattccacctcatcctcctgagtagctggaattacaggtgtgccactgtgcctggccatatgaatttgcatttctaacaggcttctagaggatgcctgaacaagggcaactagtgcaaggactaccttttcagaaacaaaaccattcctttgctgtgaaactttgttatcaaatccaaggggagtcccaaaatgctatctgaaccacatgaa

SEQ ID NO: 160379 - DNA, 619 bp, Homo sapiens
ggtggacatactcaaacaataacagatggagcgccgttttcaacaggaaatggctaaaccaccaaaataaagattcatatactagttgtctccctcagtgaaaaaagaaaaaaaagcttttttttttcattttcatggttaatcatattgatacactttggatttttattgttgttattattttacttttaaataccctacaacttcactgaggtcccatcttgaccactcatttctgtgtagaaagtttcttataatataaagaagaggttaaaacacactttcatgggtcccatttccagagattctggttcaataaagcagaatggagcccataaatttgcwttttttaaatggggtgtttctgtgttgcccaggctggtctcaaactcctgggctgaactgatcattccacctcatcctcctgagtagctggaattacaggtgtgccactgtgcctggccatatgaatttgcatttctaacaggcttctagaggatgcctgaacaagggcaactagtgcaaggactaccttttcagaaacaaaaccattcctttgctgtgaaactttgttatcaaatccaaggggagtcccaaaatgctatctgaaccacatgaa

SEQ ID NO: 160380 - DNA, 587 bp, Homo sapiens
caggtacacagacacgccactgctctgagggagcccatagagaaaagggaggaaaggagatcagtgagtggcctcattgcatctgaccattgtaatgataggaggaaggatgtacaaaaggctgcaggagggagtaaattgcacctgcctttccatgataactctggtgggactggatgaacttgacactctggaacagagattattccatgcattcaagaagaaatgagrcatctgaaatttctaagtggagttacagccattaccaagttcaggattggaaatgggagtaagtggtgggaaagacagaatcaagagataagcagccagggaaggagtagggaataaaataaattttatctaaaccattctaatttcttgttgctctctccctgctcaacaaccccactgaggaatttaatttagcttagtataaaataatctacaaatatattcattcatcaatttctttttaggcaattattctgagatttctagctaatgggggggtactgaaagatgtatgaaaatgttgatttttggctttaagagctcctatatgaagtaagaaagccaactctgaattt

SEQ ID NO: 160381 - DNA, 587 bp, Homo sapiens
caggtacacagacacgccactgctctgagggagcccatagagaaaagggaggaaaggagatcagtgagtggcctcattgcatctgaccattgtaatgataggaggaaggatgtacaaaaggctgcaggagggagtaaattgcacctgcctttccatgataactctggtgggactggatgaacttgacactctggaacagagattattccatgcattcaagaagaaatgagacatctgaaatttctaagtggagttacagccattaccaagttcaggattggaaatgggagtaagtggtgggaaagacagaatcaagagataagcagccagggaaggagtagggaataaaataaattttatctaaaccattctaatttcttgttgctctctccctgctcaacaaccccactgaggaatttaatttagctyagtataaaataatctacaaatatattcattcatcaatttctttttaggcaattattctgagatttctagctaatgggggggtactgaaagatgtatgaaaatgttgatttttggctttaagagctcctatatgaagtaagaaagccaactctgaattt

SEQ ID NO: 160382 - DNA, 585 bp, Homo sapiens
gacaccaaggacattgggtaggactgccaatttcatattttgttcatgcctatgttattcacaaaccttctcaatttttattatattcaaataaaccttatgctggtgaaatgttgcaaggaactcaatgataaatattacattaagcaaaatgtagtttggtatggtgatccaagggctgactttgaagtcacaaagacaagggtttgaattctggcaagtctcttaatctctctaagatgaaatgtcctcatctgtaaaatgrgaatgaaggtaagtgacttgcaagattaattaaggattatagataatatatataaacctctcatatcacatgagtgttgaaataaattatatctgtggttattagtgtaatctataatagcatatactccaaaacataaatgatctaatcaaaatatgtgctaaataatgacaaataataccttacattcattgagcacttcactgagctggacaacatcatgcaaatatgttttaggaagatgataggtacctggtgatcaattctcttctactgcatgctcagttatatctaaggtatatctattcaaagtgatggat

SEQ ID NO: 160383 - DNA, 585 bp, Homo sapiens
gacaccaaggacattgggtaggactgccaatttcatattttgttcatgcctatgttattcacaaaccttctcaatttttattatattcaaataaaccttatgctggtgaaatgttgcaaggaactcaatgataaatattacattaagcaaaatgtagtttggtatggtgatccaagggctgactttgaagtcacaaagacaagggtttgaattctggcaagtctcttaatctctctaagatgaaatgtcctcatctgtaaaatgggaatgaaggtaagtgacttgcaagattaattaaggattatagataatatatataaasctctcatatcacatgagtgttgaaataaattatatctgtggttattagtgtaatctataatagcatatactccaaaacataaatgatctaatcaaaatatgtgctaaataatgacaaataataccttacattcattgagcacttcactgagctggacaacatcatgcaaatatgttttaggaagatgataggtacctggtgatcaattctcttctactgcatgctcagttatatctaaggtatatctattcaaagtgatggat

SEQ ID NO: 160384 - DNA, 636 bp, Homo sapiens
ttattttttcttacctcagacaaaattataattttacctgcaataatgtgatttgtcagttgaatagtaagtttcctatcccctgaaaaaaaaaagaggaaagaaaaagcctatttttgtaaattcagattatttataaggattggtttaaattaaaaccagtgtttttactgaggaaaaaaaatcttgaactaaaacaaaaaaaaaagaagaagaaaaggaaaagamtaaaagaattacaggcggtgcatggtggctcacacctgtaatcccagcactttgagaggctgaggcgggcggatcacgaggtcaggagatcgagaccatcctggctaacgcggtgaaaccccgtctctattaaaaatacaaaaacttagccgggcatagtggtgggtgcctgtagtcccagctactcaggaggctgaggcagaagaatggcgtgaacctgggaggcagagcttacagtgagccgagattacgccactgcactccagcctggcgacagagcgagactctgtctcaaaaaaaaaaaaagaattataaaagagaacccattaagattctattaatttatgttatagaaaaaattaaaactatttgttttcaccacaagcatataaagaatattttttcata

SEQ ID NO: 160385 - DNA, 636 bp, Homo sapiens
ttattttttcttacctcagacaaaattataattttacctgcaataatgtgatttgtcagttgaatagtaagtttcctatcccctgaaaaaaaaaagaggaaagaaaaagcctatttttgtaaattcagattatttataaggattggtttaaattaaaaccagtgtttttactgaggaaaaaaaatcttgaactaaaacaaaaaaaaaagaagaagaaaaggaaaagaataaaagaattacaggcggtgcatggtggctcacacctgtaatcccagcactttgagaggctgaggcgggcggatcacgaggtcaggagatygagaccatcctggctaacgcggtgaaaccccgtctctattaaaaatacaaaaacttagccgggcatagtggtgggtgcctgtagtcccagctactcaggaggctgaggcagaagaatggcgtgaacctgggaggcagagcttacagtgagccgagattacgccactgcactccagcctggcgacagagcgagactctgtctcaaaaaaaaaaaaagaattataaaagagaacccattaagattctattaatttatgttatagaaaaaattaaaactatttgttttcaccacaagcatataaagaatattttttcata

SEQ ID NO: 160386 - DNA, 577 bp, Homo sapiens
ttaataccatagaaatgtatggaattaaagattatcttaacacattatactttttaagttttattttttaattgacatataataattgtacatatttatggggcacatagtgatatttcagtacatgtaaggtgcaatgatcagatcagggtaattgggttttctgtcatttcaaacattaatcatttctttgtgttgggaacattaactatcttccttctagctatttgaaattgtatgataygctattgttaactatagtcatcctatagtagtatgtaactctagaacttattctttctatctagctgtaattttgtagcccttaacaaatctctgtatcatccccttccccctactcttcctggcctctagcatcctttgttctttttacttttgtgagatcaactttttcagcttccacctatgagtgagaccatgtagtgtttaattttctgttcctggcttattttacttaacataacgtccttcagttccatctgtattgctgcaaatgacaggatttcattattttttgtgactgaatagtattctgttggatgtgtataggacattt

SEQ ID NO: 160387 - DNA, 583 bp, Homo sapiens
tgtaggtcatgactaataaggttaagcaactaagattgcttcctgctgatattcattgcagatagaattgtctccatttcaggttctgtctgtatagcataaaccttttgttgtacaatttttgagaatggtttcagttttgaaaatataatgattttggccactagaacagaatttagttccccctgatttgaactgattctaatttgcacatactattatacgtctcaaattcatctagagcctgaaaggctggttggctcatgttgaacccctaattctgataagcacatatttcagaaagagatcaaaacaccacaaatcttctctaatgaactgcggtttttagttctaaacaactcctaaaatttaaacaagtttacttctccaacttcctttatagcacccaaatgcytagattagattaatgtgttagattaatacattgcattcagtagatgcttaatacacttttattgaattaactagtgttaaagtgaactaaatatggcctgagaaggactctgtacctctatatttgagtccttgtggacaaactgcaacctagcttaataggtagaca

SEQ ID NO: 160388 - DNA, 614 bp, Homo sapiens
aagctttatcttgttacttgaggtaaactcaggagaatacagtaatttcccaattatttaggtttaaatgtagtccagttcagagcactttcttttcttcccttctcccaggatggcatctcttttagcgagggggcagggactgggggcatcgcatatggcattatggcattggatamgcagagaattctgctctggaatttactgaggtggctggtaattgtgcatgctcacatacactgggtctgcatctggtttcctatttgcacagtccacattggtatcttcagatgtggtcttcatggactataagatatttgggcctctcgctgtttcctttgtataagttattctctggagtgaagggaaggtttggtcagcctcatccctctttggggctatgaacaacccagagctgccatcaggctatctgtcccactacttcttctcattgtgttcaaagcacttctttgaggtcatctgtgtttcattttcagagttgcagatatgaagcagacacaaattcctttatggaaatcccccaaagttttatggtgggcctggtatccaccacacttcccgaagaccagttcttggagtgggccggaaaaaga

SEQ ID NO: 160389 - DNA, 398 bp, Homo sapiens
tgatcccatttgtccatcttttctttggttgcctgtgcttatgggatattgctcaagacatttttgcccagaccaatgtccwggagatttcccccagtgttttcttttagtagtttcatagtttgaggtcttggatttaagtctttaatccatttttattttatttttgtatatggtgagagataagggtctagttttatttttctgcatatggatatccagttttcccagaaccatttattaaggcagaaagagactgtcttttcccaatggatgttcttgatacctttgttgaaaatgagttcactgtagatgtgtggatttatttctgggttctctattgtgtttgattggtctatgtgtctgttttcatgccagtaccacgctgttttggttac

SEQ ID NO: 160390 - DNA, 604 bp, Homo sapiens
tctcatttacaaaatggagataataatagtatctgccccaacaagattaggtgagaaataatgagttatcgtatgtgaaacattttctgtttgttttttagttttttttaatgtttattttaggttcagaggtacatgtgcaagtttgttatataggtaattgtactcaatgtttagctcccacttataagtgagaacagaaacattccgaatagtactaggcacgtattaagcattcaggaattgttagctattgtttcctaaggcaccatctattcataatattttgttgtattttcctgacgggcaagccttaaatgcttattckttttcttttattttgtcttcttttttttggaggggggacatttaatttaactatagtgccaggtctctttaaaagatattgattaattccaattagtttggccttaaacatgaaaaaaatttagtctagggacattaccaaaagtattattttcttacacatgttctcagtaagtcttagtaaaacatttcaaatgaagacctaactctgaagtctggaatatttgttgacattattgtcaacattattgttctgatcacagagtgtctcctggag

SEQ ID NO: 160391 - DNA, 343 bp, Homo sapiens
ccacacaactaatgagagttagagcgtgggtatgaatccagctagtttgactggtgagtccctactcttagcaactacccggaagagctctattccagtgtatgatggctcttttagaaaggattttttttttttgtatgatagttttttctttayttttggaatgattactttgtccaactttaagttaacacattgctttccaaattaactaactatccagaaaaataatttaataacattgattagaaggaggaaaatagcaactgccatcaatcacaccctgattacctgccagacactggcttcagtaccttacattttctcatttcattcttacatc

SEQ ID NO: 160392 - DNA, 548 bp, Homo sapiens
tttttctacaatcagctgatgactcaagtgttgaatttttatatctttcacatattatctaataagtccatttggaatgtgtaagctaaattataacaagaagttatatttgaataatgctttagttaaaatataaaagttaaaacataatttcatttgcttttcacatcaactttataagaaaggcaggaagttactcgtgtcctcattttgtctgaaaccataatccaagtttcctaacttcttgttcaaatayctaaatgtctcgtccaaagattgagtcttaccaagagtaggccaaatgctctgcacaaaaatggatatcttaaaacaatctccataggaggaaagtgctgttataatccttattttacaaaatgagaaaactgaagcatcaagacataaatatcgctattttagtttcctattgctgctgtaacaaattaccaaaaatagtgccttatagcaacatgaattcattgtcttccacttttggaggtctgaagtccaaaatgggtctcactgggctaaaaaggtactggcagtgt

SEQ ID NO: 160393 - DNA, 381 bp, Homo sapiens
ccggcctagtttagaagatcctggtttgccaattgcaaggtatgtctacttaagtaagttacccaacctctctgtcttagattcctcattgtaaaatgtggacaatgatagaacctatcacttgggattgttttgagaattaaattaattaatataggtagaaaatttatgacagcatgttacagctggtaagtgctccacaagtgttaggtatttgattgtcattgctgctgctgctactattactactactactactaattctactaatattgctgcgacaattacttgtgggcagacttaatcataggatggtggttacaactgaawtgagacagatgttatcaagatgattaaatagaggtgtccagcactcacctc

SEQ ID NO: 160394 - DNA, 583 bp, Homo sapiens
aatcatttcttagtttatatatagtgcttttaatgtaatgtccaagaactcttctctaaccttaggttccaaagatattctcctaatttttccaatagttttatatttttacatttaaacccatgatacatttgagttaatttttgataaggtataaggtttaggttgggattaatttttttgcctatgcacacccagtgactccagtgccatgtgttcaaaaggctgtttctccattgaattgtgttaataactttgtcaaaaccaatttgttatatttgtatttgtctgtttctggggtctctattctgttctattgatctttgtgtctattcccctgccaatactacgctgtcttgaatatagtatctataaagaaatccttaatattcaattcaaaattattcaattcaaatttcaattcaaaattcaattcaattgattcaattgattcaattcaattcaattcaattcaattgattcagtygattcaattcaattgattcaattgattacagtatctataaaaaaatccttaatattcaattcaaaattattcaattcaaaattattttagctattc

SEQ ID NO: 160395 - DNA, 420 bp, Homo sapiens
gtgctttaagggagccattattataaagcataatgggagtggtttgctataattagggggtcagggaaggctttagagaagtggccttatttccttgggaatttcaaaggacaagtgggactttgccaaatggatatgaggggtagacttttggggcagaggaatagcatgagtaaagttatggaaatacaatttttcagccttttggagaacaggatatcatgtgatggtgctgagttgcaatgtgagtggacagcagatgaaaagagttccaagaagagtgctgcartagacagactggggtcggtagccaggaagccttgaatgccctactaagaattttggacctaaatccatctaaaacacaaaagtgacatgctcacactggtgttttacagagaaaaaaaagaagatgcaaaa

SEQ ID NO: 160396 - DNA, 346 bp, Homo sapiens
gtaaatctgatagccctgtgcattcctaattataagcaaagcagagaactaggagttagattgatattgccagaaaatgtgccagagtctataatttgcctcttccctcactggcctctacagtcaagcttgaaatttaccccctttgcctcctaccgtcacgtaactcttttaaatgaggatgcctggagcagtgtgtgtctcataccaaagacctgttctgtacatatatttctgagaagttgtaggtaaatcaaatttttgcaagtccarttgaaattgaaatgcatagggagagctagctatttagggatatcccatagtgagatctattgtaaagtgaatt

SEQ ID NO: 160397 - DNA, 579 bp, Homo sapiens
gatgttaatgaccctgtggcgttcaataggtagatccaaaaaataccctttgcggtgcagtttttaaaacgcccttcttggattttcacagtagctaaatgttagagacaaatttgaaacacaattgtttgggcctttgaaaaccagataatcataagtacatttcatcaggttcaaagaaagttcagaaacatgaaaatgtaatttcaattgcaaaagtcataagaagaatactttattttcattacaataaaaacatcttactaagaaaagatcagtgcaaatgaaataataacaaagaattaagggcaactgatttaatttggttcaaaaatgggagaagagactaagggagaagcattagaaacccaaattcacaccctgcagccccagaagagcactgtagtattgaatttaatatagggaatttccattctggaccctaagaaatatctcacagtaataaagtaggtttcttgaggacaaagtacaacagcatctatatcctaattcagaaaygcaaaggagcccaagcttcagtggctttagattataagacaaaagttagaataagaaaac

SEQ ID NO: 160398 - DNA, 477 bp, Homo sapiens
aggccttcacattcactcaaccactcactcactgactcacccagggcaacttccagtcctgcaagctccagtcatggtaagtgccctatataggtgtaccactctttatcttttataccacatttttactgtgtttagatattgatatggtttggctgtgtccccacccaaatctcattttgaattgtagctaccmtaattcccacatgttgtgggagggacccagtaggagataattgaatcatgggggcggttcccccatactgttcttgtgatagtgaataaatctcgcaagagctgatgattttataagagatttctcctctctggcttgccaccatgtaaggtgtgccttttgccttttgccatgattgtgaggcctcctcagccacgtggaattgtgagtccattaaacctctttttctttataaattacccagtctcgggtatgtctctatcagcagcatgaacacagac

SEQ ID NO: 160399 - DNA, 515 bp, Homo sapiens
aagtcattgagtgggagaaaatagttgcaaaagacacatctgataaaggactgttgtccgaaatatacaaagaactctttaaactgacaaaaagcaaatgaacaacctgattaaaaaatgggcaaagacctaacagacacctcactaggtagctaataaacatatgagaagatgctcaacattttatgttattaaggaactacaaactaaaacaacagtgacatacactacacacctattggaatggccaaaatctgacacactaacagcaccaaatcctcaaaaggttatgaagcaccaggaactctaccatcactttggaaaaaagcagtttctcacaaagctaagcatgttcttaccatgcgatacagcaattgtgcttcttggtatttttccaaatgagttgtaaactctgtcctcaccaaaacctgcaaacagattgtttagagcagctttattcataaccayccaaacttggaagcaataaaaatgtcttccaggagttgaaaggataa

SEQ ID NO: 160400 - DNA, 592 bp, Homo sapiens
tcccagcactttgggaggctgcggcgggtggatcacctgagggtcaggagttctagaccagcctggccaacatgacaaaactccatctctactaaaaaaaaataataataataaaaaaaaatatatatatatataaaatcaaattgggcgtggtggtgtccacctgtaatcccagctactcgggaggctgaggcaggcgaattgctcgaacctgggaggcagaggttgcagtgagccgagatcatgctactgcactccagcctgggggacagagcaacactccatctcaaaaaaaaaaaaaaaaattgattmgtattactttccctatttatctaacagtattattgcatagaatcactaacggaatttatatttggtgttttaaactgtaaaatgctatacaaactaaagactagtattagccttataataaagaagaagaaagaggaggaggaggttggcagtttatggccttctgcctgaaataaccaaatttgtgtctcaatttcagggcatatattttatagttaactttgccaccttgtaactgaaacatttacagtgggagttggacaagataacagacaacttg

SEQ ID NO: 160401 - DNA, 506 bp, Homo sapiens
atctcagctactcgggaagctgaggcacgagaatcatttgaacccaggaggcagaggttgtagtgagctgggatcacaccactacactccagcctaggcgagcagagagagactccagcgcaaaaacaaaaaaaccaaacaaacaaaaaaaatagaagcagcagaaccgtgcagttattattcattcttgatacctccttctcccttaatctcttgtaatcaatccatcaccaagtcttgctaatttttcttcctaagtatctctcaaactcatttgcacatttccacttccattgccattccgcttatccaagttatcaacatctctcacttgggctattgmtatagcttcccaatgcatctcctcacattccccattgcccacctgcaatttatttttcatactgcacttacagcaatcttttaggaattcaagtcttatcattttgccacacctggccaaagctcttcagatacttcccattggtcttaaaatgcagacaaac

SEQ ID NO: 160402 - DNA, 621 bp, Homo sapiens
ccaccacacagagctgctgggaagattagcaaaagagactacgcaaaaaagtgtccagtagcacaccaggcaagtaatacagattcagtgaatcttagttttgttccagagagatcatttagaaatgcattattaaactacaaaattaatgaagagcttaactgtggtccaatgtttcaaggtttcttttaagtcacctagtccaataggaatacccacaactagaataaaagaaagaagtgaagctgtttgttttaacttgggttttatgtaatggtcaygtaggcatccccacagtgtcctttttgctgaggccctttgtctctctactgtgaagagagtggcttgtgattcttttggtttcacagatacctagaggagttctgaagacaagtgtctaaagatgaaacatggtaggaaaaataatgctgggttaatctttttctttatcacagaagtttgccctctccttcagggagtctcagtatgaacatgttgttctttccctttctgaaataagatgagggacaaaaaaagcaaaaggaacttgagagaaagactgacaaaggggaaaaatctcttttcctcccccttcatcagtggttgtggctccctgtccag

SEQ ID NO: 160403 - DNA, 597 bp, Homo sapiens
tttagtatgtcacagctctgttttcattaatttcaaagaattttttatttctgccttaatgttattattcacccaaaagtcattcaggaataagttgtttaattcctatgtaattgtgtggttttgagagatcttcttggttttgatttctatttttattgcactgtagtttgagagtatgtttggtatgatttttatttctttgcatttattgagtcttgctttaccagtaaagcatgtagtagatcttrgagtgtgttccatatacagacaagaggaatgtactttctatcaatgttggatagaatattctgtagatgtttattaggtccaattggtcaagtgtctagtttaagttcatgattcctttcttagtttgctgcattgatgatctatctaatactgtcagtagaatgttgaagtctcccactattattatgtggctaagtattttcatagatctagaagtacctgttttacaaactgggtgctccaatgtttggtatgtatatatttaggatagttaagtcctctttgaattgaactcttcattatcatataatgcccttctttgtcacttttgacttgttattttaa

SEQ ID NO: 160404 - DNA, 597 bp, Homo sapiens
tttagtatgtcacagctctgttttcattaatttcaaagaattttttatttctgccttaatgttattattcacccaaaagtcattcaggaataagttgtttaattcctatgtaattgtgtggttttgagagatcttcttggttttgatttctatttttattgcactgtagtttgagagtatgtttggtatgatttttatttctttgcatttattgagtcttgctttaccagtaaagcatgtagtagatcttagagtgtgttccatatacagacaagargaatgtactttctatcaatgttggatagaatattctgtagatgtttattaggtccaattggtcaagtgtctagtttaagttcatgattcctttcttagtttgctgcattgatgatctatctaatactgtcagtagaatgttgaagtctcccactattattatgtggctaagtattttcatagatctagaagtacctgttttacaaactgggtgctccaatgtttggtatgtatatatttaggatagttaagtcctctttgaattgaactcttcattatcatataatgcccttctttgtcacttttgacttgttattttaa

SEQ ID NO: 160405 - DNA, 533 bp, Homo sapiens
agttcttgttagattaagttgtttgttgagagtggaatgctatgtctttaataacttcctcaattatatttataaataattcttgtgagaactaccatgttaaccaaagaaaatattaagaataattayatatgctgctctaaacctttacgttaactcatgtattcatcacaacggccttatggggtaattataaacagtttagcctcattttcagatgtggcaactgaggtacagagaggttaagtatgtagttcaaggtcacttgaccagaaagtgctagagccagaattcaaacctggattcaaaccaggccatgtgcgtctatgttactgtccttccagtaatacaaccaggccaacttcatttagatgccaaccactccctgagtatacactaaatttcagatgttgttctagaaaaattgtatataaatcactttatatttatatactgcatatatttacaggaaggaatagatgttaacaaaataaactataaataaataatatacatttcagatactggtgagt

SEQ ID NO: 160406 - DNA, 594 bp, Homo sapiens
gtggtctatgttctgccaaaggactcctaagacaagaaatggcaaatatcttgagggaaagaatgagacagaacaaaagaactaagaatacccccccagggctgggcgcagtggctcatgcctgtaattccagtactttgggaggcagragcaggcggatcaagaggtcaggagatcgataacatcctggccaacatggtgaaaccctgtctctactaaaatacaaaaaattatctgggcagggtggcgtgcacctgtagtcccagctactcaggaggctgaggcaggggaatggcctgaacctgggaggcagaggttgcagtgagcctagatagtgccactgtgctccagcctggtgacagagtaagactctgcttcaaaaaaaaaaaaaaaaaaaaagaaaagaaagaaagaaagaaagaaaaaaacaatacctcgatcttaatttgtgaaaatttggtgccttttcaaacgaatataccagtacagtattaaataaggatttaaatacttatttcgactttatttctaaataaactctctacagtggttgcttactgagtgatgaaacactgagaggtatctacagtaatt

SEQ ID NO: 160407 - DNA, 556 bp, Homo sapiens
taaccactactgcctgaaatctttgcagaatgcccacagcyttcagcttttcccaaaatcaaataggatacaattattgctgctggtttccagtcaacattcaaatccatttaaaagcagattcctataaagttgcctctatccaaatatgcaaagtggtcttatgaaaaataacatttatgacccaagatccagttactagttttagcaaccttgagggagccacttagacttcaaaatatagttatacgctttaggtgtatatgtttatatagggatatatgcaaagaaaagcatttgaatactcaatatgcttgtccatctaaaaatctgaattttaggaaactaacaatttggaatttatttttaacctctcaattacagtcacatttttaagtaataaccattagttttcatgattgcatctccagatgctctcacatatattatcttactatgaagtaagaatgattttatctccactttaaatatgaagaaactgaggcttagagaggttaagcacattgaccaagttcagctaataaatgtatggagt

SEQ ID NO: 160408 - DNA, 556 bp, Homo sapiens
taaccactactgcctgaaatctttgcagaatgcccacagccttcagcttttcccaaaatcaaataggatacaattattgctgctggtttccagtcaacattcaaatccatttaaaagcagattcctataaagttgcctctatccaaatatgcaaagtggtcttatgaaaaataacatttatgacccaagatccagttactagttttagcaaccttgagggagccacttagacttcaaaatatagttatacgctttaggtgtatatgtttatatagggatatatgcaaagaaaagcatttgaatactcaatatgcttgtccatctaaaaatctgaattttaggaaactaacaatttggaatttatttttaacctctcaattacagtcacatttttaagtaataaccattagttttcatgattgcatctccagatgctctcacatatattatctyactatgaagtaagaatgattttatctccactttaaatatgaagaaactgaggcttagagaggttaagcacattgaccaagttcagctaataaatgtatggagt

SEQ ID NO: 160409 - DNA, 551 bp, Homo sapiens
atacatattcctctttaggtaatgtcaactctttagaaattggggagagaaagaactattcccacatgaaatcataataaactctatattagaaactactctattgaaatgcctgctttaaaattaaaaaaaattagtgaattttatattcatggaatagtgatttttatatctgctgaagtggctaacaatgcatgtagttgataggtcagttaatcaattagaatttattgagcacctaaggtcttggacagyggtactgggatatctatttgacattattaatggaatcctagacagtcattgttgaataataataaatgaggactacatccctggccccgaactctggcaggagcttaggaagggaacattcactacaatcatggatctagatagtgattcagggaggccaattttaagggaaaacaacccagccacatcacctggtgttagactggacctgagattcgaagatattaaactaacacataagcaggacagagagaagatgcctggatgggaagtgtatggtgataattaaaacagga

SEQ ID NO: 160410 - DNA, 629 bp, Homo sapiens
aagttctcttttctttttttcagtctgtgccctcccagaatcaaccagtatcctgatttctttcttcattacttagttttgccgttccttaaactcataaaaatgaaataattcagtatatacttgctgtgtcttctatcactcaacatgttttttaagattcattcatattgttatttgtatcaagaacttgttcctttatttctaagtagtagtctattgtttaaacatacmataatttgtttatccatgttcccaataatagacatttcagttgtttgcagttttttgcttttctgaataaagctgcaatgaagattctttttttttttttttaatttaagttttagggtacatgtgcacattgtgcaggttagttacatatgtatacatgtgccatgctggtgcgctgcacccactaactcgtcatctagccttaggtatatctcccagtgctatccctccccgctccccccaccccaccacagtccccagagtgtgatattccccttcctgtgtccatgtgatctttacaggacactttgtggacatatgttttaattaattaattaatttaattttttggagacagagtatcactctgtcacccaggctagagtgcagtggct

SEQ ID NO: 160411 - DNA, 515 bp, Homo sapiens
tagcttttttttaaaaaaaattgttctcactttgattatcttgtaattctttactccatgactcttcaaaactgttacactgcacaaccataacttcaagctgtttcattgcctcaaaacataaattgtctgggcctggagattcttccataaaacagcggagtcctctttcgctgtctcctcacctcccttttgctttaaatccttcctgacatgcctgttctcacatttttggtttgaaggtttttctttttgaaaaagactatggaatctgaataggaagtaaataattctgctttgwgactttgtacctagccttccttttcatgtctattctctcttccaccccaccacttcaataacttgcacatatattttgtgctcttacaacattatatcatatttattacacggtcatctcccccagcagactggaacctccttatatggcagaactgttgtacatctataaaactccatacctagtacagtgcttggcaatatgccatagtgat

SEQ ID NO: 160412 - DNA, 595 bp, Homo sapiens
agacattgtctaccaccccctaaggaggcagtcatggtacctataatgaagcttcccacatgtaaaagaaaattttttggcaaggcaagacatgtaattcaggaagaaagacataattcaggaagagagaaagactaatttaaggccattcatgggaatacataaaatgcttatacatataasatataatctgaaagacaacccaagtagcagctgagttaattaaaattattttatcttggattcttgtattatatcaccttatttcagctttttaccaatgttgaaggagatcatgacatccctaacactggagtgtgtattttctgatccatccatgggatataaaatgatgattgattaaaggtggttggattagtggaaaaattactagattgagactgcagaaaatgaaattgtacttccatctttgctgtttgccaactatatgaaattggcaagtcaggcccactgggttactttctttatctctaaaatgaaggaaccgaactaggtcaggggttggcaccctataagttcacaggccaaatccgaccttgccacatgattttgtaaataaagttttattggatca

SEQ ID NO: 160413 - DNA, 595 bp, Homo sapiens
agacattgtctaccaccccctaaggaggcagtcatggtacctataatgaagcttcccacatgtaaaagaaaattttttggcaaggcaagacatgtaattcaggaagaaagacataattcaggaagagagaaagactaatttaaggccattcatgggaatacataaaatgcttatacatataacatataatctgaaagacaacccaagtagcagctgagttaattaaaattattttatcttggattcttgtattatatcaccttatttcagctttttaccaatgttgaaggagatcatgacatccctaacactggagtgtgtattttctgatccatccatgggatataaaatgatgattgattaaaggtggttggattagtggaaaaattactagattgagactgcagaaaatgraattgtacttccatctttgctgtttgccaactatatgaaattggcaagtcaggcccactgggttactttctttatctctaaaatgaaggaaccgaactaggtcaggggttggcaccctataagttcacaggccaaatccgaccttgccacatgattttgtaaataaagttttattggatca

SEQ ID NO: 160414 - DNA, 559 bp, Homo sapiens
catatgaaggacatttgtttacagtaggagagctgaaataggaaggcaaaagtcaccttgttcagcctcaactgggaacatacacatgggacaactcaatttttcactgttctgcgaggtctgtgaatgtgtattgatttggagttacaaataaattcggaatctataaataatgagaatcaactgtttatatcttagtgatctggccacaaagtgcatggttatatacacggctgagtaaagaagttaatgagtggatggataaatataaatctgttcattttaaagggaacaagtcaaaaggtgtcctttaaatcccgtgattttgaaatatacacaggagttgccatacccaacagcaaagaaaggacaaatctgagaatgacaaagtcagtgttttgacacctgaggagatacagcagacagggaaatggaaagggmattgctgtgaagccaggcagagttggatgtgagactcattttccaggcttatgaccttggaggagagccacttggagcctctaattcctccttcagaaaatcaagattaaaatatcca

SEQ ID NO: 160415 - DNA, 620 bp, Homo sapiens
tggagtcatattgactctttttgctaccagaaagtattttattagtggtgaggctaaggaacaaacagtgtttctcaggggttagtttgttggggaccacctatgaattttttcatgccctatcgtacctcatagctactggcaaagtcaagaaagtggcagaaatctctagagagaatatgtcatttacaaaatcaattataaagttctacacacatacaaacacacacacacacaaaatggaagacactatcaaaaagtgaagaattagaggctcaaattcttgcctgatatcctagcatttatccactaacaaatatcctaatataaggaggttttaacctggtatatttccctagtagtcagtctgacaaagataatgaattaaatatataaccacctaagtcagaggaytttttatctttaagatttctaaacttgaaattccaagtataaaaagttaaaagctttcaaatgtattagggcagccattcatctagttaattaagttaaacttgctacttaggttgggggtacatattcttagtaagagcaagacttggaaacaaaaggaaaattctgagacgaagggtctaaatctgaagtggacacccaaagaa

SEQ ID NO: 160416 - DNA, 432 bp, Homo sapiens
gaattcagacaagtcatcaggacagtttctgtttcctcatcgctttgtaagcattcatgaatttgtggatgtgtgaagtgagttctaatcctctagccagaatagggtaaaggttttatctttccagtaagggctccatatctatctatctccctcctatcactctagcaccctgtactctttggggcactctttctattagcagatagagccttatcaatgttctcgggacttcatctgatcctgttctacatgagaatcatctgggaagcttagacaataggtactgtcttgcctccatcccagagcaattaagttggaatctctaggggtagagcacagttrttcacatttattactcccaggtgattctaatgtgccatcaaggtggaaaactttgctatagatgttgaggcagtgatactcaacgtt

SEQ ID NO: 160417 - DNA, 402 bp, Homo sapiens
taaaccacagtgtgtcatctcccttactgcatcagtaacaaayctaacttattggggaacacaaagttttcttctttcctggagcaaccaatataggaacacatacacaggaaaaagagacagagggagagagttgttgcggggtggtatggcagggagggtagggaagcgggggagaaagagcactccagccctgtaagcaaaagcaaatgcaaggttcccttatgcttaaagaaacagataccatgaaaagttgcagaccaaagtatgcatcatacacctgtgtggagaaagagttaacagagcagacctgaggctactgtctttagaaagacctgcttgaaagagttgcccttgctgacgtctggaaactttgcttttctaatatccccttaactgatg

SEQ ID NO: 160418 - DNA, 610 bp, Homo sapiens
ttagctcagtatctaattggtagtcctccctgactctataaatgcagcaaagaaaagtcttctttatgatagaataaaataccacctacatcctatacagatctttgttcttagtgtacagcaatcaaaaatattagccaaaccatacaaagaataaccaagagaaaaaaatcagacaagagaagaaacctataggatatccatatattttagctatcaacaattaatgtttaaaatagctatagtaaatttgttaaattacaggtatatatgtaatatataatacataatatatttcatattacatatattatgtatgtcatatataatatgtaatgtgtacatatatgtgatatgaaatatacatctcatatatsacatatatatctgtaatttaacataccatacattaacatatataacataggtaatatatatttcatattacatatgtaataaattcattacatatattacatatgtaatatgtaataaattcattaaattacacacacacacacacacacatatatatatatatagagagagagaggtggcaaattttactagagagccaaatgggcagcttagtgctgaaagaaattagtaa

SEQ ID NO: 160419 - DNA, 610 bp, Homo sapiens
ttagctcagtatctaattggtagtcctccctgactctataaatgcagcaaagaaaagtcttctttatgatagaataaaataccacctacatcctatacagatctttgttcttagtgtacagcaatcaaaaatattagccaaaccatacaaagaataaccaagagaaaaaaatcagacaagagaagaaacctataggatatccatatattttagctatcaacaattaatgtttaaaatagctatagtaaatttgttaaattacaggtatatatgtaatatataatacataatatatttcatattacatatattatgtatgtcatatataatatgtaatgtgtacatatatgtgatatgaaatatacatctcatatatgacatatatatctgtaatttaacataccatacattaacatatataacataggtaatatatatttcatawtacatatgtaataaattcattacatatattacatatgtaatatgtaataaattcattaaattacacacacacacacacacacatatatatatatatagagagagagaggtggcaaattttactagagagccaaatgggcagcttagtgctgaaagaaattagtaa

SEQ ID NO: 160420 - DNA, 595 bp, Homo sapiens
attcaggaaaatggattctgccctggagtctccggaaaggaaagtagctctctctataccttaattttagctcagtgagacctggattgacttttggcctccagcatggtaagatgacaaatctgcattgttttaagtcactaactttgtgttaacctgccacagtggcactagaataccccacctaaaagatttaaacttatttcaagatccactaagaattatcctaatttaagattgtattagtccgttttcacactgctgataaagatatacctgagaccaggaagaaaaagaggtttaatggacttacagttccacatggctagggaggcctcacgataatggtggaaagcaaggagragcaagtcacatcttacatggatggcagcaagcaaagagagagctgtgcagagaaactcctgttttaaaaaccatcagatctcaggagacccattcactactatgagaacagcatgggaaagactcacccccatgattcaatcatctcccaccagttccctcccacaacacaacatgtgggaattatgggagccatgagataagatttgggtggggacacagaaccaaaccg

SEQ ID NO: 160421 - DNA, 595 bp, Homo sapiens
attcaggaaaatggattctgccctggagtctccggaaaggaaagtagctctctctataccttaattttagctcagtgagacctggattgacttttggcctccagcatggtaagatgacaaatctgcattgttttaagtcactaactttgtgttaacctgccacagtggcactagaataccccacctaaaagatttaaacttatttcaagatccactaagaattatcctaatttaagattgtattagtccgttttcacactgctgataaagatatacctgagaccaggaagaaaaagaggtttaatggacttacagttccacatggctagggaggcctcacgataatggtggaaagcaaggaggagcaagtcacatcttacatggatggcagcaagcaaagagagagctgtgcagagaaactcctgttttaaaaaccatcagatctcaggagacccattcactactatgagaacagcatgggaaagactcacccccatgattcaatcatctcccaccagktccctcccacaacacaacatgtgggaattatgggagccatgagataagatttgggtggggacacagaaccaaaccg

SEQ ID NO: 160422 - DNA, 619 bp, Homo sapiens
cattctttctaactttttttggaccaattaactatcctcacttcaccctctacaaccccattcccttttccggcctctgatacccattcttctaatctccatgagttcaattgttttaatttcaaggtcccacatataagtgagaacatgcaaagtttttgtttctataccctgcttatttcactgaacataatgacctccagctccatccatgttgttgcaaatgacagcatctcattctttttaatggttgaatactactccattgtgtatatgcaacacattttccttatccatttgtctcytgatggacatttaggttgcttccaaatcttggctgttgtgaatggtgttgcaacaaacatgggagtgcaaggatgtcttcaatttcctcaattcctttattttgggtatatgcctagcagtgggactgctgggtcatatggtagctctatttttagttttttgaggaacttccaaatttcttcatagtcattgtactactttacatttccaccaatggtgaaggaggggggttcccttatccccacatcgtctctagcattcgttatgcctgtcttttggataaaatccattttaactagagtgagatgatata

SEQ ID NO: 160423 - DNA, 388 bp, Homo sapiens
tatgtaggtgctcaagtgttagatgcacatatatttacaactatcatattcacttgctgaattgacctctttatcattatataatgacctccttygtgtcttcctagagtttttgtcttgaaatctgttttgtctgatataactactccttctcttgtgtccgtcagcatggaatatctttttccatccctttattttcagactgtatgtatctttgtaggtgaagtgtgtttcttataggcaacagattattggtcttattttaatccattcagccactatttttattgtcttatcttttttgctttttattgtttttatttttatttgtctttttactggagagtttaggccatttacattccatgttattattggcaagtgagaa

SEQ ID NO: 160424 - DNA, 515 bp, Homo sapiens
cttcttggccctttggctaagatcaagtgtaaaaactttacaccttaacttcatcccccagactactttttaactttttgttgtttctctttatgttttatcatactctctatgtcctgaaaagttgttgtagttattggttaattattcagtatttccacgcaagagtagttcagatacctcagttacagtgttataatattctgtgttttcctgtgtgcttactcttaccagtgaattttgtaccttcagatgacttcttattgctcattaacattcttttctttcagattgaagaactccctttaacctttcttgtaagacaggtctggtattaatgaaattcttcagcttttgtttgtgtrggaaagtatttttccttcatgtttgaaggatgttttggccagatatactactcaagggtaaaagttttgttttcgtttttctccttcctcaccttcaatatgtcatgccactctctcttggcctgtaatgtttccactgaaaagtctgct

SEQ ID NO: 160425 - DNA, 538 bp, Homo sapiens
ggccttggtaccttatttattatagtttatttggtgaggccatgcttttctgctggtcttgatatttgtagatgtttgtcattgtccgggcattgaagagttaggaatttattgtggtcttcatagtctggccttgtttatgcccattcttcttgggaaggctttccaggaattcaagggccccaatcccagtatcactgtggttcttacagatttgttgatgtaccaccttggagatctcrtataaaatctggaagaattatctcaattaccaggcgatactcctgttctcttcccttactttctcccaaacaaatggagtttctgtctctatcctgagctgcctggggctgggggtacagtgacagaagcattcctgtggttaccaccactagaaatgccctgggtcagacctgatgccagcacagcactgagtctcatccaaggcctgcagtaaccactacctggctaccctgtatgtagggcctagggctctacaatcagcaggttgcaaagctagtcaggtttgtgtccttgc

SEQ ID NO: 160426 - DNA, 528 bp, Homo sapiens
gtatctctattatgttacttaacaatctattttagattgcttaaatgtacattagaatgagcccctagttgcactatttgtattgaatattattcatttttgtgttctccacaatgtctaacacagtactctacattttgtaagcatttaaaatcattgtattgaacgaataataaaatcaaattcattcataagacaaaatgacaataaaacatacattcctccttttgctggtttctgacaggactacctaatatctttaatgttactggaatttatacaaaagtaattataattacctaactctatatctgcctatgtctgtatgttattggtatatgaatatttaaatgaaggggtaaatgatttctcaaaggcagggcaaaattcttcaagatactatttttgttaggaaaacctacaaaaataacactgcaatgtytaaatcacagttgcatttaacagaatgcttttatttttaatatagtgaacttttagttctttatacattgataacattgctaatta

SEQ ID NO: 160427 - DNA, 561 bp, Homo sapiens
ctataaagtaagcattatacacatattaaggaaggagtggtctaattcagcagaagttcagctctgttactagcatgattctactacatgaataattatgtttctttagatacatatccccccatacacacacacagatttagaagtgtttctatgagggccccagacagtgttacaaaacattaaattagagataatttttttgtgaaaactcaaaaagctattaatttgtgaataatacatctagaaaaaatacaacttaatttgaaaatgtaatttattggaaaacaagcctatatagaataaaggcaccagtgcaagtaagagtgaaaaaacttatgaagcacttayatttttataatgtaaattaacagggacacgcctttaatatgtagagatggaagagcttattcctgagttaaaaagattaatgaagagggattgtgggttgggacaagcagacaattatcagaaaacatgttcattaacctacagtacatgatctgtacatcaccatcattatcatttactattagttatcatagcttgggttttacagat

SEQ ID NO: 160428 - DNA, 586 bp, Homo sapiens
aagcttagacaagtgatttttatttttaacgagatataggctctgaagcactggtgttcattcttggctgtgctctataatcacttgaaggagattaaaagaaatatcctttctttggtcccactccctgggattgcaatttaatttgtttggtatatggcccaaacatttgtctccttaaaaataaaaaagctctccaatttattctaatgtgtagccaaaactgaacaacwcttctctgaaagagagctaagaattattattgtctattcgagacatgatgcctttggttaaagagctagaacaattttctagggataaaagtaacattttagaaaataaagcatctgagaattatacaatccccacagaccaaaggaaaaaaaagaaaacttttattatgtgctgagacaccgagtattagaagtcccatatttgagaaaagggaagtatgacatcagaaacatgagtctttctattgaaagggaatcttgtacaattaaaggaataggtaaaatgcatgtcacttggacctagatgaattttatttattcagacactgaattatgatttccttctcctctgt

SEQ ID NO: 160429 - DNA, 622 bp, Homo sapiens
ggggtgcacagatttgcactttcttcaacaacctctcatccaaataaccaataatctacatttttagcatagctaacttgagttgtggtctaggccttaaatagagcttaatatttttacaattttcttcaytaaaactatgttatagcaacaaacatttcccagctggtgggttaggagtcagagtgccataagaaaaaagttttaggagtaatgaaatgatcaaagacagtattttacccatattaatgatcttgatctcattatttgaaatatggcaacaacaacaaaataaacgatttaaatggcaatgctagagaatccctataataaaatatagcaatattgttaggatgtaatataactacaaaaagtcatgttttcaatgacttgcatgacacaaggaaatgcttacaatgtatttcataattataataattatgaaaattaaatttggaacatttagaaaatacaaaaaaagacaggaaaaatgaatatcacctgcaattccaaccatcaggaattgctatgacagagagagataaataaccagatagaactttctctctctctcatatactgtttctgagggtatgcagagcaggttttatatgatagtcac

SEQ ID NO: 160430 - DNA, 622 bp, Homo sapiens
ggggtgcacagatttgcactttcttcaacaacctctcatccaaataaccaataatctacatttttagcatagctaacttgagttgtggtctaggccttaaatagagcttaatatttttacaattttcttcattaaaactatgttatagcaacaaacatttcccagctggtgggttaggagtcagagtgccataagaaaaaagttttaggagtaatgaaatgatcaaagacartattttacccatattaatgatcttgatctcattatttgaaatatggcaacaacaacaaaataaacgatttaaatggcaatgctagagaatccctataataaaatatagcaatattgttaggatgtaatataactacaaaaagtcatgttttcaatgacttgcatgacacaaggaaatgcttacaatgtatttcataattataataattatgaaaattaaatttggaacatttagaaaatacaaaaaaagacaggaaaaatgaatatcacctgcaattccaaccatcaggaattgctatgacagagagagataaataaccagatagaactttctctctctctcatatactgtttctgagggtatgcagagcaggttttatatgatagtcac

SEQ ID NO: 160431 - DNA, 568 bp, Homo sapiens
tgtaagtttattacttttataaagtgctgcattctactaaattattctaagggataattgaactatttatttgcaagctatttatttatagttctaacaaggtaaacaatgacctacaataaaatgcacatatttaaaatgtactatttgataaactrtgacataaaaaatatagctgtgaagctatcaccacaatcgaaatacatattcagcacctcccaaagttcctcatgccccttcttactcacctccttgtccccaagcagccactgatctaccttcttccattatagattaatttgcattttctatcattttatataaatagaaacatatggtatgtaactttttggagggtctggcttctttcactcagcatattttgggttcatacatattgtagcatttatcaatagttactttgcttttttataactaagtagtattctattgtatggctatatcatggtttatccattcactgattgatggatatatgagttatgtactgtttgaggttattacaaataaaatgctattaacattcattaacattcatgtataagtc

SEQ ID NO: 160432 - DNA, 568 bp, Homo sapiens
tgtaagtttattacttttataaagtgctgcattctactaaattattctaagggataattgaactatttatttgcaagctatttatttatagttctaacaaggtaaacaatgacctacaataaaatgcacatatttaaaatgtactatttgataaactatgacataaaaaatatagctgtgaagctatcaccacaatcgaaatacatattcagcacctcccaaagttcctcatgccccttcttactcacctccttgtccccaagcagccactgatctaccttcttccattatagattaatttgcattttctatcattttatataaatagaaacatatggtatgtaactttttggrgggtctggcttctttcactcagcatattttgggttcatacatattgtagcatttatcaatagttactttgcttttttataactaagtagtattctattgtatggctatatcatggtttatccattcactgattgatggatatatgagttatgtactgtttgaggttattacaaataaaatgctattaacattcattaacattcatgtataagtc

SEQ ID NO: 160433 - DNA, 568 bp, Homo sapiens
tgtaagtttattacttttataaagtgctgcattctactaaattattctaagggataattgaactatttatttgcaagctatttatttatagttctaacaaggtaaacaatgacctacaataaaatgcacatatttaaaatgtactatttgataaactatgacataaaaaatatagctgtgaagctatcaccacaatcgaaatacatattcagcacctcccaaagttcctcatgccccttcttactcacctccttgtccccaagcagccactgatctaccttcttccattatagattaatttgcattttctatcattttatataaatagaaacatatggtatgtaactttttggagggtctggcttctttcactcagcatattttgggttcatacatattgtagcatttatcaatagttactttgcttttttataactaagtagtattctattgtatggctatatcatggtttatccattyactgattgatggatatatgagttatgtactgtttgaggttattacaaataaaatgctattaacattcattaacattcatgtataagtc

SEQ ID NO: 160434 - DNA, 552 bp, Homo sapiens
gcttatcagtggactcaacacagtcaaagaaagaactaataaacatgaagagagttcaaatgaaattatctaagtcaagacaaaaagaacagaaaaacagaagaaaagaggaaaacaagcaaacaaaacaaaagaacagagcatctgagagctgggggtcaaaatcaaatggtacaatatgtgtataattagaacgccagaarcagtaagaaagaggcaaaagaaatagttgaacaaataatgggtaagaattttcaaaattaatatcagacaccaaagaagttcagaaaacaaggaacaggatatatatcaaaaggcacacacttaggtatatcattttcgaactgctggaaaccaaaaacaaaaggaaaataaatccacttttaaacatatagataggctaaaagaatgaaaaacttgaaaatacttaagcaaatatatagaaaacatgaaaacacagatcaagaaagctgaggcagctgtattaatatcagcaaaagtagacttctgaacaagcaatagaatgaggaatttaaacggacattacaaaca

SEQ ID NO: 160435 - DNA, 592 bp, Homo sapiens
cgaaagactgttttcctcccaagatcaggaaagacaaggcacactcagtttcatgaattcttaaygtttccaaaaaccatgaaaaaactcagtgttgtctgtggagaggaaaatcttctttgttttaaagtccataatctaagtcttataaactcacttggattaaattccatgggaagaagatagttttggcagtatgcatttacaatttctgcctaacctcttagtgtatatttctttgagccctgtgtttcctacctttgactatggaagtaaatgtatctctacacagtgacgtagcattcatactctctcatcaactgatttttcagtcctgagccacggtagctatttttaccaccacttgctacagaatggcttaggtgtacgaattatacctcttggggaaaacttttcccacgcatataattaatcgaatgctaacttgaggccatatggccaggaaatagccctcaggtaaaagccacatggatgcaagtttagcttcaatttagcaagtggacagatacccgtttggctctgaatgcagaacagaatttagtacagtgaaacaagtgctacttgtaggcct

SEQ ID NO: 160436 - DNA, 520 bp, Homo sapiens
acaaatacataagtgtgccaaagaatatgaaaaatatggttgaaatgatacttattatatttctgttcctgcgtgcaggactttcttaagacagtactcaggaagaaatctgtggcagagtgaaagaaaattaagaagagattgtacttcctgaaggcctattataatgtaattatgtaatctttctctaaaggtgacccttttgccccgcctaactttttagaattgtatttccttatgttcagtctttccagccatggttgaggtgcatgtgtccctcacagaaatccagtagaatgacaaaaacatttgacatttacagcatctcgtgaccctccgaggcacagaagtaatttaatagtgatggaaaaatttgccatcaaactacccaagtgttcctaaatagtttggcagttaatagtcctgagctatttcagaatttctcagtgtytcctactgtacggcattgttcactaagatagcaaaagcctccactaacaaagatacattcagattttta

SEQ ID NO: 160437 - DNA, 539 bp, Homo sapiens
tactttctaatttcaagactttttctaaggttagagtaatcaataaagtcttctattcacataagggttagacttatagatatcagaaaataagaggaactagacccactaacataaaagtttagttgatatttcacaaagtgcaaaagcgtttccatgggggaagaatagtaggataaataaatggttctggaacaaccagatttccataaaaaagaaaattagtctcaaaactgccttatttcatataaaaatgttaaatcaaaatggatcatagaattaaatacaaaagtcaaaactgttaattgcatagaaaaaaaaaaagacatagctgartatcttcataagttggaatagaaaaaaattcctgggaaccatgaaagaaaaaatgattaataggacttcattgaaagaaaaaactttgctttaacagaaaaattgtcattatttgaactgtctagtcatttcctaaggtgctgcgtatagttggggcaaactatatgctaaccaaaaagcttaaaagaaaaagctgaggaaag

SEQ ID NO: 160438 - DNA, 595 bp, Homo sapiens
tggactgccacaaataaccttcataatgctggggcgcatctcaaatcaatagtcacctggggacagagacggagagatgaagggattgcaaaaaggcacaaagaaacttttggaggtgacggaaatgtacagtatcttggttatagtggtgacatgtgtatacacgtgtcaaaatttattgaagtgtgtactttcaatatgtgttgttcattgtatgcaaattgtacctcagtaaagttgtttaaaaaaaactaagcctaatagtggatttacattcaaaataaaaacagatgcagaatacagatgctgaacaaaaaattaatgtctgtttccatttaaagatcagcttgtcttctataatatggtaagagaaaaattttgaaaagtatttttaacatatttaatactctttgtaaagtgtcacaaaaacaaattaagcaaaaatgatcaaccattagctgacaggctaatatttcatattaattatatttcaaaattctatgtagtgttctaaccctctaaatgatakgcatgaaaagaatgaatcacaatttcctccacaaaatctgaagggttatcaaagttcagtattgag

SEQ ID NO: 160439 - DNA, 432 bp, Homo sapiens
gaattcagacaagtcatcaggacagtttctgtttcctcatcgctttgtaagcattcatgaatttgtggatgtgtgaagtgagttctaatcctctagccagaatagggtaaaggttttatctttccagtaagggctccatatctatctatctccctcctatcactctagcaccctgtactctttggggcactctttctattagcagatagagccttatcaatgttctcggkacttcatctgatcctgttctacatgagaatcatctgggaagcttagacaataggtactgtcttgcctccatcccagagcaattaagttggaatctctaggggtagagcacagttgttcacatttattactcccaggtgattctaatgtgccatcaaggtggaaaactttgctatagatgttgaggcagtgatactcaacgtt

SEQ ID NO: 160440 - DNA, 585 bp, Homo sapiens
gttacaaaaaaaaaattgtactcaatatattctgaactttatcaataaaagaattgtggaaatgtgttagatttttctcttgttataaaagtccctatgtagtgttcttaattttggctcttgataaagtttactatctgccccctttgcagaagaggtttgctgaaaacggtggttcagtagattggagggtgggccccmgggatctagtgttttgctttgtttaagcaagtgcaggccgtatatttggtggtactctcagggtctttttaagtccttttatgtgttctgtgccctgtaagtaattggtgcctagtggaaatcagcctcaacccaggaacctccataggaagagaaattatccttgttactggtttagtatgaagcacttctcgtctagagttctgtatagccagctgaaattcttcgttgtgtactcagaacatgtcaaagccttctgtgtatcttgtagttgaatggtcactcttaggttctagatgtcatctcagagatagaaagagctttgggttgcaacggttagagctttgaggcttgaaccaaaggcggggcagctgtgcacccagt

SEQ ID NO: 160441 - DNA, 321 bp, Homo sapiens
gttgtagaattactcagtagataggaactcttacctgttcccaactccgtttcaaaattcagccaagattccttgatatgggatttctttctatattttctgaaatgcagtgccacttagaacacttatttactaytataatatacaataaaatgtaatttaaaaaacaactttgtaaaataagatatttgtaagagcagtggttttttttatatttggtcatgttgtgtggggcaaatacagctcagctttggctttactatattccttttttaataataaaaaagcaaaatcatatgaaaattttcttacatatagatc

SEQ ID NO: 160442 - DNA, 584 bp, Homo sapiens
acaactttgtaaaataagatatttgtaagagcagtggttttttttatatttggtcatgttgtgtggggcaaatacagctcagctttggctttactatattccttttttaataataaaaaagcaaaatcatatgaaaattttcttacatatagatctatttgtaaaagcaaaagaaaatttatttcaagtrtgtaaggaaagcggaaattactcaattggttatacatatacttttggatatttcaatttctgtaacgactgacatccagtgaagccttctttcaattttctaacattaatacaaaagtcatcaaaatgtataaatgtaagatgcttctaaaaacaactgtcacatttaacgttttgatttagtaatcaggccatgattttttcgattctaatttgtttctgtactttctctttaatgggggagggggtgggcttctaagtcttcctcttgagtctttgtacaataaagtgagctatttgcttctatttagcaaagctggatggggcatatctctgcatttgattggttggtttttaagggattactcctctggaaagacactgtctcatattgc

SEQ ID NO: 160443 - DNA, 584 bp, Homo sapiens
acaactttgtaaaataagatatttgtaagagcagtggttttttttatatttggtcatgttgtgtggggcaaatacagctcagctttggctttactatattccttttttaataataaaaaagcaaaatcatatgaaaattttcttacatatagatctatttgtaaaagcaaaagaaaatttatttcaagtgtgtaaggaaagcggaaattactcaattggttatacatatacttttggatatttcaatttctgtaacgactgacatccagtgaagccttctttcaattttctaacaytaatacaaaagtcatcaaaatgtataaatgtaagatgcttctaaaaacaactgtcacatttaacgttttgatttagtaatcaggccatgattttttcgattctaatttgtttctgtactttctctttaatgggggagggggtgggcttctaagtcttcctcttgagtctttgtacaataaagtgagctatttgcttctatttagcaaagctggatggggcatatctctgcatttgattggttggtttttaagggattactcctctggaaagacactgtctcatattgc

SEQ ID NO: 160444 - DNA, 584 bp, Homo sapiens
acaactttgtaaaataagatatttgtaagagcagtggttttttttatatttggtcatgttgtgtggggcaaatacagctcagctttggctttactatattccttttttaataataaaaaagcaaaatcatatgaaaattttcttacatatagatctatttgtaaaagcaaaagaaaatttatttcaagtgtgtaaggaaagcggaaattactcaattggttatacatatacttttggatatttcaatttctgtaacgactgacatccagtgaagccttctttcaattttctaacattaatacaaaagtcatcaaaatgtataaatgtaagatgcttctaaaaacaactgtcacatttaacgttttgatttagtaatcaggccatgattttttcgattctaatttgtttctgtactttctctttaatgggggagggggtgggcttctaagtcttcctcttgagtctttgtacaataaagtgagctatttgcttcyatttagcaaagctggatggggcatatctctgcatttgattggttggtttttaagggattactcctctggaaagacactgtctcatattgc

SEQ ID NO: 160445 - DNA, 550 bp, Homo sapiens
cttttgtttatgccaaacaatttgcccaagatcacacagttagaaattgactgagttgaaccttaaactctgttcttccgactcagatgtcagtactttccacaaccgtaaaattatctttcactatctgttcttcctcatttttcaagtgtaattcaagatctgaaaaatttgcgtctagaagtttagctgcaactttggagaaaagaacatattgtttaagaggcaaaatctctcccatatgcaaaaatttattttgtgcaaaagtagccatgtttttcccaaatgttgtcttccccsacccccgcgaggcacaaattaaattaatgcctgtgagactttccaaatagctcctctataaactgtgaagcccctctggaaagttattcagtgagtacctagaagagcctgttgggagctacaccaaaagcaggaatattcagaggttagtgctccatccctggaggctcatggatgaggtatgacccacacagggaataatctggagagttaactgcagtggatagggagagatccacagcaagtactt

SEQ ID NO: 160446 - DNA, 593 bp, Homo sapiens
gtatcatgaaacacatgtcactactctctgctttcaaggacaaattttgtgtttggtttttctcccccatagggaagaaacataaaacataatgtcaatacagatcctttatctttattactaaagcacagtaaactaaggtgcatatttaatttaacacattctgatgtagctcactgtgggccctcaatgaatagtttgtgaacattttctactattgcctttgaaaaggttgtacaacttagcttgaacaatttggcttatttgtttactaatttgtagaagaaggaatttacagtgttagattgtgaaaagtagaatgttttaataatgtattaataatttcattgctagcatggctctgctgtcttcagattattttcctactcagttctagcacctctggcctcctagttacttgcccarttttgacatgcaggaatgactgtgtaaggctcgtagaaacttggcatgtattctttctttggcatcatttaatatatttaaacccagcagtgtatctagaggcagccaatgtttcaccaccgggttttatatatattaaatgacacattccagcagaagaccagaat

SEQ ID NO: 160447 - DNA, 332 bp, Homo sapiens
ggaaacccgcattcaggggcacaccttcatttatctgggaacagcgcggatcccagaggtgcgggataaaccaggcgttccagctgctcacacgctgtttggtaccccgcgtctaygaagcacaaagcaggagcggattggaggttttacaaactgaccaaccccgccgcccgcgcccgctggagggagacgcacacctttgccctgcatattcgcttccaggctctgcatctctgctcttggggagccggccacccgcttttccgcgcgggggctggggttctcgcctgaaggcgaagtccgcgtgcgcgatggaacctggtgccccgccc

SEQ ID NO: 160448 - DNA, 563 bp, Homo sapiens
tccccttccatcttgttgctccatctgcttgggaactggcctcactcacgtggtttagaggggctcaccaccatgtccacattccagctagagggaagtggaggggttgtgtgtgctccttttcattaaaggcatggcctgagtgatgtagctaaatcacctctacttgcctcctattggccacatcatagtcacatagccaaagccagctgcaaaggaggctgggaaatgtagtctttctttttgggtggctacttcgctaaaaatcaggagttctaatattacagaagaaagagagaatggattttaagagactctggcagtccctgccacagatgtcagcagttttctcactcggcactttagtttgctgaattgatgtttactgagcatggattaaatgccaaaccttttgcaagaatctgyggaggcaaagaggaaacagtccttgatctaacctggtgtaatggaaagggtagattgggagctgagagactggcagtcagtctcttgaacgctgagatccttgttttgtggtctcttgtagctgcctgtgtccttgt

SEQ ID NO: 160449 - DNA, 611 bp, Homo sapiens
gaacactgttcaggggaggggcacatcactccagtagagaagattaagaggaaacttccagaagatgaggcttgagctatgcctccaaagctgctggggagaagggagaagggcattttaggcagaacattccagaaaccctctgggacccatcttggcaggacccagctgrggcctaaccccagctacttcctggagctgaggccactagcccttcctgataaggtgtcatgatttccttccttcctttccaagtgttggctccccaatttgtagggactttattaaaaacacacagttaatggttaggaaagaggaggcatttttgcttctctctccccacccctccccaccctgagcccccactctggctggaatgtagccatcaaaataaacattaaatgcaaaatgccatagctgagttattacttgtgagggtgctgggagaaaaatttatagcaacattacagtgttttgttaaaaatctcttaatgcaccaaaatgggaaggtgtgtgtgttttttattaaaatgttacactctataaatccgatctgcaggaaggacacaggtggcgacccagggactcagctgaggaagctgtcacttcta

SEQ ID NO: 160450 - DNA, 611 bp, Homo sapiens
gaacactgttcaggggaggggcacatcactccagtagagaagattaagaggaaacttccagaagatgaggcttgagctatgcctccaaagctgctggggagaagggagaagggcattttaggcagaacattccagaaaccctctgggacccatcttggcaggacccagctgaggcctaaccccagctacttcctrgagctgaggccactagcccttcctgataaggtgtcatgatttccttccttcctttccaagtgttggctccccaatttgtagggactttattaaaaacacacagttaatggttaggaaagaggaggcatttttgcttctctctccccacccctccccaccctgagcccccactctggctggaatgtagccatcaaaataaacattaaatgcaaaatgccatagctgagttattacttgtgagggtgctgggagaaaaatttatagcaacattacagtgttttgttaaaaatctcttaatgcaccaaaatgggaaggtgtgtgtgttttttattaaaatgttacactctataaatccgatctgcaggaaggacacaggtggcgacccagggactcagctgaggaagctgtcacttcta

SEQ ID NO: 160451 - DNA, 420 bp, Homo sapiens
cagggggctgatgagagggtttccctgcagatacagacctttaggggaaggccctggaagaagtgattgacatgggacttggtgtgggcctcatgatggggaagtccctcaccagaagaagcctacagggcctcaccttcctgttctctttctatttctaggyccatcctggggatttgggaactagtcagcgcctatgggcctgatacaaagtagcgggttgatcaatgtttgagtgaatgaatgaatgaatgaatgaaaagacccttgggctcaagatcatggaacagcagagtgggaggggcatgtggagacgatcagttcgatgttcttaacctctcttgggcaggcacttttaggagaatctgataaaggtttagtcattttctccagaaactcactcttaccaacacacactca

SEQ ID NO: 160452 - DNA, 420 bp, Homo sapiens
cagggggctgatgagagggtttccctgcagatacagacctttaggggaaggccctggaagaagtgattgacatgggacttggtgtgggcctcatgatggggaagtccctcaccagaagaagcctacagggcctcaccttcctgttctctttctatttctaggcccatcctgggratttgggaactagtcagcgcctatgggcctgatacaaagtagcgggttgatcaatgtttgagtgaatgaatgaatgaatgaatgaaaagacccttgggctcaagatcatggaacagcagagtgggaggggcatgtggagacgatcagttcgatgttcttaacctctcttgggcaggcacttttaggagaatctgataaaggtttagtcattttctccagaaactcactcttaccaacacacactca

SEQ ID NO: 160453 - DNA, 420 bp, Homo sapiens
cagggggctgatgagagggtttccctgcagatacagacctttaggggaaggccctggaagaagtgattgacatgggacttggtgtgggcctcatgatggggaagtccctcaccagaagaagcctacagggcctcaccttcctgttctctttctatttctaggcccatcctggggatttgggaactagtcagcgcctatgggcctgatacaaagtagcgggttgatcaatgtttgagtgaatgaatgaatgaatgaatgaaaagacccttgggctcargatcatggaacagcagagtgggaggggcatgtggagacgatcagttcgatgttcttaacctctcttgggcaggcacttttaggagaatctgataaaggtttagtcattttctccagaaactcactcttaccaacacacactca

SEQ ID NO: 160454 - DNA, 620 bp, Homo sapiens
tcccagatgaacatgaagttaccatactggccctggactacccacctctggacttcttttatgtgagagaaaattaaacctcaactttgtttacgatactgttattccgggtttttgctctcatgcaacaaactctaacactaagcattactctactattacagcttagaaaggttaacttgcttaaggtcaaaaagttcagaggccaaatcaagtttaaaaccacacctatctgactccaaaataaataccattacaccacactccttcaaaatataatttagaatagatacaaaaacacataagcaggaattgtcaagttctaaaataaagacatttggaagctaggccttgaaagagaggatctggaatgatggggtcaaaacaggttgaggatagggactggggggcactaaagaagagtaggataaaagtctatgacaggagcatgcagcctgtatctcttaccggtgataagcaggaaayagggtattgaagaaaaaattctacaacagccaatttatagtgagaaaaaaagaaaaataaagactgaataggaagagtatttctgttataaaagaaaacgatgaaagagggaagcaatctggatttagcttaaa

SEQ ID NO: 160455 - DNA, 646 bp, Homo sapiens
tgctttatggcactctgaacactgtactgaaattacacgtgtgtctcctgctacagcactagcacaggggagcacaatcacatagctcagaacagggctctgacatctgagttaaaaccccagctttgcccccttggttaactcatcgataaaatgaagaaaatatcacctgctgctcaaaggaattttaaggattccatgagaaaatacatgtaaagcacctagcacaattcttggcataycttagggagttaataactaataactgaataaataaaaaccataagcagcaaaattaaatagttgtgaatttcatctcttttgatttcatctaatcaccttcttatagtatctaatgaatggtaaaatgccaaaatgactaatggttaaaaaaaaattagcaaagataacaggaatttttttaaaaaaacaggtcatcagcttctaaataactgtggctgactctagagtagtaaggaataatgtaatcacagcaaacatcacctgatgaagaatggagttattaagagctaaaccagaccgaactcagtaaaagcaatcaaatttactttaactaaaagttctcaatataatcattttcaagcataattttaataatgtggaaaacatttctaaaataagtttt

SEQ ID NO: 160456 - DNA, 646 bp, Homo sapiens
tgctttatggcactctgaacactgtactgaaattacacgtgtgtctcctgctacagcactagcacaggggagcacaatcacatagctcagaacagggctctgacatctgagttaaaaccccagctttgcccccttggttaactcatcgataaaatgaagaaaatatcacctgctgctcaaaggaattttaaggattccatgagaaaatacatgtaaagcacctagcacaattcttggcatatcttagggagttaataactaataactgaataaataaaaaccataagcagcaaaattaaatagtygtgaatttcatctcttttgatttcatctaatcaccttcttatagtatctaatgaatggtaaaatgccaaaatgactaatggttaaaaaaaaattagcaaagataacaggaatttttttaaaaaaacaggtcatcagcttctaaataactgtggctgactctagagtagtaaggaataatgtaatcacagcaaacatcacctgatgaagaatggagttattaagagctaaaccagaccgaactcagtaaaagcaatcaaatttactttaactaaaagttctcaatataatcattttcaagcataattttaataatgtggaaaacatttctaaaataagtttt

SEQ ID NO: 160457 - DNA, 640 bp, Homo sapiens
ggctggtctccgatgaaagaatctgttaatttacagaataatctagatcaggctatttatagtaaaaaaaaaaaaaaagacttggccgggcgcagtggctcatgcctctaatcccagcactttgggaggccaaagctggtggatcacgaggtcaagagatcgagaccatcctggctaacacggtgaaaccccatctctactaaaaatacaaaaaattagccgggcgtggtggcaggggcctgtagtcccagctactcaggaggctgaggcaggagaatggcgtgaacccaggaggcggagcttgcagtgagccgagatcgcgccactgcactccagcctgggcgacagagcaagaccccgtctcaaaaaaaaaaaaaaaaaaaaaggaaaaaaaagactcattaacccctcaattaagtattgccagtaatgtgtggtcccttaacataccatctctgagatccactgtttaacsatttttcttattcacaacagccacgtagaaatctccacacataatctcccacccaacaaactacgaatcttctcttccctccacctgtatgcactttcaggtgaacaaatgtatgcgtgcttaacatcacaggctttattaagggtcaggggatatgcaccaaag

SEQ ID NO: 160458 - DNA, 488 bp, Homo sapiens
catgtattttcaaaaaaaaaaaagcgtggtttatcaaaggctatattaaagatgaaggtgtgtagtttggagttttgttccatcagtgtggactgagcagctgtttgaagaatatcattaattactttaatcttttttttttaattgacaaaacaaaatggttctaaaaaacgttttgaaacaactgtgaacagataaagagtcactggatcgtttatctaagtaaacctatgcatggcatggcattatatttcatttaatctaaaaatgtatttatctgatggctgaataggaacagctccagtctacagctcccagcatgagtgacgcagaagacaggtgatttctgcatttccaactgaggtaccagaaccatctcactggggcttgtcagacagtcagtgcaggacatgcgcagcccacggakcatgagccgaggtagggcggggcatcgcctcacctgggaaatgcaaggggtaagggaattc

SEQ ID NO: 160459 - DNA, 554 bp, Homo sapiens
agaagttcagggtacctaaggtaaaagtctgactgatatctgcagcacaattcatctaaactccacacttctgcaataagctccttttgaggttcatgtggaatgtggaatacaattttctcatgctctctgcccattctgagatatccaacctcaaccttcgttaccccaaatgcctacagtactatttactaactggttgccaaacttgttgcttcttcacaggctctgaaccatcttggcagactattggcaactatataaccttgtgtagctcacggactctaatttaagagtttcatcttcccagtgggtcagcaatgggcccatcaaacagtttgaatacttatcctaaattagcctattgaatcacagctctatatatcaatgaattcaggatgctttaaaattatgccttactcaactttgttaagcatctttcatattcatttctacaaatttgatacatatwttttaatggcaaattcccttgattctttttgtgtataacactttatttcttgctctaattataaattttaccataatctctt

SEQ ID NO: 160460 - DNA, 606 bp, Homo sapiens
acttattctgggtcatgggaaataagttggatttggataaacagaagacaggtgaaagaaaatcacaatagtataatgctgggagccaaggcttgaaggtgtcaaagggcaagggtcttgaaggacagaaacgctgtgcatgtagctgaaacaagaccacagtcaagagcaattgcacaacaatctcagcaaaaaagaaccagaggtaccgtggcagatattctgactgcctgcaccattaggagcagcggactgaccagatgggactgcagaaactggagatggggtggatctttctaaaaataggcatcaagctacccattagattaaaaaacasagcccaggatggtgacaggttttgaaagaaatgggaggagagaaacataagccatgatttggtttttcagtcacacttgtactaatggaaaatatcttccaacatgaaagatgagagtgtgaagttcaaaactcagaggtcttcattttccaatttgagtttttctctaaattttataattcaagtcttattcatgtgtcaaattattctttgatctttgattgtatatttaatttctctgagttaacatttaaaaagttatctttgga

SEQ ID NO: 160461 - DNA, 543 bp, Homo sapiens
gggttcttggtcatgaaatccttgcctaagccaatatttaaaagggcttttccaacattatcttctcgaaattttatagtttcaggtcttagatttaagaccttaatccatctgagttgatttttgtgtaaggtgaaagatgaggatctagtttcattctcctgcatgtgtctaaccaattatctcagcaccgtttgttgaaagggtgtcctttccccactttatgttttggtttgattagccaaagatcagttagctgtaagaatttgggtttatttctaggtttcctattctgtcccattggtctttgtgtcaatttttatacccatatcatgctgttttggtgactatggccttatagtatagtttgaaatcaggtagtgtgatgcctccagatttgttmtttttgcttagtcttgctttggccatgtgggctgttttttggttccatatgaattttagaattttttttctaattctgtgaagaatgatggtggtattttgatggggactgaattgactctgtagattgcttttggcagt

SEQ ID NO: 160462 - DNA, 329 bp, Homo sapiens
atttatctatttcctttatattttctaatttgtgtggataaagttgtttatagcattctctgaggatcttttgtattactgtaggaacaattgtaacgtagcctttgtcatttctgattgttcttatttggatattctctttctttttctttgttagtgtaggcagtgatctatcatcttatttactttttctaagaacaaaaccttgaaacgaaagttgatcttatttttgcatctcaatttcattaagcttttctctaattttarttatttgtttgcttctgctccctttggagttggtatattatttcttttctagttcctttgtt

SEQ ID NO: 160463 - DNA, 581 bp, Homo sapiens
attcatttatgctattatggagtaaagatttacctcaattcattgctttattcttttaagcaacagacataaaattaatccttttaaagtgtacacttaagcattctttagtatattcacaaagaagtagtgcaaccattaccactgtctaattccaaaatattttaatcccccaaaaagaaactccatatccattcagtcacaactaatcgcctccycactctacctaatcccagatctgacacttatccactctgtctctatggatttgtctattctgaacactttatgtaaatggaatcatgcaatttgtggccttgtggtttgacttctttaatttagcatcacagtctcaaaattcacccatgttgtgacttgaatcagcactttattcctctttattgccaaatattcgattgattggatatatcacatttgtttatccatttatttgatggacatttgagttgttgcaattttcttcactattataaataatgctgctgtcaacatttctgtgtgtttttattgggacgtatatttgcattttcttgggcatgtatctaaatgtggagttactg

SEQ ID NO: 160464 - DNA, 581 bp, Homo sapiens
attcatttatgctattatggagtaaagatttacctcaattcattgctttattcttttaagcaacagacataaaattaatccttttaaagtgtacacttaagcattctttagtatattcacaaagaagtagtgcaaccattaccactgtctaattccaaaatattttaatcccccaaaaagaaactccatatccattcagtcacaactaatcgcctcctcactctacctaatcccagatctgacacttatccactctgtctctatggatttgtctattctgaacactttatgtaaatggaatcatgcaatttgtggccttgtggtttgacttctttaakttagcatcacagtctcaaaattcacccatgttgtgacttgaatcagcactttattcctctttattgccaaatattcgattgattggatatatcacatttgtttatccatttatttgatggacatttgagttgttgcaattttcttcactattataaataatgctgctgtcaacatttctgtgtgtttttattgggacgtatatttgcattttcttgggcatgtatctaaatgtggagttactg

SEQ ID NO: 160465 - DNA, 433 bp, Homo sapiens
cactctacctaatcccagatctgacacttatccactctgtctctatggatttgtctattctgaacactttatgtaaatggaatcatgcaatttgtggccttgtggtttgacttctttaatttagcatcacagtctcaaaattcacccatgttgtgacttgaatcagcactttattcctctttattgccaaatattcgattgattggatatatcacatttgtttatccattyatttgatggacatttgagttgttgcaattttcttcactattataaataatgctgctgtcaacatttctgtgtgtttttattgggacgtatatttgcattttcttgggcatgtatctaaatgtggagttactgagtcatgataaagctgtgcttaccttgtgtaggaactgccaaagttttccaaactggctatatcactttc

SEQ ID NO: 160466 - DNA, 433 bp, Homo sapiens
cactctacctaatcccagatctgacacttatccactctgtctctatggatttgtctattctgaacactttatgtaaatggaatcatgcaatttgtggccttgtggtttgacttctttaatttagcatcacagtctcaaaattcacccatgttgtgacttgaatcagcactttattcctctttattgccaaatattcgattgattggatatatcacatttgtttatccatttatttgatggacatttgagttgttgcaattttcttcactattataaataatgctgctgtcaacatttctgtgtgtttttattgggacgtatatttgcattttcttgggcatrtatctaaatgtggagttactgagtcatgataaagctgtgcttaccttgtgtaggaactgccaaagttttccaaactggctatatcactttc

SEQ ID NO: 160467 - DNA, 576 bp, Homo sapiens
tggtctatgtgtctgttttcatgccagtactatgctgatttggttactatagttttatagtayattttgaatttagatagtgtgatatctttagctttgttctttatgctcaggactattttggccatttggtgtcttttgtggttccacataaactttaggattgcttttattatttctgcaaagaatgtcacttgtattttgacagagattgcattgaatctgtaaattgctttccatagcatcaacatttatacaatattgattcttccaatctatgagcatagaatatttttcattttattttgtcctctataatttcttttgttagtgtttcatagtttttccctgtagaaattgatttctagtttaaatccactggagttgtgagacttgatatgattttaactttttcgagtttgttagacttgttttttgactaacatgtgctctgtccaagagaatgttccatttgcttatgagaagaatgtgtattctgaagcagttggatgcaatgttagtaaatgtcagttaagttcatttggtctactgtgcagtttaaatacaactttcttt

SEQ ID NO: 160468 - DNA, 576 bp, Homo sapiens
tggtctatgtgtctgttttcatgccagtactatgctgatttggttactatagttttatagtacattttgaatttagatagtgtgatatctttagctttgttctttatgctcaggactattttggccatttggtgtcttttgtggttccacataaactttaggattgcttttattatttctgcaaagaatgtcacttgtattttgacagagattgcattgaatctgtaaattgctttccatagcatyaacatttatacaatattgattcttccaatctatgagcatagaatatttttcattttattttgtcctctataatttcttttgttagtgtttcatagtttttccctgtagaaattgatttctagtttaaatccactggagttgtgagacttgatatgattttaactttttcgagtttgttagacttgttttttgactaacatgtgctctgtccaagagaatgttccatttgcttatgagaagaatgtgtattctgaagcagttggatgcaatgttagtaaatgtcagttaagttcatttggtctactgtgcagtttaaatacaactttcttt

SEQ ID NO: 160469 - DNA, 576 bp, Homo sapiens
tggtctatgtgtctgttttcatgccagtactatgctgatttggttactatagttttatagtacattttgaatttagatagtgtgatatctttagctttgttctttatgctcaggactattttggccatttggtgtcttttgtggttccacataaactttaggattgcttttattatttctgcaaagaatgtcacttgtattttgacagagattgcattgaatctgtaaattgctttccatagcatcaacatttatacaatattgattcttccaatctatgagcatagaatatttttcattttattttgtcctctataatttcttttgttagtgtttcatagtttttccctgtagaaattgatttctagtttaaatccactggagttgtgagacttgatatgattttaactttttcgagtttgttagacttgttttttgactaacatgtgctctgtccaagagaatgttccatttgcttatgagaagaatgygtattctgaagcagttggatgcaatgttagtaaatgtcagttaagttcatttggtctactgtgcagtttaaatacaactttcttt

SEQ ID NO: 160470 - DNA, 615 bp, Homo sapiens
caattttgaaaggcagcatctgtttttttctataagcatttttctacctttccacctttcttgctatagatttttacaactggtgttccagccaaacacttgacattttaccacagaacattaagttaccacacttcctacccacataaataatctcatttcacatttttaaagagctttattttcacaatactcattactttgaagtcttcttatattagccctgaccagaggactctattttcctagttattacctaaaaacagtcaaaggacggttttatctgtggttttgtctgcttgtcagtgaaagagatgtttctttttcttatgattgaataaatatgcagtaaatactaaatattacttatatgttaataatgtctaacttctattgagtgttttctatgtatcaatcatagttataagttatttccctatggagccaatttaattttcctgtcagctcatttaattcaacaacctyctaaaacacagactattattgctcctattttacagacaaggaagctaagactgttttctaaaaatttccatttttattttagattcaagggtacacctacaggtttgttacaagtgtacattgtgtgat

SEQ ID NO: 160471 - DNA, 583 bp, Homo sapiens
attttgatgggtttataatatgttattttattataaagtcatgaattatcttgcttatttcctgattgtagagatttctttagattttgtacttttaaatgtagcctcttataaaatagagattatatgtgcatatattgtatacaaatatgttatgatgtgaacatgtagtgacccatagtgtatgtaaaattaaaagagtcattatcttctcgtttcataaaattaagcattacatattcttaagtatygtcaaaaacaggattatgattttaaagactgtctagaaatctgtaacaagaatgttttacgtacccatgaatttgctgtttctcatatttcttccattttactatgattagaaaatactttggccaatgtttatgttcagtcataacatatgttcagttcatatttcacctatatttcattagacattgtattagtctgttctcacattgctataatggactgcccaaggctgggtaatttacaaaggaaagagggttaattaactcacagttatgcatgtctagggaggtatcaggaatcttacaatcatggcagaagggaaagcaaacac

SEQ ID NO: 160472 - DNA, 501 bp, Homo sapiens
gccttagcctaccaaagcactgagattacaggggttagccaccacacctagaccttttttttttttttttttgtctgagacagggtttctctctctgttacscaggctggagtgcagtggtgcaatcatagctcactgcagccttgatctccaggactcaagagatcctcctgcctcagcctcccaagtagctgggactacaggcgtgtgccactacacctggcttttttttttccagtagagataatgtcgcgttaccttgcccaggctgacagtcttcttgacagagcaagaaatctctaacttcaacatggaccaagaaacattctagagggtctcatcagtatccctcagcccgagaattaccgaagcagaggtgaaactcctaggatggacatcaaaccacccaagccctggccttaactatcacccctggactcagtcagaactggaccaggtctgcagcaggggataaactgttgtcatctgctgtgcagaatt

SEQ ID NO: 160473 - DNA, 501 bp, Homo sapiens
gccttagcctaccaaagcactgagattacaggggttagccaccacacctagaccttttttttttttttttttgtctgagacagggtttctctctctgttacccaggctggagtgcagtggtgcaatcatagctcactgcagccttgatctccaggactcaagagatcctcctgcctcagcctcccaagtagctgggactacaggcgtgtgccactacacctggcttttttttttccagtagagataatgtcgcgttaycttgcccaggctgacagtcttcttgacagagcaagaaatctctaacttcaacatggaccaagaaacattctagagggtctcatcagtatccctcagcccgagaattaccgaagcagaggtgaaactcctaggatggacatcaaaccacccaagccctggccttaactatcacccctggactcagtcagaactggaccaggtctgcagcaggggataaactgttgtcatctgctgtgcagaatt

SEQ ID NO: 160474 - DNA, 501 bp, Homo sapiens
gccttagcctaccaaagcactgagattacaggggttagccaccacacctagaccttttttttttttttttttgtctgagacagggtttctctctctgttacccaggctggagtgcagtggtgcaatcatagctcactgcagccttgatctccaggactcaagagatcctcctgcctcagcctcccaagtagctgggactacaggcgtgtgccactacacctggcttttttttttccagtagagataatgtcgcgttacsttgcccaggctgacagtcttcttgacagagcaagaaatctctaacttcaacatggaccaagaaacattctagagggtctcatcagtatccctcagcccgagaattaccgaagcagaggtgaaactcctaggatggacatcaaaccacccaagccctggccttaactatcacccctggactcagtcagaactggaccaggtctgcagcaggggataaactgttgtcatctgctgtgcagaatt

SEQ ID NO: 160475 - DNA, 529 bp, Homo sapiens
cattaagctattctgttctctgcttcatctcttagattggtggaacgagaatgcctacacgcagccacaggaatccagtttccatggaaaccaaaagcagttgcttgcctgctcagcaagttgaaactgaaggagtggctccacataaaagaaaaataacttgaggactgtaccatggaaaactaaatttaaaaaamcagttataacagtgtttaatttagataagtttgagggaaaataatcagtaggcaagaggaacatttttcctgtagtagctagagtgccttgaaaaaatgtgttggctatgtgaaggaatatttcaactaaaatggaatggtatgcttttcacccttgaagtttgaggaggatcttgatatgttttaacattatcatggcagggaaatatataaagaagaaaaatatttttacattaaaccttttctaaaaattgtaaatagaaaaataatttggttttttatcaagaacaacacttatcgttatgtattgtgttagttatattgccagtctg

SEQ ID NO: 160476 - DNA, 529 bp, Homo sapiens
cattaagctattctgttctctgcttcatctcttagattggtggaacgagaatgcctacacgcagccacaggaatccagtttccatggaaaccaaaagcagttgcttgcctgctcagcaagttgaaactgaaggagtggctccacataaaagaaaaataacttgaggactgtaccatggaaaactaaatttaaaaaaacagttataacagtgtttaatttagataagtttgagggaaaataatcagtaggcaagaggaacatttttcctgtagtagctagagtgccttgaaaaaatgtgttggctatgtgaaggaatatttcaactaaaatggaatggtatgcttttcacccttraagtttgaggaggatcttgatatgttttaacattatcatggcagggaaatatataaagaagaaaaatatttttacattaaaccttttctaaaaattgtaaatagaaaaataatttggttttttatcaagaacaacacttatcgttatgtattgtgttagttatattgccagtctg

SEQ ID NO: 160477 - DNA, 590 bp, Homo sapiens
aactaacttgctttcgattttacaggctcataggtggaagagacttatcttgtctcagatgagactttrgactgtggacttttgagttaatgctgaaatgagttaaggctttgggggactgttgggaaggcatgattcattttgaaatgtgaggacatgagatttgagaggggccagggccagaatggtatggtttcgctctgtccccacccaaatatcatctgaagtgcagctcctagctcccataattcccacatgttgtgggagggacccagtgggagataattgaatcatgggggtggtttcccccatactgttctcatgatagtgagtaagtctctcaagatctgatggttttataaggggtttcccctttcacttggctctcattctctcttgcctgctgccatgtaagatgtgacttttgccttctgccatgattgtgaggcctccccagtcatgtgaaactgtgagtccatcaagcctctttttctttataaattacccagtgtcaggtatgtctttatcagcagagtgaaaatggactaatacagggtatgtttaaagtttcagtaacaataccactggtt

SEQ ID NO: 160478 - DNA, 590 bp, Homo sapiens
aactaacttgctttcgattttacaggctcataggtggaagagacttatcttgtctcagatgagactttggactgtggacttttgagttaatgctgaaatgagttaaggctttgggggactgttgggaaggcatgattcattttgaaatgtgaggacatgagatttgagaggggccagggccagaatgrtatggtttcgctctgtccccacccaaatatcatctgaagtgcagctcctagctcccataattcccacatgttgtgggagggacccagtgggagataattgaatcatgggggtggtttcccccatactgttctcatgatagtgagtaagtctctcaagatctgatggttttataaggggtttcccctttcacttggctctcattctctcttgcctgctgccatgtaagatgtgacttttgccttctgccatgattgtgaggcctccccagtcatgtgaaactgtgagtccatcaagcctctttttctttataaattacccagtgtcaggtatgtctttatcagcagagtgaaaatggactaatacagggtatgtttaaagtttcagtaacaataccactggtt

SEQ ID NO: 160479 - DNA, 642 bp, Homo sapiens
gtgtccgggagtaaatatgttacattttctcctattctcttttagatggaggcagtgatgtgctcatgtgtggtctccagcctcttttcttccatcccagtggctaggatggttcaggatccatatgctgtggttataagatgsggaagcctcagccgtcccaggtccttgagtaacaacatggagtatcaaccagcaatggccgtataatacaagtaagaagtaaacctttgttttcttaagccaagggggttttggagttaatttgtcattgtagcatgtacctaatgaatacagaccttatcatactccacttctgcatcatttaggattcttatccagaacaatctctttggaataatttacatctctggcttctggaagtcccctctctccttattctcttccctctcagacattgtctcagtagccttgaagctcttctcttcatctacccatgttccttcaagagattgttccctagggctttttccttggtttctattttctattgctctccatactttccataaattattttataaaggcctgtatctgcaacaatcaaatttatcccaacaggctctaaatttatattgccagatcattcctttcttttgaataacaggatcatatgtttaa

SEQ ID NO: 160480 - DNA, 386 bp, Homo sapiens
aagccattaactcaggaatttatatctcccaccttctcttttgagttccagattcatataaccaatggtctacttgatatctcaaatcttacatatctaaaagcaagytcttgattttctccccaagtatgtttctctcttcagtcttcattgtctcaataatggcactaccatatacccatggcacatgccagaaacctgcaactgcctgattcctccttagactccaggccagaccctgtaagtcttggctcctcctccttcacatctacttatatactctatactatatagagagtccactatacacacacacacacatatatatatacacacacacacacacacacacacatatatatacatacacacacacacacacacat

SEQ ID NO: 160481 - DNA, 560 bp, Homo sapiens
gcatacagctcaggagtgctaaactgagatttggcccctgaagtcttccagaaatgaagccagacaactgaatccacctgttgccacaatcaaacccccaaggcaccaaagaagataaaagcaaaaccccatycaaaggacagcaacttcaaagattgaaggaacatcaacacacagagaggagaaagaaccagtgcaagaactctagcaactgaaaaagccagtgtcttcttacctacaaactaccacactagttccccaggaatagctcttaaccaggctgaaatggatgaaataacaaatatggaattcagaacatggataggaaagaagatcattgagattcagaataaagttgaaacccaatccaaggaatctaaggaatacaataaaatgatacaagagcagaaagagaaaatggccatttttagagagaaccaaactgactttacagaactgaaaaactcactacaagaatttcataatacaattgcaagtactaagaacagaaaagaccaagctgaggaaagactctccgagctcaaagtctgggtctctga

SEQ ID NO: 160482 - DNA, 560 bp, Homo sapiens
gcatacagctcaggagtgctaaactgagatttggcccctgaagtcttccagaaatgaagccagacaactgaatccacctgttgccacaatcaaacccccaaggcaccaaagaagataaaagcaaaaccccattcaaaggacagcaacttcaaagattraaggaacatcaacacacagagaggagaaagaaccagtgcaagaactctagcaactgaaaaagccagtgtcttcttacctacaaactaccacactagttccccaggaatagctcttaaccaggctgaaatggatgaaataacaaatatggaattcagaacatggataggaaagaagatcattgagattcagaataaagttgaaacccaatccaaggaatctaaggaatacaataaaatgatacaagagcagaaagagaaaatggccatttttagagagaaccaaactgactttacagaactgaaaaactcactacaagaatttcataatacaattgcaagtactaagaacagaaaagaccaagctgaggaaagactctccgagctcaaagtctgggtctctga

SEQ ID NO: 160483 - DNA, 616 bp, Homo sapiens
tcaaccagagcagttctacctatttgttttatgttttgctgggattccatatgagattttgtttaatataaactagtacttttctgccttagaaaaaagcccacgatggcaactactgatccagttcagatgttggcaaacattctttgtaaagatccagaaagtaaatattttagacttcaggaccacatattcccatcacatattcttttttttttwaatcattttaaaaaaagtaaaaaccattctcaccttgcaggtcacatgcaaatagggcagaggaatgacctagtttgactatgccgttattttaggtgatgaaactagagtctggagagggacggtatcttctttaaccacaaaataagcaaatagctgagacaggctttgaacctgcgtataaggagcactctgcagaaacataattcctgtgtttcctaacaaggctctctgcttcatcagccacagtcccaacctgttttgtgatctaaccattgtttattgcaacaacaacaaaaccttttcagtttctctgctacaaaattgacagccacagcacactaagcattttttcaaccaggaaaacgtacgtacatttggatattttcccaaggca

SEQ ID NO: 160484 - DNA, 585 bp, Homo sapiens
ggctgatataaaagaaatattgtaaactggatagtttataaacaataaacatttattttcacagttctggaggttgggaaaccaagatcactgtgccagcaaattcaggctccactctctgaatactttcttttcttttttttttttttctagtctcctctttcctgattgtttttttatatactttaagttctggggtacatggtctgctgcctttttttcagagatgccctgcgtagagaggcagtctggccacagcggtcttgctgagctgtggtgggctctgcccagttcaaatttcctctgaatactttcatatcagggattaggtttaaaaatatgaaagccattttggcccattcctcctaaacggcccttcatgmtatgtcctcacatggtggatggggctagtcagctctccaggatctctttcataagggcactaatccatttcatgatgatagagccctcaatctgatcacatcccaaagccctcacctctgaataccatcacacctatgaattttgttaaacacaaatattcagatcatagcaagatagatgtgattcaatgttttcaatttc

SEQ ID NO: 160485 - DNA, 503 bp, Homo sapiens
aacaaccctctgcttctgtaggtgggttttagaatcactaaattagaacatgatgccaatcagaccagtttgatccaataggatcaatgaatttcatacggagaaaaatctctgaccaatgataacaaattatatctttaaaagcttttctaccattaagtgatttttttatagaggagaaaaataaacagaggactaagtataaagtaaaagtgggtgaatataagtcatttttctgctactgagaagataactgaaacctacgtgccatagaaagtatatgacagaatcatcatcccataaaaagcccacaggagttggttggatyttcgtagatctttgcataaatgctaggacgggaattagcctgcaaagtataactgcagtttttaagccttatgcaaactttgtgaaactggaaaagaatctccaaaaatgtataatgtcttgtaatacaaatgtcctaacccaatttaactgataaactaaaaatacagaaagtt

SEQ ID NO: 160486 - DNA, 381 bp, Homo sapiens
gaattcggttgtcttgctgcttactagctggtagcacctggctttccagcaggctggttgaaaacagaaaatgcttctctgcttaagacagggaaagggcgtgggctttggcatcagaaacctggctttcctgtagactagctgtgtcgggcctggggcgtcttcccaagactcaatttccctgtctgtgataatacgtgcctacttctcagggcattataaggactgaacaagaatgtctgtgtgaaacaccaggcgcatggtcgggggtggtacatggtagttcttcccgggtgacaccatattcatcccakggtccatgggacaatgaggtcaaagaaggaccagctgaggctggtgtgcctgcttgctggcttagta

SEQ ID NO: 160487 - DNA, 405 bp, Homo sapiens
gctgtgagacccctgatttcccactccacaccctatatttctgtatgtgtgtctttaattcctctagtgctgctgggttagggtctccacgaccgagctggtctyggcaagtggtgcccatacatggggctcaaacccaggttgaagggtcaccagagtgacattggagaacatggaactaagctggaggacacctgagtactcttaagcaatccccgtggtgaataagaaggggagctaggaagcatcagggtaacaatgggacaaatgtaggttctggttaattccaccttggaaccttttcacactaacgatgaggaggaaggagagtataatgaagtaacagagcaggtttgtttgccagctaaagctaaagcagcaaaggagggagaggtttgtccctac

SEQ ID NO: 160488 - DNA, 504 bp, Homo sapiens
aagacagtataatttctctgagcctcagtttgctcatctgtaaaatggagacattatgagtactttgcagtattttcatgcaggtgaaaagaacccaactccacgtctgacatgatgaaatctccraattttatctgtcctctcccttccagggccaggtggggtgtgcagtggggcctctgggcccaggtgttggcattggacacttggttcctcctgggctctgttcccagcttttcctacccatatttccaggtacccaaggctaactgcctcccccagaacaacccccagattcgttccaccttaaaaggtccttgagctctcactagaacaaccaaacaagagaacagaacattagagaaaattgcttgtctaaaatagacaaataattttcatttcatccttctttctgtgctccactttatctgtcttcttgctgtccctttttctatataagccaggcacgagggcgatattattcttctaaattctcaagatgga

SEQ ID NO: 160489 - DNA, 445 bp, Homo sapiens
gtgcatgcttcttggttcaggagaagaaggcagattggtagctggttacatatacctgagtagtaaaagatggcacaggctgaaagaccatagggaaaagcagaaattggggcccagaatggtttcccataccctaccccaataataattagaaaaggcagccaaggggaggaaaatcattgagggccatccttgggtttgtatgagcctttgccatttttgtattcttgacatggttgctgcccctcagctgacagttctacccccattttacagaaaagagatggctaaatcrtttattccaggtttcacggctaggaagaaacagagctgaggctcaaattcaggcctgtgccccgccctctccaaatacactctttcagaaacatgccatgtccaggaatgccaggtggatggaggggtgtccacatgttaacattcaggc

SEQ ID NO: 160490 - DNA, 394 bp, Homo sapiens
atccagggaaaatctccctgaaacccgatccctccccttatcgaggggcaggcagattagcctgattgattgaacaatggacgccgaggctttaacacgatctccatgtggctcccgtgcagaagaggctctgggcagatgcagggcctgcctagtggaggaacctgtcctgtggggtcagcatcatcggcctcccaggctgctggagggagagagctgagaggacccactgctaccagggcgacactagaatcctgaccaccacttgcaccatgtaggggctgctttccctgcacgatccaggtccttggttgggcttacgtgctccacattgtgagtgcctgtcgtcttcrtcatcgtcatcatcgtcatcactactgctatttcacaggta

SEQ ID NO: 160491 - DNA, 585 bp, Homo sapiens
cactagataattgaaataagggattttttccccatggaaattatctaaataagtctcaagtttcttgtggctgcaatagacatggactgataaacaagggacttattcgccctggatgaaaatctaacccctggtcatatttccagaagacagaaggacaaccttaccttttcagaaactgggataaaaatgcaattcccaatctcacaataattgtttagtacaamgaaccaagctagagaatccctggggagatacaaaattcatattaagatagtagaaattaaaagtcctaatgaatgtgactttactttttgacttcaccttaaaaagaagcttttgaaaattgatttatattttccatgtttaagtgagaatacctacgatgagagtaggagggtctaaaatcagaatttctaaattagaccctgattcttgttacttagtgaaactttctgtccaccgaagggtttggttggcatctttttttaaactttattggggcacaatttacttaaagtaaaatgtacccattttgagtgtacaggttgtggaatattgacaagaccaacctagcacaggcaa

SEQ ID NO: 160492 - DNA, 585 bp, Homo sapiens
cactagataattgaaataagggattttttccccatggaaattatctaaataagtctcaagtttcttgtggctgcaatagacatggactgataaacaagggacttattcgccctggatgaaaatctaacccctggtcatatttccagaagacagaaggacaaccttaccttttcagaaactgggataaaaatgcaattcccaatctcacaataattgtttagtacaaagaaccaagctagagaatccctggggagatacaaaattcatattaagatagtagaaattaaaagtcctaatgaatgtgactttactttttgacttcaccttaaaaagaagcttttgaaaaytgatttatattttccatgtttaagtgagaatacctacgatgagagtaggagggtctaaaatcagaatttctaaattagaccctgattcttgttacttagtgaaactttctgtccaccgaagggtttggttggcatctttttttaaactttattggggcacaatttacttaaagtaaaatgtacccattttgagtgtacaggttgtggaatattgacaagaccaacctagcacaggcaa

SEQ ID NO: 160493 - DNA, 585 bp, Homo sapiens
cactagataattgaaataagggattttttccccatggaaattatctaaataagtctcaagtttcttgtggctgcaatagacatggactgataaacaagggacttattcgccctggatgaaaatctaacccctggtcatatttccagaagacagaaggacaaccttaccttttcagaaactgggataaaaatgcaattcccaatctcacaataattgtttagtacaaagaaccaagctagagaatccctggggagatacaaaattcatattaagatagtagaaattaaaagtcctaatgaatgtgactttactttttgacttcaccttaaaaagaagcttttgaaaattgatttrtattttccatgtttaagtgagaatacctacgatgagagtaggagggtctaaaatcagaatttctaaattagaccctgattcttgttacttagtgaaactttctgtccaccgaagggtttggttggcatctttttttaaactttattggggcacaatttacttaaagtaaaatgtacccattttgagtgtacaggttgtggaatattgacaagaccaacctagcacaggcaa

SEQ ID NO: 160494 - DNA, 545 bp, Homo sapiens
ggactgacactgagaagtggtggctctgatgttaccacctagagaatgcatttgtgccctgtgaatctggggtccagcggctcttctgtcctgccccttctctctctctctctctctctctctcgtcctctgactccrcaggctttagccttgtctcctagccggggcatgtgtgaggtcctttgcaagtgactggggactctggaaacatgaggtggtgatatccaggggtgaactcctgacacgtggcttgattttcccaagtcaagaccctctgcttttcctaggggtctgccttgggtgtgggtttgagcattgcgggaggaagaaggagagggaggcagtgggctgtgctctgcctggaagcatgcaggaagctgatgggaaacagctgagccaatagctctgcacacacagaaaataaatcctggcttccgaagaagctgcagaaaattgattttttgcagcttcagtggtcatcttgaaggatttgggggatggaaatggggcccatttctcatctctgttctgtgctgctgggtcag

SEQ ID NO: 160495 - DNA, 545 bp, Homo sapiens
ggactgacactgagaagtggtggctctgatgttaccacctagagaatgcatttgtgccctgtgaatctggggtccagcggctcttctgtcctgccccttctctctctctctctctctctctctcgtcctctgactccgcaggctttagccttgtctcctagccggggcatgtgtgaggtcctttgcaagtgactggggactctggaaacatgaggtggtgatatccaggggtgaactcctgacacgtggcttgattttcccaagtcaagaccctctgcttttcctaggggtctrccttgggtgtgggtttgagcattgcgggaggaagaaggagagggaggcagtgggctgtgctctgcctggaagcatgcaggaagctgatgggaaacagctgagccaatagctctgcacacacagaaaataaatcctggcttccgaagaagctgcagaaaattgattttttgcagcttcagtggtcatcttgaaggatttgggggatggaaatggggcccatttctcatctctgttctgtgctgctgggtcag

SEQ ID NO: 160496 - DNA, 585 bp, Homo sapiens
caatcggacaagaaaaagaaataaaaggcacacaaattggaaagaaaggggtaaaattaaccctatttgcagatgtcakgatcctttatgtagacaactccaaagattccataaaacaactgttagaagtaacaaattccgtaaaattgcaggacacaaaattaacacacaaaaattaattgcatttctgtatatcaataataatctatccaaaaaagaaatcaagaaaaataccatgtatgatagcatcaaaaaggaataaatttaactaaggaggtaaaagaagtgtacactaaaaattctaaaactgataaaagaaactgaagaatacacaaataagtggaaagatagtgtatgttcatggattggaagaatattagaaaaattcctataccatgcaaagcaatatacagatgcaatgcaactcctgccaaaattccaatggcattatttacagaaataaaaaaaaattctaaaattcatagggaagcacaaaagaccccaaatagccaaagcaattttgcaaaacaaaaacaaagttggaagcatcacacttcctgatttcaaattatattataatgctaa

SEQ ID NO: 160497 - DNA, 592 bp, Homo sapiens
taactcaaacagtaaaatattcagcaagtcagtaggacataaaataaacactaaaagtcagtggcctttataggcacaaataataactaattataagatgtaaacagaaaagaaacttccatttataatagcaatgaaaataataaaatactcagaaataaatctaacaagaaatgttgaaaacctatacaaagaaaaccataacaccctcctaaaaaccataaaagttgacttgaataaatgcaaaagataccccttgttcatagtcaggatgtctcatcattaaattaatgatataaatttaatttataaacagttawaaaattactcagttaatttataaacttaatatgatgccttaaaaattctaaatggcttttttctgtagccagacaagttgatagtaaggttcatatggaaaaattaatttgcaagaattggtaggcgggaaaacactgaaaatgcaaagctctaaggaaggaaccagccctaccaggtatttttaaatattacaaagcctctataattaaaggtatggtaatagcacacaaagagacagaccagtggaatcgaatccaaagaccagaaataa

SEQ ID NO: 160498 - DNA, 623 bp, Homo sapiens
gatggaacaatcgaacaatctctatgaactgatatggagtgatttctagaatatatygtcaggtggaaaaagcaaggctcaaaagaatacataatatatactagcactatgtaagaaagaagaggaaactaggaaacatacatgcatttgtttatttttgccaaaaaaaaacataggaaggaaaaatcagaaaaatataaaattgtttaccttctggggaatggcggaggagatagagtgaaagggatacagaagtgacacttttctcggtattttttttgtataacatttaattttggaagcatattcataaactacagaatcaaaaaacaaggatgaggggaacaaaaaccaaattgaaagcaaacgagccaaactgtattgcaaataaatcctaagaaaactgctgatgaacccaaattcagaaccacactgatgtgggaaagcactaatcctagtaattgttgaacaaagtatattgactatatgtcctcagcatagaagaaaaagaactgcaaactaattgtgaactctttcacttagacttgtttctcacagcagtatgggtgtaccaattttgaaacaatcttctatatacagtataggattgagactgagtaaat

SEQ ID NO: 160499 - DNA, 623 bp, Homo sapiens
gatggaacaatcgaacaatctctatgaactgatatggagtgatttctagaatatattgtcaggtggaaaaagcaaggctcaaaagaatacataatatatactagcactatgtaagaaagaagaggaaactaggaaacatacatgcatttgtttatttttgccaaaaaaaaacataggaaggaaaaatcagaaaaatataaaattgtttaccttctggggaatggcggaggagayagagtgaaagggatacagaagtgacacttttctcggtattttttttgtataacatttaattttggaagcatattcataaactacagaatcaaaaaacaaggatgaggggaacaaaaaccaaattgaaagcaaacgagccaaactgtattgcaaataaatcctaagaaaactgctgatgaacccaaattcagaaccacactgatgtgggaaagcactaatcctagtaattgttgaacaaagtatattgactatatgtcctcagcatagaagaaaaagaactgcaaactaattgtgaactctttcacttagacttgtttctcacagcagtatgggtgtaccaattttgaaacaatcttctatatacagtataggattgagactgagtaaat

SEQ ID NO: 160500 - DNA, 629 bp, Homo sapiens
atcgccctgccctcccagctcctcaggccccatccttccccactcaacccccagccacccctcgcagcagaggctatccaacacaggaaggaggacaggagagctccagcccattcacctgcacttcctaatgctcacaaagcagcgcgtttgccccataactcatcccccccaacacccaaataaccctctgcctagggtactctgggaggaagagcacctcgaaatatgagaaaccagcttacttcaaaaagacagcacttcctagggcacccagccccaaatacctgttccaggaaagaggttcaggttcccgaccccagaaagggatatggccactaatctgctcctgcagggactggcaagattcttgttggggtctgccttgtttaccctagaagaggaggcaggaggtcaaaagacasaaacccagctacctcagttagaggacaaagtcaaaagccacctttgaggtgggcaggaggaaaggtgatgcccctgaaacacacataggaacgggcccacattggccctgagttgggcccctctcatgtgtcccaaacttgcccatcacttgagatgggcaacacctcttgcctcccccaacagcatccagagaggtgctcact

SEQ ID NO: 160501 - DNA, 591 bp, Homo sapiens
ttaagaactattgttgtggggcttttctgttcttctggatcaattctgcacaacataagactgagtctttaggaagtgaattctcaggacagcasacagaagcattttcatgtttaggctaaaacatggcccgggccaaagagaagccatccctcagaagcccctcctaagccacaagatgactcaagaacacaccaagaaacatattctggtgggctcatccaggccctcaagggggtccagctttttctgctctgggtcgccagggctgctgactggccgttccacctcttcctctcggtcccctcgctcatccagctctaggtctccgtgctcagtcaaagcgttgatctccttttttgaggagtacagcatgatggacaaaatctacacagaaagaaaatccagctgaatgtgagcactcagtgggcgggaagatggtacagtcctttaatcatgaaaatattgggcctaactttttaagacatcagaatctacctgaagaatgtgaaattagaaaagaaacacgaatgtatgtttaattacactttgtgaccgaagaaatactaactgaacactatgggaaccttt

SEQ ID NO: 160502 - DNA, 579 bp, Homo sapiens
tgagtttataacccaaaatattaagaactattgttgtggggcttttctgttcttctggatcaattctgcacaacataagactgagtctttaggaagtgaattctcaggacagcacacagaagcattttcatgtttaggctaaaacatggcccgggccaaagagaagccatccctcagaagcccctcctaagccacaagatgactcaagaacacaccaagaaacatattctggtgggctcatccaggccctcaagggggtccagctttttctgctctgggtcgccagggctgctgactggccgttccacctcttcctctcggtcccctcgctcatccagctctaggtctccgtgctcagycaaagcgttgatctccttttttgaggagtacagcatgatggacaaaatctacacagaaagaaaatccagctgaatgtgagcactcagtgggcgggaagatggtacagtcctttaatcatgaaaatattgggcctaactttttaagacatcagaatctacctgaagaatgtgaaattagaaaagaaacacgaatgtatgtttaattacactttgtgaccga

SEQ ID NO: 160503 - DNA, 542 bp, Homo sapiens
actgcaataacatgtgcaccatgcggtcttccgtcctgaaggagtctctggatcagctggtacaaaaggaaaagggtatgtgtgtgtgggggttctcctgaaaatactctgatcatttcttctaactgttgtgttggtaaaatgagccaattcttttccctgccttcatttctgaaaatacagagtcatgagtttgtaacgtaagaatgtgatctttctcctcattccctttcttcttaacacagctggtttctcatcattcaattctctgctcagatgtgactttgagggatgcctttccgctttatctaattaacacctcccctaccccaccttctggtcagggtcacctttgcaggtttaatggtggaaatygcgcttattgttatctgaagttgtagcattattgattcacttgtgtgttgtctgtcttgtctgcttcctcattcctgcactgtgcctgttgcatggtaggtattcaatgagtatttgctggataaatgaaggaagccaccacagactcacttggagatggcaacaga

SEQ ID NO: 160504 - DNA, 477 bp, Homo sapiens
gagagaaaagagatgtaaggataggaggagtggcgctgagaaccattttttgtattgtcctgtccaggtttttacacagcaccttccsaattcagtgtgggcgccgaataagtgtggaaagacagtagtaacatgctggaaaggctcacattctaaaacctatcctcctcatgcaaaaactagcttttctaaaatacatactggtttgtagatccttaaagaaccatatattagactcatttaaaccttcataggatccgaaactgataggcaaataccaggtttcctgtgaatacttgtaattatgcagttcttcatataatcaccaagatcatgtctgctaagtcattaagagagcaaattgatttggcaacaaaatattttccttggaaggcattttgggagtttatttactgggcgcttcacttcgagttaagaagactgatccagggttacccagtgaatcattagtaaaac

SEQ ID NO: 160505 - DNA, 478 bp, Homo sapiens
ggtcttgccctgtcacccaggctggagggcagtggcactatcttggttcactgcaacctccaccgctcaggttcaagcaattctcgtgcctcagcttctcgagtagctgggattacagatgtgtgccaccatgyctggctaatttttgtatttttagtggagatagggtttcaccatgttgactatgctggtctcgaactcctgacctcaagtgatctgcccgccttgacctcccaaagtgcggggattataggcatgagccactgcatccagcccaaatattagttttttcacctatacttttggcagtggggtaagggacagaattttttttaatagagacagggtttcactgtgttgcccaggttggtctcaaactctcggtctcaagtgatcctcctgcctcagcctcccaaagtgctggaattacaggcatgtgccactgcacccggcaaagggacggatttttgtattgatt

SEQ ID NO: 160506 - DNA, 478 bp, Homo sapiens
ggtcttgccctgtcacccaggctggagggcagtggcactatcttggttcactgcaacctccaccgctcaggttcaagcaattctcgtgcctcagcttctcgagtagctgggattacagatgtgtgccaccatgcctggctaatttttgtatttttagtggagatagggtttcaccatgttgacyatgctggtctcgaactcctgacctcaagtgatctgcccgccttgacctcccaaagtgcggggattataggcatgagccactgcatccagcccaaatattagttttttcacctatacttttggcagtggggtaagggacagaattttttttaatagagacagggtttcactgtgttgcccaggttggtctcaaactctcggtctcaagtgatcctcctgcctcagcctcccaaagtgctggaattacaggcatgtgccactgcacccggcaaagggacggatttttgtattgatt

SEQ ID NO: 160507 - DNA, 478 bp, Homo sapiens
ggtcttgccctgtcacccaggctggagggcagtggcactatcttggttcactgcaacctccaccgctcaggttcaagcaattctcgtgcctcagcttctcgagtagctgggattacagatgtgtgccaccatgcctggctaatttttgtatttttagtggagatagggtttcaccatgttgactatgctggtctcgaactcctgacctcaagtgatctgcccgccttgrcctcccaaagtgcggggattataggcatgagccactgcatccagcccaaatattagttttttcacctatacttttggcagtggggtaagggacagaattttttttaatagagacagggtttcactgtgttgcccaggttggtctcaaactctcggtctcaagtgatcctcctgcctcagcctcccaaagtgctggaattacaggcatgtgccactgcacccggcaaagggacggatttttgtattgatt

SEQ ID NO: 160508 - DNA, 478 bp, Homo sapiens
ggtcttgccctgtcacccaggctggagggcagtggcactatcttggttcactgcaacctccaccgctcaggttcaagcaattctcgtgcctcagcttctcgagtagctgggattacagatgtgtgccaccatgcctggctaatttttgtatttttagtggagatagggtttcaccatgttgactatgctggtctcgaactcctgacctcaagtgatctgcccgccttgacctcccaaagtgcggggattatagkcatgagccactgcatccagcccaaatattagttttttcacctatacttttggcagtggggtaagggacagaattttttttaatagagacagggtttcactgtgttgcccaggttggtctcaaactctcggtctcaagtgatcctcctgcctcagcctcccaaagtgctggaattacaggcatgtgccactgcacccggcaaagggacggatttttgtattgatt

SEQ ID NO: 160509 - DNA, 414 bp, Homo sapiens
tcagatcttttaatctctgggttaaaagaaagaaagatacagagggtggatgatttacagtaacttgggaatcagaaagcaaagcctttaggacatgaccctcaaccaacagtcatggtattagtgtwgaacacattatcatattctcttatggcaattgaaaacacaatggctgattactttgggtatagcacttgcagtatctgcatttctaattaggacagcatatcatttgctttattaggcaaaataaaatgatctcaaatgcaacaagcaaattttagaacactgggaggaaagaaagggactatttaatcacctgctcctccaggatgcaaaactagacaaacataacatgagataaattgtaataacacaagccaaagagaacagaaaggggttaggctagtacag

SEQ ID NO: 160510 - DNA, 568 bp, Homo sapiens
tgtgtgggacttaaggtatgatccatcctgacacaatttgttctccagcgggaacccatgaaatcaaataagttatgtgctkccaaaatataattgtgagacaatggacaggcctaggatagacattcccatgtatggaatacatgagattagatacatggaatacataggagtaggatagatactcccaaaagggagaaatagaagagaagaaaagagtaatagatctcaagtaggtccaaaatccagcaaagcaaataacattaaatcttaaaacttgagaatatatcttctctttatgtcttgctttccagataaattggagcagggtttggtccctaagactccaggcagtcccattccttggtttgccaggttgctgtcaggtgcatgtggctcttccaggctaagttgcatgcactactattttggagttttggaggcagctccacttcccactgctccactagatattgtcaaagtaggggttctctgtggtgaccttgctcctacagcaccattagacactgtcctagtaggggagctctgcagtaagtctacccctgta

SEQ ID NO: 160511 - DNA, 554 bp, Homo sapiens
cttgacaaaaattttgctgtgttatatgcagattactttcaaataattgtaagtaatgtatttgacattggtattgctaaattgtgtagcttgacattgtcatataatgagcaattaatggccaaaaacagtgaataaaattttcactcttatgtttaggtttgaaactataatcaatggtgaaaaaaaaaaaaaaacaggaactgcatcaaagacagtwtaaaacacatagtacaaattttgtggagtgttttgttttttgggttttttcttcaacttttattttagatgtagggggtacatgtgcaggtttgttacatgggttatacactattgggggattgtaaattagttcagacactgtggaaagaagtttggagatttctcaaagaacttaaaatgaattttcaatgtggtatttgcttccaaaacaaacctaaggtcaataaaaaggaagaggattaatacctgtaagttctttctatgtgtcaggcattttaactcacatgttatataaaccacagaataacattaattacttagtaatagaatcc

SEQ ID NO: 160512 - DNA, 237 bp, Homo sapiens
agctcttcaaaatatattgttcattttagttagtaacaatctacctaacaaattgttgagatagtaacctctcagattaattcaaccatgcttacaggtgaattctatgtaaatcaagcaaaacttargtgtgagtgatatttcaatgacactgtttttggtggctgcacacatacttggtcaaggtggaattatcatcttcaaatgtatttaaataaatgtattgaatgagtgtat

SEQ ID NO: 160513 - DNA, 596 bp, Homo sapiens
ctagctgatggacaagcccttgggccttctgggaacattggtggtagtcaggcagtattcaccatgggcctggtgggtggaagtggggggatggttacctatgggaagagacttcttctgcttgaggaaaggggagggaaaagtgggaaacactttgtcttgtggcttgggtgccagctcaattgcagtagaatagagcacaaagcacatccttaagcttcccaactccaggcactggctcccagatggcatttttggacccatgtggactgagtgggggttgaaattaccaccctgaagggaagagggtaagcctggctagattctccccattctgactaaagagcccttgggctttaagtaaacatcaaggataagaaaraagtggtcaccatgtacattgggtgagacccagtgctgtgctggcttcaggtctgatccagcacagtcctagtggtgatagccacagaggtacttgtgtcacctctgtcccagctctggacaaccagcaggagtgttagatttcatttgctggggaaagtaaggaaagagaatcagagtgtctgcctgataatcgagggaattctctcagatct

SEQ ID NO: 160514 - DNA, 407 bp, Homo sapiens
agactacaataaatacataattcttcaatgcccagacattgattgatatctacaagcatcaagaccatccaggtaaacatgatctcaacaaatgaactaaatacagcacaagtggtcaaccccagagtgacagagatatgtgacctttcagacaaagaattcaaaaaagctattttgaagaagctcaacaaaattcaaactaacacagagaagggattcagaatcctatcagattatttcaacagagggattgaaataattagaaatattaaaaagaaattatggagctgaaaaattcaattgagatgctgaaagatgcatcagagtctctcaatagcagaattgatcaagtasaattgatcaagtagaataaagaattagtgagtttgaaaaaaggctatttgaaa

SEQ ID NO: 160515 - DNA, 593 bp, Homo sapiens
ctatagaaacaaatgtatgtaattagactgacacataatatgagcagagctcctttgtctcttaattagtagtcttttcagttaatatatctttgaacaaggtaagccaattgcattaactgtttagtattctcccagcctggctatgaaaactttggtatatatgatatacttttgaaatgcatgcatattcaaaaatttattttaaaagtttatagaaaataatgttaagcagaacataaaacaggttttaagattatagataaaattattttcttttcataatatatgatgtcaaaattattagtaggaactattttaaaatgtcagcaatggttatatgatgattatctctatatttckctactttcttgattatctttggagaccaggttgagtaaaaaagaaagatcattttgcataaacaaatagaaaaatatttattccataaaaatgtagaatgaaggcggtattaagagaattttttaaattgtaaagatagctcaaaaggctatgaaagctaggcttctggctaaataaggtagagataagccataatttctatgtttttatctatgtatattctacttgca

SEQ ID NO: 160516 - DNA, 530 bp, Homo sapiens
acacgttgtggtataaataaagatagtaaagaaattactataatgaagcaaattagcacatctatcatctcaaatatttacccacagttttgcttttgtggcaagaaccacttaaatytactcatttaacatcaatctcttacatggtacaattttattacctatggccctcatgctatacattagctctctagacttattttgttttccttgtatatttaattttttttggattctacatctaagtgagaccatgcaccatttttcttactgcatcttgcttatttcacttagcataatattctccagacttatccagttgtggcaaatggcaagatctcattctttattaggtgtgaataatattacattgcatatatgtaccatggtttctttatccattcatccactgatgaaaacttaggttgtttacatatcttcactactgcaaataatgttgcaatgaacatggaagtgaaggtatatttatgaggtagttatttcatttcttttgggcatatgcccaaagg

SEQ ID NO: 160517 - DNA, 530 bp, Homo sapiens
cccatgcctggaacgcacctccctatgtcttcacctgaatgatgcctycttttcactgaaaaggtccttttgtaaccactatatttagtatagtgatatactagacttactttctagtatatcactttgtattttctagtatactacttattaacttctcactatctgataccgccttacttatttttaggtttttttttttttttttacacttcctactaaaatgcaagcttcttgaaagcagggacatagtctatgttaattttttatttttttattacatagtaggtggtaggtgtatatatttctgggttacatgagagatattttgatacaggcatatgatgcataataatcacatcagggtaaatggaatattcatcacctcaagcatttgtcctttgtgttacccaatccaattatacatttattttaaaatgtacaattaaatcattattgtctatagtcactctgttgtgctgttgaatactagatcttatttactgtactttttgtacccattaacgatc

SEQ ID NO: 160518 - DNA, 495 bp, Homo sapiens
ttttgcctaattacttagtctgtgtagtgttactataaagtactacctgaggctgggtaatttacaaagaggtttatttggcttacagttctacaggctgtacaagaagcatggtgtcarcatctgcttctggtgagggccccagaaagcttccactcatggctgaaaagcatagtggagctggcgtgtgcggagatcacacggtgagagaggaagcaagagagtgcagggaggtgcctgactcttttaacagccggctcccaggcagctaacagagtgagaactcactcactagggagggcattaatctattcatgagattccaacccgaatcaaatgtcagcatgaggctcggaggggttaaatatccaaaccataaacatagcccagagagttgttctttatctttaaagtcagatttattaagtccaattttactagaatattcctggttgttgactgttctgggtccattttggaatggcctgggtgcct

SEQ ID NO: 160519 - DNA, 383 bp, Homo sapiens
gcaaacagttttatgactgactctaacttgtttttaagagaaggttatttcctttatggccttcaacatgtttaatactgattattaagagtgctagagtgcccacaggagaaggggggctcccctcctcacataccaacccctaagtcctcagtaaactcacacagacaaaaacaattctgtaagtaataaacgtaacaggcttggcacatctaataattacttggaagagaaattgggactggaatgcacagaaaacaacctatttgggatttgcttttcaycggcgaagtcatcatcatccggctcatgaattcccaaggccacttgatgggcgttcattaccagtacgcgaagccactctagaatggcactctaagaac

SEQ ID NO: 160520 - DNA, 440 bp, Homo sapiens
tttttatacattttagagatgatggggctatgggtgatttttatttgtgtgtgtgtatgtctgtttcagtattttccaaataaaacagtaagagaatgtctagagaggggctggagcaagatggccaaatataagtttccaccaatcatttcctcttcaggaatacygcatttaacaacaatctacaggaaaaaagcaccttcatacgaactaaaaatcaggtaagcatttacaatacctggttttaacttcatattgctgaaggacacactgaagagggtaggaggacagtctttagttgccaattcccgccatcctccatccctggcagtagctgcatggcacagagagaagctgtgtgtttgggagagagagagtgcagtgattttgagactttgcattgaactcagtgctgccctgtcacagtggaaagcaaaact

SEQ ID NO: 160521 - DNA, 440 bp, Homo sapiens
tttttatacattttagagatgatggggctatgggtgatttttatttgtgtgtgtgtatgtctgtttcagtattttccaaataaaacagtaagagaatgtctagagaggggctggagcaagatggccaaatataagtttccaccaatcatttcctcttcaggaataccgcatttaacaacaatctacaggaaaaaagcaccttcatacgaactaaaaatcaggtragcatttacaatacctggttttaacttcatattgctgaaggacacactgaagagggtaggaggacagtctttagttgccaattcccgccatcctccatccctggcagtagctgcatggcacagagagaagctgtgtgtttgggagagagagagtgcagtgattttgagactttgcattgaactcagtgctgccctgtcacagtggaaagcaaaact

SEQ ID NO: 160522 - DNA, 440 bp, Homo sapiens
tttttatacattttagagatgatggggctatgggtgatttttatttgtgtgtgtgtatgtctgtttcagtattttccaaataaaacagtaagagaatgtctagagaggggctggagcaagatggccaaatataagtttccaccaatcatttcctcttcaggaataccgcatttaacaacaatctacaggaaaaaagcaccttcatacgaactaaaaatcaggtaagcatttacaatacctggttttaacttcatattgctgaaggacacactgaagagggtaggaggacagtctttagttgccaattccmgccatcctccatccctggcagtagctgcatggcacagagagaagctgtgtgtttgggagagagagagtgcagtgattttgagactttgcattgaactcagtgctgccctgtcacagtggaaagcaaaact

SEQ ID NO: 160523 - DNA, 186 bp, Homo sapiens
ctaacctcaaaccctgggaggcccctcaagtcatcagccctaaaactttcatctcaaaataacttacaattctttctaccttgccctgggattccttccacctgccctcttcctttctcgaacctccccccscgccgtgcaaaacccagaacctagcccctcagtctgtccccctccatcaaagtg

SEQ ID NO: 160524 - DNA, 647 bp, Homo sapiens
aaaaactttttttgagacagttttgttctgttgcccaggctggagcacagccgttgcccagctggtgaaatcccagctcactgcagcctcaaactcccaagcttaagtgatcctcccacttcagcctcctgagtagmtgagatcacaggcgtacaccatcacccctgctaattttattttattttattatttatttagaaaccatgtcttgctctgtcgcccaggctggagtgcagtggcacgatctcagctcactgcaacctctgcctcccagttcaagcgattctcctgcctcagcctcttgagtagctggaattacaggtgcctgccaccacaactggctaatttttgtattttttgtagagatggggtttctccatgttggtcaggctggtctcgaactcctgacctcaagtgatccacccacctcagcctcccaaagtgctgggattacaggtgtgagccaccacgcccggcctcaaactttttattgtgaaataaaatggtgatacagagagccaaacattaatcaaataaaaaaaatcagtaataaatattctgctagttttattagcacagtaattctcaaccaagaacattatgggagtgttcctgattattccagcagctggagatgagaaccgttt

SEQ ID NO: 160525 - DNA, 577 bp, Homo sapiens
aagctttaagagtcactacacaattagtgcctttctctttgccacagtacctggcaatgcttcaggtggtagctagtctgttagtggggccctgttcccttcttcactgttttgctttttgcctgtctctgccttatctcaggcttctaccatttctgtcctggatagcctcttaacttatgtccctgttttcactttcactcccctctggtacatctactgcactgtggccaaagtggattctctaaaagaggctctgatcacactcttcttctgtttaaaactctccaggaaattctcattaacttcaggaataagtctacaccttcagcagaatgtattcaagcaggacttttgagaccctcagccactgcccctgtcccatcacaagctagtyggatgtccatcccccataaacccatatcttacacttctatattagtacttttcacaatatctcacagcaacccctgtcagctctctggcagcagaacactgggctgcaaggatcttagtgccactctgtggtggcaccccctcagccctgcaaatcttttttactcacaactgaccaggc

SEQ ID NO: 160526 - DNA, 642 bp, Homo sapiens
agatgatgcaatcatagtgggtgaaaatgtacttcccaagtttttggataattcaatcttaatatggaggccactgacattctgtttgtatccatattttgggaaaacagttgtytaactctacaagtcaatagtctgcctaaaaatgcagccatttatattactacatccaaatttgtggagacttcacaattttctccagaaacaatgataggtacttttatgtaattaaaagttccatcctggtgaatttcccaaaacaaagggaatttgttctaaaacttaactgatatttccaactctgggaactgaaacattcagcaaccacaaattgttgttccttttctaaaagtaatttttaaaagtaatcttaaattcttcccaaaaacccacacgaagttatagttaatattcacaatgaattcaggttaatatggggaaacatagaacaaagatgagatattcacatgcatttatttttaaaagatataattcagagaaatacattggcatttccaagtgtctatcttttttttttctggagaaaagttctagtgtaggccctctttctattttcataacagcattgacacacatttcttcaaacagaattatgttctaattcaaataatttatgaaaat

SEQ ID NO: 160527 - DNA, 603 bp, Homo sapiens
tgctcactttttgtgcccatttttctgaaatgtctttttccaccctttaccttaagtttgtgtgagtctttatgtgttaggtgagtctctcgaaggcagcaggtagttggctggtgaattcttatccattctgcaattctgtatcttttaagtggggcatttaggcatttacattcaatgttagtattgagatgtgaggtaccattccattcattgtgctatttgttgcctgtataccttggttttttgtttttgtttttaaaattatatattttttataggtcctatgagatttatgctttacagaggttctcttttgatgtgtttccagaatttgtttcaagatttagagctccttttagcagttcttgtagtggtggcttggtagtggtgaattctctcagcattcatttgtctgaaaaagamtgtatctttcctttatatatgaagcttagtttcactggatacaaaattcttggctgataattgttttatttgaggaggctgaagatagggcctcaatcccttctagcttgtagggtttctgctgagaaatctgctgctaatgtataatttaaaggtatagttatacctttaaaggta

SEQ ID NO: 160528 - DNA, 385 bp, Homo sapiens
ttttacaatttgatggggttgaagctgtgtcacatctcagcctgatgggcctatttaattagttccagtgagaaggcaggagaaggatgaagtgtcataaaaatagaagtcagtcagccaatgcaattcatgtcagcacataattctgcttccttctccctccacggtcgccgttcgaccacctctttgacactgacagtcacaatctggcagatgtcacttcccacctctgccttccagccaaaggacttaagttgataaaattgttggtgaggagacaatgtagaaaaggccctttacagtataactagtcctaagtcccacggctctgcaggaatcatcttaatggtragaaatgatatcatagacttgaagttgttggggg

SEQ ID NO: 160529 - DNA, 460 bp, Homo sapiens
ttctcagagttttgtagccagggagacatttctcccaattcacctttatttccttctgagccttgagcatactctacttttcctgaggagtgattttcaggagtatgatttgccccctgagaaggatttcagtgatttggtagaggaatgaagagtataaagacttctttgcttaagctgtgtagcagcaattttcttcctttaaaagttaaaccatctcttttccttttcctactctgatatgttctctyacatcaactcttttttaaaaattaacatttagagccacagcaggttgctaagagtacatagcatgccatcgtgttccagggccaccatggcctctgctcctcctgagatcatgatccctgtagagtcctcccagatggatctcttattttccttacctttttcctcaagggctctggaagcatttatcttttcatttaagaccatttat

SEQ ID NO: 160530 - DNA, 498 bp, Homo sapiens
tttgatggacacctaggctgattccctgtttttgctattgtgaatagtgcagcaatgagcatatgagtgcaggtgtctttttggtagaatgatttattttcttttgggtatatacccagtaatgggattgctgggtcaaatgatagttctaagttatttgagatatctccagactgttttccacagtggctggattaatttccattcccacaacagggtataagcattcccttttcttcacagcctctgactggtatgagatggtatctcattgtggttttgacttccatttctctagtgattagtgatgctgggcattttttcatgtgtattggctactttatatcttcttttgagaagtgtctgttcatgtcctttgcccactttttaatggggttattattattattattattattattattattattgcttgtttatttatttaagttccctatagattctggatattagtccttcgytggatgcatagtttgc

SEQ ID NO: 160531 - DNA, 467 bp, Homo sapiens
cataatcaccaacactgttgcagcaacagcagtagcatatttaaaggcaatagtgggtttatttgattgttttccaataaatgggcagtttgggctcttccattttttccttccatggtttataacctgacacaacacgmaacacttacaaaatgccacagaagagaaataggaaaaataaaggtcagggacattaactgatgataggctttactgaaaaatggagtttgttggattgagtttttacactgtttacgaggtggaaaagtggactaatgaaacagaaataggaacctttatctttcttcattgccctctacccagatagaacagctttcttaagcaaagaggaggtaattaatgaataataatactttatctttgtatttttatattttttataattcaaagcttttatgtcccacatctcatttggtaagaatggagtagaaagttggacatgtagg

SEQ ID NO: 160532 - DNA, 467 bp, Homo sapiens
cataatcaccaacactgttgcagcaacagcagtagcatatttaaaggcaatagtgggtttatttgattgttttccaataaatgggcagtttgggctcttccattttttccttccatggtttataacctgacacaacacgaaacacttacaaaatgccacagaagagaaataggaaaaataaaggtcagggacattaactgatgataggctttactgaaaaatggagtttgttggattgagtttttacactgtttacgaggtggaaaagtggactaatgaarcagaaataggaacctttatctttcttcattgccctctacccagatagaacagctttcttaagcaaagaggaggtaattaatgaataataatactttatctttgtatttttatattttttataattcaaagcttttatgtcccacatctcatttggtaagaatggagtagaaagttggacatgtagg

SEQ ID NO: 160533 - DNA, 434 bp, Homo sapiens
gtgtatttctgttaattaatatggtagatgtcaagatgccttggaatataatttttgcataatgattgtaaagtattctttatgtttgctttggtagcaaatataataatgtttgtattcccttcttctctgtttgcttccattaggggttttaggacaggttctcagttcctctgcctcccagctatggggggaagaaaaacacacttctagccaatgtacttaagcaagcatttactagagaagattctggargggcttttgctttttctgatgaaaaggacaaatgtagccagcacatagggctaccatgtatgaagggcagcagaacagaacctgaatcttttgtgacattcttaatcagttaaatcaacactagtgaccctccatatccaaacttcttctcatataagaaaataaatatgattcatgtt

SEQ ID NO: 160534 - DNA, 611 bp, Homo sapiens
ggtgagtggccatattactcttttgtttcaagcatcagtttttttactttcttacttgtattttcatacttcaatagcaataaataaaatctagtgtttaaaaattataaaattcagataggaaaaagaagaaaattaaaatcctccatccatagacaacaataattaacaasttggtacgtaccacttttctatgtgtacatgcacatacatatatttgcacaagatatgagataacagtatacattccaatttaaactacatttttacttaatgtataaaacaaacatgcttccataaaaagcatcatttttaatgagttcaaatatatttcactatgtgagtctgccataatttatttaaccacttattattatatatttagaagaaggtttccagtctttgctattattaaaaacataggcatttttttgtgcaaattccaaatactttccttgggataaattcctagaattaagaatgttagatcactgcatatatacatttgaagactttaaaaaaatcttagtaaatttccatcagaaaatctgtataaatttttgctcatgcatatagtgtatgagaatattcccaaccctccaaaaataaaa

SEQ ID NO: 160535 - DNA, 524 bp, Homo sapiens
ctctgggacccactagctgagagaatttgggaaggctatgtagttcaagtttcagtttcctctatgaagtacaagactcaatccttcccagtgttttagcaaatctattattgttagtaattgttgtcatttgtattgaaatgctgccttgctccttccattctccttcagttattaaatcacacaacagtccaggagttgaggttctttccttgttgccagtcttccctgttgttggcyagcatcccagatatcccattgcatgcaccctctacctacagagacttcaccccacccagttgcctctctgatgatgataatcaccagttgtgccaaaagacaccatgtgtctctagacattaaattccacctgcccaatctgtccctctccaccacctactcttccctgacattcactacaagttacagcaaatgctgattcccaggtccgagctcttcgtaaggttgcctgtactccactctccaactcagaaactctctccaatagatctattttgcctctt

SEQ ID NO: 160536 - DNA, 510 bp, Homo sapiens
ttacgtttaacattatgaaaacaggaactgctatttacttatatgtggatcacaaccttgtgcatcatttcccaagttccctgcacctctgctctttctagctcagtaaaatacaccatggtgcttatgagttctggatctaagtagatctgccttttgataaatctggctctgggacccactagctgagagaatttgggaaggctatgtagttcaagtttcagtttcctctatgaagtacaagactcaatccttcccagtgttttagcaaatctattattgttagtaattgttgtcatttgtattgaaatgctgccttgctccttccattctccttcagttattaaatcacacaacagtccaggagttgaggttctttccttgttgccagtcttccctgttgttggccagcatcccagataycccattgcatgcaccctctacctacagagacttcaccccacccagttgcctctctgatgatgataatcaccagttgtgccaaaagac

SEQ ID NO: 160537 - DNA, 524 bp, Homo sapiens
ctctgggacccactagctgagagaatttgggaaggctatgtagttcaagtttcagtttcctctatgaagtacaagactcaatccttcccagtgttttagcaaatctattattgttagtaattgttgtcatttgtattgaaatgctgccttgctccttccattctccttcagttattaaatcacacaacagtccaggagttgaggttctttccttgttgccagtcttccctgttgttggccagcatcccagatatcccattgcatgcaccctctacctacagagacttcaccccrcccagttgcctctctgatgatgataatcaccagttgtgccaaaagacaccatgtgtctctagacattaaattccacctgcccaatctgtccctctccaccacctactcttccctgacattcactacaagttacagcaaatgctgattcccaggtccgagctcttcgtaaggttgcctgtactccactctccaactcagaaactctctccaatagatctattttgcctctt

SEQ ID NO: 160538 - DNA, 527 bp, Homo sapiens
aagagagagaagtgccttttgattattgttcaggggcaattgcgacatcttcctggaaagttaagcacaaggggagatcaaatgctctagtttgaagtctagttgtattcgcagctcacgtgagaaaaatgtgaaatcaaggaaaaaaacacccgaataaaagtaaactaaaatccaaatgatagtgaagttcgagcaamatattgtagaaatgtgaagaaatgacatgctgtaagccagtggaagatggatactaataatttattatcaagtgtatggatatgttaaaaaaaaaaaaaacagcaccaggtagaatctgcttcttaggctcttggaccaccatgcagttagcttctgcctgctgttccacggaaagtctctctggaatcatctactacctcataggtagaggcagaatcaaagcgggtgccagctgcccatcttaatgaatcagtgctgatggggtgccaggaaataaatttcttatcctggggatggtttaaaaagtgagatttttaaacaaaatt

SEQ ID NO: 160539 - DNA, 575 bp, Homo sapiens
ccttcactggaatatgaatttattattagggaaactgtcagtccctacagtgggatcataaactaacttgtatgtacataatattatactgcctctacttaagtattttatttatttttatttttaaaataaaaaacagaaatgtatttctccacacttctggasactggtaagcctaacatcaggatgccagcagactctgggttagtgtatggtgaaggctgctctcttcttccaagatgtcctcttctcactacagccttacatggcagaagggcaaaaagagactaatgctgtatcctcacatgcagagagatggaagggccaggcagctcttggaaaccccttttataaaatcattaatcccattcacaagggtggagccctcatgacttaatcacttcccaaacatgatttaaaaatttttcattttttcattattatgggtacataattgttatatatatttatggggcacatgtgatgttttgatacagagcacaacgtataataattatatcagggtaactgggtatccatcacctcaagaatttatcatttctttgtgttagaaa

SEQ ID NO: 160540 - DNA, 575 bp, Homo sapiens
ccttcactggaatatgaatttattattagggaaactgtcagtccctacagtgggatcataaactaacttgtatgtacataatattatactgcctctacttaagtattttatttatttttatttttaaaataaaaaacagaaatgtatttctccacacttctggagactggtaagcctaacatcaggatgccagcagaytctgggttagtgtatggtgaaggctgctctcttcttccaagatgtcctcttctcactacagccttacatggcagaagggcaaaaagagactaatgctgtatcctcacatgcagagagatggaagggccaggcagctcttggaaaccccttttataaaatcattaatcccattcacaagggtggagccctcatgacttaatcacttcccaaacatgatttaaaaatttttcattttttcattattatgggtacataattgttatatatatttatggggcacatgtgatgttttgatacagagcacaacgtataataattatatcagggtaactgggtatccatcacctcaagaatttatcatttctttgtgttagaaa

SEQ ID NO: 160541 - DNA, 461 bp, Homo sapiens
cattactatctctttaggtttggttactgggtcattgttttttccatttgygaatgtcatggttccctgttttctctctctctctctctcttttttttaataaacatatgtcatgtcttcacatggaagtgttagttattccagtctttgttgtctggcttggcttggtcttttacaagtatacctgtctaaaggttttatgcagattgactattgggttcctttagttcaagactgctgcctccttttaggcacttgataggacactaagtccaggtttactgtggccctcacaaaagtttggagcactgcccatccccgatggggtactctggctgtgtgagaagactggctaggggtttgtgtccagaggacctatggagcatgcctcttacagcgtggtgctgctgaacagcatctctgatttggcatctcctttggctgacatgaagagcagccac

SEQ ID NO: 160542 - DNA, 435 bp, Homo sapiens
ctctgtctcaaaaaaaaaaaaaaaaaaaaagattttgtctggaacatgaggatttttatttatctatttcctcctgctcataatgaacttacataatgtttaaaaaaacataggatttttgttgtaaattttttagatgaaatacaatccaacaactacagtcctacaactaagaaattttagatcaaatgcttttaaaaagtcttaacacttacatctcagtacgcaaatgaatttgaaaagaaggaatatgatattttttaaaagtggcccaaatgagataacgttgatcagaagataattttkggagataaataccaacagtttctgaagaaagaaattagcaaagattaatagacagaagtaaaaggagtctgtaaaagaaaaatcagggaaagcccgaaatatgtccaataaggaaatgaatagatttac

SEQ ID NO: 160543 - DNA, 621 bp, Homo sapiens
gggggatagtactacatcaagggaacaccctgtgggacaaaagaatctgaacagcagccttgaaccccagatcttccctctgacatagcctacccaaatgagagaaaaacagaaaaataattctggtaatatgacaaaaaaaggttctttaacaacccccaccccaaaatcacactagcttaccagcaaaggatccaaaccaagaggaaatccctgatttacctgaaaaagaattcagaacgtcaattattaagctaatcaaggaggcaccagagaaaggtaaagtccaatttamggaaattaaaaaaaaaaaaaagacacaaagtatgaggggagaaatcttcagcaaaatagacagcataaataaaaaataatcacaacttcaggaaataaaagacacagtcagagaaatgaaaatgtactggaaagtctcagcaatagcatcaaacaagcagaagaaagaacttcagagctcaaatataaggttttcaaattaacccaatccaacaaagacaaagaaaagagaatttaaaaaaatgaacaaagcccccaagaaatttgggagtatgttaaatgacctaacctaagaataattggcattcctgaggaaaaagagaaatc

SEQ ID NO: 160544 - DNA, 659 bp, Homo sapiens
ctggtattcaagacatgaaatctctcagccacccactaggaagccgttatctttttattatgtaaagtgagaagagttgcttttcctctgtctattcatgtaaacattttgagatgttacaatactacaagaaatgggaggtagtttctttgtgagctattactcatgtttatttcttaaggatcaacaagaaatttagctgaaatggaatataataggaagcagtagtctcaaaatggaaccaaatataccatactgatttgcattaaattgactaacattgctattaaagaaacaagtcttaattgtaattcttcatcaaattattcatttttataaactaaagcttttagacagtgcattaatgagatccaaatcaatctaacagggagcacaggaagcaattaagtttagtatggagagamtgcaggaaaattactgatagtataaaagttttctctgacttaaagagaaatgcttttaaataatagtaaggcctttcaagataataatcaccatcttgcacaaatatagctgctataaaattaactttcaaaccatttagatctatcattgtccttttattcacatcttcaaagcactagtctgataaaacaccagaaataaatcatgggtttttttttttttttgatgtttat

SEQ ID NO: 160545 - DNA, 512 bp, Homo sapiens
atgaaacatgattggacacaaaaggaaggaggctgggcaggcttataatgtcctagaaagtttaccccgatcctaaactgagttccagtcagaagcattgtttgctttgacagatamaagttacacagggtaaggtacttggagacacaggcaggatcaggcttcttgtaatctggctcttttcagctctctttactcccatttctagtattcacagttgtaattggcctccaccttaagggcatgataaagtgttttcttctattattcacaaaaatatgttcttatctgtctttattgatctcaaaaatatagatagaaagcatttctcttaacaaacttatattcctcctattattctttctttttttaggacaaggtctcattctattgtccagggtggagtgcaatcgcacaaacacagctccctgcaggacaaggtgggagtgacaaggtggcgatcctcccacctcagtctgctgagtagctgggactacaggcatgtgctatca

SEQ ID NO: 160546 - DNA, 530 bp, Homo sapiens
aatgtgaacactggagagggagattaggaagtatacaaaacaaaccattaagtaaatcacaagtgtggaactaaaatttagccttgggatgaccagctgcgatgggtttttctggtgcattttaggtctgggttaataaggtcagccctcaagaggctgtgatttcctgctgcatagttatattttagaatcatccggggccttttaaaaataaaatccccaggtcccttccctggagattctgattcagtaggtcaagggtcagggctagaaattttcatatttgaaaagcttcacaggtgattctgatacacacctctggttaaagaccagaaggagccttggggggaaggtcagcctgggtttacatttttatctcktgtcgatcccattgtataataggcagcttttcccatacctagcaggaaatgaatggtgaccctggggggcagggaaaggtgggtatcatttggaagagctgtggtgaagggcccaggagaaaaactactgagggggcactgctccagagc

SEQ ID NO: 160547 - DNA, 534 bp, Homo sapiens
attaggaagtatacaaaacaaaccattaagtaaatcacaagtgtggaactaaaatttagccttgggatgaccagctgcgatgggtttttctggtgcattttaggtctgggttaataaggtcagccctcaagaggctgtgatttcctgctgcatagttatattttagaatcatccggggccttttaaaaataaaatccccaggtcccttccctggagattctgattcagtaggtcaagggtcagggctagaaattttcatatttgaaaagcttcacaggtgattctgatacacacctctggttaaagaccagaaggagccttggggggaaggtcagcctgggtttacatttttatctcgtgtcgatcccattgtataataggcagcttttcccatacctagcaggaaatgaatggtgaccctggggggcagggaaaggtgggtatcatttggaaragctgtggtgaagggcccaggagaaaaactactgagggggcactgctccagagctcagagatcttgctgggtttgaattc

SEQ ID NO: 160548 - DNA, 611 bp, Homo sapiens
catcattgactaaaatgttgttatgtggcacatgactgtatatacattatgtacataatatatataatgcattacctagaagaaccaataagaaaactatataaggagatacacttaataatactatagataaatcaaaatggaattctaaaaaatattcaagtaacccataggaaggcaggaaaaagaaaacagaaatggaaagcaaagaataaacagaaaacaaaaaataaaatgcagacaaacttctacatatcaataattatattaaattaaaatggcctaaatacactaactccaagacagagactggcagwggggattaatacaatggtccaactatatattatctacaagaaacactattcaaatataatgagataggtagattggaaagaaaacacaggaaagctacacaattcaaacattaatcaaaagaaagcaagaatgactatattaatatcagataaagtagactgcagagaaaagaaaattgccagggacgtagactgacattacaagtgataatagtctcaatacgccaagaagacatagattcttatgtgtatatgcaccaaataacagagcagctaaatattcgaatcaaaaac

SEQ ID NO: 160549 - DNA, 521 bp, Homo sapiens
tgggacttcttttcctttttatctgctagagatgacagagcagagttggggatgtaatattaccaccataatgttctttttacaaaaaaagttacattaatttaatgttcacatataggcttctttttcaccttctctcacaatgctatctaatcagcctggaaaataagtacaatgatttacacagtggtacaaaattaaaagtaatcttttatcttgatgctttattgctaatagyatttgtatagcatatagcatatagcatgagaggtacttccagcatcgaatctgaaattaattgttagcttcctctgttatgtgaacagaagcagctaagtctttgtctcttagaaaggttctttaaaaatcatcattctttgtcttagatcatgcattatccctacatctacacaagtttgcttttcaaatgccatatcttaaaaaaacatattttgcctctgttcggataaatttacttaaaacaaaattgcaaattgtattgttaaaattatttgatgaaa

SEQ ID NO: 160550 - DNA, 521 bp, Homo sapiens
tgggacttcttttcctttttatctgctagagatgacagagcagagttggggatgtaatattaccaccataatgttctttttacaaaaaaagttacattaatttaatgttcacatataggcttctttttcaccttctctcacaatgctatctaatcagcctggaaaataagtacaatgatttacacagtggtacaaaattaaaagtaatcttttatcttgatgctttattgctaatagtatttgtatagcatatagcatatagcatgagaggtacttccagcatcgaatctgaaattaattgttagcttcctctgttatgtgaacagaagcagctaagtctttgtctcttagaaaggttctttaaaaatcatcattctttgtcttagatcatgcattatccctacatckacacaagtttgcttttcaaatgccatatcttaaaaaaacatattttgcctctgttcggataaatttacttaaaacaaaattgcaaattgtattgttaaaattatttgatgaaa

SEQ ID NO: 160551 - DNA, 410 bp, Homo sapiens
gaattctactgtttttacctgaagttcaacagtttttcaagcataaatccktctctgattgttgtatgaaaacaacatacatacaatggatcagttttgtcctgctttatagttgctttttgaaaaggatttgctgatctccttacttggccatcactctacacccactttttaatatgtaggaagaaaaaagaaaaattaataacaactggagattggaaaggcagagggcatattatgggaagaagcattagcccataagcattcagttggtatcttacctcatcagttctttcaaaggctctgtgtatgtgtgtgtgtgtgtgtgcgcgcacctgctacgaatacaaatagcttgctacaaaatatcactctcggaaagagagtacttatgctctaacttataactt

SEQ ID NO: 160552 - DNA, 558 bp, Homo sapiens
tcggctccttaccttctgtctttcatgttgtagttgccaaatgtgttacaactatatacatagaaaactccatcagacagtgttacagtttttsttttcaatcatcacacatattttaaagaaccaaacagtgaaaatttgttatatatatgcagatatttatcatttctgtggtgatttcttcatttctgctttgagctgaatgctgtgtcctcctcagatccaatgtgatggcggtaggagctgaggacttttcaaggtgattaggtcatggaggtggaaccctcatgaatggggttggtggcctaataaaagagacctcagagagcccagagaaatgccttttcccttctgccaggtgagggtgcattgagaagacaccttctaggagcccaaaagcgagtcctcagcagacactgaatctgacggcacattgatcttggatttccaacctccagaagtgtgagaaataaattgctcttgtttataagccacctagtccatgatattttgtgatagcagccccaaaagactgacataattcctgaaggtccaggt

SEQ ID NO: 160553 - DNA, 558 bp, Homo sapiens
tcggctccttaccttctgtctttcatgttgtagttgccaaatgtgttacaactatatacatagaaaactccatcagacagtgttacagtttttgttttcaatcatcacacatattttaaagaaccaaacagtgaaaatttgttatatatatgcagatatttatcatttctgtggtgatttcttcatttctgctttgagctgaaygctgtgtcctcctcagatccaatgtgatggcggtaggagctgaggacttttcaaggtgattaggtcatggaggtggaaccctcatgaatggggttggtggcctaataaaagagacctcagagagcccagagaaatgccttttcccttctgccaggtgagggtgcattgagaagacaccttctaggagcccaaaagcgagtcctcagcagacactgaatctgacggcacattgatcttggatttccaacctccagaagtgtgagaaataaattgctcttgtttataagccacctagtccatgatattttgtgatagcagccccaaaagactgacataattcctgaaggtccaggt

SEQ ID NO: 160554 - DNA, 558 bp, Homo sapiens
tcggctccttaccttctgtctttcatgttgtagttgccaaatgtgttacaactatatacatagaaaactccatcagacagtgttacagtttttgttttcaatcatcacacatattttaaagaaccaaacagtgaaaatttgttatatatatgcagatatttatcatttctgtggtgatttcttcatttctgctttgagctgaatgctgtgtcctcctcagatccaatgtgatggcggtaggagctgaggacttttcaaggtgattaggtcatggaggtggaaccctcatgaatggggttggtggcctaataaaagagacctcagagagcccagagaaatgccttttcccttctgccaggtgagggtgcattgagaagacaccttctasgagcccaaaagcgagtcctcagcagacactgaatctgacggcacattgatcttggatttccaacctccagaagtgtgagaaataaattgctcttgtttataagccacctagtccatgatattttgtgatagcagccccaaaagactgacataattcctgaaggtccaggt

SEQ ID NO: 160555 - DNA, 605 bp, Homo sapiens
acactaataacaatttatgcaaattagtgactaattttacattagcatagtggtaatcactttaagatcgtttagtaagaatgatggcccaatcaagactaggaagtattttttttaaatgagatagagaaatgaaagatatagggtttattgcaaatagtttttaactgaaatccaaatattagtaatgaactattttgaaaggaatgtattgagtaaaaccccataatttatcattcattttcttctgagtattttccacacattttgatctctagratatggcacctgggctagaaatctctcagggaccgtctccatcatgatttttctggaatttcctgtttgagtcaggatgaaaatatccccgatatgctctgtttttggggatttagccccgtgcttccacaacttagagaatcaagagataaaagaagctaaaacaagagaaatgtggttaaatcatgattttaatttttcagagcttcttgcttcatgtaaactaaaagtttatggattataatcctcaaacagccatacataaaaactgtatttagatactttctttgcctactaacttaacacaacttgagtcaaggtttgga

SEQ ID NO: 160556 - DNA, 482 bp, Homo sapiens
aggtaaatggagaatgttaactgatttaagagctccgttaattcagttatacaacctatgggagtattacagccrggattgccttctcctgccatgattccaaaaaactggcctttaatagtcatagatttaaaagactttttttttttttttactatccccttagctgagcaggactatgaatggtttgcatttacaattcctgcagtaaacatcctgcagcctgctaagtattttcactggaaagtgttgccacaaggcatgttaaacagtccaacaatttgccagacatatgtaggggaagcaattgaacctactcgtaaaaaattttcacagtgttacattattcattatatggatgatatactttgtgctgcccccactggagaaatattacttcaatgtaatgatcacttgcaaaattcgatttcttgtgctagtttaattatagctcctgacaaaattcagactactccttactc

SEQ ID NO: 160557 - DNA, 620 bp, Homo sapiens
ttactgacagatactctaatccagtgttgtcaagagatgagagattggcctctaaagataaatgagttcacctgaagcacatgaactgtggttacttctaaaacaaggttgctatgtgtatgaaccttgttttaaaagtaactacagttcatgatctccaggttataaccagaaatacctggaagtggtacccactgtgcaacctggaagagcaatagtgaacagcttgatcctgaggaggcatgttatggcctaatcccactcccccaaaattgattgtcagagaatggagaatttatcatttggatacacacatatacaaacacacatgcatatttatactgcctattatgttatagtttatgcttctataaaatataaatttaaaattktatgtagatatgtattctagatatattaaaaatttaatattttctagcctgtattttattctacataatgaaaattttactgttgttaaatattcttctacaacatcaatttataattaccaatatgaactaaatcagtctattgtttgtcatctgagatttttgaagtctaatattaaaaacatttcaacaagtatcttagctataagtatttgcatatgttagcat

SEQ ID NO: 160558 - DNA, 620 bp, Homo sapiens
ttactgacagatactctaatccagtgttgtcaagagatgagagattggcctctaaagataaatgagttcacctgaagcacatgaactgtggttacttctaaaacaaggttgctatgtgtatgaaccttgttttaaaagtaactacagttcatgatctccaggttataaccagaaatacctggaagtggtacccactgtgcaacctggaagagcaatagtgaacagcttgatcctgaggaggcatgttatggcctaatcccactcccccaaaattgattgtcagagaatggagaatttatcatttggatacacacatatacaaacacacatgcatatttatactgcctattatgttatagtttatgcttctataaaatataaatttaaaattgtatgtagatatgtattctagatatattaaaaatttaatattttctagcctgtattttattctacataatgaaaattttactgttgttaaatattcttctacaacatcaatttataattaccaatatgaactaaatcagtctattgtttgwcatctgagatttttgaagtctaatattaaaaacatttcaacaagtatcttagctataagtatttgcatatgttagcat

SEQ ID NO: 160559 - DNA, 568 bp, Homo sapiens
gttatgaggattatggcatgtgtgaaagtttgtgaattataacaaaaatataatgtattagcattacattaaagtgtgaggtagggcatgttcaggtcaaagcctaggaaaagaaaacrtcaaaagagactgactatacacatgtactaagtccaattacaaaactttgagaaacatgagacttactttatgttgaagaggatgtttacttttttccatttctcattgtctcctgtcttcaaatattaatcacataatatatactggaaaaacaactcacagatatacctcaatttttaaaaatgtagtctaaaaaatgtacatttataaaacagattttttatttccaaaggacaaaattcagtgatttactaaaagttcttttatacacaatttataaagcacaacagtgcacacattctggtaaactttttgactggtattttaccaagtttcaaacatagcttttaaagaacctaggatttagctattttgaaaaatagttcatactaaacaggcaaaaactggaagcattcctgctgagaactggaacaagacaatgatgccc

SEQ ID NO: 160560 - DNA, 545 bp, Homo sapiens
caccaatgttaaagctatggtccttaatttcaagttgctttaaaaactaatttaatgtgttattttcttagaaatttatatctttattatagaaattttaaataatacatgtagactaaagaggaaaacattatcaatccccttcatcactcatgttatgcagattttcagtctttcagatgtaggcatctatctttaaaatgtctttgttatagcttaaggattacttcccggagagaccttaattatctaattaggttyggcctattagaatagaaatctcattatgcattacattctgtaagtttttggtgtacttttaaatttttctctctcacaccataaagaaaaactccacgagctgggactgtatgttttctatttattattttattctcagtatcttgtatagcagttcacataaatgtatgtccaattatttcttccacaaagaattatcaagtgtttttaattggcataaaaaagaaaggaaacaaaaacaaacgaaaataccagaaaaccctcaggttaatagttgatatact

SEQ ID NO: 160561 - DNA, 530 bp, Homo sapiens
ataaaatgtcttttttcatttatgaactactcatatgtgtaattattttaccaacatattttattttggaaagtagagccaaagaacagaaacttaaaaaaaaaagtgatagttattatattccattcattaagcatggtctttgtacatttcctcttattaatcaatccacacataaaattattaacaaatgaaacagctccaggctttaatgcaaactaagaaaattaattttaagcaataaaattccagtaaatataatatttattgagttcttactatgaacaaacayggtgataatgccaaaaataaataagacatgcttcctgactaattaaaatatatttttatattcagatgaaaagatattggaaaactatcaaaacttaggaaaataattgttatagacttaatgtcaatattaattgttttgttcagactaaaaactgaaagaaatgcacctctgaatgacatcaaccgtgtaaatgggagttctatcactcatgagaagcttcttttaaccttctcaa

SEQ ID NO: 160562 - DNA, 402 bp, Homo sapiens
atagcagaaaacagtcagaattattttcagcttttaataaacagctcaatagcctcagggaaattgggcatattacttcatttcttggttttcaaatgtatttctatcacttaattatctaatgaaaatggtattatttatttaaaatatttaagaaggtttttgactcagrttttctcctcatttttacctctctctattctgccttctgcatcacctgaatggccttgcaaaagacagtaagagatgttgtggacaaatctggagcaattgatgatatacattttgcatttatgtttgtagaatatgaggaagtctgacaaacttaaaacagctattcacaggctgaaatcccactttctcaaaaaataaaatgaatttttggaatggatttttagagct

SEQ ID NO: 160563 - DNA, 571 bp, Homo sapiens
gtgctattcgtgttttgcttgtsgttttcgctcaggattagcatcattcaaggcaaacgcaaagctgcttttcccacccccccccccgactcttttttgaaaaatcatttttgggggctgctgaggagagctaggacccaggagacaccttcccaaacagcaggggttgtgtgctttcacatagcagtactgtacaaggaaaaccccgtcggatctgttattgcgggatacttgtgaaatatacataggattctttcttatggctgcatcccggatctggaaattttacttggggaccaggaggatttgaaaggctgcatgtactcagaagatttgcaagcaacactccaattcttgtcatagagctcgcagacttctcacttatcggcttttttccttccttattttttaagaattattcttattttcccctctctttttctgctctctcctctctcagtctctccttttctatctgcctcttcatttttctcctagtctgtttttttttttcctgctctgcacctggattgtatcttcagcaaacaatcgggcactttgagaactaact

SEQ ID NO: 160564 - DNA, 534 bp, Homo sapiens
ttttgtaaggctggggttcagagcaggtggcctcgggtccctgctcctggcccttctgcctcacacagtcgagcaggggcagggatcacagtgcagggggagtgacacagcgcasgagggatccaggagggctgggcaggacaggaggagggacagctggggagtgggcacagcacattctgggagctgacaacagcagggacagagcagaggcccaggctgtgctgaactcagtcttggaagtagcaggcagacccagagggcttgggctgctgggatcgataggggtggctgaggcaggcagcagggcctgctgggagctacccaggtgagaagggacagggtcctggagccagagtagcgaaggaaccagcaaagggaagggcctgggcgtggggatgaggggctctcagatgatgccaggcccctggtttggttcattcacaaagacagagccatcctccaaaagaagagttagggcttcaagtgacaagatacaaacctgtaatccgacccggctaagtattttcccca

SEQ ID NO: 160565 - DNA, 534 bp, Homo sapiens
ttttgtaaggctggggttcagagcaggtggcctcgggtccctgctcctggcccttctgcctcacacagtcgagcaggggcagggatcacagtgcagggggagtgacacagcgcacsagggatccaggagggctgggcaggacaggaggagggacagctggggagtgggcacagcacattctgggagctgacaacagcagggacagagcagaggcccaggctgtgctgaactcagtcttggaagtagcaggcagacccagagggcttgggctgctgggatcgataggggtggctgaggcaggcagcagggcctgctgggagctacccaggtgagaagggacagggtcctggagccagagtagcgaaggaaccagcaaagggaagggcctgggcgtggggatgaggggctctcagatgatgccaggcccctggtttggttcattcacaaagacagagccatcctccaaaagaagagttagggcttcaagtgacaagatacaaacctgtaatccgacccggctaagtattttcccca

SEQ ID NO: 160566 - DNA, 601 bp, Homo sapiens
ttcgtgttttgttttagggtgtttttttcatttgggtttggtttgcatttgggtttttggcctttttaaatcctttccccctgtcctttgtaaggcattgcacgtgaatcacctagtgctggcccagagtatcatctgtgatttttgccctgaatagtgaccttgactgaggctctctagctaagtcacctgactgccagggtgtggaaagggaagcagaggaaatccttgttgtgcctctggcattcaggggtggatgagttaattgttaaagaatcagccctaagtctcttgaatcctggtactttcttcttaattatcagtgtcatagaaggaggtggaaggacagatggatagctaatgctgtttcctgtgtggaagtcagttgacagagcaatgtggcacatatcatgcccgggcaccagcctgtcctgtaatcctggccagccctgctgacttacactagtgtcccagcrcactctactccaccatgcctgtttctccatctgaatgtggagataacagctcctccgttctacactgagtccttctttgtataattatacggttaattactttttaaagtaattaacttaagctt

SEQ ID NO: 160567 - DNA, 601 bp, Homo sapiens
ttcgtgttttgttttagggtgtttttttcatttgggtttggtttgcatttgggtttttggcctttttaaatcctttccccctgtcctttgtaaggcattgcacgtgaatcacctagtgctggcccagagtatcatctgtgatttttgccctgaatagtgaccttgactgaggctctctagctaagtcacctgactgccagggtgtggaaagggaagcagaggaaatccttgttgtgcctctggcattcaggggtggatgagttaattgttaaagaatcagccctaagtctcttgaatcctggtactttcttcttaattatcagtgtcatagaaggaggtggaaggacagatggatagctaatgctgtttcctgtgtggaagtcagttgacagagcaatgtggcacatatcatgcccgggcaccagcctgtcctgtaatcctggccagccctgctgacttacactagtgtcccagcgcactctactccaccatgcctgtttctccatctgaatgtggagataacagctcctccgttctacactgagtccttctttgtataawtatacggttaattactttttaaagtaattaacttaagctt

SEQ ID NO: 160568 - DNA, 581 bp, Homo sapiens
tctgcttcacatgtagttgatctagtagtgtaattcacagaaccaaaattcaaacctgaaatcttactaattgattaataattgctaaagaggaaatgttttatagcgtttactatacagatgctacagaactatttgagggcgaaataattcatacgatggtgttttgagacacaatttaaaacatccgttattccttcctgttcctaatctcaatagaagggttgatatcataaaagatgttagaatgtattaggtgatacagggaggaaaagagggcatcttccacrcagatttgctacagatttacaaaggaaagaaaaaatcctctcacttccaaggcccccatcttcttcctttaccaattttgttggtgtgatttgagaacaagaacatttgcgaaaggacttgatgtgtggatataaagtgatagtttcatacttgttacaatgtaagatcatatgcttctgagaaggagaattcattattaaagatgtttgtgatatttaaataagaatgaattataaaacagtatttacagtatatttaagattatatgcataataaaagttccaaattgg

SEQ ID NO: 160569 - DNA, 521 bp, Homo sapiens
agtgttcctatgcttgtctgttgtgctatatccagggtgcttaagtttcaagaagaaacagctgtgaggaataggactatacattttggtggacctggaagtctctgttttatgtaattttatccttacatgttaatctacactctccattagatcayaatgaatgtctcacacatcttggtatcttctacatgtgccttccataagttttctaatatagtaggcccttgataaatgtttggtgaatgcccaacacgaaatgttcattttgtgaagacatatgcatcagcaaaagtggactgcttatagcctgaagcatgtaagagtgcatgggtcagcggtaaagagttgcggagggatatcttcagatggaagagaggtagctcatctgcattgatggcaatgcttttctaatctttgatattatatgacatatttctggactggtcatcccctttaggctaaaagatgaagttttgaatgctgaagtacagtttcttttttttttttttttgagacag

SEQ ID NO: 160570 - DNA, 578 bp, Homo sapiens
gagctccgtagcaagatatggccaatggctaccatttgtacagcacaaatgctgatggtatctaatatctaagctccattatttagtttgtgttatgtttaatcaaaaccagagtaattagtagttaaaaccttggaaaacatattgataggatacattccctaaaagaaaaagtatggaaatctgagtgtaactttgtgcagataataaaaaccaaaacatgtctatccaaatccagatgttttgcccaaaccataatgccaaaattcatttagatgattgattgcaacttttacttttcatcaacaatagcaataaaatgatgctctgtaatttatcttgttaatttagcatggaaatcacagcagctattttaggcccagtcaaattttagatactgaatggtgtggattatacatcaatactgatgtaattgtacagaaggatgcaatttccttttttcctttatgatcaaaagctctaagtttctcttttaattctcaaaaatctcyttgtacttcgtaattttgtgatttacttcttgtctcatttttccttgtctaccaatcttaagatga

SEQ ID NO: 160571 - DNA, 563 bp, Homo sapiens
tctcctacctctgaccttttctagtatttactagaagtatttagtaattattttaatcaggatttttaaaaagctgaattaacaacaaaaaaatctatagaaacaagaacaaaacaagcaatgttgcctaactttcaacaattgcagctgttactagcaggatgaaaggccactcagaggattgagggaaagggtgaataactgaggsaggagaatagggtctgaaggcagggaacctaagctcaatattcactgacttcctagaattgaatcaaaaagaaaaccccacctctccatgtccaagtaacaaaaggatcagaggtaacccccactttcagcctgaagattaaaaaatggagaggacttctgatgggtcacctcctgcaaccagaccggtggtgggccactccttcatttacgtagggtgtaaccaactaacaaatgggaagagggtatttaaacctcagaaaattctgtaagcagtgctcttgagccgcttgctggagcctaccaccactccatggagtgtacttccctttcaataaacctatgctttcattgct

SEQ ID NO: 160572 - DNA, 563 bp, Homo sapiens
tctcctacctctgaccttttctagtatttactagaagtatttagtaattattttaatcaggatttttaaaaagctgaattaacaacaaaaaaatctatagaaacaagaacaaaacaagcaatgttgcctaactttcaacaattgcagctgttactagcaggatgaaaggccactcagaggattgagggaaagggtgaataactgagggaggagaatagggtctgaaggcagggaacctaagctcaatattcactgacttcctagaattgaatcaaaaagaaaaccccacctctccatgtccaagtaacaaaaggatcagaggtaacccccactttcagcctgaagattaaaaaatggagaggacttctgatgggtcacctcctgcaaccagaccggtggtgggccactccttcatttacgtagggtgtaaccaactaacaaatgggaagagggtatttaaacctcagaaaattctgtaagcagtgctcttgagccgcttgctggagcctaccaccactccatggagygtacttccctttcaataaacctatgctttcattgct

SEQ ID NO: 160573 - DNA, 541 bp, Homo sapiens
ttcctaatgtattctttccattcttttccttactatgaacgttagcaagtatttttactccaacggaaaatgtttctaattaacctaagtgtggtaaacatgcacatgttgacatgtataaatgtatatgttcatattcactcttttgcgtgtgtcagtttagttcagttcagcagatagagtatactttgtaaaaaatagagtacctattctctgaaagcaatgtactaagctggggccaaaaggatgaaaaagatgtccctgccctcaggtcctgtgcttttatgttttctgtttttagaaaataattactataataaatcatggtctaacaacgtgtatttttaaatgctctcagttttgtttctagaaattcagaatgcctraggatttgaaggacatttttattataacaaaggggaaaaaaattctcataaaagcagacagctaatgcttactttagtcttcatagcacaaagaaagctggcattatttttctttctagaattagttttatgtatgtagttaactataaatatta

SEQ ID NO: 160574 - DNA, 580 bp, Homo sapiens
gaatgtggaacaacacatctgtttgtctacttyggctctaagaagagataaccaagttttggagccatactgaaacatgaacagtggctaatggcttcgctgattatcataggctctgaaggaataacatttgaggaatgagtatgagatctctggactgatactcagtataagaactgagcatacgaagctttaactgccataagatcgatcatcagagcgtatcttctataaatcaagctcttagtgatcaggtagataaaatgatctattcaatagaggtcagtctgccttcttccccaaatgacctggttcttgctaaatgagtacataaaaaatatagccatgccagcaaggataaaatgattgcataatcttgtcttcccaagactgatttggctaacgttactactgcatatctaatatgtcaacaacagaatagtgttgattccttgatatggcaccattccctggagaggaagaacagccaactggtagcaaattaggattgattacattggaattcttccatcatggcaggagcagccatttgtccgcagtaaaatagacacttacacct

SEQ ID NO: 160575 - DNA, 458 bp, Homo sapiens
cacttctgcattggcgtaaatatcccagagttgccttcagtataagaaacaccaaactgaacttctgatatcctctctactaacacaatctaaaaccacacacacaaaaactactccatctgtgacttcccttctyagtagataacaactcaaatcttccaatgacataggccaaaaccttggagtcattctgtttctctaacaatctatatccagtctaaaagcaaatcaggggccttgatcttcacaggatgtccagaaaccaagcactcacatgaaatccacttctaattcctgtctatctctattatcaccgattatttgtgttattgcagtaacctctaacatattgcctttcttcttcctttcatccctaaagttatcactgcagctaaagtgattgtttttgttgttgttgttgttttgagacagtctcactgtcgtcagcccaggctgga

SEQ ID NO: 160576 - DNA, 490 bp, Homo sapiens
acaccctggctcagggagcccctgggtctagaatccccgaagggccgcagctcttctttccttcttgtcacccccaacgtggtgagcggagggtgggggggcgtgcttcggccctgtttgcgttacagctctttcagtcccgccattcagtgggtcccgagttcttgtcctgtatccaggaagaatgagatatgcagacaactagagagtragcaagacagacaggagctttagtgagtgacaggacagctcagaggagacccacagttggtagctcctttctgcaggtgtgtcattccaaggagagcccagctctcagtggagaggagacccatactgggtaggtcctttctgcaggcaggtcgcccagcaagtgtccagctctcagtgaggagacctgtagtgggtagcacctttccacagctggtagtccgaatgtctgtcctagtcaggtggatctggggtttttacgtgctcaggagggagaaag

SEQ ID NO: 160577 - DNA, 375 bp, Homo sapiens
gagctctgtgatgcttttgaataaagtatatttgatwatttcctttcttgtttagtccaactgtggtttaggaggactcctgcaagaagacaggtgcataaagatacttatcaactagataagagtccattcaacctggaggcttattttacttttttatattgctattgtagaaatgcagttaagtgcaaggtctactgatggagatatcatgaaatgataaaaaatttatatttgttctcactattcttattatctttatatataaacacatagataaaacacaatttcataacagaaaaggaaattgactttttttccgcttttaattctgtattgaaaatatcttcatcataaaacacactttggcccatg

SEQ ID NO: 160578 - DNA, 375 bp, Homo sapiens
gagctctgtgatgcttttgaataaagtatatttgattatttcctttcttgtttagtccaactgtggtttaggaggactcctgcaagaagacaggtgcataaagatayttatcaactagataagagtccattcaacctggaggcttattttacttttttatattgctattgtagaaatgcagttaagtgcaaggtctactgatggagatatcatgaaatgataaaaaatttatatttgttctcactattcttattatctttatatataaacacatagataaaacacaatttcataacagaaaaggaaattgactttttttccgcttttaattctgtattgaaaatatcttcatcataaaacacactttggcccatg

SEQ ID NO: 160579 - DNA, 375 bp, Homo sapiens
gagctctgtgatgcttttgaataaagtatatttgattatttcctttcttgtttagtccaactgtggtttaggaggactcctgcaagaagacaggtgcataaagatacttrtcaactagataagagtccattcaacctggaggcttattttacttttttatattgctattgtagaaatgcagttaagtgcaaggtctactgatggagatatcatgaaatgataaaaaatttatatttgttctcactattcttattatctttatatataaacacatagataaaacacaatttcataacagaaaaggaaattgactttttttccgcttttaattctgtattgaaaatatcttcatcataaaacacactttggcccatg

SEQ ID NO: 160580 - DNA, 375 bp, Homo sapiens
gagctctgtgatgcttttgaataaagtatatttgattatttcctttcttgtttagtccaactgtggtttaggaggactcctgcaagaagacaggtgcataaagatacttatcaactagataagagtccattcaacctggaggcttattttacttttttatattgctattgtagaaatgcagttaagtgcaaggtctactgatggagatatcatgaaatrataaaaaatttatatttgttctcactattcttattatctttatatataaacacatagataaaacacaatttcataacagaaaaggaaattgactttttttccgcttttaattctgtattgaaaatatcttcatcataaaacacactttggcccatg

SEQ ID NO: 160581 - DNA, 559 bp, Homo sapiens
agtaattctccactttggctgtggataaaattggaggggcccaagggaatgaggaggggcagcaatagcatcttctgttctgcctttgttttgcctgcccttggtattgctcagatctctcactaagtctactccattaccaagcctgtaagatggtggccagccacaatttattagacttcttatgggaagtgtgtgcaacaagcttgagtcctcattgytgcagttggttcaggggcaataaacagtatatctcttttctgatcacccatgctggatttccctccctcttgcccaacagttcagtttgctagtgaatgcaaggctgaaatggaagaatgcaatcctgaattttatctctgggggatttgacctcctgtcaggtcatgaatgctgtaatttgcctttcactgctgtcagtaagcatagaaacaccaacagacgccccggggacttctccaggttccaggctacttatccccagcaggtagtcacacgaccctagaaactcatgacattcaggtccgctacgatcaccagcgtaatctgtgcctataac

SEQ ID NO: 160582 - DNA, 559 bp, Homo sapiens
agtaattctccactttggctgtggataaaattggaggggcccaagggaatgaggaggggcagcaatagcatcttctgttctgcctttgttttgcctgcccttggtattgctcagatctctcactaagtctactccattaccaagcctgtaagatggtggccagccacaatttattagacttcttatgggaagtgtgtgcaacaagcttgagtcctcattgttgcagttggttcaggggcaataaacagtatatctcttttctgatcacccatgctggatttccctccctcttgcccaacagttcagtttgctagtgaatgcaaggctgaaatggaagaatgcartcctgaattttatctctgggggatttgacctcctgtcaggtcatgaatgctgtaatttgcctttcactgctgtcagtaagcatagaaacaccaacagacgccccggggacttctccaggttccaggctacttatccccagcaggtagtcacacgaccctagaaactcatgacattcaggtccgctacgatcaccagcgtaatctgtgcctataac

SEQ ID NO: 160583 - DNA, 595 bp, Homo sapiens
tctcatgaggaaggattacagattatgtctacgatggggcaacaatcttgaaagccttcctataattttttcgcctactacacccaatattgttaccagctcagacactgtattatgcagccttatgaaaagtttgtgtatttcccttataagagactacaataactcagataaatggctgcaggtcccattggagaaagactcactactcacattacaaagaccagtttattggtgctatcgtctactgagcaatataggaaagtcataaatattttggtgatatcgctcttttcgccagtgctgtattgtgcaactaayggaatggaaatgattttgaggatgattaaaactaacagcatagcaagaaacttgtcattggtgtttctaatttctatatggaattatagaatggtagatgacacttcttgctgtggtctgaaaacaagaagtcaaggtacatacatgcaaatactcctgtacatgttatacctttagctgtgtaacaatgagcaagttatatttcctcctaagtacaatttatcttcaaaatgaagtgtctttcggatgttaatcttcaatgattccaacacac

SEQ ID NO: 160584 - DNA, 609 bp, Homo sapiens
atgaaccgtggagcatcttgcattgccagaaggtaaataaatgctataaaaacaaaataacaacaaaaacaacaggagcttgtcaaaaggacacagaaacaagcccccaaaatctgtcagtagccaaagctagaaaaatacaatgaccaaagtaaatagtgacagtattggattataatgtcaagagtaaaataactgagtctatactaccattctgataaaactaaatgactgaataaatgcagaagagaaaaatattgcttatggaattccagttattaaaagtagaaacagtgagggaaataggaaaatcactgagtcacaaatgaattctagtatccgattttatatctgtcaaaagtgtatttcacataattttatcaaatatataaaccactttgcatcctactcttttacttagcaattaatccaaatatcttatgccatatatcttataataaaattaacattgtagaaaatttggaaaatgaacagaattaagaaaaatacatgcaktcaggccaaaaatgaataaggctctttggattttagtatatttattcagtttttaatttgcatttttacactgttagcatttgtatatttata

SEQ ID NO: 160585 - DNA, 561 bp, Homo sapiens
acgtcttaaactagcctttccttctaagatcttaacctacggcaaagacacacaagtggctctttgattaattctaccatcatttcgtattaatctgttcatgcattcattcatcaaatatgtattgaagtgatatttttaaatgtgggattcaaagagataaactgggaatgaaargagagaggactaggcactgaacctcagagtatttcgacatttaaagattctaataagggaaggagtcagtccagaagattagaaatgagaagcctgtattttaggcaaaaaaccagattcatgtagaaaatactctaagaaggagtagaggctgtgtcaagtgattgcctaatgaaggtcactgggcttgacaaggtccattttagtagaatgatccttatggaaatctggttggggtgggttaaggggacagtgggatgtgaggccgtgcagactgctggtttcaactgttttttttttttttttgaggagtattcctattaacataaatgaaatcaggcttcagcacggtccgcagcaagttaggaggccaaatatattttt

SEQ ID NO: 160586 - DNA, 561 bp, Homo sapiens
acgtcttaaactagcctttccttctaagatcttaacctacggcaaagacacacaagtggctctttgattaattctaccatcatttcgtattaatctgttcatgcattcattcatcaaatatgtattgaagtgatatttttaaatgtgggattcaaagagataaactgggaatgaaaagagagaggactaggcactgaacctcagagtatttcgacatttaaagattctaataagggaaggagtcagtccagaagattagaaatgagaagcctgtattttaggcaaaaaaccagattcatgtagaaaatactctaagaaggagtagaggctgtgtcaartgattgcctaatgaaggtcactgggcttgacaaggtccattttagtagaatgatccttatggaaatctggttggggtgggttaaggggacagtgggatgtgaggccgtgcagactgctggtttcaactgttttttttttttttttgaggagtattcctattaacataaatgaaatcaggcttcagcacggtccgcagcaagttaggaggccaaatatattttt

SEQ ID NO: 160587 - DNA, 577 bp, Homo sapiens
gcagtaatggagcttcaaagtacatgaagcaaaaactcaatagacctgcaaggggaaatacatatctactgttacagttaaagatttcaatagcactctttcaaaacttgatagaacaaatatataattccataaacgtatggaagtcttgaacactaccaaccaaatcaaagaaattgacagttttgaaagcaggatctcaaagatattagctcacccatgtttataacagsattatcacaatggccaagaggtgaagcaaaccagatgtccactgatggaggaatggatgaatgaaatatggtataaacatacaatggattattcaaccttaaaagggaaggaaatcttgttacatgctacaacgtgaatgaaccttgaggacattatgctaagtgcaataagccagccacaaaaagacaaatacggtatgattccatttacttgaggtatctagagtagtcaaactaatagaaatagaaaataaaatagtggttgccagggccttgcgggggcgtggggaagagaatgggaagttgttcaacaggtataggatttcattttacaagatgaaaaa

SEQ ID NO: 160588 - DNA, 577 bp, Homo sapiens
gcagtaatggagcttcaaagtacatgaagcaaaaactcaatagacctgcaaggggaaatacatatctactgttacagttaaagatttcaatagcactctttcaaaacttgatagaacaaatatataattccataaacgtatggaagtcttgaacactaccaaccaaatcaaagaaattgacagttttgaaagcaggatctcaaagatattagctcacccatgtttataacagcattatcacaatggccaagaggtgaagcaaaccagatgtccactgatggaggaatggatgaatgaaatatggtataaacatacaatggattattcaaccttaaaagggaaggaaatcttgttacatgctacaacgtgaatgaaccttgaggacattatgctaagtgcaataagccagccacaaaaagacaaatacggtatgattccatttacttgaggtatctagagtagtcaaactaatagaaayagaaaataaaatagtggttgccagggccttgcgggggcgtggggaagagaatgggaagttgttcaacaggtataggatttcattttacaagatgaaaaa

SEQ ID NO: 160589 - DNA, 565 bp, Homo sapiens
ttcagttgaatgtgtagggattatctaattaaaatactaacaggtaagaggacttccagtttctggctcaggatataaggagcttgaaagtaaacactttattctaacaaagaggcaaaaagctaaacaaactgaaaattcaacaactcttcttagattcatcagataagtgaggtcccaggacagcctgcttccccctccacaaactggaaagacagattacagagaatcacaactttcctgagcaggtccacaagcagaatcctccatgggagccagtscctttgtgaaaaacataaaactaagtgacaaattggtggaagctcagtatggataaggccgagttaaaaacttcaggaaatctagccatatggggccacacacacttctgtaagtgtactgctgacttacagtagaaaggagttcagccagattttcacatatcggagaaaaatccccttgtacttcaagggtggagggaaaggtcataattttgaaatacatgggagaattctgttcttaccgggacctgacctcaagagaaactattttattagagtttaca

SEQ ID NO: 160590 - DNA, 457 bp, Homo sapiens
tatttattataaaagagggaaagaaatagattgaagcaatttttatactatcttttaatacttgaatgaattggaatcaacagagccaaataatatatacccttcttctgcattccccagcattaaaatatatataatacagttggccttccatatccatggttctacatctgtggattcaaccaactgcagatcaaaaatatttttttaaaaataaaaaaatacaaaatttaaaatacaatgtaataactatttacatagaattcaatttttttttttaagagttagggtctcactctgtcacccagactgaagtgcactggcatgatcatagcttcctgcagccttgaactcctgggctcaagtgatcctcccacctcagcctcctaagtaggtgggagtacaggcacaagccactacacttsgcaacatttactttttattaggtattacaagt

SEQ ID NO: 160591 - DNA, 510 bp, Homo sapiens
atcacattatgttactgactacatatctctctgtatctccattaaatcataagccctaaaaagacaagggccatatcatctttctaagagattacacaayctccttcctaggtgtttagatgtctccctctctctcaattggtgggaaataattcacttaccacctaaaatacatgtaacaactgaagatcaaaacattaacagaaatctttttggaatgttagctggctttaataaaagaaatgcttggacatatgccactcctaaaggtatgggtatatcattctatcatcaagaaattgttcgttttagcttacaaacaaaaaaatgtatagtttaacagctagaatatatacaaactatcctatatgcaatacaggttgattatccctaatccaaaaatccaaaatctgaaacttttagcatttttttttggagtcatggttccactctttcattcagggctcaccgtagcttcgatctcctgggctcaagtgatcctcctgactc

SEQ ID NO: 160592 - DNA, 510 bp, Homo sapiens
atcacattatgttactgactacatatctctctgtatctccattaaatcataagccctaaaaagacaagggccatatcatctttctaagagattacacaatctccttcctaggtgtttagatgtctccctctctctcaattggtgggaaataattcacttaccacctaaaatacatgtaacaactgaagatcaaaacattaacagaaatctttttggaatgttagctggctttaataaaagaaatgcttggacatatgycactcctaaaggtatgggtatatcattctatcatcaagaaattgttcgttttagcttacaaacaaaaaaatgtatagtttaacagctagaatatatacaaactatcctatatgcaatacaggttgattatccctaatccaaaaatccaaaatctgaaacttttagcatttttttttggagtcatggttccactctttcattcagggctcaccgtagcttcgatctcctgggctcaagtgatcctcctgactc

SEQ ID NO: 160593 - DNA, 581 bp, Homo sapiens
aagtcagttcaaaatgagataccaaggaaattgcaaatggaagtcagttaaaagaggcattttctctagcaatatcattaaaattttcaagcatgcaaagttcccattacttatttctgtttctagacacaatttttctttctaaaaacttaaaaggccctggttgtggccgggtgcggtggctcacgcccgtaatcctagcactttgggaggccgaggtgggcggatcatgaggtcaggagatcaagaccatcctggtyaacacggtgaaaccccgtctctacaaaaaaaaaaaaaaaaaaaaaaaaattagccgggcatggtggtgagcacctgtagtcccagctactcaggaggctgaggcgagagaatggcgtgaacccgggaggtggagcttgcagggagccgagatcgcatcactgcactccagcctgggagaaagtgtgagactctgtctcaaaaaaaaaaaaaaaaaggccctggttattagaagtcctagagagaggtagcatgcagagtgcaggtgggcagagaccatgtgggtatacatatgtgcatgggcatgtatgtgcacgtctgca

SEQ ID NO: 160594 - DNA, 557 bp, Homo sapiens
attaaaaagtgaataatttaagattctaagtagtctccatttaaaatcagaaggacatttttgagataattacatcaatgtagtatgattaaaaaagactataatggctgtaagttcacaataaagcagtagctaacatttaytgagcccttactttgtgctaggtaatgtacatatattgacttgcaaacctcaaaacagccccaggagtaggtactatcagtagccccattttactcttgaggaaaataaggggcagaaggataaagtcacacaaggaggttaaagttgcccagggccagcaattggtaaagccaggatttgaacctagccttaccaactaggggtgaacacagaaagacagaaggtgtaaattcagctagagggaccaggggagtaaaagaacaggaactgcctgcctggccttattactagacacttcatgtaatatttcagttaagtcttatgaaaaccctataaggcagaaatcagtatttcattttaaaagttaactcttttgaaatgacttttcaacttgaatgttaaattacataccg

SEQ ID NO: 160595 - DNA, 620 bp, Homo sapiens
taatgcagccatttaaaaagctacaagaaacaataagctcctcaacaaggatttataaacaatcagtcttgaattccttaaaaaaggaaacagacgctatgctgacgcacaaacacttttttaaaaaatcagagagtataaaaatagaacagcgctgccctatagatgaaaaattgttcaaaagatttaaataagttaaaacaccgaaactgagcttatataggacacaaactcaaaataaatctaattcaggtttttgaggcttttccctatgaaggtataaaatagcagtaaatacttkaaagaaaacgatcttctggcttaagttttttcaataccatcttctggaaaagagaaattcccaggcaagggaaacaccttttccctcacttcaatatgcaaagcttttatttcccataaaatgtcaattctgaattattatccttacttcagggtcatctcatttttctaaaatagactaccaaactggacacagcaccacctaccatttatctactcgtgttgttttaggtctcattaacttgtactttgttgcctacaacaactctgtaacagacgtgaaattcctactctcaactttttatttgtgcatattgctt

SEQ ID NO: 160596 - DNA, 592 bp, Homo sapiens
gctgtcttattctcaatatgcattttgttacccaatctgctcctgacattaaataaagctccaaaaattagattccggccctcaaaccccacaacgggagttaattaacctcaccttcaaggtgtacaataatagagaagagttgcaattccttgcctccactgtgagagaaaccccagccacatctccagcacacaaaaacttygaaatgtctaagctgcagtggtcaagcattcctacaggaccttctccaccaggatcttgcttcaagtgccggatatctggccactgggcaaggaatgcccacagcccgggattcctcctaagccacgtcccatctgtgcaggaccccactggaaactggactgtccaactcgcctggcagccactcccagaacccctggaactctggcccaaggctctctgactgactctttcccagatcttggcttagcagctgaagactgatgctgtccgatcacctaggaagcttcctggaccatcacagacgctctgggtaactcttagagtggagggtaagtccatcaccttcttaatcaatacagaggctacccactccacattaccttcc

SEQ ID NO: 160597 - DNA, 592 bp, Homo sapiens
gctgtcttattctcaatatgcattttgttacccaatctgctcctgacattaaataaagctccaaaaattagattccggccctcaaaccccacaacgggagttaattaacctcaccttcaaggtgtacaataatagagaagagttgcaattccttgcctccactgtgagagaaaccccagccacatctccagcacacaaaaactttgaaatgtctaagctgcagtggtcaagcattcctacaggaccttctccaccaggatcttgcttcaagtgccggatatctggccactgggcaaggaatgcccacagcccgggattcctcctaagccacgtcccatctgtgcaggaccccactggaaaytggactgtccaactcgcctggcagccactcccagaacccctggaactctggcccaaggctctctgactgactctttcccagatcttggcttagcagctgaagactgatgctgtccgatcacctaggaagcttcctggaccatcacagacgctctgggtaactcttagagtggagggtaagtccatcaccttcttaatcaatacagaggctacccactccacattaccttcc

SEQ ID NO: 160598 - DNA, 387 bp, Homo sapiens
tgatatctacagcactctccaccccaaaacaacaaaatatacactcttctcatcaccacatggcacttactctaaaattgatcacataatcggaagtaacactcttcagcaagtgcaaagggactgaaatcataacaaacagtctctcagaccacagcacaattaaattggaactcaggattaagaaattcactgacaaccacacaactacatggaaattgaacgacctgctcctgaatgactcttgggtgagtaacaaaattaagtcagaaattaagaagttctttgaaactagtaagaacaaagatacaatgtaccagaatctcttagacgcagctaaagcagtgttaagagcgaaatktatagcactaaatgcccacatcaaaa

SEQ ID NO: 160599 - DNA, 572 bp, Homo sapiens
cttaaatctaagatctaagactatgaaactgctacaagaaaacattggaagaactctccatccaggacattggcctgggcaaaaatttcytgagtaatacccaacaagcataggcaatgaaggcaaaaatggacaaatggggtcacatcaagtaaaaagcttctgcacagcaaaggatacggtcaacaaagggaagagacaacccacagaatggtagaaaatatttgcaaacaactcatctgatgaggtattaataactagaatatagaagaagctcaaacaactctataaaaagtctagtaatccaatttaaaaatgagcaaaagatctgaatagacatttttaaaagaagatatacaaatggcaaacaggcatatgaaaaggtgctgagcatcattgatcatcagagaaatgcaagtcaaaactacaatgagatatcacctcaccccagttgaaatagcttctatgcaaaagatgagcaataacaaatgctggcaaggatgtggagaaaagggaaccctcatacactgttggtgggaatgtaaattagcacagctataaggaagaatagt

SEQ ID NO: 160600 - DNA, 572 bp, Homo sapiens
cttaaatctaagatctaagactatgaaactgctacaagaaaacattggaagaactctccatccaggacattggcctgggcaaaaatttcctgagtaatacccaacaagcataggcaatgaaggcaaaaatggacaaatggggtcacatcaagtaaaaagcttctgcacagcaaaggatacggtcaacaaagggaagagacaacccacagaatggtagaaaatatttgcaaacaactcatctgatgaggtattaataactagaatatagaagaagctcaaacaactctataaaaagtctagtaatccaatttaaaaatgagcaaaagatctgaatagacatttttaaaagaagatatacaaatggcaaacaggcatatgaaaaggtgctgagcatcattgatcatcagagaaatgcaagtcaaaactacaatgagatatcacctcaccccagttgaaatagcttctatgcaaaagatgagcaataacaaatgctggcaaggatgtggagaaaagggaaccytcatacactgttggtgggaatgtaaattagcacagctataaggaagaatagt

SEQ ID NO: 160601 - DNA, 455 bp, Homo sapiens
ataggatagatagatatataatggggagtttattaaggagtattaaactcacaagatcacaaggtcccatgataggccatctgcaagctaaggagctaggaagccagtctgaattccaaagctgaagaacttgaagtccagtgtttgagggcaggaagcatccagcacaggaaaaagatgtaggctaggaggctaagccagtctagtcttttcacattctcctgcctgcatttatcctagccaygctggcagctgattacattgtgctcacccagattaagggtgggtctgcctttctcagcccactgactcaaatgtaaatctcctttggcaacaccctcacagacacacccaggatcaatactttgcatccttcaatccaatcgacactcaatattagccatcataattgagtcttcacctctctgatcatgtgagccaatcccctctaataa

SEQ ID NO: 160602 - DNA, 466 bp, Homo sapiens
atatataatggggagtttattaaggagtattaaactcacaagatcacaaggtcccatgataggccatctgcaagctaaggagctaggaagccagtctgaattccaaagctgaagaacttgaagtccagtgtttgagggcaggaagcatccagcacaggaaaaagatgtaggctaggaggctaagccagtctagtcttttcacattctcctgcctgcatttatcctagccacgctggcagctgattacattgtgctcacccagattaagggtgggtctgcctttctcagcccactgactcaaatgtaaatctcctttggcaacaccctcacagacacacccaggatcaatactttgcatccttcaatccaatcgacactcaatattagccatcataattgagtcttcacctctctgatcatgtgasccaatcccctctaataatcccctctcatgtatatacacata

SEQ ID NO: 160603 - DNA, 568 bp, Homo sapiens
tgactctactttttatgggaataaataaccaatctttatcatgataaaatgataacacatttcatgatgatgcataacyggtccttcctcagccccacctccaccctactccctgctgccttttaaaaaaaattaaatattttaaatattttaagtatttaaatattttttaaatatgtaaatgtgacctcattatttataatacttaaaagaccacgttcttgtatacccaatcttattcttttttttgcacattttaattttttaattaagaatatgctttttcattttgttcacctggcaattcttctgaaatttgaaaacaatttcaatgcagttttgtgggtataatgttacctagggaacagttttgctttaagttccttatattgtgcatttcttattcaattctcataccttgtaattaataattttgttaaaatgcatccacttttaggtcatcccaaaaccaaagcttttataactcatggtggaaccaatggcatctatgaggcgatctaccatgggatccctatggtgggcattcccttgtttgcggatcaacatg

SEQ ID NO: 160604 - DNA, 587 bp, Homo sapiens
gtattgttctttggtgatgatatgattctatacctagaaaatcctaaagactgcctaaagcctgctagaactgaaaaatgacttcagtaatgtttcaagatacaaaatccatgtacaaaaatcaataccatttctatacaccaataaaaattcaggctaagagtcaaatcaagaacacaatcacatttataccacacacacaaacaaaatatacttaaaaatacatctaaccaaggagacaaaagwtttctacaagaactacaaagcactgctgaaataaatcatagatgactcaaacaaatggtagagcattttatgctcagggttggaagaatcaatatcattaaaataaccatcctaaccaaagccatccacacattaaatgctattcctattaaaatgccaatgtcattattcacagaattagaaaaaaatattcaaaaatttccataaaaccaaaaattagtccaaatagctgaagaatgcctcagcaaagagaacaaagccagaggcatcacattacccaacttcaaactatgttataaggctgcagacaccaaaacagcatggttctgttacaaaaacag

SEQ ID NO: 160605 - DNA, 635 bp, Homo sapiens
atctgtttctctgaaatttttaggaaggacattactatagagactatagaaaccgagatagttgaataaagaaaataatggatgatcataaatgtaaaagtgcacgatgttttcaacagtttcaggaaagttggaggcaagtaggatgatgatgattaggacaaaagaaggtctagcataatatctaaaccatcaatgattccatgaccrtcaagaagacaaataaaatacaggttattctcattattcatggtagtcgtgttctgtgaagtcaccacaaatgctgaattaatgactgttgagtccttgttcttaggagaaatacagggttggttttccaggagactctggtcacatttttgtcaactgctcaagacataaacagatttcgtgtgtgtttctgtttaaagacgttctatttaatatacattgttgattcattaacattaaactcacagtaaacaccgctaaaacttataactaaacaaagcttaccaaatatacatattttctccatatggcacatcacaaccttcttgcactatactttggcactacagttggggactattttaaacagcaaaatcgccagcaaagataataaaaatgtgaaaaatgtagcactatgtagacca

SEQ ID NO: 160606 - DNA, 494 bp, Homo sapiens
cctgtggaataaccagctagcaacatgatggcaggatcaaatcttcacatatcaatattataacttgaatataaacaggcttaatgccccacttacaagggacagagtagcccattggataaagaagcaagacccaactgtatgctatcatcaggagacccatctcaaatgcaatgacactcatagtctcaaagtaaaggcataaggaaagatctaccaagcaaatraaaaacaaaaaagaacaggggttgctactcttatttcagacaaaacagactttaaaacaataattaaaaaggacaaaaaatggtgtaacaaagtgataaagtgttcaattcaacaagaagattaactatctaaatgtatatgcatccaacactggagcatccagactcagaaaataagttcttagagcctacaaaaaagacttagataaatacaaaattatagtggagatttcaacacccctctaaaggtgttataaaggcagaaaa

SEQ ID NO: 160607 - DNA, 306 bp, Homo sapiens
ctgctccctcccatttcacacttcaccttctgccatgattgtaagcttcctccctagaaaccgagcagatgccagcaccatgctgcccataaagcctgcagaatcataagccaattaaaccttttctctttatacattacctaatattggctttttgtttacttggttttgttagtttgtttgtttgtttttggagacagggttttgctctgtcacccaagctggagtgcagtgggtgcagtgcagcctcgacctcttgggttcaarcaatcctcctgcctcataatttccaagtagctgggacta

SEQ ID NO: 160608 - DNA, 476 bp, Homo sapiens
ccatgttgcccaagctggtcttgaacttctgagctctagtgatccacctcccttggcctcccaaagtgctgagattacctgcatgagccaccatgcccgacccaggtatttttttatagcagtgtaagaacagcctaatacagacaggaacagacacttctcaaatgaagacacacaagcagccaacaaacatatggacaaatgctcaacatcactaatcagggaaatgggaaattaaaaaccayaataagataccatctcaaaccagtcagaatggctattactaaaaagtcaaaaaaacaacagatgttgttgaggttgtggagaaaagggaatgcttatacactgctcgtgggaatgtaaattaggtcagccactgtgggaagcagcttggagatttctcaaagaaattaagacagaactacaatttgacccagcaatcccattactgggtatattatacacaaaggaataca

SEQ ID NO: 160609 - DNA, 600 bp, Homo sapiens
gtaaatagtctttccttttcctcttatgttttctaaattacatttgacwgttgaagcaaaacattgtcttctgtggttctcaaaatataaagcaaatatttaatatttatatttattaatatttaatgtttatatttgttaatgtttaatattaaagagggaaaagcaaagggatttaaggggaagtaagttttttattctatactccaccaaaactagtaaaatttcaatacacatagacagtgatgttatgtatgtatatataaataaatatatatttatatacacatatatataacttaaaggaaccactaaaatttttctacaaaaaaaagccaaaaataccaatagatgatccaaaattaaattctgtttaaaaagctactgttactctatttatataacattctgaaaattgaaaaattatagagatggagaataaattagtgattgccagatgttagggatagtaggaggagggaaaaaggtaggtctttgtggtgatagaatagttcttcatcttaactgtagtggtggttacacaaatctacagatgtgacaaaatgccatagaattagacacatactttgtacgactgtc

SEQ ID NO: 160610 - DNA, 600 bp, Homo sapiens
gtaaatagtctttccttttcctcttatgttttctaaattacatttgactgttgaagcaaaacattgtcttctgtggttctcaaaatataaagcaaatatttaatatttatatttattaatatttaatgtttatatttgttaatgtttaatattaaagagggaaaagcaaagggatttaaggggaagtaagttttttattctatactccaccaaaactagtaaaatttcaatacacatagacagtgatgttatgtatgtatatataaataaatatatatttatatacacatatatataacttaaaggaaccactaaaatttttctacaaaaaaaagccaaaaayaccaatagatgatccaaaattaaattctgtttaaaaagctactgttactctatttatataacattctgaaaattgaaaaattatagagatggagaataaattagtgattgccagatgttagggatagtaggaggagggaaaaaggtaggtctttgtggtgatagaatagttcttcatcttaactgtagtggtggttacacaaatctacagatgtgacaaaatgccatagaattagacacatactttgtacgactgtc

SEQ ID NO: 160611 - DNA, 600 bp, Homo sapiens
gtaaatagtctttccttttcctcttatgttttctaaattacatttgactgttgaagcaaaacattgtcttctgtggttctcaaaatataaagcaaatatttaatatttatatttattaatatttaatgtttatatttgttaatgtttaatattaaagagggaaaagcaaagggatttaaggggaagtaagttttttattctatactccaccaaaactagtaaaatttcaatacacatagacagtgatgttatgtatgtatatataaataaatatatatttatatacacatatatataacttaaaggaaccactaaaatttttctacaaaaaaaagccaaaaataccaatagaygatccaaaattaaattctgtttaaaaagctactgttactctatttatataacattctgaaaattgaaaaattatagagatggagaataaattagtgattgccagatgttagggatagtaggaggagggaaaaaggtaggtctttgtggtgatagaatagttcttcatcttaactgtagtggtggttacacaaatctacagatgtgacaaaatgccatagaattagacacatactttgtacgactgtc

SEQ ID NO: 160612 - DNA, 551 bp, Homo sapiens
gtgaaagcaaataacatataaaacagcgccaatatttatggagatagacttcccaaaagaaactatacagaccaggaaggactggaatgatgttttcaaagtgctcaacacaaaaggatgccaccaaaaaatattgaaacaaaaataattatcaatcaaatataaatgagagatgaagtatttaccaggcaaacaaaacatagaattgaccactgagctagtcagaggagaaggaggtccccagagaatctccaacaagcctgtgcactgggaggaatgtgcactggggtggaacctcaggaattttgcactgtttgcaacagggaggagcccggcaaatatcccatgtggaacctgggattcaagctgctagtgggaagcactctggcaggggtctccagccttgtggaagatccctgtttcccctttttttttccttttcacccaataaaaccctgctttactcacctgttgaaccatctgccagcctaaattttcrtggccctgagatggacaaagacaccattgcgttatttagtccacctatttac

SEQ ID NO: 160613 - DNA, 667 bp, Homo sapiens
atacttaccaaaacctgagctctcaagcatgtaaagcaaacattaacagacctaaaggcaaaactagcatgcaacacagcaatagtaggagactttaacaccccattctctgtaatggaaagattatccaggaagaaaatcaacacagaaacatcagagttaaagtacacactagatatgaagggcctaactgacatatacagaaagtttcacataattgctgtagaatagacattctttttattagcacaaaaaatgtctcccttaattctatgataggctaccaaacaagcctgtacaaattcaaaaacacaagtatcatatgaagtatattttctgaccacaatgaaataaaacaaaaaataaattaaaagaagaatctggaaaacagacatgaacacatggaaattaaacatactgctaaatgacaaacatgtcaatgaagttattaagaagaaaatttaaaaattttgtgagacaaatgaaaatggaagtacagcataccaacrtctatggaagatggccaaaaaaactgtaagaagaaagtttcttgtaacaaacatctgtatcaaaaaagttgaaagacttcaaataacctaatactatacatcaaagaactaaaaaagcaggaacaaaccaaacccaaagctaatagaaagaaagaaat

SEQ ID NO: 160614 - DNA, 621 bp, Homo sapiens
ctattacatgacattaaatgaaaataactttttacattaaattattagtttgagcttatctgtaaatatttactatttagatttaccatgttttagcttactacactctccattttctgtattttatggaaatgataatttatttattctcttaagctgttaatgaaaagttatgcatagatacatttccaaaatgtctatgcgtaaatggcctagaagtaataatatcccagatgcaatgaacatgctaagtacttgaaattttgcttctagacactatactccaataaaacgaaccatgccttcctcaagatataaatgacattacccctgaggcaacaaaagtacaggatgtgcctgaaatatctaggggtgccagaaagtaaataagtatacaacatgatgacaacatatcagaaaaatatagaaggaaactgaaggaagtcccaatgaatcgaatctggaccaatttgagcaatggaataatgawagctgtggattgtaacctttggaataaaccaaatactcatgaaatcatattgacagaaaccagtataaggaaataaaagggaaaaaatgttctttcttagagtagaatttctcttactaattgttaaagaa

SEQ ID NO: 160615 - DNA, 549 bp, Homo sapiens
atttttgaaaaatacttggcaaaatatgttgtgcatacacaaactttaggatttctttttttaaacaagtttttaaaagaaagtttacctcccatgtttaggatctgaaagtataccggttatgtcagaatgggttcatcattattttacagagaaaataaataaataataaatggaaaacaaaagaaacaacaacaacaaaaagatgggtattcaattttgacattatatactgaaaacttttggcgctacatttctctttctctttattttgtcttgataggcgtatgcactgagcaatgtggaattayactatgcatttacatttacaaatgagaacataagggaaaccacaattcagagtaattctcaataaatttcaagcaaacacatattcaacaagggctttatattgtgtgaatgagctactcaagatagtgaagagatctccactggaaaaatgactggtagattcttccactgaggattaagtgcccctgtgagacacagaaaagtgatgatgagggtccctcacaggcagttataggt

SEQ ID NO: 160616 - DNA, 527 bp, Homo sapiens
aagggaaattaatagtgccaccaggaaacggaagagttggtagagaagtaggayaagtgaaagaatgactaatagtacaatcatgataattgctaatacttactgttgttactaaatccaagtcaatagttttgaaacctgtcccctaattgtttattacataaaataattgtattacaaattgcttgtttttccattaagtatatctttcaaatttttaaattttcaatttttaaaaatttttgtggttacctagtaaatgtatatatttgtggggtacatgagatactttgatacagggatgcaattggaaataagcatattatggagaatggagtatctatcccctcaagcatttttactttgtcttatgcacaatataattacactattttagttatttaaaaatgtacagtgaagttattattgactatagtcaccctgttgtgtgatcaaatagtatgtcttattcctttttacatacctgttaaaatccctgcttacccccatgcccccagtacccttcc

SEQ ID NO: 160617 - DNA, 460 bp, Homo sapiens
ttggtagagaagtaggacaagtgaaagaatgactaatagtacaatcatgataattgctaatacttactgttgttactaaatccaagtcaatagttttgaaacctgtcccctaattgtttattacataaaataattgtattacaaattgcttgtttttccattaagtatatctttcaaatttttaaattttcaatttttaaaaatttttgtggttacctagtaaatgtatatatttgtggrgtacatgagatactttgatacagggatgcaattggaaataagcatattatggagaatggagtatctatcccctcaagcatttttactttgtcttatgcacaatataattacactattttagttatttaaaaatgtacagtgaagttattattgactatagtcaccctgttgtgtgatcaaatagtatgtcttattcctttttacatacctgttaaaatcc

SEQ ID NO: 160618 - DNA, 554 bp, Homo sapiens
ctttttcttcacatccccatcagcatttatttttgtctgtcttttgggtataagctactttaaatggtgtgagaagatgtctcattktagttgtgatttgactttctctgatgatcagtgatattgagcatcttttcacatgtctgtttgccacttttctgtttacttttgagaaacatctctattcaaattctttgtccatttttttatcttttcctatagagggtttgagccccttatatattctggttattaattccttgtcagatggatagtttgtaaatatttttcccattctgtggactgtctcttcacttgttgattgtttcctttgctgtatagaagctgattaacttgatgtgatctcatttgttcatttttactttgcctgtgattatggggtataacccaagaaattttggcccagaaaaacatcctggagattttctttaatgttttcttgtagtagttcataatttgaggtctgagatataagcctttaaaccatttttatttgatttttgtatatggatagagctagggatctagtttca

SEQ ID NO: 160619 - DNA, 565 bp, Homo sapiens
tgtatagggttcctttttcttcacatccccatcagcatttatttttgtctgtcttttgggtataagctactttaaatggtgtgagaagatgtctcattgtagttgtgatttgactttctctgatgatcagtgatattgagcatcttttcacatgtctgtttgccacttttctgtttacttttgagaaacatctctattcaaattctttgtccatttttttatcttttcctatagagggtttgagccccttatatattctggttattaattccttgtcagatggatagtttgtaaatatttttcccattctgtggactgtctcttcacttgttgattgtttcctttgctgwatagaagctgattaacttgatgtgatctcatttgttcatttttactttgcctgtgattatggggtataacccaagaaattttggcccagaaaaacatcctggagattttctttaatgttttcttgtagtagttcataatttgaggtctgagatataagcctttaaaccatttttatttgatttttgtatatggatagagctagggatctagtttc

SEQ ID NO: 160620 - DNA, 492 bp, Homo sapiens
acattgaactgtacacactaattggtgagtcatatggyatatgaattatgtgtcaacaaagttttagaagacattacttgcaccacgatattaaaaaatgccgtttgagttgtataattacttcttctctctatgtcaagggcaccgaacaggcaggagcctctcacttgccactgttcttaacagtattataaaataattacataagacaggttacttacatattctaggtcataaaaattattgcttgactagagtaattgtaaacataaaagaacaccaaacacactaaaataaatatgaggtcatcaatcttttgttggtctccttggcatgcacctattcagactgttagtattatgtatttacttcaaattttagcagttatattttaacttgattgatttttcctcagatataagtatgagaaatgacagaaagaaacaacaactggaaaagaagcattgcataagaccaggatgtctctgaaat

SEQ ID NO: 160621 - DNA, 435 bp, Homo sapiens
gtgtaaagatttcagtgttgagctcaaaaaactcatggtttactttgagaaccaaggatcaagggactagcttaataaactgtagacactagagtacttcctggaaagctgttttcatgggtaaggtaagatgaattaattgtggaactgaaagagttgtttaaaggtatatttgttactattgcagcttcagagggaagacaaatgtgtatttaagttcatagtggctacattagtccattctcacactgctgtaaagaaatacctgagactgggtaatttataaagaaaagaagtttaatagactcagttcyacatgactgggatgcctcaagaaacttagaatcatggtgaaaggctaaggggaagcaagcttggatcttctcacttagtggcaggagagagaagtgcaagcaggggaaataccagacactt

SEQ ID NO: 160622 - DNA, 435 bp, Homo sapiens
gtgtaaagatttcagtgttgagctcaaaaaactcatggtttactttgagaaccaaggatcaagggactagcttaataaactgtagacactagagtacttcctggaaagctgttttcatgggtaaggtaagatgaattaattgtggaactgaaagagttgtttaaaggtatatttgttactattgcagcttcagagggaagacaaatgtgtatttaagttcatagtggctacattagtccattctcacactgctgtaaagaaatacctgagactgggtaatttataaagaaaagaagtttaatagactcagttctacatgactgggatgcctcaagaaacttagaatcatggtgaaaggctaaggggaagcaagcttggatcttctcacttagtggcaggagagagaagtgcragcaggggaaataccagacactt

SEQ ID NO: 160623 - DNA, 446 bp, Homo sapiens
gtgtaaagatttcagtgttgagctcaaaaaactcatggtttactttgagaaccaaggatcaagggactagcttaataaactgtagacactagagtacttcctggaaagctgttttcatgggtaaggtaagatgaattaattgtggaactgaaagagttgtttaaaggtatatttgttactattgcagcttcagagggaagacaaatgtgtatttaagttcatagtggctacattagtccattctcacactgctgtaaagaaatacctgagactgggtaatttataaagaaaagaagtttaatagactcagttctacatgactgggatgcctcaagaaacttagaatcatggtgaaaggctaaggggaagcaagcttggatcttctcacttagtggcaggagagagaagtgcaagcaggggaaatacyagacacttataaaactatc

SEQ ID NO: 160624 - DNA, 309 bp, Homo sapiens
ccccattaagacatggtgacgagttgccatcttggaggaatgcccaataccagcatcttgatggtgaatctttcagcctcaagaactgtgacaaataaatgtttgttgtctgtaagctagccaatgtatggtatttttctatatagcaccctgagcatgctaagacatgcagtctcagcatagsttttgtctcacccactgggagctctgaagctgttaggccttcagagttggtccaaactgaaaaggggagaatgggcctttagagtcctacatgtgaccaggcattggatatgggctgtcttggaa

SEQ ID NO: 160625 - DNA, 406 bp, Homo sapiens
cttaagggaacattgacaggtaatctggcaggactcctagcggtttggcgtggtgagggctacaggcctctgcctttggaaaggggaaggaatagtagggaggactgtgtcttgcagtttgagtgccagctcagccacaagacaatagtataccaaccaggtagacttcttaggtttttgactctagtccccaattcctgggtgggacttctgaaccaatccagggcctgggggaccttgctgccctgatgggaaggacataggcttgactggcttttccacctgctgattgtagagccacaggcccttgagcaaacataggcagtagccaggaagtggttaccaggrcttgggcaagacccagcactggattggcttcaggtttgacccagtgcagtcatagtgg

SEQ ID NO: 160626 - DNA, 560 bp, Homo sapiens
agctctagccaatcacatagtaaacctccttgtaaaatttgtttcttcttgcttagaagccatcaaacttatgcaactggagccttggaatattggctctctttttaccagggacccttagataggcccttagatctgactaccatttcccccaaaacaatgccccctgtcagcatgaagcagttaagagcagttgtcatccctatcstaatggcagttagatgtacctcttcagagggagggtttgatggcagtggctgctccagatagtctgccactgccatgatgtcagctgcagaagggaggcacgaccaggcctcctgcttcctggagtaggcaggagccccacctactgggtggggctgcagacgccaaagttgtggctgcagatccaagcgtccctgtgctcttggtgggctggaagcaggcaggaaccctgctcccccgggcgcagctgccactgcccaaaccatggctgcagacctaggcctcctgctccacagagcaggcaagagcacggccactccctgggcacagctgcagccacccaaaccatggct

SEQ ID NO: 160627 - DNA, 560 bp, Homo sapiens
agctctagccaatcacatagtaaacctccttgtaaaatttgtttcttcttgcttagaagccatcaaacttatgcaactggagccttggaatattggctctctttttaccagggacccttagataggcccttagatctgactaccatttcccccaaaacaatgccccctgtcagcatgaagcagttaagagcagttgtcatccctatcgtaatggcagttagatgtacctcttcagagggagggtttgatggcagtggctgctccagatagtctgccactgccatgatrtcagctgcagaagggaggcacgaccaggcctcctgcttcctggagtaggcaggagccccacctactgggtggggctgcagacgccaaagttgtggctgcagatccaagcgtccctgtgctcttggtgggctggaagcaggcaggaaccctgctcccccgggcgcagctgccactgcccaaaccatggctgcagacctaggcctcctgctccacagagcaggcaagagcacggccactccctgggcacagctgcagccacccaaaccatggct

SEQ ID NO: 160628 - DNA, 471 bp, Homo sapiens
ttattttatggatgaggaaaccaagagccaaggagtttaaatatcttaccaatcccatcactaagtttcagaggaagtgcttggctctttccctggatgcacttcatctttgaaattcagaactgatgtgcgatgggagactcccgcgtaggacagattataataacaaaaaattagaatgactcaattatytactccagcccctttccttctctctctaatttctctttctgattcttaatcacaagccataaccgtgttgctcagcacctcatatggtttggatgttttgtccccctccaaatctcatgttgaaatgtgattcccaatgttggaggtgaggcttagtgggaagtgttagagtcatggggacagatccctcataattgtaatactattgtattgtattgtacacactattgtaataagtctaaaataacttaaagtgtgtaactggattgtttgtaactc

SEQ ID NO: 160629 - DNA, 590 bp, Homo sapiens
atataaacatgtcatccattctcaagatggattgaagatgtaaaacacctcaaactataaaaatgttagaagaaaatctaggaaataaccttctcaacatcaggcttggcaaagaatatttgtctgagttcccaaaagcaatcgcaacaaaaacaaaaatagacaagttggacctaattaacctaasgagtttctccacagcaaaagaaatgatcaacagaataaacagacaacctacagaatgagatagaatgttcacaaactatgaatccaacaaagattgaatatatccggagtctatcagaacttaaacaaaccagcaagcaaaaaccaaataaccccattaaataatggacaaaggacaagaatagataccttgcaaaataagacataccagtggccaatgaaaaaaatgctcatcatcattaatcaacagatacatgcacatcaaaaccacagtgaaataccatctcataccagtcagaattgccgttatttaaaagtcaaaaaacaacaggtgctggcaaagctgcagagaaaaggagatgcttatacactgttggtgggaatataaactgttagtttggcca

SEQ ID NO: 160630 - DNA, 569 bp, Homo sapiens
aaataaatatacagagagaataaaacagtggttaccagggccaagggtaggggcatgaggctaaggacacaaagtagcagatatgtagaatgatcagatctagatgtctgttatataacaacatgaagactatagtttataatagtgcattatgttttggatttttgctaaatgagtcaatggtagctgttcttgccacaaaaaaatgggtaactatgtgagatgattgatatgttaatttgcttcactatagtaaccattwtactgtctatatgtatctcataatatcatgtcatatactttaaacatacacaatgcaatttcttttaaaaaggaagcatttatttacaaaaaaactactgaaccttgggtaaaaacagtgggaatctgtggtgtattttagcatggggtgctcccactcctattcctccacctctagctccaatcagcagtagttccacgaaggtgggctaaaccaagaaaaccggcagctttgctgtcaaatatgactaacttgatttggagcagagcatgcataaaacccccatgcatctgggtgttatcaaaaa

SEQ ID NO: 160631 - DNA, 570 bp, Homo sapiens
taactttgtcagccattatgttaaatataagtggtcaaaataccataattaagaggtagggattggcagattagataacaaagcaagacccaggtataagctgcctgtaagaaacttataggtaagaaaagaaaaaaaaaagtccaaacaggttaaaagtaaaagaaggtaaaatacatatatacatgtatattctatgcaagcataaacttaataaaagctggagtaaacatattaatgagacaaaataatttttagagyaaataatattaccaggaataaagaagataattttatagtgataaaaggaatcaagtcatcaaaaactcaaagttatccgtaatgcttatgtacctaataacagagcttcacaatacatgatgtaaaaactgatagaaccacaagcaaattgtaactggagagttcaatgtttctctgtcaatcaatgctgaacaagccgactgaaaatcagcaagggtataggagacttgaaaaataccatcaacataatcggccaaattgttagttgtagaacactctatcctgtaacatcagaatatgtattcatta

SEQ ID NO: 160632 - DNA, 518 bp, Homo sapiens
catttttcagtatagccacttgctcctcaatgtcacaagggaaagagagtctccttgcaagataggtacataatcttacgtagcataatcacrtaaatataatcagttataatcggtgacctttgccatattctgtggtcagaagcaaggaagagggtccaccaacactcactggaggtcgtgggatcaccgtagattctgtctgacataaattctgagaatagacctgaaaacttatacgctgaaaactacaaagcgttgctgatggaaactaacgaagacttaaataaatggagaaatgtctcatttttatacactggcaactcaatattgttacaatgtcaattctttccaaattgatctatacattcaatgcaatcataataaaaatttttgtagaaatagaacatttctctaagaattgacgaaattatttaaaaattcttatggaaatccaaagtacctaaaatgcccaaagtatccttgaaaaagaacaaatgtggaggaatgcttctatc

SEQ ID NO: 160633 - DNA, 417 bp, Homo sapiens
taggctgaggagagaatgaccctgttccttattcatccaktggcattacaaaactagtcggaaaccccagactcctccttcaccttccccagcatcccaggagctgcttgctctggaagatgtttccatcagcctgattccagagcacagctgtccctacaccatgcattagacatgacgactgaggaatgaatggacttctctccctcaaagctccgcaatcttagggtcatcatcccctggtccactgtgacctatgtgtgtgtttgtcacatgtttgcttcatgcccagacaagaaatgccttcatagagtcctttcacatgtcaggttcagtaatgacacgttaaatcctgactccttaacagaagcaggtacactttacagatcacatcgtgaaatggaatttgtagttgct

SEQ ID NO: 160634 - DNA, 427 bp, Homo sapiens
atcacagagcctgtaggctgaggagagaatgaccctgttccttattcatccattggcattacaaaactagtcggaaaccccagactcctccttcaccttycccagcatcccaggagctgcttgctctggaagatgtttccatcagcctgattccagagcacagctgtccctacaccatgcattagacatgacgactgaggaatgaatggacttctctccctcaaagctccgcaatcttagggtcatcatcccctggtccactgtgacctatgtgtgtgtttgtcacatgtttgcttcatgcccagacaagaaatgccttcatagagtcctttcacatgtcaggttcagtaatgacacgttaaatcctgactccttaacagaagcaggtacactttacagatcacatcgtgaaatggaatttgtagtt

SEQ ID NO: 160635 - DNA, 434 bp, Homo sapiens
taggctgaggagagaatgaccctgttccttattcatccattggcattacaaaactagtcggaaaccccagactcctccttcaccttccccagcatcccaggagctgcttgctctggaagatgtttccatcagcctgattccagagcacagctgtccctacaccatgcattagacatgacgactgaggaatgaatggacttctctccctcaaagctccgcaatcttagggtcatcatcccctggtccactgtgacctatgtgtgtgtttgtcacatgtttgcttcatgcccagacaagaaatgcctycatagagtcctttcacatgtcaggttcagtaatgacacgttaaatcctgactccttaacagaagcaggtacactttacagatcacatcgtgaaatggaatttgtagttgctcctggggtgtgtgtggt

SEQ ID NO: 160636 - DNA, 497 bp, Homo sapiens
gccagcagcctagggaactatktaaattgattgtgaaggagaactttccaactctctgagtttatctccagatgaaataaaacatcttggacctcatcacagaatatgatcaagaagaggctggctcatggaaaactggagatgcctgggctaaatcaagggaggtcaccctaaataggttagtatcacttaattatagtttataaaataactacagatgttgaaggctcagaaaaattagtcaatggaaagagaaagaaagacgattggataagtgaaaacaatgactttggaggttcatatagctgtccaagggagtcaaattctcttttattatcagtgaatagtgtaagggagggaccacctgattttggtgacatttgagcactcatctaaaagtgagcatcctgggctctattccttaccccatcctctgttacttatatgcctttaggtaagtgatttttcctggctgggttcatatttccttacctgta

SEQ ID NO: 160637 - DNA, 377 bp, Homo sapiens
gaactatgtaaattgattgtgaaggagaactttccaactctctgagtttatctccagatgaaataaaacatcttggacctcatcacagaatatgatcaagaagaggctggctcatggaaaactggagatgcctgggctaaatcaagggaggtcaccctaaataggttagtatcacttaattatagtttataaaataactacagatgttgaaggctcagaaaaattagtcaatggaaagagaaagaaagacgattggataaktgaaaacaatgactttggaggttcatatagctgtccaagggagtcaaattctcttttattatcagtgaatagtgtaagggagggaccacctgattttggtgacatttgagcactca

SEQ ID NO: 160638 - DNA, 490 bp, Homo sapiens
atcgataagccagcagcctagggaactatgtaaattgattgtgaaggagaactttccaactctctgagtttatctccagatgaaataaaacatcttggacctcatcacagaatatgatcaagaagaggctggctcatggaaaactggagatgcctgggctaaatcaagggaggtcaccctaaataggttagtatcacttaattatagtttataaaataactacagatgttgaaggctcagaaaaattagtcaatggaaagagaaagaaagacgattggataagtgaaaacaatgactttggaggttcatatagctgtccaagggagtcaaattctcttttattaycagtgaatagtgtaagggagggaccacctgattttggtgacatttgagcactcatctaaaagtgagcatcctgggctctattccttaccccatcctctgttacttatatgcctttaggtaagtgatttttcctggctgggttcat

SEQ ID NO: 160639 - DNA, 507 bp, Homo sapiens
tcagtgacttagtggaatatcagaacacagtttatttaactttattaaamaatagaacaaaactcaacacccagcgatggaatatcacaatgtctgtcattcagtcagctattaccaggcatgcaacaatgcagaaatatataatccataaccaggagacaaatctgaaataaaaatagacacagaagtgaagaaatcggtagacatggtgatttataaaattattacaaatgtgttccaccaggcaaagtttcttagctttgagttctatgaaaatcgaatctgatcctagggtggaagtatttcaccttggtaatcagcaattctaatccaggaatacctaaatttgtaggtttgggaaagtcaagttgtgggagagggtcactagatgtggcagccacatggcaggctagttggatctcactgccagaaagaaactagcgtttagttgcaagcatctagttctggatgaattgcaggtctaagacctatgggttgtgactttat

SEQ ID NO: 160640 - DNA, 568 bp, Homo sapiens
cccgctttcctctcccccggacttcgctccttgcaagttgtaaggtgttggcaaggtgcgtgaaacaggctaggagttctggaccggcttccaagtcagatacattcactgtgggcgcacgggtatcctccttctacgctggtcaggggaaggagtttctctgggtggctcctgggcttggggctctgtgagcttggttttctccctgaatgagttggggaatgttttcttctaagtagcctacaggctgcgacctcaaggctggcaatagcttgtgtacttgtttattctccgggaaagaacataagctcccttttgagacagggcgagaaagagggagagagacmgagagagagagaatactgattggttttcacattggaaatacctgcccctgtcctcatttttagcctccttagatgctttctttatcagtcagcacttccatagatgttcccgggagtatctgtatctacaaagggtttttctttcgtttcatttttaaaggttggagtccaatcttacgattttttttcaatggtcacttgcttttttccctacataatat

SEQ ID NO: 160641 - DNA, 534 bp, Homo sapiens
ggaacaacatcatgaactgaagatgaggatgttgaggagaagcagccggagaacagacaagaaaactttgtgtttttcattagctcagtgagggccagttgaaaygtcaagcaggtaaatggtcctataaacactgatgctcagggccacccttctcagacattgattcattgctctttaaagctgaaggtcggatcggaagcgtacactactgtcatgggactagtccctgaaatatgcagatttatatgcaacttatgttaggccttgctcctttctactctcatgcagccaaggggtcatatgtttgtttgaacatcatctacttattggaagctagaacattagacatttttaaacattttcccttcaagtcctgtgatggttactcttgctgttctggagtttttctaatgacctccaggatgtaataccaacaggacactgagtgtggaaagaaaagcagtttttgatttactggccatgtatcttgttttcttaagtactgtacatgcttttctctgtagggtacag

SEQ ID NO: 160642 - DNA, 654 bp, Homo sapiens
cctgaggctcagctggggtagaatccacttctaagatagttgggcagctggcagaattcagttccttgcagttgtaggaatgaggcattaagttttttgctggcttttggccagagtttaccatcagttcctgggggccacacacggttgtcacctgggacttcctagcatggctcaaaccaggttaggagtggggttgggggagagagagagggtgagagggagactccacagttgagtgctacaattccatatgtaatcacataatcctgtacacataatcacatgtagcctatcactgtcagtttgctgtgttggttgaaaggaagccacgggtcctgcccactctcaaggagaaaaggatccctagggcacggacatcagcaggtgggggtgccgcatggccccctaagagtctgttcascacacactcttctagaaaagtaatataaaaagatcatctcacagtcagcaaagagcttagcaaccattaagtacaaataggtattttataggaagaacaaacataaataataaatgtaggaaaagattcccaagtgtataattgattgaaagcagtgcattaaacattgtcattttccccagtgcatttgtgaaactctaattgatgatatcaggttttggttgtgcaca

SEQ ID NO: 160643 - DNA, 416 bp, Homo sapiens
gaattctttctttaatatgtgaaaaactacctactctgacattttatatgtatgatatataatatatattttagtatattacatattatatatatttacatataatatatcatatatatataaaatgtcagggtaagtagtttctctcatattgaaaaataaataatgaggaatccttatcacagcatcaaaacrcagagcaaccaaatcagtgtttttcaccgacttgtaaccaagaacacctttgtgattaatatgaaaatcaaatgctgtcttcttcagttgatagtctttgatctgcagaaattacagtttctccttcaagtatctctattagccaagaaaattttaagatggtcattttgtatataatcagtttcattttcaatttttcaaataggtcttataaaattgac

SEQ ID NO: 160644 - DNA, 415 bp, Homo sapiens
acattttatatgtatgatatataatatatattttagtatattacatattatatatatttacatataatatatcatatatatataaaatgtcagggtaagtagtttctctcatattgaaaaataaataatgaggaatccttatcacagcatcaaaacacagagcaaccaaatcagtgtttttcacckacttgtaaccaagaacacctttgtgattaatatgaaaatcaaatgctgtcttcttcagttgatagtctttgatctgcagaaattacagtttctccttcaagtatctctattagccaagaaaattttaagatggtcattttgtatataatcagtttcattttcaatttttcaaataggtcttataaaattgactaaaaaattgtattctaccccttctccttacgaattc

SEQ ID NO: 160645 - DNA, 416 bp, Homo sapiens
gaattctttctttaatatgtgaaaaactacctactctgacattttatatgtatgatatataatatatattttagtatattacatattatatatatttacatataatatatcatatatatataaaatgtcagggtaagtagtttctctcatattgaaaaataaataatgaggaatccttatcacagcatcaaaacacagagcaaccaaatcagtgtttttcaccgacttgtaaccaagaacacctttgtgattaatatgaaaatcaaatgctgtcttcttcagttgatagtctttgatctgcagaaattasagtttctccttcaagtatctctattagccaagaaaattttaagatggtcattttgtatataatcagtttcattttcaatttttcaaataggtcttataaaattgac

SEQ ID NO: 160646 - DNA, 603 bp, Homo sapiens
agatctttgtaattaaaactataaaacactgatgaaataaattgaagaggacaccaaaaaatgaaaaaatattccatgaaaaacctgaaaaagaaataaaaaagtaatcccatttataatagccacaattaaaattaaatatctaggaattaatgaaagaagtgaaagatctttgtaattaaaactataaaacactggttgggtgcagtggctcatgcctgtaatcccagcattttggaaggcaaaggcaggcagatcacttcaggtcaggagtttgagactagcctggccaacatggcgaaaccctgtctctagtaaaaatacaaaamttagctgggtgtgatggcaggcgcctgtaatcccagctactcaggaggctgaggcaggagaatcacttgaacccgagaggcagaggttgcagtgagccaagatcgcaccactgcactctagcctgggcgacagagggagactccatctcaaaaacaaacaaacaaagaaacacaaaaactataaaacactgatgaaagaaattgaagaggacaccaaaaaatgaaaaaatattccatgttcatggattggaaaaatcaatattgttaaaatttc

SEQ ID NO: 160647 - DNA, 599 bp, Homo sapiens
aggattcattgtttaaaaaaaaaaaaaaaaaaaaaaggtggaggtggggtcttttccaagatggccaaataggaacaactctggtctgcagctcctagcgtgatcgacacagaagacgggtgatttctgcatttccaactgaggtacctgattcatctcattgggactggttggacagtggatgcagcccatggacggtgagccaaagcagggcagggcatcacctcacccaggaagtacaaggagttggggatttccctttcctagccaagggaggctgtgacrgactgtacctggaaaaatgggacactcccacctaaatactgcacttttccagtggtcttagcaaacagcacaccaggagattatatcctgcacctggcttggcgggtcccacgcccacggagcctggctcactgctagcgcagcagtctgagatcaacctgcaaggcagcagcctggtagcaggaggagcgtctgccattgctgaggcttgagtaggtaaacaaaacagccagggaagcttgaactggacagagcccaccacagctcagcaaggcctgctgtctctgttcactccacctctgggagcagggcat

SEQ ID NO: 160648 - DNA, 599 bp, Homo sapiens
aggattcattgtttaaaaaaaaaaaaaaaaaaaaaaggtggaggtggggtcttttccaagatggccaaataggaacaactctggtctgcagctcctagcgtgatcgacacagaagacgggtgatttctgcatttccaactgaggtacctgattcatctcattgggactggttggacagtggatgcagcccatggacggtgagccaaagcagggcagggcatcacctcacccaggaagtacaaggagttggggatttccctttcctagccaagggaggctgtgacagactgtacctggaaaaatgggacactcccacctaaatactgcacttttccagtggtcttagcaaacagcacaccaggagattatatcctgcrcctggcttggcgggtcccacgcccacggagcctggctcactgctagcgcagcagtctgagatcaacctgcaaggcagcagcctggtagcaggaggagcgtctgccattgctgaggcttgagtaggtaaacaaaacagccagggaagcttgaactggacagagcccaccacagctcagcaaggcctgctgtctctgttcactccacctctgggagcagggcat

SEQ ID NO: 160649 - DNA, 599 bp, Homo sapiens
aggattcattgtttaaaaaaaaaaaaaaaaaaaaaaggtggaggtggggtcttttccaagatggccaaataggaacaactctggtctgcagctcctagcgtgatcgacacagaagacgggtgatttctgcatttccaactgaggtacctgattcatctcattgggactggttggacagtggatgcagcccatggacggtgagccaaagcagggcagggcatcacctcacccaggaagtacaaggagttggggatttccctttcctagccaagggaggctgtgacagactgtacctggaaaaatgggacactcccacctaaatactgcacttttccagtggtcttagcaaacagcacaccaggagattatatcctgcacctggcttggcgggtcccacgcccacggagcctggctcactgctagcgcagcagtctgagatcaacctgcaaggcagcagcctggtagcrggaggagcgtctgccattgctgaggcttgagtaggtaaacaaaacagccagggaagcttgaactggacagagcccaccacagctcagcaaggcctgctgtctctgttcactccacctctgggagcagggcat

SEQ ID NO: 160650 - DNA, 599 bp, Homo sapiens
aggattcattgtttaaaaaaaaaaaaaaaaaaaaaaggtggaggtggggtcttttccaagatggccaaataggaacaactctggtctgcagctcctagcgtgatcgacacagaagacgggtgatttctgcatttccaactgaggtacctgattcatctcattgggactggttggacagtggatgcagcccatggacggtgagccaaagcagggcagggcatcacctcacccaggaagtacaaggagttggggatttccctttcctagccaagggaggctgtgacagactgtacctggaaaaatgggacactcccacctaaatactgcacttttccagtggtcttagcaaacagcacaccaggagattatatcctgcacctggcttggcgggtcccacgcccacggagcctggctcactgctagcgcagcagtctgagatcaacctgcaaggcagcagcctggtagcaggaggagcgtctgccattgctgaggcttgagtaggtaaacaaarcagccagggaagcttgaactggacagagcccaccacagctcagcaaggcctgctgtctctgttcactccacctctgggagcagggcat

SEQ ID NO: 160651 - DNA, 641 bp, Homo sapiens
tgcatcattttggaatattttctaagctgcataattagaaatttctcagagagcttttcctttcttattttttccttaaagctttggattcagtatgtcaactggtatgtggtatcagtattaaaagtattacatgagtgctaatatgctgttaaagtaaacatgtataggatataaataccatctatattaggtctcagaaattattcctttttagtcaagccatatttagaactatatgtaaaaactgtatacttcgcttttcaaataggtgctcttttttttcatgattcatttttttttgcttgaatttagccaataggaaagagtagaaataaggaaggttatcggtttcactgtacagctcggtggcatatattttcctcccctttcactgttaaagtgcattaaataaagtaagtctttattaataatctcttaaagagatgatgagataaactacagaggaaaaaaaaactgactagccagtgggagatgtagaatgagggaaataatttggattaacaggatagatattagaggatatcttaaaatagttttttaagtrtcttccctataggaaaaatttgaattgaaagccatcgagaaattatttataaatggaaaatcagagagtaaaa

SEQ ID NO: 160652 - DNA, 596 bp, Homo sapiens
aacagaaagaataaggattgaagaaaaatgaatagcatctcagagacctgtgtaacaacatcagctatactaatawacatgtaatgggagtccccgcaaaaaagagaacaggagggcagaaaaagaactacataaatctatagatcctagaaacccaataaaccccaagtaagataaatacaaaaatatccattaatctacatattataatgttgaaagacaaagtcttgaaagcaacaagaagaaaataattaatcatatgcaaaggagcaatacaattaaaagctaacttctcatcagaaacaatggaggttcagaaggccgtggaatgacaaattcaaagtgctgaaagaaaaaaaagtcaaccaaaaattctatatcaaacagaactaaccttcattaatgaaggtaaaccttcagaagaaaaataatatgtttcccctaatagttccaagaaacattatagaagtgaaacccctcagtttgaattggccttgctagggtcacatatacatgcctggacttttacctacaccaaatggatatagagagggttccccaacaaatagcaaggaaatgaattctgggcaggcaaa

SEQ ID NO: 160653 - DNA, 540 bp, Homo sapiens
ttttaaaatctttatttgaagatttaagaaagaaatatattcctatgacacatgtacctatttactgtgactaaaaatctagtaatctaagagataacttcagataatttcagaatttgggractaaaaatgttttaatggctaaaaggagaaacaggaagttcaagtgtctaaaaatcatattatttttctttttttggtactacaatgttccaatgctactttcaggtcgttaaactcttaaatatacttgtttttaaaactagggtcataggaaagcactaaactttaagaaaaaaatttctagaggcagggcctatgttgctcaggctcatattgaacttctggcctcaagtaatcctcccacctcagccacccaagccattgggattataggcatgagcctgctcccagctttaaacttctatctttgaagtttcatagtacctaagagatagattcatataagatcagaaacaaaagtatcttttaacgctgtatttatgctattttacgctatatattataatcccctaatcc

SEQ ID NO: 160654 - DNA, 549 bp, Homo sapiens
ctttgttgtcgactacagaaaatgggatggatctgttaagtatccatgctgatgctctccagagactctgacagaggtgaggaaataaatggtttgaggtgggcacattaaagtgactctcatgttggtgtaaccgttttatggtttcagyagagaactatctataaacagttaataatctcattttatcttgagtttcctgcattgttgaaccaaacataaagagcttctgaaacaaagctgtgtataaggtttgattgtgccttttaagtgagtggaactcactctggaagggtgggaattcgttagttaaattggcactgcagttggttgtgtttccattaaaaaagaaaacactgaaatgaaaattctgtgaaatattgatgtcctcgtttcttctttgagagtttttcaagtaaagctgtgaagcgaaataaattatacctttctctaaatattgaatcccttgcttttagggtttgctttcagacaattatatattttccggaaattttaaaccaaaagatatttattgtcaagtattaggag

SEQ ID NO: 160655 - DNA, 549 bp, Homo sapiens
ctttgttgtcgactacagaaaatgggatggatctgttaagtatccatgctgatgctctccagagactctgacagaggtgaggaaataaatggtttgaggtgggcacattaaagtgactctcatgttggtgtaaccgttttatggtttcagcagagaactatctataaacagttaataatctcattttatcttgagtttcctgcattgttgaaccaaacataaagagcttctgaaacaaagctgtgtataaggtttgattgtgccttttaagtgagtggaactcactctggaagggtgggaattcgttagttaaattggcactgcagttggttktgtttccattaaaaaagaaaacactgaaatgaaaattctgtgaaatattgatgtcctcgtttcttctttgagagtttttcaagtaaagctgtgaagcgaaataaattatacctttctctaaatattgaatcccttgcttttagggtttgctttcagacaattatatattttccggaaattttaaaccaaaagatatttattgtcaagtattaggag

SEQ ID NO: 160656 - DNA, 549 bp, Homo sapiens
ctttgttgtcgactacagaaaatgggatggatctgttaagtatccatgctgatgctctccagagactctgacagaggtgaggaaataaatggtttgaggtgggcacattaaagtgactctcatgttggtgtaaccgttttatggtttcagcagagaactatctataaacagttaataatctcattttatcttgagtttcctgcattgttgaaccaaacataaagagcttctgaaacaaagctgtgtataaggtttgattgtgccttttaagtgagtggaactcactctggaagggtgggaattcgttagttaaattggcactgcagttggttgtgtttccattaaaaaagaaaacactgaaatgaaaattctgtgaaatattgatgtcctygtttcttctttgagagtttttcaagtaaagctgtgaagcgaaataaattatacctttctctaaatattgaatcccttgcttttagggtttgctttcagacaattatatattttccggaaattttaaaccaaaagatatttattgtcaagtattaggag

SEQ ID NO: 160657 - DNA, 583 bp, Homo sapiens
ctggataaagaaaatgtggcatatatacaccatggaatactatgcagccataaaaaaagatgagtttatgtcctttgcagggacatggatgaagctgaaaatcatcattctcagcaaactaacacaggaacagaaaaccamcaccacatgttctcgctcgtaagtgggagttgaaaaatgagaacacatggacacagggaggggaacatcacacaatggggccttttgtgggggtggggggataggagagggagtattaggagaaatgcctaatgtggatgatgggttgatgggtgcagcaaaccaccatggcacgtgtatacttatgtaacaaacctgcacgttttgcacatgtatttcagaactgaacatataataataaaaaaatgcaatccacattccaatcaataatagtgaatacatggatagccaccaactgatcctatgtaaaaattaccagaaagacaatgcatagaagagtgacttttaaaaataagcaggtttatggagaaataaatttaagctagttcgattaaataaattttgaaagatataatttcacagtcatgatattggcaaaaat

SEQ ID NO: 160658 - DNA, 589 bp, Homo sapiens
aaagtgtgacttctcatacattaaaatactgtacatcatactttagaataaactaagcaaatctatgtaattcaatgtaaaactatcttaaaacactatattgaatgttaacaaaaagacattgaatggtggagggcctataatacatttatataaatttaaaaatgaacacataaaaactatttttaactatggaactataataactctctaaaccttgggcagtaacttctagtgagaagtagaacaattagataatggtgtctggtagagatataatggagctgaaatgttatctgcaatatttaattcatttaaaaagatcttaaagatgcataatatattacaattttaatatagggtttatgtgtgcatgtgtgttcagtatattattttatgctattttagaagttgtaataaaaataaaaataacgyttaaattttcatccacatttctgggaagatagagtctcaaagtgctttatggagatgtctgtataaaatacccactaaacttaaatggtgaatttcaaattaattattaaaagcaaaagtagctgacaaatgagatgaattttaaatattttat

SEQ ID NO: 160659 - DNA, 365 bp, Homo sapiens
accatgtctctgcactgaactgcagagaaggcagtatatatctctgggtacacatatctctatgcaatggatgctccaactagtattttgcatcagtaacagactgaagtcccatcamcacttcatgaaagacctggagaatttaatgagaaggctaccaatgaggttgataattcaggattgccatttcttcagaacaaatatggatcactcccactcccacttgatagtactcaatgaggcaaatcttatgatcaagatttcactttttaaatcctcatagagaagcatcattgggagaaagcaattttcataatttatcatccatcagccctgggtattcggaaggaaaatatgaagcagta

SEQ ID NO: 160660 - DNA, 365 bp, Homo sapiens
accatgtctctgcactgaactgcagagaaggcagtatatatctctgggtacacatatctctatgcaatggatgctccaactagtattttgcatcagtaacagactgaagtcccatcaccacttcatgaaagacctggagaatttaatgagaaggctaccaatgaggttgataattcaggattgccatttcttcagaacaaatatggatcactcccactcccacttgatagtactcaatgaggcaaatcttatgatcaakatttcactttttaaatcctcatagagaagcatcattgggagaaagcaattttcataatttatcatccatcagccctgggtattcggaaggaaaatatgaagcagta

SEQ ID NO: 160661 - DNA, 386 bp, Homo sapiens
gcaaaagcagaaatagaacttaagacacatcagcccaagacagctttgtgttcccagaggtttcttattttttctttgtttttttgtttgtatctgaattatatttttctttctcacttgtgaagtctctccagaattgattttggagtaggggtctagaagctaaagctaagtcatcatcctggcagaaactataaattcaaaamactatgtctttatgccagttatcgatttttattagctgacatatcccaacaaaaataatacaactaaatgtgctttatcaaacatttaaaaaagataaaatatatatatatatatatatatatttcttattttgtaacaaatatgacatagggtaaattggtcaaatatcaagttattaa

SEQ ID NO: 160662 - DNA, 421 bp, Homo sapiens
aaaaaataagcattggaaacaagaaagcaaaacatgtcttcaaggcagtaaaaaattagtaattaaccmaatttgttcaaatttcagaaagggattacaatattataacagaaatttcgatgttcaaatattcattatgtttagccatatcgagaaaataagtttggagaaaatatatttggcatatataggggcaaaaatcaatctgtgaaagggcaatgtagttaaaattaatgatagctaccaagtaaagatgcttgttgtacaattcaaacattttaactactaaaaattataaaaatactgtatagaaataagtataataaattatacattattattaaggtataaataaagttaacgtagtataaaataaattaacatatttttagaaaccagacgtatacactaattttttaaa

SEQ ID NO: 160663 - DNA, 341 bp, Homo sapiens
atgtcagtgcctcaacttttttactgatcctttgtctatttttccccttctaataatgagagaaaagtatcctttgagtatttacactttttattcttatgctgttttgtgagtgttttattaatttgaaatatcawcccgtgttgttggtaatattactttctctgagtctattttttgtgaaatttcaattttatttagcaatttcatgtagctatttcaatttgcttttgattagggtgagtgtgttatatctttccacagttttttctttatcccaaatgtcttaatactttaagtaagattcttgagtgcagcctgtatttgagaggtttttattt

SEQ ID NO: 160664 - DNA, 438 bp, Homo sapiens
attctttaaaatttgttctttaaagtatatatatacgtttctgtgtgtgtgttcatgtgtgtgacttcataagactatcagaaactttcaaagatagtagcagraaaaagtaaaatctgaataaattaataataaagttaaaaatgctgtcaaaaactactttcactaacgattttactgatgatttagttttaaagaagagttaccttctgtggtcctgtttcttagactttaatatacatttatactattggataatttggaaaatgcagattctttatcactacatcttgaatatggttgaagaatctgtgttttaataaatgcccagataatttcagtgttacttgtgcttgaattttctttcagtagcaaaatcgtatgatacttaaagtgctttatatttagaaaatgataatatttgtaagaactttaaaa

SEQ ID NO: 160665 - DNA, 438 bp, Homo sapiens
attctttaaaatttgttctttaaagtatatatatacgtttctgtgtgtgtgttcatgtgtgtgacttcataagactatcagaaactttcaaagatagtagcagaaaaaagtaaaatctgaataaattaataataaagttaaaaatgctgtcaaaaactactttcactaacgattttactgatgatttagttttaaagaagagttaccttcygtggtcctgtttcttagactttaatatacatttatactattggataatttggaaaatgcagattctttatcactacatcttgaatatggttgaagaatctgtgttttaataaatgcccagataatttcagtgttacttgtgcttgaattttctttcagtagcaaaatcgtatgatacttaaagtgctttatatttagaaaatgataatatttgtaagaactttaaaa

SEQ ID NO: 160666 - DNA, 321 bp, Homo sapiens
gaattcttaaaagttcagacactgtggaaagcaatttggagatttctcaaagaatgtatgagaactgctattcatcccagcaatctcattactggatatatatatccaaaggaatataaattattctaccatgataacacatgcacacacatgttcactgcagtactatttacaattgcaaatacatggaatcaacctagatgccaatcagwggtggtctggataataaagcaaatgtggtacatatacaccatggaatactatgcaaccataaaagaatgaaatcatgttctttgcagccacctggatagtcctggagac

SEQ ID NO: 160667 - DNA, 532 bp, Homo sapiens
aagttccagaaaaataaactatttgatattatctgtcaatatttcaaacagggaaatattgactcagtagctgtacttacacaattttttagtaccaaaatactcacatagaaataaaatgctctatgcatgaaattacttttatttcattgtttttaaaatctggggaaaatctcaatgtttatcagtagattgtwtaaaatatttatttataaacgtaattaaacataatatgcatctctaaaaatcaataagaatatagaattaaattctcctacaaataggtctaggtatgaaaattatataatctctatctataggtaactcaaaacctctcaacaaatcacaaagctttttcaaaattaaaatacatctagattagcatttgaataaaggttaaataaatgcacagtgcaaataatgcagaaaataattctaaatatttattaattcaaaatatgaaagcaaataaaaacaaaaatgaaagcataaagaaaacatgaatagaatgttaaaaaacaagggagttaat

SEQ ID NO: 160668 - DNA, 532 bp, Homo sapiens
aagttccagaaaaataaactatttgatattatctgtcaatatttcaaacagggaaatattgactcagtagctgtacttacacaattttttagtaccaaaatactcacatagaaataaaatgctctatgcatgaaattacttttatttcattgtttttaaaatctggggaaaatctcaatgtttatcagtagattgtttaaaatatttatttataaacgtaattaarcataatatgcatctctaaaaatcaataagaatatagaattaaattctcctacaaataggtctaggtatgaaaattatataatctctatctataggtaactcaaaacctctcaacaaatcacaaagctttttcaaaattaaaatacatctagattagcatttgaataaaggttaaataaatgcacagtgcaaataatgcagaaaataattctaaatatttattaattcaaaatatgaaagcaaataaaaacaaaaatgaaagcataaagaaaacatgaatagaatgttaaaaaacaagggagttaat

SEQ ID NO: 160669 - DNA, 235 bp, Homo sapiens
aaaacacaattgtatctatttttatcacgtctttgaatgatatagaacttttcttagccagataagcttaaggttaggtacttagctcaattttaacctakaaatagattggaggttttttgtttgtttgtttttgagatgaagtctctctctgtcactgaagctggatcataatggcacgatctcggctcactggaacttccacctcctgggttcaagcaattttcctgcctcg

SEQ ID NO: 160670 - DNA, 572 bp, Homo sapiens
ggtgtaaacattgaggtttaggcaaacaaaaggtcggcagcttgggtatcagtccactgaaagcaggatccgaacaggaggggaagtggtgaagcgggtgaactcacctttgtagattttsaggttgagtggcttacagcatgttcattcaggaagagaggccagtatgcagttgcaattgcttgcagcctggaggaaggtcacatctagatgcataaattttggagacaatttatttgtcactgatgcctttggagacggttgagacccttcattaatcatgaaatgtgataactgctgttgtaacagcatgaacttggtgttaatcacagagccaatattattaagtgatgttaagtgttgggaacacaaccagtattttctcttaaggaaatgggaaggctgtgtctctgacctcacaaataaatattctggagggtggagttgacagaattttagtgaagcaggtatccagttagcacaggcccacagtgccaaccaactatgaattttgaagccgttagaccttacctaaaattagctgtgctgttagaagagtgaataataatgct

SEQ ID NO: 160671 - DNA, 575 bp, Homo sapiens
ctttacagtttatgtaagtcataatgctagaaaaaactaattgcaattcacagtaatctgactcttgatcgccaaagcatagttcaacacagaattgttttttgtttttaatatccaaaacaatgttggaagggagatgtctagctatgatataatcaaagctttataccgttccaaggacacacagttatattcatgttctggcacacacaaaaaaagcactactatcctttagagaaaaagttagcaaactacagttcatgggccaaatccagcccacagyctgctttcctatggcccacaagttaaggataacttttatgttttttaatggttgagaaaaaaatttaaaaaagaataatacttcatgacctgtgaaatttatatgaaattcaaatttcaatgtccataaagttttattagaacacagtcacactcattaattcatacactgtctatggctgcttttgtgctaccatggcagaactgagtagatgcaacagaaaccgtatgtcccacaaagctaaaaatatttactatctgtccctttacagaaaatttttgccaactccttc

SEQ ID NO: 160672 - DNA, 501 bp, Homo sapiens
gaacagactgagtaatgatatcaacgctgtaataaraagtctcccaggaaggaaaagcccaggacgcagtggcttcactgctgaattttaccaaacatttaaagaagaactaataccaatcctactcaaactattccaaaagatagaggaggagggaatacttctaaaactcgttctatgaagctggtatatgataccaaaaccaaagacacatgcaaaaaaaaaaaaaaaattaaaaaaaaactacaggccaatatccttaataaacattaatgcaaaaatcctagacaaaatactaacaaaccaaattcaacaaaacattaaaaagatcattcatcatgaccaagtgggacttatcccggggttgcaaggatggttcaacatatgcaaatcaatgtgatacatcatatcaacagaatgaaggacaaaaaccatgtgatcatttcaattggtgctgaaaaaacatttgataaaattcaacatcccttcatgaaaaaaagc

SEQ ID NO: 160673 - DNA, 501 bp, Homo sapiens
gaacagactgagtaatgatatcaacgctgtaataaaaagtctcccaggaaggaaaagcccaggacgcagtggcttcactgctgaattttaccaaacatttaaagaagaactaataccaatcctactcaaactattccaaaagatagaggaggagggaatacttytaaaactcgttctatgaagctggtatatgataccaaaaccaaagacacatgcaaaaaaaaaaaaaaaattaaaaaaaaactacaggccaatatccttaataaacattaatgcaaaaatcctagacaaaatactaacaaaccaaattcaacaaaacattaaaaagatcattcatcatgaccaagtgggacttatcccggggttgcaaggatggttcaacatatgcaaatcaatgtgatacatcatatcaacagaatgaaggacaaaaaccatgtgatcatttcaattggtgctgaaaaaacatttgataaaattcaacatcccttcatgaaaaaaagc

SEQ ID NO: 160674 - DNA, 406 bp, Homo sapiens
cacttttgttgaaaaccaaagacatgatcactactgagaatgaactcatsctgagtagaaaaaatagacacgcaagccagcaatttagattttaatattctatctaccataatagtgggatttgcaaagtcctgtgaaatgaggaaagaataaatacctacctcgggtaagggaagtcagactggaaagtcttcacctaaagtaatgtctgatctgaaatttggagaagattttatttaggcagaaataggtaaactagttataacaaatagtgtgggaaaaaatttcatgttataagaacatgaaattcttcaggaactacaaataactcaatgtattattatcagagacaatatttgatacaagggagggggagggaactgattcgaataggtgagtaagatgg

SEQ ID NO: 160675 - DNA, 443 bp, Homo sapiens
agatcttacctcacacctcagggtcataactctcttgactacattgggttctgtcctrcttttctcattcttggccatgtgtattttgtcctatcctgggaacaaggagaggaggcaagagctttctcttgcatttccatgttaaccttactaccacattcttcccagaaagccaggaaatacaatgccaatgttttccattcagtttatatttcatgtataattaacttttgtgttgaacatgaataaactgaaaatttcttgaaatagaaacaatttgatagaattttgtgggtacagtacatacaatccatgtccaataaattactgacatctaaacttgttatagatcttttgttccatcatgtactaattcagtaattctattgcaataaaactaacatttgtttgttataatttgttctcggtaagcctttttctgt

SEQ ID NO: 160676 - DNA, 413 bp, Homo sapiens
cagtgtcagtcaacattcccagggccagatcttacctcacacctcagggtcataactctcttgactacattgggttctgtcctacttttctcattcttggccatgtgtattttgtcctatcctgggaacaaggagaggaggcaagagctttctcttgcatttccatgttaaccytactaccacattcttcccagaaagccaggaaatacaatgccaatgttttccattcagtttatatttcatgtataattaacttttgtgttgaacatgaataaactgaaaatttcttgaaatagaaacaatttgatagaattttgtgggtacagtacatacaatccatgtccaataaattactgacatctaaacttgttatagatcttttgttccatcatgtactaattcagtaattctat

SEQ ID NO: 160677 - DNA, 443 bp, Homo sapiens
agatcttacctcacacctcagggtcataactctcttgactacattgggttctgtcctacttttctcattcttggccatgtgtattttgtcctatcctgggaacaaggagaggaggcaagagctttctcttgcatttccatgttaaccttactaccacattcttcccagaaagccaggaaatacaatgccartgttttccattcagtttatatttcatgtataattaacttttgtgttgaacatgaataaactgaaaatttcttgaaatagaaacaatttgatagaattttgtgggtacagtacatacaatccatgtccaataaattactgacatctaaacttgttatagatcttttgttccatcatgtactaattcagtaattctattgcaataaaactaacatttgtttgttataatttgttctcggtaagcctttttctgt

SEQ ID NO: 160678 - DNA, 443 bp, Homo sapiens
agatcttacctcacacctcagggtcataactctcttgactacattgggttctgtcctacttttctcattcttggccatgtgtattttgtcctatcctgggaacaaggagaggaggcaagagctttctcttgcatttccatgttaaccttactaccacattcttcccagaaagccaggaaatacaatgccaatgttttccattcagtttatatttcatgtawaattaacttttgtgttgaacatgaataaactgaaaatttcttgaaatagaaacaatttgatagaattttgtgggtacagtacatacaatccatgtccaataaattactgacatctaaacttgttatagatcttttgttccatcatgtactaattcagtaattctattgcaataaaactaacatttgtttgttataatttgttctcggtaagcctttttctgt

SEQ ID NO: 160679 - DNA, 456 bp, Homo sapiens
ctaccaattccaaaagagagtcttgatttgggattaggttactctgaaatattttccaaagtaactcaattttacagaatcaaagtgtacttgtagttcattttatagctatggagaatatgtatttctaatttccactttagagggtttttttttaaccatcacaactaggaattttaattctttgtctgaaaaattataccatacatatttccctcaaaamcatttggtatgaagtactgcccattagaagcaagctgaacattttgaatatatattattcatctcatacgggatgaccttgctcagtaggtcataatttgaagatctattatgactgtgattaataggacttctcccgaccagtatctgaaataaatgcaaatggccactgtaacacaattacttggtttccattttaaagtctttccacttagaaactaagttatacataga

SEQ ID NO: 160680 - DNA, 408 bp, Homo sapiens
agatctagacaatggatgaaaatatgtggtttgtgctgtccagaccacaatcgttggaatctagttgtgaaatgctgctctattcyccttaataatttttagaaatatcatcaatatctgtttttgacaatttttattaaagtggcaaatggtcgttaatcatttttagatcagtttttccattagataccagacagaattatctaggtatgaaaagccaatcataaataaggtactattcagttaaactgctttgttcacacaaagaatcatgctattagtttgcatacttcctaagattttaatttcacactcttcagtgtcacaattatattgtcaattaagtgtgtcattagcaaaactgggaaccctcagacataacatttccattcaagtcaaactttatac

SEQ ID NO: 160681 - DNA, 345 bp, Homo sapiens
gttgtgaaatgctgctctattctccttaataatttttagaaatatcatcaatatctgtttttgacaatttttattaaagtggcaaatggtcgttaatcatttttagatcagtttttccattagataccagacagaattatctaggtatgaaaagccaatcataaataaggtactattcagttaaacygctttgttcacacaaagaatcatgctattagtttgcatacttcctaagattttaatttcacactcttcagtgtcacaattatattgtcaattaagtgtgtcattagcaaaactgggaaccctcagacataacatttccattcaagtcaaactttatac

SEQ ID NO: 160682 - DNA, 345 bp, Homo sapiens
gttgtgaaatgctgctctattctccttaataatttttagaaatatcatcaatatctgtttttgacaatttttattaaagtggcaaatggtcgttaatcatttttagatcagtttttccattagataccagacagaattatctaggtatgaaaagccaatcataaataaggtactattcagttaaactgctttgttcacacaragaatcatgctattagtttgcatacttcctaagattttaatttcacactcttcagtgtcacaattatattgtcaattaagtgtgtcattagcaaaactgggaaccctcagacataacatttccattcaagtcaaactttatac

SEQ ID NO: 160683 - DNA, 350 bp, Homo sapiens
tttgtgctgtccagaccacaatcgttggaatctagttgtgaaatgctgctctattctccttaataatttttagaaatatcatcaatatctgtttttgacaatttttattaaagtggcaaatggtcgttaatcatttttagatcagtttttccattagataccagacagaattatctaggtatgaaaagccaatcataaataaggtactattcagttaaactgctttgttcacacaaagaatcatgctattagtttgcatacttcytaagattttaatttcacactcttcagtgtcacaattatattgtcaattaagtgtgtcattagcaaaactgggaaccctcagacat

SEQ ID NO: 160684 - DNA, 675 bp, Homo sapiens
ggagtgtttacctttaaccttcactccctagacaacagctgttcttctattcaagtattgacaatattgtgcaatagtatcggaaaaatatgacgctgaatatgctttattgttataagacagtaagggatcaattcatttaaaaagccctgatttattccagaggaaaagtacaataatgctggttaaattaatagtcaaatctttagattggtcaatataaaggacagtgtaaaattgtactgaggacttttacaatagaaatctgaaaagcttcaaatgctttggcattttacaaattattaacttgggtatggcctagtgcaaccatggccttactctgaatgcaggagggaaaaaaactaaatactctgtatttaaggattattcamtgttctttactttgagttactaggtattcataagaaagtaagagattctgccaaagacatgtgattatacgtggaagaaactgaatcactaataaaaatgaaattggatctactcaaaagcaacccaatagaaggagaataaaacttttagctggtcctgttcactggtggctttctttgtgggctcataatgtggaacaagaaaggtacacaccactgctggaactacactgtgacagctgctaaagaatggagctgactagagatttcaggctgggtccaa

SEQ ID NO: 160685 - DNA, 560 bp, Homo sapiens
tctattaagttcagaggatatttcacaattccaaagaagaactgtgatgtttattatgatgcacatataccatgtatatgcacacaggtatatgtgaatggagattatattccttctcctttgccttgtgctgcaaatagccaaataatctctgctayaaatcatgtaattgctgcttagtagtattcaatttggatggtgcctcatgggtaatctctaaatagaacaactggtcccagtttacggattgaaaggtttgtaaaagaagggcagagataaatgacgggtatcccagtaataaccaaagatcaggcacagaagacaatgattctagaaagtccacaagtctctaggtagttgaattctcaccgcataaactgttttaacttttgtcaattgggtttctaccatacttattctacattaaatgtggagtttacttattccacattaaactgtaacttccccaaggagagaggattgtttttatattttgtaacttcaggtatctactaaaaaattccacacagagtaaagtcatggatggaaaggtttcattg

SEQ ID NO: 160686 - DNA, 554 bp, Homo sapiens
acagtaaatattaattagaaaacagtctgagacttgaccatataattatgcagaaatatacaaattatacacagattaacatgtcacctttttatttcatatgcctggatgtgatccttagaaatttttcaaatagaagccagagatttaagctatatcctattattaaactcacattacatttacacaattaataaatctttacatataattatctaaaataattgtgtaatttcctctcctgagtattcacctaaacttgggcgatcagcaatcttgtatgagtatttttcagatggcaaaaagctctaaatactaaaaaaagaaacaatggcattacatcatctattgtgtctaatgactgtgagacgactctttgcactttaaaaaagatattagmaaccacagaagaaaaaaaaaatttttttaaagaggggaggtctcaccatattgcccaggctagagtgcagtggctattcacaggtgtgatcattgtgcacaatagctttgaattcttgggctcaagtgatcctcctacctcagcctctgcctct

SEQ ID NO: 160687 - DNA, 627 bp, Homo sapiens
taatggactggctgtgttccagcatctttttgttgggaactctcccttgcaaccaaatgttaaatacagatcataggtgaccttgataaaactactcaagaaggcaaatttgacatctttctttcttatgcataaaactccagggagtttcaaggcccagtggtaatggcctatggaacacaaagggcaacacgcacaattccctttagaacttccaatccttccaatcttatgcataagccatctgcttagagtcacctgaacartgagaatttagagtcttcatgctcaggtttctggagtaaatttataaatacaattaatgtgacatagaaggcatgcccacgcactgcatgacactgtgtaaagccccgtatccagttctttgtctcagcaatctgagagaataaagatcttgcagatgtgggtttctgccccattaaacaggactacataatcttgtgactacattactgccacgtactctaccctgaaccctagaacaccacctggaattatgtggctaggtagaatagatgagactttttacaataaaacactgaagaaaacaattttaaaaacatctggtttccaggtcttgcaagttgtcatatattgtgtacagaa

SEQ ID NO: 160688 - DNA, 401 bp, Homo sapiens
acatcagaacacaaaaacaacagtgatctctgcccatgtagaacttaaactcaagttagggtggaagggaagcaccaaatataaaaaataggcaaattatataatttttaaattaagtactgttaaaaacaaactttttaaaattaggataaggtcgtggatcttatacaaatagaaaatggacagctgtcaaagatttttaaaaaaatttttattttaggtttgggggtacatgtgaaagtttgttccgtagataaacatgtgtcacagaggtttgttgtacataatattacatcacccaagtattaagcccagtacccaatagttatcttttctgctcctctccctcctccyaccttcccccctcaagtacaccccagtgtctgttgtttccttctttg

SEQ ID NO: 160689 - DNA, 532 bp, Homo sapiens
atgtcattttggagctttaaaatttgattacttcagtagatttcagacttgcatgggccctgtagcccctttgttttggccaatttmtcccatttggaatggctgtatttacccaatgcctgtacccccattttatctaggaagtaactaacttgattttgattttacagactcataggcagaagggacttgccttgtcttggataaggctttggaatgtggactttgagctgttgctgaaatgagttaaggctttgggggcctgttgggaaggtgtgattgcttttgaaatgtgaggacatgagatttgggagagtccaggggtggaatgatacctaaatcatttccctccagttcaaagttccaaaagtctctagggcagggacaaaatgccaccagtctctttgataatagataacaagtcacctttgctccagttcgcaacaagttcctcacctccaaatctcatcttgaattcccacatgttgtgggagggacccagtgggaggtaactgaatcatggggtcacttt

SEQ ID NO: 160690 - DNA, 580 bp, Homo sapiens
acagagtgaatccccaaaatagctctattattcctctctctaaagtagagaagtagctgagaattcattttaaagaggacagttgattacatttatataataactattaccctttgtcctgccactttgccaaagggcttcatctaaacttcagtttagaaagctcctgtggatcccagcagatcatcctctggtattttcagtgttgttgaaactttgtatttctttgtgttttcatgagggtgaatcaagaatcactagccttccaatatctgatctcaggktcccctgttcacatttatgaaatgggcaatttttcttatttgaatggaaaaaatttcaatttatgtaaatgtttataaaaatcttgaagactaacaataattctttgtaatcttaccttctttttcagctgaattttattctgtttctgaatacggttagagttctagctaccaaaatctgggagaccaatgcagttgggcatgacacaaggaagcaatacaggtaatttcaggagaggcatccatcagaggaaatattttggttactatttctttcctttttttttttttttttg

SEQ ID NO: 160691 - DNA, 349 bp, Homo sapiens
attgtaggagaaggaagaattgctgtcatgyataagcttttcactgcctcagtctggaagtgaaatattgtttctgctcttgtatatagtcacatggcccctgggaggctgttgggaaaacccatgtggaaaagcacatggaatacttggggagcagcactattttttgccacagacatttttcacatcagtgaacattcctcaaatatatgatgtctattgttagggaatgtgacgttgtttgtccaatgtaagtttaaatttacaatgtaacagctatcattcctatctgtaagcaaaaccaaaaataaccaaccaggaatgactcagtgcctcttgtgaatgacaa

SEQ ID NO: 160692 - DNA, 601 bp, Homo sapiens
actttctttggtttatttggtagaatgttgcaaactgatgaagatttaaattgtaatttttccttagataatatcttaaataagaccttccatgccctaactcccagaagtgattaatgacaggaatcctaagccattactgcggctctattttggcattattttcaccccagaggcatgtagcactctgctaaagtcatgctgtttgtggtcatatcctctattgacatcagactgactcagctggcgcagtgggatctggaatctaaaggtggtgtcagcagattttttttttttatgaagggccaggtggctgagagtttttggctttgcaggccatgcagtttctgttgagacttctctgccatgactaatgcactctgttgctgtagggtaaaagcagccacagaaaatagtatccaattgggcatggctgtgtcccaataaaagtttatttataaaaacagacagtgggccatatttggtctacaaactatagtttgtctacygttggtctaagcttggtctcagaccagctctgtgattctggggaaagatactcaaactttctgaacttcactctctttatcggtaaacatgg

SEQ ID NO: 160693 - DNA, 567 bp, Homo sapiens
gagacttattaagtggtacagaggctgatatatgaagtcttgagacattgccaggaaattctaacatgagagcaccaattctaaattaattgtgtcaggtcaggctctgagacagtcatcttccctcaaacctcattytatcatgagctccaacttctccccaaagtcagctaagtttgaatggcctctgattcctcttaaaattaaggattcttcaaattcatacatagcactcttccttgatggagctgggcattaggtcctcctgggctttgaggttgtcaggagagaaagaaattggatgacaaatcccaaatactttactttatattcacaacttatttatttcaatcatttaatattaaaatctcatggatgcatgcttatgggctcaaacagtttagaaggtataataaaaaccatggttaagtatctcaatctacatttcaaggagccttctggttttggccaagcaaaaaagccatattcatttacctgcctcataaatgtcttgaacactcataggaggatagacaggacccttacagtgaccaccagcagagcaat

SEQ ID NO: 160694 - DNA, 603 bp, Homo sapiens
ggaggtggggatggttaatgggtacaaaaatatggaaagaatgaataggacctaccatttgatagcacaatagggtgactatagtcagtaataattacatattttaaaataaagaatgtaattggattgtttgtaactcaaaggataaaatgcttgaggggatggataccccattttccatgatgtgcttatttcacactgcatgcctgtatcaaaacatctcatgtaccccatacatatatatatatctactatgcacccacaaaaatttttttgaataatttaaatttttttaatgataaggcataatacatagcacactctttatgcttagaatttttcctttgttttgttctgtttactaattatacytgaaaattaattctcttgttctattatttattaaaataaactctttatatatatgtcaacataatctgagctttttaatgatccatgcctgcagttgtccacttataggacactacagatctcaaattgaagataacattaatcatttggtaggtcaagactaagctagagcaggaactaaacagcttcaggatgatatttatgtatccaagccccttccccaaaatcttg

SEQ ID NO: 160695 - DNA, 539 bp, Homo sapiens
gtattgatcctgggtgtgtctgtgagggtattgycaaaaaagattaacatttgagtcagatgttaggtgagggcagacccacccttaatctggttgggcaccatttaatcagctgccagtgcagctagaatataaagcaggcagaaaaatgtgaaaagacaagactggcctagcctcccagcctgcatctttctcccgtgctggatgcttcctgccctggaacatcagactccaagtccttcagttctgggactcagactggctctccttgctcctcagcttgcagacagcctactgtgggaccctgtgatcgtgtgagttaatacttagtaaatactaatataatatactactactaatataatacttagttaatactaatataatatatatatatatattctattagctctgtccctctagagaaccctgactaatacattatcccttgtcttgttgttatccagtggtatccctcataccatccttcactcaccgtcttaacctagagatggatatttctcaataatttggtcata

SEQ ID NO: 160696 - DNA, 608 bp, Homo sapiens
tcataaacatttcatgtgtttgtacacatcacaaatatttttgaagattatgtagcagtccgtggaatgatagtgtaactataaccatactgcttgaaaaagattttgcacacattgcttctttcttttgagttctcagaaaaaattcccaggaactgggggttcctgggtcaaaatttgtaaatgttttttacagcttgttttatatgctgctgattggctctctwggaagatggtacaaagtgcctatttcctgatttttgttagctttacttttatgtggtaggtatttgcaagttccataatcattttcctaagtttctcttttagacggcttgcagggatggctgcagtagcaataatgggttggcaacctctccacaccctcctcctagtgctcatggtttccgagggctggattttgcagctcctgccgttgcatcttttgcttttgggaggtgacctataagctgcccccaccacttggctgctgttctccagattttcttcttgttttcatggaaagagggacacccccagtctgagtagtagaaacggggaagggcagaggtaggaagagcagtggctgctgccccaaggcacaggag

SEQ ID NO: 160697 - DNA, 563 bp, Homo sapiens
tgaattactgcataaaatcctaatgcacttattaacgatgcatatatatgcagattttaaacagagtgaaagataaatttcttttctgcctccttggggagcatcctaatatggattttctttaaacatttcttgacctattgaacatttgataaacaggtattttacycaaagctccctccagatctttgacaattaagaaataacataaaaacctatttaggattgcatcgtactcttctctgttagtatttgggatagagatttgaaggagagtgatcctgttttccatttttcgtctcatataattttttttaatgcttactctttgtcagtcactccactatagacagggttgcaaagtcaattaagctatggtttctttgtttcaggaaactgcagactagtgaaaagtggagcagaagagaaaaaaataaacaaagaaaatatacaatgataggccagactgatacattgataaggcttataatagatttttacctagatacaagagtcagacatctaatttagaccaagagaggataatattgtgagttgaattt

SEQ ID NO: 160698 - DNA, 611 bp, Homo sapiens
catacgtttagctattatgtttagacttttggtctaaatctayagctctgctttaaatatcttaataaattaaattagtaaaatccctaaatctttctgttggataagagtgatgtatttctaatattcaaaaagtccaatatattctacaacataaatagaacctatattttaaactatttatccaaacatttaattatcaaaaaagtcctccttttatttttgattctgaacgttggttcttttccatgccctcaattagctaatattctctccaatcaccatgatgtgtaataattctcactgaggtgtatgtcatagcttttgttctcatttcccaccctgtttaatagttcgcagtagttcttagcaatcatcttgttcagggttttggtttgtttgcttgattttgttctcagctgtggtttttcatcaaataaaatcttaggagtataatgatatgcattaaataaaaactgcttattgattgaaatgatactgtaataagtaatgacatgcaaaaaacaatgaaatgagggctactatcattaagtgggtggggaatagaaatccacaggatccctctgcggcccttatttcccccaacacac

SEQ ID NO: 160699 - DNA, 550 bp, Homo sapiens
aggttgcacagtgagctgagatcatgccactgcactccagcctggtgacagagcaagattctatcttaaaaaaaaaaaaaaagaaaaaaaagaaaagaaaaacatttctttttttctagacccattctgtccctaactttttacaactcttcccactattgatgaggctaactcaaaaatataaataatcaaaaaatttaaaactttcttaattactaattgggaataaagcctttcttggtacaattacatctaatttcattctacagyatacatgtagatacaattgcttgtgataataacagtggtcaagaaatcagaaacccatgagaaagaatagaaaactgaatcagttctaaattattaaagattatgaacctgtagtatatagtagggtataactcaactggtttctaaaattttttgaaattttcaatgtaagtaaagcataagtgtaaaatttaacctccaccataacaaaatgtcacaagttatttattaccaggaccagaaataggaggaccaaaattttccgtggatgcaaggggtt

SEQ ID NO: 160700 - DNA, 550 bp, Homo sapiens
aggttgcacagtgagctgagatcatgccactgcactccagcctggtgacagagcaagattctatcttaaaaaaaaaaaaaaagaaaaaaaagaaaagaaaaacatttctttttttctagacccattctgtccctaactttttacaactcttcccactattgatgaggctaactcaaaaatataaataatcaaaaaatttaaaactttcttaattactaattgggaataaagcctttcttggtacaattacatctaatttcattctacagcrtacatgtagatacaattgcttgtgataataacagtggtcaagaaatcagaaacccatgagaaagaatagaaaactgaatcagttctaaattattaaagattatgaacctgtagtatatagtagggtataactcaactggtttctaaaattttttgaaattttcaatgtaagtaaagcataagtgtaaaatttaacctccaccataacaaaatgtcacaagttatttattaccaggaccagaaataggaggaccaaaattttccgtggatgcaaggggtt

SEQ ID NO: 160701 - DNA, 619 bp, Homo sapiens
aaattattggaaacaggcacttttatttaaaagagaagcagagcataaaagtttgaaaaatttgcagcctgaccatgaggtagaaaagaaaaacccattttctggggaaaaattcaagatgactgcagaaaattgcctaagtaatgaagagccaaatgttatagcmaagacaatggggaaaatgtctccaggtcatttcagagatcttcactgcagcctcccatcaccgtacaggagcctctcccaacaagggaagcagcctctcccattacaggccaggaggcttaggagtgaaaaatggttttgtgggctgtgtccagggccctgctgctctgtgtagccttgggccatggcagcctgcatcccagctgctctagctccagtcatggctaataggggccaacgtacagcccaggtctttcttcagagggtacaagccccaagcattggtggcttacatgtggtgttgggcctgcgggcacacagaggataagagttgaggtttgggaacctctgcctagatttcagagaatgtatggaaatgcctggatgttcaggcagaagtctgctgcaggggtagagcccttaaggagaacctctgctagggcagtgcagaagg

SEQ ID NO: 160702 - DNA, 619 bp, Homo sapiens
aaattattggaaacaggcacttttatttaaaagagaagcagagcataaaagtttgaaaaatttgcagcctgaccatgaggtagaaaagaaaaacccattttctggggaaaaattcaagatgactgcagaaaattgcctaagtaatgaagagccaaatgttatagccaagacaatggggaaaatgtctccaggtcatttcagagatcttcactgcagcctcccatcaccgtacaggagcctctcccaacaagggaagcagcctctcccattacaggccaggaggcttaggagtgaaaaatggttttgtgggctgtgtccagggccctgctgctctgtgtagccttgggccatggcagcctgcatcccagctgctctagctccagtcatggctaataggggccaacgtacagcccaggtctttcttcagagggtacaarccccaagcattggtggcttacatgtggtgttgggcctgcgggcacacagaggataagagttgaggtttgggaacctctgcctagatttcagagaatgtatggaaatgcctggatgttcaggcagaagtctgctgcaggggtagagcccttaaggagaacctctgctagggcagtgcagaagg

SEQ ID NO: 160703 - DNA, 504 bp, Homo sapiens
tggggactcttgggaggtaatcraatcatgagggtggtttctcatggtttaaaccattcctctgggtgttgtcctggcccaagagtgagttactgcaaaatctggcttccctcttcctcctgctctgaccatgtaagacatgcctgcttccccttcacctttcagcatgattgaaagtatcctgaggcctccccataaccgatcatgcttcctgtacagcctgtggaaccatgagccaattaaacctcttttctttacaaattatccagtctcaggtatttctatatagcagtgcaagcatggactaatacaggcagtaaaaaatgtgtatggagagggataaggaaataaaaaaaattgagaagataaagttgcattgttgttgttgtaactgtcccctaggtgttaaatgatttataacatctttcatactgaaatgattatttgtgtaaatgggcaaaaaaataggaggatataatgctagaaggataaaatgaattactt

SEQ ID NO: 160704 - DNA, 504 bp, Homo sapiens
tggggactcttgggaggtaatcgaatcatgagggtggtttctcatggtttaaaccattcctctgggtgttgtcctggcccaagagtgagttactgcaaaatctggcttccctcttcctcctgctctgaccatgtaagacatgcctgcttccccttcacctttcagcatgattgaaagtatcctgaggcctccccataaccsatcatgcttcctgtacagcctgtggaaccatgagccaattaaacctcttttctttacaaattatccagtctcaggtatttctatatagcagtgcaagcatggactaatacaggcagtaaaaaatgtgtatggagagggataaggaaataaaaaaaattgagaagataaagttgcattgttgttgttgtaactgtcccctaggtgttaaatgatttataacatctttcatactgaaatgattatttgtgtaaatgggcaaaaaaataggaggatataatgctagaaggataaaatgaattactt

SEQ ID NO: 160705 - DNA, 458 bp, Homo sapiens
ttttacagtaaaagagataaggttgtaaaatataaaacatggagagacgatttttgaactacaaatgtgaatagtaagaaaagatcactttaaggggaattttgttttatcttcattgtaagttgatgttttttaaatgcagcagtttctgttctaaagctgattactactgtgccacatgtatggacttctttccttagaagtgacttataaatatgtagatttcacaattaatgcagaataatgataatgggttaatcgtaaataggaaggtacatttttcacttatggaatgatcatgttcaaaattgttatccacatttataaatttttagctaatatttcatattctttgtggagtaagagattggatatttggcacagaggattttcttttgtaaaacagatatttaaaaataygaccactttggtaggtagaggttttccttagcctatca

SEQ ID NO: 160706 - DNA, 622 bp, Homo sapiens
acttggtcagggcaggtgcttccactcatcatcaacctacttgagggcaagacagatgttactcttaatcaccatctacyggactggatcctgaactgtacaaccaaattaaaaacctgctgccagaagggctcactgctagtccataaaataagcttcctgagtccttcctcctcaccctaagccttgcaggaggcatatgtctaacacatcactacaacaagcagcatctgaaaaagccagaagctagccccaaataaggaacccaaacagagcactgggcccctcaaagcacccagaaataaagccaaaatatcatagaaaacatacaacacaatcacacattcaagcattcaagggagaaaggaatacaaaaaaaaatcttccatccaaatgatagcaaaaacaaaaataaaaaggtacatctcccttagatgagaaggaatcagcacaacttgagcagtacaaaaagccagagtatcttgatatcttccaaaggatcatactagctatctagcaatggatcctaaccaaaattaaaaatctaaaatgacatatgaataattcaaaatatgtatttccaggaaattcagtgtgatccaagagaaagttaaaattcagc

SEQ ID NO: 160707 - DNA, 563 bp, Homo sapiens
aaatgctctgttctcttactgtataatcgaaaaaaatcagtaagatgggctacattacattagaaaagttgtacaacctcattattttttattgttagttcaaaaaaatgaaacaaagaggacactaacaaattrgaaatgacaagaacatagtctcatggaacttttttgacatcttaacaaatttatcattgtaagctcatgtttttaacttttccaaaaaatgtaggacttcagtgaattttgttgagaggctgatgaacactttcttggtattatgatatatgtttttcttttatttcatctttgctacaattactttctctgcttactttttatgtctgaaaccctacttattctagaaatgtaatatgttttcaataacaaattaagaaagattgtgatagtaaaacatagttttgtacaaaggagtgttttttaaatgataaagcctctgtacaaatgtaaggtggtattattattttttgaaagatttatatcggtaagaatttttaagatattctaagagtaccattcattgtcaaaaagattatgctgatatc

SEQ ID NO: 160708 - DNA, 563 bp, Homo sapiens
aaatgctctgttctcttactgtataatcgaaaaaaatcagtaagatgggctacattacattagaaaagttgtacaacctcattattttttattgttagttcaaaaaaatgaaacaaagaggacactaacaaattggaaatgacaagaacatagtctcatggaacttttttgacatcttaacaaatttatcattgtaagctcatgtttttaacttttccaaaaaatgtaggacttcagtgaattttgttgagaggctgatgaacactttcttggtattatgatatatgtttttcttttatttcatctttgctacaattactttctctgcttactttttatgtctgaaaccctacttattctagaaatgtaatatgttttcaataacaaattaagaaagattgtgatagtaaaacatagtttwgtacaaaggagtgttttttaaatgataaagcctctgtacaaatgtaaggtggtattattattttttgaaagatttatatcggtaagaatttttaagatattctaagagtaccattcattgtcaaaaagattatgctgatatc

SEQ ID NO: 160709 - DNA, 563 bp, Homo sapiens
aaatgctctgttctcttactgtataatcgaaaaaaatcagtaagatgggctacattacattagaaaagttgtacaacctcattattttttattgttagttcaaaaaaatgaaacaaagaggacactaacaaattggaaatgacaagaacatagtctcatggaacttttttgacatcttaacaaatttatcattgtaagctcatgtttttaacttttccaaaaaatgtaggacttcagtgaattttgttgagaggctgatgaacactttcttggtattatgatatatgtttttcttttatttcatctttgctacaattactttctctgcttactttttatgtctgaaaccctacttattctagaaatgtaatatgttttcaataacaaattaagaaagattgtgatagtaaaacatagttttgtacaaargagtgttttttaaatgataaagcctctgtacaaatgtaaggtggtattattattttttgaaagatttatatcggtaagaatttttaagatattctaagagtaccattcattgtcaaaaagattatgctgatatc

SEQ ID NO: 160710 - DNA, 563 bp, Homo sapiens
aaatgctctgttctcttactgtataatcgaaaaaaatcagtaagatgggctacattacattagaaaagttgtacaacctcattattttttattgttagttcaaaaaaatgaaacaaagaggacactaacaaattggaaatgacaagaacatagtctcatggaacttttttgacatcttaacaaatttatcattgtaagctcatgtttttaacttttccaaaaaatgtaggacttcagtgaattttgttgagaggctgatgaacactttcttggtattatgatatatgtttttcttttatttcatctttgctacaattactttctctgcttactttttatgtctgaaaccctacttattctagaaatgtaatatgttttcaataacaaattaagaaagattgtgatagtaaaacatagttttgtacaaaggagtgttttttaaatgataaagcctctrtacaaatgtaaggtggtattattattttttgaaagatttatatcggtaagaatttttaagatattctaagagtaccattcattgtcaaaaagattatgctgatatc

SEQ ID NO: 160711 - DNA, 515 bp, Homo sapiens
tgaggccagcatggacaacataaagcaactccatctcaacaaaatattttaaaagtttctgggtaaaataatgaccatggtgaaaatcgaatcaagaactcagtctcatttacatttgcaaaaaaaaaaaaacttatgaatatacttaaycaaggagatgaaagagctctgtaaggactataaaacactgatgaaaaaaatcatatatgacataaaaaatggaaatacatcctatgcttaagctcatggactgttagaatcaaaattgtgaaaatgaccatattgtccaaagcaatccaaagattcaatgcaattcctataaaaataccccaacgtcattttttgcagaattaggaaaaaaaaattttaaaacttatgtggaaccaaaaaagagtgctaatagccaaagtaatcctaagcaaaaagaataaatcctggaggcatcatattacttcaaattttactacaaggctatagtaaccgaaacaatatggtccctgtataaaagtagatac

SEQ ID NO: 160712 - DNA, 581 bp, Homo sapiens
aacattatggtcatagtatgactaatcaggttcacatctgtaattcatcttttactgttaattagttttatatttcagtgatagagaaatctcttcctaaagtcaacccattatattttgagggcaattctaatatgatccaagggcaatcagtcaaaatcttttttccttctatcttccacatcttgatttcaattctacccactaagtaaatgaatacttacttcaaacttgtatccacaatttaaaaactcatcaaaatttaggagcttcagggatgctgaaaacatcctaatcctaataattatgaaacattttatcatgtaccttcaaaattatttttttctccaggttaaaaatcctcaaatccttcaactatttagtgttttcaaactctttcccattctagacaaattactctgaatatattttagtttttctgtaatgctctgcttcatccagaattcaaaacaatgcctatggatttccatattctcagaaggttaaaccaattttcttcctagttacactatctagatcttcatataaagcatcrcatttacctgttgatttacatggac

SEQ ID NO: 160713 - DNA, 652 bp, Homo sapiens
taaataattctggagataaaacaaaaaataaagtaaaataaagcttttattgttttaattgttctaaaatataactgttaaagcaaaaatagtagcgctatatcgtgtttatagaatatgtgaaagtaaaatgtaagacaacaataaaaaagaatgggagaagagaatttgctatacagatttataaggtttttacactactagtgaaatggtataataaaatttcaagatcaaccccaatttatgaagttwttgtcatacattgcaagccccaaataaaacatttttaaaagaggtataaagtataaagataaaatggaattttaaaagctccattaacacaaaggatggcaaaagacaggaaattaaaaaattggacagaaaaaaagagaaaatgggtaataagatggtatattttaattcaatcatgttaaaaaatcaccatgtaaatggttaaaagacatagattatatggtagaatgaaaaagataaattatctctagaaacacatttttattgtgttgaaatatacgtaacataaatttatgattttaaccatttataacttcacagatcagtggtattaagtgcattcacattgttgtgcaatcatagccaccatgcatctccagaatttgtatcatctccccaa

SEQ ID NO: 160714 - DNA, 458 bp, Homo sapiens
attagtaatttatttacccatttttattacttactgccagagtaataaaagtattatcgttctacatttatttttytttttctattttatgtgtttagagtaactttgttcaaatttctagatgaatagtcatagatttttagtagtgtcactcaatttttccaactattaaaaaacaagacagaatcaatcagtgatctatctttaaaatgttaaaagatatcaaagattattttattattcttaaatttgctaaaagctaaaaattataatgaacctgtgttgttgaaatagtctcttggaattcattaaactaattcgtttttcattttctcctcacccacactaacatttcaaattaccttataatttgaacttctagtgattttctgaccccagaaaaatggactacagtaagattagtgatgcattgtatgtgtgtttatgtgtgtgtgtag

SEQ ID NO: 160715 - DNA, 574 bp, Homo sapiens
tatacctatgaggaacaattatttccttaaaagacaacatgatgaaatgcsagatgcagtgtggtaagggagacctaactgctatgaaattattatagtgccatgtgatttattttgaaccccaaccatcatttcaccatcctgctgtcttctttattgttagagtgaatgctttcagtgacatcttataaatctttgctttggccaatatttttgcagcgtcttaacatagaagaggtatgcacagctttcactacctccaagatttagaggtataatttcaatttaatgtgaaaagttttagctgggtaagttccattagcctcttttgtcaagaagggaatatacctattcattttcatgtacagtttatatattgagctccatcaacacatgaaaggtgttatgtagtgtctgcaaagatgggagtttattgtctttaactgagcttcccacatgcacaaaagtcttctaataatattgatctatatttctcttagtaagcaaatgtcaggtatataaaaatttatgaaataaggtggctttttctccctattaaaacacctgttgtcca

SEQ ID NO: 160716 - DNA, 574 bp, Homo sapiens
tatacctatgaggaacaattatttccttaaaagacaacatgatgaaatgcgagatgcagtgtggtaagggagacctaactgctatgaaattattatagtgccatgtgatttattttgaaccccaaccatcatttcaccatcctgctgtcttctttattgttagagtgaatgctttcagtgacatcttataaatctttgctttggccaatatttttgcagcgtcttaacatagaagaggtatgcacagctttcactacctccaagatttagaggtataatttcaatttaatgtgaaaagttttasctgggtaagttccattagcctcttttgtcaagaagggaatatacctattcattttcatgtacagtttatatattgagctccatcaacacatgaaaggtgttatgtagtgtctgcaaagatgggagtttattgtctttaactgagcttcccacatgcacaaaagtcttctaataatattgatctatatttctcttagtaagcaaatgtcaggtatataaaaatttatgaaataaggtggctttttctccctattaaaacacctgttgtcca

SEQ ID NO: 160717 - DNA, 440 bp, Homo sapiens
ctcatcatcactaatcatcagaaaatagaagttgaaactacaatgagatatctcacatcagttcagaaaggctattattaaagtcaaaaaacaacaaatgctggcaggtctctggagaaaagggaatgcttatacactgttgatgtgaatataaattggttcagcctctgtggaaagcagtttggagatttctcaaagaacttaaaacagaactatccattcaacccagcattcccattactgggtatatactcaaattaaaataaatcattgtacaaaaatacatgtacgcttatgtttatcactgcactattcacaatagcaaagacatgraatcaacctaggtgcccatcaatggtggattacataaataaaatatacatataccataaaataccatgcaactatagaaagaaatcatgtcccataggcagctgcat

SEQ ID NO: 160718 - DNA, 631 bp, Homo sapiens
gtaaacagtaaatagcacaaataatggcatttaaaccaatattaaattacttacatattgaactataacaaaatgtgtatatttggaagtaatattgaaaattgtgaaatgattatatatagagaagggtctgctgaagcaagactactggtgggaaaacaaattcttagattacaattgttaacaataggtatttccttggtattaaaaatgtctctttgagacatatacactaaaaaaaatagcagtcacccaagtaaatatttatgtaaaacaagttatttaaattaaacttataatagtacatatacattatgtaataatatgaagtcattaaaaggctacttatgatagcagctatggaaatatatgaatacayataggaaaagagaaaaactaatacaagaagaatggactgaaaataaattgatgatagttgtctatatataatatgattatatttaatttttattccatcttttgtcttttctaaaaacaaatttcagtgggaatatacaatttacacattttaattttaattttcatagagtaattcattttttattaaaacaaatttaaaggtagcagaatttatcatctaccccaacacagttgtctctccaggggtaac

SEQ ID NO: 160719 - DNA, 631 bp, Homo sapiens
gtaaacagtaaatagcacaaataatggcatttaaaccaatattaaattacttacatattgaactataacaaaatgtgtatatttggaagtaatattgaaaattgtgaaatgattatatatagagaagggtctgctgaagcaagactactggtgggaaaacaaattcttagattacaattgttaacaataggtatttccttggtattaaaaatgtctctttgagacatatacactaaaaaaaatagcagtcacccaagtaaatatttatgtaaaacaagttatttaaattaaacttataatagtacatatacattatgtaataatatgaagtcattaaaaggctacttatgatagcagctatggaaatatatgaatacacrtaggaaaagagaaaaactaatacaagaagaatggactgaaaataaattgatgatagttgtctatatataatatgattatatttaatttttattccatcttttgtcttttctaaaaacaaatttcagtgggaatatacaatttacacattttaattttaattttcatagagtaattcattttttattaaaacaaatttaaaggtagcagaatttatcatctaccccaacacagttgtctctccaggggtaac

SEQ ID NO: 160720 - DNA, 631 bp, Homo sapiens
gtaaacagtaaatagcacaaataatggcatttaaaccaatattaaattacttacatattgaactataacaaaatgtgtatatttggaagtaatattgaaaattgtgaaatgattatatatagagaagggtctgctgaagcaagactactggtgggaaaacaaattcttagattacaattgttaacaataggtatttccttggtattaaaaatgtctctttgagacatatacactaaaaaaaatagcagtcacccaagtaaatatttatgtaaaacaagttatttaaattaaacttataatagtacatatacattatgtaataatatgaagtcattaaaaggctacttatgatagcagctatggaaatatatgaatacacataggaaaagagaaaarctaatacaagaagaatggactgaaaataaattgatgatagttgtctatatataatatgattatatttaatttttattccatcttttgtcttttctaaaaacaaatttcagtgggaatatacaatttacacattttaattttaattttcatagagtaattcattttttattaaaacaaatttaaaggtagcagaatttatcatctaccccaacacagttgtctctccaggggtaac

SEQ ID NO: 160721 - DNA, 609 bp, Homo sapiens
cattcttcctggcctacagtgtttctgttgggaaatatactgttcatctcatgggaattcccttatgcatgacttgacacttttcttttcctctttttaaaatcctatatttgtctttgacttttgaaagattgaatataacctgccttggaggagatctttttgaatttaaatctacttgcagatttgtgggtttcctgtatttaaatgtctatatctttcattagacataggaagttttcagctattattttcttaaatatgttctctatctttgctcatttctactccttctgaaactctcaaaattcaaaatttgcttgctttatggtgtcccatatatcacagaggctttctttgtattttaaaattgtttttctttttttttttttgtctgacctatttattatagaaaacctctctttaagttcaraaatttctctttctgcttggtctgctctattgttgaagctcttaatactatttttttactttagtcattgtattctttcattccaggatttctgtttaagttctttttttatgatagctatttctgtgttaaattggcatacacatcattaattgtttttttggtatctttgtatt

SEQ ID NO: 160722 - DNA, 575 bp, Homo sapiens
cataatataagagcattaagcttttctttcactaattatgmtttcagctgtgagcttttcatagatgctgtatacagatttttaaagttatcttctattcacatttgcttgagggtatttttaaatcatgaaagtgtatttgattttgttaaattttttgctgtgtctattgaggtgatcttatttttattttattaatgtgttatattacaatgattgatttttaaatattgcactagtcttgtatttctggaatacaccccacttattcatatttacacaatataaagcaatcaacagagataagcaattattgctgtatgcagttttcttataaataaaatagaagaaaagtgttacaaacatacttttatactgttttctacatttctctgtgaagttatctttatttaggtattcgttttttaaatgtaaatttgtgtctttgtctagttctctttaattttagcctgaaggactctcttagtattttttatagggatggtctactagcaaaaaattccatgagtttttatttatcttcgaatgccttacttttttatcatttatttaaa

SEQ ID NO: 160723 - DNA, 575 bp, Homo sapiens
cataatataagagcattaagcttttctttcactaattatgatttcagctgtgagcttttcatagatgctgtatacagatttttaaagttatcttctattcacatttgcttgagggtatttttaaatcatgaaagtgtatttgattttgttaaatwttttgctgtgtctattgaggtgatcttatttttattttattaatgtgttatattacaatgattgatttttaaatattgcactagtcttgtatttctggaatacaccccacttattcatatttacacaatataaagcaatcaacagagataagcaattattgctgtatgcagttttcttataaataaaatagaagaaaagtgttacaaacatacttttatactgttttctacatttctctgtgaagttatctttatttaggtattcgttttttaaatgtaaatttgtgtctttgtctagttctctttaattttagcctgaaggactctcttagtattttttatagggatggtctactagcaaaaaattccatgagtttttatttatcttcgaatgccttacttttttatcatttatttaaa

SEQ ID NO: 160724 - DNA, 541 bp, Homo sapiens
tggctaactttctgctgctgtgactaatgcttcaatttgcctgcaaaagctgtcagtagcttccagtgggtccagacattggtggtgtccccatgttctgacatctagactgtgtatacagtgtgatgtgtgtattttattttattttaacttctggaatacttrtgcaggacatgcaggtttgcgacataggtaaatgtgtgccatgaggttttgctgcactgatcacctcatcatgtagatattaatcccggtatccattagctattcttcctgatgctctactcttcccacaacctctccgcaggctctgttgtgttttcctcgccatatgtccatgtgttctcattgttcagctcccacttataagtgagaacatatggtgtttggttttctgttcctgtgttactttgctgaggataacagcttccaactccatccatgtccctgcaaagaacatgacctcattcctttttatggctgcatagtatttcatggtgtatgtgtacaacattttctttatccagtctatcattgatgg

SEQ ID NO: 160725 - DNA, 399 bp, Homo sapiens
tgttcacccaggctacaaaagagacctcagctaaggagcaatgactcactgaagacttctaaattcaatctcatgcagacacacaccagaggtgggactgggactgagcattcaaatgtatgccccagttgagagagatgaataaagcatattctgacaacttataggggataagaaagaatatggagcaatatcagctcaatgtcattgcatttcttgaaaataacatataattataaaatccaccttttctctgaatttatttttcatttggtatagtcagaaaaaaatacaaacaagatgtggcayaatgggaattaatacaggagataattctttaaaaaagtcttcagcaatactaactataacaaatagcataatggataaagagaatgaatc

SEQ ID NO: 160726 - DNA, 517 bp, Homo sapiens
acagcatcaaatatttacaaattctgcagtcaacatttttatccttatccttcttatatgggaaaatgtacatttwagatgttttatagtttaggataacttatgataccagggcttaataatttgttttgtcaactttttcaaaagcatggtggaaattgaaatgtatgcagaatgtaggaatgaaagtttacttctgtagactttcaccttcattgagataggaaaaaataagtcatttcaggggtcacaaactttttctaaaatgtactttttgaaacttttttttaaagatttgatttttttcagacctctaaagcttctctgaagctgaaaaaggaatagaaattctcttcgaaattagcatgtgagcttactttatttactcataatcttcaaggggctggaaattgtattgagttcacttactgagaataattggagacccagaatttatgcagaacaaactagagtttttctaactagagacattttttagtatgattgataattttaa

SEQ ID NO: 160727 - DNA, 601 bp, Homo sapiens
tattgtcacctagttggcgttgtaattgtgacttcaaaaggccatcccatcattctttcaatccagctgctcaggatgatggggaacatggtaagaccagtgaattccataagcacgaggccactgccacacttctttagccataaagtgagtgccttggtcagagacaatgctgtgtggaataccatgatggtggataaggcattctgtgagtccatagatggtagtcttggtaggagcatggcatgcaggataggcaaacccatatscagagtaagtgtctgtttcagtgaggacaaacctctgccctttccatgatggaagaggtgcaatataataaacctgcaaccaggtggctggctgataacccccaaggaatggtgccgtattgagggctcagtgttggtttctgctgctcacaaattgggcgctcagcagtgtccatagccaggtcagccttggtgagtggaagtccatgttgctgagccaatgtgtaacctccatccctgccaccatggctactttgttcatgggcccactgggtgatgacaggggtggctggggaaagaggctgagtgctgtccacagaacggttccccct

SEQ ID NO: 160728 - DNA, 601 bp, Homo sapiens
tattgtcacctagttggcgttgtaattgtgacttcaaaaggccatcccatcattctttcaatccagctgctcaggatgatggggaacatggtaagaccagtgaattccataagcacgaggccactgccacacttctttagccataaagtgagtgccttggtcagagacaatgctgtgtggaataccatgatggtggataaggcattctgtgagtccatagatggtagtcttggtaggagcatggcatgcaggataggcaaacccatatgcagagtaagtgtctgyttcagtgaggacaaacctctgccctttccatgatggaagaggtgcaatataataaacctgcaaccaggtggctggctgataacccccaaggaatggtgccgtattgagggctcagtgttggtttctgctgctcacaaattgggcgctcagcagtgtccatagccaggtcagccttggtgagtggaagtccatgttgctgagccaatgtgtaacctccatccctgccaccatggctactttgttcatgggcccactgggtgatgacaggggtggctggggaaagaggctgagtgctgtccacagaacggttccccct

SEQ ID NO: 160729 - DNA, 601 bp, Homo sapiens
tattgtcacctagttggcgttgtaattgtgacttcaaaaggccatcccatcattctttcaatccagctgctcaggatgatggggaacatggtaagaccagtgaattccataagcacgaggccactgccacacttctttagccataaagtgagtgccttggtcagagacaatgctgtgtggaataccatgatggtggataaggcattctgtgagtccatagatggtagtcttggtaggagcatggcatgcaggataggcaaacccatatgcagagtaagtgtctgtttcagtgaggacaaacctctgccctttccatgatggaagaggtgcaatataataaacctgcaaccaggtggctggctgataacccccaaggaatggtgccgtatygagggctcagtgttggtttctgctgctcacaaattgggcgctcagcagtgtccatagccaggtcagccttggtgagtggaagtccatgttgctgagccaatgtgtaacctccatccctgccaccatggctactttgttcatgggcccactgggtgatgacaggggtggctggggaaagaggctgagtgctgtccacagaacggttccccct

SEQ ID NO: 160730 - DNA, 601 bp, Homo sapiens
tattgtcacctagttggcgttgtaattgtgacttcaaaaggccatcccatcattctttcaatccagctgctcaggatgatggggaacatggtaagaccagtgaattccataagcacgaggccactgccacacttctttagccataaagtgagtgccttggtcagagacaatgctgtgtggaataccatgatggtggataaggcattctgtgagtccatagatggtagtcttggtaggagcatggcatgcaggataggcaaacccatatgcagagtaagtgtctgtttcagtgaggacaaacctctgccctttccatgatggaagaggtgcaatataataaacctgcaaccaggtggctggctgataacccccaaggaatggtgccgtattgagggctcagtgttggtttctgctgctcacaaattgggcgctcagcagtgtccatagccaggtcagccttggtgagtggaagtccatgttgctgagccaatgtgtaacctccatccctgccaccatggctactttgttcrtgggcccactgggtgatgacaggggtggctggggaaagaggctgagtgctgtccacagaacggttccccct

SEQ ID NO: 160731 - DNA, 525 bp, Homo sapiens
caatttaaaaatgaacatatgataaaaatagacaattcacagaaataggcacaaattgtcaaataaaagaagagatactacagcctagaggttaccaaagttttttcgtgtgtgtatgaagatccacacagtaaattttagtctttgctagccaggcgtctctattggaaccacttaatgcttccattgcagcttgaaaactgccacagacttggttccatttcaattaaacttcccaatttggccaagttgcagaatttgccaaccactattttagcccaatagcaatctkggaaatacaatgtttttaaaggagcttaaccgtcagattaaaacatgggtcacaaattttaatttttttcattattaaaatatgtcttctttatgataagaaaaagtatcaattagaagtcatttaaaagttcttttgtggaaaaaaacaggcaaagaacatagaaagatgaaaatgtattaaaactatgggaataatttttaatttaacagaatttaaccagtttattaaac

SEQ ID NO: 160732 - DNA, 327 bp, Homo sapiens
gatgtatattatgtgtgtcttgagtaaaactccaattatgaatctatgtatgtggctaagggycatcttcatattctgagtcacttttgaatattttttagtggtaccagtaactgcttttaggacagtactaaaataatgttttagttttaaatggatttacaacagtgcttatatggagggatttttaattttctgttttaggtcattaaattattgatattttcctgagataactttatttttatagtatacatctctccttctctctcattctctctctgtgtgtgtgtgtttgagtgtgtgtttgtatccagaagtctagtc

SEQ ID NO: 160733 - DNA, 327 bp, Homo sapiens
gatgtatattatgtgtgtcttgagtaaaactccaattatgaatctatgtatgtggctaagggtcatcttcatattctgagtcacttttgaatattttttagtggtaccagtaactgcttttaggacagtactaaaataatgttttagttttaaatggatttacaacagtgcttatatggagggatttttaattttctgttttaggtcattaaattattgatattttcctgarataactttatttttatagtatacatctctccttctctctcattctctctctgtgtgtgtgtgtttgagtgtgtgtttgtatccagaagtctagtc

SEQ ID NO: 160734 - DNA, 561 bp, Homo sapiens
atatatggccctttatggccttagttgttattattattattttggtagcttaatagtcacttaaaaatggatatgcatgacagcttatagttgttattattattattttggtagtttaataggcacttaaaaatggatatgcatgacagcttatgagttatttgtaaatacacacatgacccttcccattcatttcagaataagcctttgaaaaatctcattttgaatctcattcatccatatatctcttcctgtccaaatgttctgtgacatattatgaacacaagtccctaagctaatttctcttctggtgtcctatttggtgcccagcatartatcttgcgcttacatattttattaagtgagaaaagaaatgttgaaaaagaagggatggctgaccctcctggggttgagatgtgaaaaatgcttatgaattaatagggtggtttagagggaaagaactttccaagcagaggctaccaggattacagtgctcaaatcttaggaagtgagtatgaaaacaggttaaattactctatgggcaaggttttagtagggtcc

SEQ ID NO: 160735 - DNA, 488 bp, Homo sapiens
atctttaaaaaaaggatatctttttttccctagaattttacatcatcatgcatatctcagaatttggagaatcttattatccagatattcaaaaattttccttctagcatttaaaattttttcttscgtgcatatgtttgggtattttatgtattttattaattattcttggaatccttaaacatttaagttggttttgattttttagtattaaaaataatgctggtataagcaaattttacataacgctttgtatttaaaattacttttcctggcaagataactataaaaagaattactgatttaaaagctataagcaattttaggctttagatgtatattgctatttttttccccagaaagaaagaattaattaacatgtctatcagcagaagagaattgcccagtttattgtatcctcatcagcattgggcataatctgtgctaatttagttattgttttttaatttggattttgggttattact

SEQ ID NO: 160736 - DNA, 488 bp, Homo sapiens
atctttaaaaaaaggatatctttttttccctagaattttacatcatcatgcatatctcagaatttggagaatcttattatccagatattcaaaaattttccttctagcatttaaaattttttcttgcgtgcatatgtttgggtattttatgtattttattaattattcttggaatccttaaacawttaagttggttttgattttttagtattaaaaataatgctggtataagcaaattttacataacgctttgtatttaaaattacttttcctggcaagataactataaaaagaattactgatttaaaagctataagcaattttaggctttagatgtatattgctatttttttccccagaaagaaagaattaattaacatgtctatcagcagaagagaattgcccagtttattgtatcctcatcagcattgggcataatctgtgctaatttagttattgttttttaatttggattttgggttattact

SEQ ID NO: 160737 - DNA, 488 bp, Homo sapiens
atctttaaaaaaaggatatctttttttccctagaattttacatcatcatgcatatctcagaatttggagaatcttattatccagatattcaaaaattttccttctagcatttaaaattttttcttgcgtgcatatgtttgggtattttatgtattttattaattattcttggaatccttaaacatttaagttggttttgattttttagtattaaaaataatgctggtataagcaaattttacataacrctttgtatttaaaattacttttcctggcaagataactataaaaagaattactgatttaaaagctataagcaattttaggctttagatgtatattgctatttttttccccagaaagaaagaattaattaacatgtctatcagcagaagagaattgcccagtttattgtatcctcatcagcattgggcataatctgtgctaatttagttattgttttttaatttggattttgggttattact

SEQ ID NO: 160738 - DNA, 488 bp, Homo sapiens
atctttaaaaaaaggatatctttttttccctagaattttacatcatcatgcatatctcagaatttggagaatcttattatccagatattcaaaaattttccttctagcatttaaaattttttcttgcgtgcatatgtttgggtattttatgtattttattaattattcttggaatccttaaacatttaagttggttttgattttttagtattaaaaataatgctggtataagcaaattttacataacgctttgtatttaaaattacttttcctggcaagataactataaaaagaattactgatttaaaagctataagcaattttaggctttagatgtatattgctatttttttccccagaaagaawgaattaattaacatgtctatcagcagaagagaattgcccagtttattgtatcctcatcagcattgggcataatctgtgctaatttagttattgttttttaatttggattttgggttattact

SEQ ID NO: 160739 - DNA, 313 bp, Homo sapiens
gaaatctcagagaacaccaagcaagataaatgccaaaaatgacgcatgagcatatcatattcatacttcagaaaatcgaatatataaaagaatctcaaaagaagccatagggaaaaaaataccttacctacagaggatcaaagataataattacatctgacttctccttataaaacataaaaycaagaagagagtagaatgaagtatttaaaagattgaggcaaacccccccccaccaaactaggattctgtatcctatgaaaatatccttcaaaaggaaaggcataacactttctcatacaaacaaaaattg

SEQ ID NO: 160740 - DNA, 647 bp, Homo sapiens
aaacttggtttgctagcattttgttgagaatttgtgcatcaatatttatcagagatattggcctattgtttaatttttatatgtatttttgtctggtttaactatcagggtaaagctggccttgtataatgagtttgaaattattccctctactctatttctcagaatagtttgagtaggattggtattagttcttckttaaatgtttggtgtcatccatcagcgaagtgatcaggtctgggctttattttattttatttttttgctgggagactttttattacagcattggcctcatttttatttatctgtttaggttttgaatttccttgtgagttcaatattggtaacttgtgagtgtctagaaatttattcatttcttctgaattttccaatttactggcatatagttgttcatagtagccactaatgattctctgaatttctgaggtatcagtcataatgtcttctttttcatctctgatcttgtttatttaggacttctctccttttttttcttagtctggctacatgtcaattttatttatcttttcaaaacaccagctttttgttttgttgatctgcttttttcttcatttcaaatttatttcttctcttacctgtgtaatttcttttattctactaat

SEQ ID NO: 160741 - DNA, 647 bp, Homo sapiens
aaacttggtttgctagcattttgttgagaatttgtgcatcaatatttatcagagatattggcctattgtttaatttttatatgtatttttgtctggtttaactatcagggtaaagctggccttgtataatgagtttgaaattattccctctactctatttctcagaatagtttgagtaggattggtattagttcttctttaaatgtttggtgtcatccatcagcgaagtgatcaggtctgggctttattttattttatttttttgctgggagactttttattacagcatyggcctcatttttatttatctgtttaggttttgaatttccttgtgagttcaatattggtaacttgtgagtgtctagaaatttattcatttcttctgaattttccaatttactggcatatagttgttcatagtagccactaatgattctctgaatttctgaggtatcagtcataatgtcttctttttcatctctgatcttgtttatttaggacttctctccttttttttcttagtctggctacatgtcaattttatttatcttttcaaaacaccagctttttgttttgttgatctgcttttttcttcatttcaaatttatttcttctcttacctgtgtaatttcttttattctactaat

SEQ ID NO: 160742 - DNA, 647 bp, Homo sapiens
aaacttggtttgctagcattttgttgagaatttgtgcatcaatatttatcagagatattggcctattgtttaatttttatatgtatttttgtctggtttaactatcagggtaaagctggccttgtataatgagtttgaaattattccctctactctatttctcagaatagtttgagtaggattggtattagttcttctttaaatgtttggtgtcatccatcagcgaagtgatcaggtctgggctttattttattttatttttttgctgggagactttttattacagcattgrcctcatttttatttatctgtttaggttttgaatttccttgtgagttcaatattggtaacttgtgagtgtctagaaatttattcatttcttctgaattttccaatttactggcatatagttgttcatagtagccactaatgattctctgaatttctgaggtatcagtcataatgtcttctttttcatctctgatcttgtttatttaggacttctctccttttttttcttagtctggctacatgtcaattttatttatcttttcaaaacaccagctttttgttttgttgatctgcttttttcttcatttcaaatttatttcttctcttacctgtgtaatttcttttattctactaat

SEQ ID NO: 160743 - DNA, 551 bp, Homo sapiens
ctatagtacagattaattgtgatatttcttttttttattttctgtctagataatctgttcaatgctgagagtggggtgctgaagcctccagatattattttattgggataaatctctctcttttgctctaatagtgtttgctttgatatatctgtgtgctccagtgttgggcgcatatatatttacaattgttatactctctcttgctgaattgacccctttatcattatatgattaccttctttgtctctttttatattttttgttttaaaatctwtttttttctcatgtaagtatagctactcccactcttttttgttgtttgtttcaattgacatggaatatcttttttttttcagtctatgtgtgtctttataagttaagtatgtttcttgtgggcaacagatcattgggtctttttaaaaaaatgtattcagccactttagtttatttacattcaatgttattattgatatgtaggatttactcctgccattttgttattcagtttctctttttcaatggtcttcttttctcttctttctttcttt

SEQ ID NO: 160744 - DNA, 432 bp, Homo sapiens
cttaattgagtgtctggcctagagtaaaaattcagtaaaggctgtggcttttattataaaaactataaaattagtagagtgggcacaagtcaagaaggtaaatgaatttttccttttccatgctgttcttccaaggtcttattaataatttgatctagcagtaaaactgtaattctgcttattaaaaataatgcttctttatatacagtaaaaaaaatacttgctaaacccaatatattctttaaagtactgaaaagttctaatagtttatactcatgactcccacgtgagtcagtatcttcccattaacaacacaagggcaaatctgctttgtctttatctattggcagcaccagaccactctccccttgaagcagtrgtctcaaatcttgtgtatgaaagaatcattgcaataactgcttgaaaaggaag

SEQ ID NO: 160745 - DNA, 573 bp, Homo sapiens
ctttgtccagggcatgacgtcatttggtttgtcaaaaccatatacatccacctgagattttgatcagcaatcgaggcagactctaatctggacacaatgcggtgctggaaattattcactatcgttgacacaataacactcaccaaagctacaatgcatgaatcgaaaccagcaatgrtaaatgtctgctgcaagaacctgtggagtgaagtcaagaatgattttaaaggctttctgggattgaagaagttaggaaaatcactcatgcagaaagacaagttggtggagaacgatttgccgacctgcttgacaggaagtgggagaacacattgaaggccattgacaagtgttaaaccaggaattgggagaacttgagtcatctacagaggaagaggaagaggaagaagaaactgaagcagaaccagcaatgtggacattaccaacatttgctgaagtgtttcagatttcacagacttttaaagacaaaattatgaaatgtgatccttagttggaatgcagcattaaagtcacctgcatgctcaccaaaggattagaacgtctgcagcaaagctt

SEQ ID NO: 160746 - DNA, 573 bp, Homo sapiens
ctttgtccagggcatgacgtcatttggtttgtcaaaaccatatacatccacctgagattttgatcagcaatcgaggcagactctaatctggacacaatgcggtgctggaaattattcactatcgttgacacaataacactcaccaaagctacaatgcatgaatcgaaaccagcaatggtaaatgtctgctgcaagaacctgtggagtgaagtcaagaatgattttaaaggctttctgggattgaagaagttaggaaaatcactcatgcagaaagacaagttggtggagaacgatttgccgacctgcttgacaggaagtgggagaacacattgaaggccattgacaagtgttaaaccaggaattgggagaacttgagtcatctacagaggaagaggaagaggaagaagaaactgaagcagaaccagcaatgtggacattaccaacatttgctgaagtgtttcagatttcacagacttttaaagacaaaattatgaaatgtgatccttagttggaatgcagcattaaagtcacctgcatgmtcaccaaaggattagaacgtctgcagcaaagctt

SEQ ID NO: 160747 - DNA, 561 bp, Homo sapiens
ggatggtggggatagttgcacaacaatgcaaaggtacttaatgccactgaatggtacaaggaaacatcagtaaaatggtacattttatgttatatatacttcaccacaataaaaaagaaagatttccagctcagatttggagtcggtgcagaggaagacatgttagtgaaagagtacattctyaggaagagctcaattctaaagaaacagcctgtttcactaaacccttaattgtgtggctcctcaaaagctcagaagaagctgatgtcaaaattaaagcacctgttccaccaaagtgctgcggcattgcaaggaaagcacccgttatcttcatctctgtgcctgaacacatcttctcatgtttgttgtcacactttgatgaatgcccccagccagccagctaccctacgtggctgtgtaaactcctcctcttgccctcaaccccaggggtgacctggtgcgttagtgactcctggctgaggtaaacgatacggcacggtggtaatggcaactgtcagatccttcccttttatctccctccatccactgtgaagcgtctct

SEQ ID NO: 160748 - DNA, 562 bp, Homo sapiens
aaaggttggaatataaaactggataagagagagtttctctataagggggcactcctctttcactcagaattagctacctggcaagggtcccaggatgtgggtctcatacaccgcttggataagtcctggaaacttgcagaaagtgttgrcctacaaaaaaatgaagtaaagatggcagaactaccagcactgactgtggagaaaagaatcaagaggcttggagaagtggacatgctagaatagttctcccacgggaggtcagttgaccatgctcctggggagaacactgcatggatgcaggtgataaggaatgcactggtgagtttggagtcctaattagggaaaaggagtcaagatggttgggaccagggtaaagcaaaaaaacagataagctgtaagtttgcctttcttcatggtccaggacacagagccatcctgtgcaaataactcaccatcttcctgcgcccagctatcaccagacactcggctgatagaaaaatgcaagttagctcactgcgaccttggcattatcagtaccgcacaaagccctcttcagcacaca

SEQ ID NO: 160749 - DNA, 507 bp, Homo sapiens
attgtttacagggtatcctaaaaatcttagtgcagttttaagctctaaagagagatcaagaatgaatgatcagtttaaaataactgaaagtataattggattgtttgtaacacaaaggataaatgcattaaggaatggagacccaattttatgtgatgtgattagtactcactgcatgcctgtatcaaaacatytcatgtaccccataaatatatacacctactgtgtacccacaaaaattaaaaaaaaaaagaatggatgataaggaggctaaagtcagccattcctagcgggaagttatgccttcttgcccaatttcaagacctaagccagttctcagacccacaattcattgagtaaagaaaaggtccatacgggtccatgaggaaggatgcattcatgcaggatatacagcatagcctatgcagtatggattccccagtgctcccaaaagaaactacagccacctatgtaggtgctataccttggaaagaagggaacacccag

SEQ ID NO: 160750 - DNA, 507 bp, Homo sapiens
attgtttacagggtatcctaaaaatcttagtgcagttttaagctctaaagagagatcaagaatgaatgatcagtttaaaataactgaaagtataattggattgtttgtaacacaaaggataaatgcattaaggaatggagacccaattttatgtgatgtgattagtactcactgcatgcctgtatcaaaacatctcatgtaccccataaatatrtacacctactgtgtacccacaaaaattaaaaaaaaaaagaatggatgataaggaggctaaagtcagccattcctagcgggaagttatgccttcttgcccaatttcaagacctaagccagttctcagacccacaattcattgagtaaagaaaaggtccatacgggtccatgaggaaggatgcattcatgcaggatatacagcatagcctatgcagtatggattccccagtgctcccaaaagaaactacagccacctatgtaggtgctataccttggaaagaagggaacacccag

SEQ ID NO: 160751 - DNA, 524 bp, Homo sapiens
aagttttccccatacatttaatttttcttttgtgaattccttgttgatgtcttttgtctatcttttttttaaaacaaatatagtcatstttttattattgatttaaaagagagctttatattaagatttaccctatgtctttttaatttttatttattttttattaagggatagttgacaaatacaaattatatatatttatggtgtatacatatatacaatatgatgttttgatgtatgtatacattggggaatggttaaagcaagctaacatgtcaatcacctttcatacttgtccgttgtcagtttttgttgtgagaatatttaacatctactctcttcacaattttcaaccattcaacacattattatcaactgtggtcaccatgctgcacaataggtttccctatgtctgttttatttttatttctttgagacagggtctcgctctgtcacccaggctggagtacagtggcaccatcttggctaactgcaacttctgcaagtgagtcttgtgcctcagc

SEQ ID NO: 160752 - DNA, 524 bp, Homo sapiens
aagttttccccatacatttaatttttcttttgtgaattccttgttgatgtcttttgtctatcttttttttaaaacaaatatagtcatgtttttattattgatttaaaagagagctttatattaagatttaccctatgtctttttaatttttatttattttttattaagggatagttgacaaatacaaattatatatatttatggtgtatacatatatacaatatgatgttttgatgtatgtatacattggggaatggttaaagcaagctaacatgtcaatcacctttcatacttgtccgttgtcagtttttgttgtgagaatatttaacatctactctcttcacaattttcaaccrttcaacacattattatcaactgtggtcaccatgctgcacaataggtttccctatgtctgttttatttttatttctttgagacagggtctcgctctgtcacccaggctggagtacagtggcaccatcttggctaactgcaacttctgcaagtgagtcttgtgcctcagc

SEQ ID NO: 160753 - DNA, 555 bp, Homo sapiens
gatgcggaaaatggacaaggtgctcatgggaatagtgggaagaagggctgtttgagatgaaagagtccagagggcagttttctctgagtaggtagcatttaaacacacctgaggggtgggaagcaccagcccatgaagacggaatttcattgcaacatttcacaatcttcctcaacactttctctcaacaccttaatgatctatattgtgtgatggggatgactaacattaaacggagatgggggycgggcatggtggctcatgcctgtgatcccagcactttgggaggctgaggtgggtagatcacttgaggccaggagtttgagaccagcctggccaaaatggtgaaaccctgtctctactaaaaacacaaaaaattagttgggtgtggtggcgggcgcctgtaatcccagctacttgggagtcagaggcataagaattacttgaaccctgggggatggaggttgcagtaagccaagatcatgtcactgcactccagcctgggtgacacagtgagacgctgtctcaaaaaaaaaaaacaaaaaaaagcaaaga

SEQ ID NO: 160754 - DNA, 584 bp, Homo sapiens
ctcagcttcactgggccacagcatcaatctttaccctgaattcagctttgatgcacctgagtgcctgatgagctacagggatcctgtttctgaaaactttacgtgggtgacaaaatagcaaaatagtgtgtgaggcctttgccttgagacctgggtttgttccggagacaactctaatggaggagagagatttgctcctcccactctcctcgctgacatttggcctcaggggactgagtcatacccgactgactccatgtatataagtgtgaatggcagtctggtagtccaaccaggtgatgcttcctgtccccggagggtagccaatatcatctcctgcttttcttcctyctgatttagcatcactcagggcaggaattctgggctggaggagaggggcctatagttctcttgtatggtctgagtttgctcacacagcaacctgctcttatctagtctgatttttttcaacagcatcctgttgtaccttgtcatctggctctgtggacaggcctttctggtcttcacactgatgcaggtttgttagtttttttcctccttgttaatgtatagtcaggaattta

SEQ ID NO: 160755 - DNA, 584 bp, Homo sapiens
gatgatgcaaagatttcagaaggaaaacaaaaaagactggaggaaaacaatggaagggcagaagtgagattggaaccctggtataactgagagcaatgtttctaatcattaagagcattgattcaggcctactgcagtttgaagcccagctctgtgagatgtttgctctccaccaagttacttaacttctctgtgaggccgctatacacagttctgcagtgcacactctgtactcccatactgtacagagacagggtgcctctccctctctgagcctctaataaatgggaggttttctttgttcatcgtagcacatcataataaacatgagtgaaagaaagaggatgattgtgaaagttaaatgagaagtggtataccaactgatttgcatacatcctggtggaaaccaagcactcattcattaatgaatgctcttagasttagaatgaagactacctagttgaccacagtcagcctggctccaccctctcagagcgatattgacatattcagacatgcccacaggagagctgccaggtccagggaaaagatttgaaagtgtgtctcatgaggaaaagagatct

SEQ ID NO: 160756 - DNA, 547 bp, Homo sapiens
aaggatctgttaaagaatataacctcaatatacagattaaccagataaaaatacaagatagcagtcaaatttgaatttcaaataaataatttgagatgtacttactttaaaaacstatttgttgtttatctgaaattcaaatttaactgggttctggattttatttggcaaatcctccccaaaagaagaaacaaatgcaggaaacaagcacaggatacaagaaatactgccatcagaaaaatgacagtaaattcatttaactattagctatatgagggaaaaaggctttatttccattaggtacacctttgacaatacctgtaaaataatgactctggtctaagccacaaatccattttctttcaaatatccaagaggttgccataatggcctttcagtgttccatcgacaaagatgctctccttgatcaaactctagtcaggctcctctgaaccctcttctcaactagctctgacttcatgtatgcttctgtatttgtctctgcattgtccagttttagctaatatcctcttaagttagtttagcc

SEQ ID NO: 160757 - DNA, 541 bp, Homo sapiens
aacaaacgggaaccttagagaagacaggcacatatttggggctggaatcaggtagtttccatactccttgagcttaatcacaaaacgtgtaaccctgaaatatgaaggactgaagggaggaaaggcgaacaatgacccaggcctaagactgggaacaaaatgattctgtaaaaacacagaggtccccaccgttgcaacctggctgccaaagcatgcttagggtttatttccagttttataaaatttatgtaagacaccagttcacatcatatgcagatcattcttgtactggactctttaggttcatctcctaatcaagcgaaacactcaacacttgctgattttatatgctyaaaatgttagtagcagttaaaatccaattttcaccttggattcctagaatgttttatttggtagggcaaaaataaatcattttttctcaacagggcctccagaaaggtacaaggttttcattacatgattcaggccgctttatcccatggctttgtttttgcaggtccacagccaagagcagcataag

SEQ ID NO: 160758 - DNA, 616 bp, Homo sapiens
agacactaaaatcttcagttttactccccacctcccacacaaactcaactgcaaactgatctacctctctggatgttagttgcatcaacccataaaattgtaaggacagactacttgctaatactcatttaagtgcccaagttctatgattttatgaaagctccagggcagggctgagggcagccaaggagctacgtggcagggcaatcctatgaaggtcggtgttcctcaggtgccccctgcctgccaggttgatacattagattccatgctgccacagcctgcctggtggtatcctcataccctgacctrggccaacctaatcaaggataaccataataatgggctgccttttcctcaccctacgtcatgccagccctttcctgctaacctgtacacacaaagggcagctctaccttcctgagaagagttacagctcttaaatggctcgattctagattatattgggtagctataatgaatgatataattatcaataggcaagatctcagaaatgattcaagatggtcatggaaatgcagatcttgggtgtactgggctgtgaccattataaagtcacattataatccatcaacctacactgtacaggtatgtc

SEQ ID NO: 160759 - DNA, 545 bp, Homo sapiens
agcttcaataaatgcaatcagcacacactccaactgagctctctgctcagcaagaagacagatgtctagtagcctcagcctcaccttccccagtcactgcccagcagctcctccaaaagaaggcaggccactgcactggtccaagatcacctgggagggcyctatccataagggcatgtggccttaggcgatggggaggaagagagagccacaattcacctctgccctctactgacccagcctggctcagttccccttccacataagtaagatgttttataaccatttttttctttagacttctaatctatttacatagtttatggactcagtttagggaataaccagtgtgaaaagtgttacaataattctggcattacttctgtcaggataaaactaggtttgtttgttttgtaatcatagatttaggcttcatcccagtaatattcacgttgccaggacaggagagatactgcggaaattcaagagcaggtttctgagcagaactcaatgtctcagctcccctaaatgaacaccatttctca

SEQ ID NO: 160760 - DNA, 545 bp, Homo sapiens
agcttcaataaatgcaatcagcacacactccaactgagctctctgctcagcaagaagacagatgtctagtagcctcagcctcaccttccccagtcactgcccagcagctcctccaaaagaaggcaggccactgcactggtccaagatcacctgggagggccctatccataagggcatgtggccttaggcgatggggaggaagagagagccacaattcacctctgccctctrctgacccagcctggctcagttccccttccacataagtaagatgttttataaccatttttttctttagacttctaatctatttacatagtttatggactcagtttagggaataaccagtgtgaaaagtgttacaataattctggcattacttctgtcaggataaaactaggtttgtttgttttgtaatcatagatttaggcttcatcccagtaatattcacgttgccaggacaggagagatactgcggaaattcaagagcaggtttctgagcagaactcaatgtctcagctcccctaaatgaacaccatttctca

SEQ ID NO: 160761 - DNA, 545 bp, Homo sapiens
agcttcaataaatgcaatcagcacacactccaactgagctctctgctcagcaagaagacagatgtctagtagcctcagcctcaccttccccagtcactgcccagcagctcctccaaaagaaggcaggccactgcactggtccaagatcacctgggagggccctatccataagggcatgtggccttaggcgatggggaggaagagagagccacaattcacctctgccctctactgacccagcctggctcagttccccttccacataagtaagatgttttataaccatttttttctttagacttctaatctatttacatagtttatggactcagtttagggaataaccagtgtgaaaagtgttacaataattctggcattacttctgtcaggataaaactaggtttgtttgttttktaatcatagatttaggcttcatcccagtaatattcacgttgccaggacaggagagatactgcggaaattcaagagcaggtttctgagcagaactcaatgtctcagctcccctaaatgaacaccatttctca

SEQ ID NO: 160762 - DNA, 407 bp, Homo sapiens
ggaattctggggggttcatctcagttcagtgcattcaagaagagaaagtgcttcccgttgttccttggccataaccatgtgcaggagttcagagagtcagccacaccttgtatgctctggatatggcctaaattcatgctgtcctagcaaatgttgtcatttgtcctccatttgcctgcaggcttcatccctggctggttttctctctctccagagcaaacatttagcaaccactgtgttgagtgcctgtgtgtgtgtctgtgtgtgtgtgtgtgcgtgtgcgtgtgtgtgatctccagtcccctcctgctatttccctgtgactaccaaaaataccattatcttttcatttatttcctttactctgtaagtatcaccctyttccctaattccttctgtcttcagac

SEQ ID NO: 160763 - DNA, 612 bp, Homo sapiens
ttgtaggaaatctattttcaaaagtgaaatatcttcaaaatcactttaaacccctaagcacatttcttcaactagaagagatgcaaattttcttaaattgggttcaatctgaatgttagctgaagagcataggaaactaaaatgatctgattgaaattgatgaataacttttatttttaatctaagaaggttgataggaaaagagatggtttgaaagtgaatagaagaaacaagttaaaaggacagggactggaaaagaaaaatatttcattcagacaggattcttactaaggaaaagatattgcaagtgcatttgaaacatacatgaaagcaaagtgrccctagtaaaattgaagggtagagaattaaagagaagttataaggaaatggaggattttatatcattttttcccttttgcatttaatgtgaagtaagaaaaaggaattacctagggcatagagcatatttcttagtgtagatgtggaagagaccattgtttaaaaaaaaaaattggaacatcctaaggcaaagtaagaataagtactaagtccaaataaccgtgattcatgactctgaaaggacaagagaataggaagaacaaagtcatgctt

SEQ ID NO: 160764 - DNA, 484 bp, Homo sapiens
tgggcatgtaaattagtataacctctgtggaaaacagtgtggagatttccctcagaaatgaaagtagatctaccactgctgggtatctacccaaaggaaaagatgtcactacatcaaaaagacacctgcacacacgtttatatcagcacaattcacaattgcaaagatatggaatcaagctaagtgcctatcagtcgatgagtggataaagaaatttggtgtatatatagcatggactactactcagccataaaaaagaatgaaataatgtattttgcatccacttggatgaaattggaggcaattattctaactgaaataactcaataatcaaaaaaccaaatacsacatgatctcgcttacaagcgggaccaagctgtgagagtatgcaaaggcatacagagtggtataatggacactggagtctcagaatgggggagggtaggaggggagtgagggatgaaaaactacctattgggcacat

SEQ ID NO: 160765 - DNA, 550 bp, Homo sapiens
tcctttactagttccaactttcagttcattttgtaattatttgcatggagtagttgatttcttattgtttatattttttgttttctgtatattgtgatgttttgacatctcaaaagtttttccagctagggaaatacaacttctcccaaggacagctaagagatagtgaagaataaagccagagcatgcttttgttatacaaactaaccaatccagagccattcccttctctgcctggccctactctctaagcagcactgtttctcaccttaatcatcccagtaccaggtagcaggcaaataggcaccattgtaacatcttcagccctgctgaaattattcaaaccagccaattctaaactatttactctgccctgccttgccttttctgtggaaacaataaagatttgttttgttytcataaatgaagtccagatactgtcaggtgttggaagtggtcctgttattcagtgatgcctttggagatataggctcttttcatcttttgaatccactctccttattatgcttgtctttggccttaagattaa

SEQ ID NO: 160766 - DNA, 532 bp, Homo sapiens
acattatttctttctttttgcctgctactgggagaagagaagtaggtaccttttaaatgatacaattaaacscttttgcaggtacaattttgccctttggggatgtaagcattaatggaataaaaatttcaaagatattagaaaaagattattagataaaaatgtacacatagtttttagaatgtatcagccatttatggcagcccccaacttttgaaatcccttccccattctggcggttcaccagtatcacgcatctagccttccctaagtagaattcctaaattattattctcaggctccactgacttgaggtgtaaacatttgaccaacctcctcaacattaggtgtaaacatatgaccagcttcctttctctctttctagcagacaggaaagacaaacgtgaatattgtgtgactgaggagttctggcaagcatagcctcattgagttgttgggtttgctgcatcagccatagaaaaagtgctagctgttgattcctgacttcatggactcaagtaactagtagaac

SEQ ID NO: 160767 - DNA, 477 bp, Homo sapiens
aaaataatcagcagtcagagttttagaactctctacctatttcttgtttcaagtttgatgtagtgttagaaatgggaagcttttaaaaataatcagcagtcatggccttaatgagaggctgtgtagttaaaaatcagaggctttgctattctagtgggctactgggtaagatagcagacttcctttcctgtgtcttgtccttaagtttccaggcatgtttcttaaattttgatggtggacaytgtgttttctagaactctacctagaggaaaacagatgagtgaattgatctctagacattttttttctgctgaaacagtaagtttctaaaacaaacttaatggtgtttttgtagctttaagtatttcaatattttctcaagaattattttaatttgcacaaattagatggaattttgttgatttgtgcttgtcttataatgcagctggatatggcattagtgaaattacattatgc

SEQ ID NO: 160768 - DNA, 606 bp, Homo sapiens
gagcttattaaagtttttttttttatcagggagcaatctatacatcttcacatctttcttaacaaccatcccagaacttggcacagactttcaataaasaaaatttctaaccacaattgtagtgcattaagaaattggtaatgattactattattttaatattattcaatcttaagtttgtaactttttatcagaggtgaatcagttaattttcaaatcttcaaatttcacatattttataattggaagatttaaataaattttccaaggccacagttaagcattttggagagtctataatccttgtggttagcactgtgctctttggttacactccacaaaataaagctacttctaaattggttttcatctcatggtgtcttcaggtttagagtgcctgggacttggaaaaattattatttatcttacattctgacggcatgttgctgccattcttgtgatttactatggaacggagaaaacattgccaaccaagcatgtcaaagccacatctcattgtacattccatttgctcttcagagcattgctcctagtgtacatgtacgtgcacaatttccattgtagcaataaaataaaataagccaa

SEQ ID NO: 160769 - DNA, 577 bp, Homo sapiens
ttttccactaatgaactggctacctgggccatttgaattatgcaatgggatgtgacattcatggtacattggagaagcagacataatagtcracagcagcgagaaaaggaacttggaaaaaatggaccatgtttacttgctctgtacaacctgcagagacaaaaagtggtggttgcaggaaaacaggttttatttcctctttcagttaaatcataatggattaattataaaaatagtgtggtattatgaatgaaaatatgacccatggatttagaatttccaggtttgcatccagatctccacctttatcaattttgtgatcttaggcaaattacttcacttctttgtatctcaagtttcttacctagaaaatgagaataatcccaactacacagaagtgtgaacatttagtcttgagtattacagtagataattcatgtaaaccacttagaaaagtactggaaaccttataaaatctcaaaaaataggttatattattgtgactgagctaggtatagagtatgtaccaccaaatataccttgagatttatctgtcaatatgtagagaggcacaaca

SEQ ID NO: 160770 - DNA, 472 bp, Homo sapiens
ttatctgtcaatatgtagagaggcacaacatctttatgtcagtgctccaattttcatctccttatatcaggaaggccactattctccagtaatgtcgatatctgtgctagagaatactgagagatgacatatatattaatagctgtaaaactgtatctccacgggttctctcagtaggggatgggttgttagcactctctgtggggttctactaccttaagcctaagcctgttgtcyctgcccatcactacctgcccttcctaggctcctgaactgaatctttctttagtttcctaggagggatcatcacttggccagttttttctaagagtagtctgacagcatagctgttaaatcttactattatagttcattccttcattgcacaaggttcttcctcccagaggccacatgccaagggcaagataaatgtagcccagactaataaagtacttggaacccctgctgcctc

SEQ ID NO: 160771 - DNA, 554 bp, Homo sapiens
atgtcagagatctttaaggcagcctccctcatcacaggcccagaggcctaagagggaaaaatggttttgtgggctgggcctagggtcccactgttctgtgcagcctggggacttggtgttctgcatcctaggcaccccagcttcccttgtggctagaaggggccaaggtatagcttgaactgttgcttcagagggtgcaagccacaagccttggtgtcttccatgtgatattgggcatacargttcacagaagtcaagaactgaggttggggaacctctgcctagatttcagaggaggtatgaaaatgcctggacctccagacagtctgctgcaggggctaagccctcatggagaacctctgctagggtagtgtgaattgcttatatgtaaaaagggtgtgagatgtggaagggccaggggtggaattatatggtttgactctgtgtccaacccaaattgcatctcgaatggtaatccctataatcccctgtgtcaagggatggaggtgattggatcatgaggatgatttccaccatgctgttcttgtgacaat

SEQ ID NO: 160772 - DNA, 510 bp, Homo sapiens
gcagcctccctcatcacaggcccagaggcctaagagggaaaaatggttttgtgggctgggcctagggtcccactgttctgtgcagcctggggacttggtgttctgcatcctaggcaccccagcttcccttgtggctagaaggggccaaggtatagcttgaactgttgcttcagagggtgcaagccacaagccttggtgtcttccatgtgatattgggcatacaggttcacagaagtcaagaactgaggttggggaacctctgcctagatttcagaggaggtatgaaaatgcctggacctccagacagtctgctgcaggggctaagccctcatggagaacctctgctagggtagtgtgaattgcttatatgtaaaaagggtgtgagatgtggaagggccaggggtggaattatatggtttgactctgtgtccaacccarattgcatctcgaatggtaatccctataatcccctgtgtcaagggatggaggtgattggatcatgaggatgat

SEQ ID NO: 160773 - DNA, 634 bp, Homo sapiens
taccttatttgagaaagtgtttttacagatgtaattaagaaaagaattttgaggtgaaggcattctcagattgtcttggtgggctcactatgaattacatgtattcttataagaaggagacaaagggagatttaagacacacagaagaagaggaagaagagaagaaggcagtgtgatcccctgggcatacattggagtgaggcagccacaagccaagtaatgttggytgtgaccagaagctgggcaaggcaaggaatggattcatcctttagtccccaaagtcagcatggcccagccaacacttcactccagtccagtgatactgattttggacttctggcccataaaacataaggtaatacatttatgttgtattcagccactaagtttgtgataatttgttacaacagctacaagaaactaatccatatgacatattgttataagatctcatagatttgcttatgaaattttgtcctcctggaaagactttataatacatttcattacttaccaaacttgcatttttcttaaaaatctagctaacatgtagacctattatatagccttctgtggcgtagcacttctggcattttaataggcagaaaccaatgctccctaatgtgtgctttca

SEQ ID NO: 160774 - DNA, 634 bp, Homo sapiens
taccttatttgagaaagtgtttttacagatgtaattaagaaaagaattttgaggtgaaggcattctcagattgtcttggtgggctcactatgaattacatgtattcttataagaaggagacaaagggagatttaagacacacagaagaagaggaagaagagaagaaggcagtgtgatcccctgggcatacattggagtgaggcagccacaagccaagtaatgttggttgtgaccagaagctgggcaaggcaaggaatggattcatcctttagtccccaaagtcagcatggcccagccaacacttcactccagtccagtgatactgattttggacttctggcccataaaacataaggtaatacatttatgttgtattcagccactaagtttgtgataatttgttacaacagctacaagaaactaatccatatgacatattgttawaagatctcatagatttgcttatgaaattttgtcctcctggaaagactttataatacatttcattacttaccaaacttgcatttttcttaaaaatctagctaacatgtagacctattatatagccttctgtggcgtagcacttctggcattttaataggcagaaaccaatgctccctaatgtgtgctttca

SEQ ID NO: 160775 - DNA, 634 bp, Homo sapiens
taccttatttgagaaagtgtttttacagatgtaattaagaaaagaattttgaggtgaaggcattctcagattgtcttggtgggctcactatgaattacatgtattcttataagaaggagacaaagggagatttaagacacacagaagaagaggaagaagagaagaaggcagtgtgatcccctgggcatacattggagtgaggcagccacaagccaagtaatgttggttgtgaccagaagctgggcaaggcaaggaatggattcatcctttagtccccaaagtcagcatggcccagccaacacttcactccagtccagtgatactgattttggacttctggcccataaaacataaggtaatacatttatgttgtattcagccactaagtttgtgataatttgttacaacagctacaagaaactaatccatatgacatattgttataagatctcatagatttgcttatgaaattttgtcctcctggaaagactktataatacatttcattacttaccaaacttgcatttttcttaaaaatctagctaacatgtagacctattatatagccttctgtggcgtagcacttctggcattttaataggcagaaaccaatgctccctaatgtgtgctttca

SEQ ID NO: 160776 - DNA, 389 bp, Homo sapiens
catttttctcctcacaaacgttaaataaaggccaagtcagattataatgcagctaacattttttctttcaggataagcaaaatagatgccaactagagcagaaagtattgctttttcccattctttaatggtttgatgactgcctgggagggcctaactagctttctggaatcagacaactttctcactgcccaggacacgtcaggcttgatgccatccctgccatttgaggataatgaascatcatccactgtcagaaataagaacttacttaatgaataagaaagctggcaatcataaacaagaaaagtgcctcagcagcatttcacatcattaaaacatctccaacttgattcctttttgtccttttgttacattcttgctatttc

SEQ ID NO: 160777 - DNA, 504 bp, Homo sapiens
tttatacctctcacccaacctagacctgtaagtactttattcaaaatgctttcaaaggaaagccagtctccacattttgctttacctcctagggaaaacatgtgcctttattcatctaaatgtgaggaacaggaaaaggagaaacatacaacaggcttcctgtctaagttcaaattcagtgtgtaagtgttttaggttcagagaacaacttgagtaatacctgcaaagtaagttctctaggtaaaatacagctcctagccaggaagcaggccatgtggaagaaggcagcggaagccactgctactacttctgtgagcartatcactgggcttgagcaatctttcttttgaaaaatttagataatgatactcttaattctagtgttttaaagtatgcatctggagaggtgtttttctttttttgccctcatttaacaaactcttaattgtcctctccagtggcagcagcagtatataccagctttttctgatgaaaatagaaact

SEQ ID NO: 160778 - DNA, 633 bp, Homo sapiens
tttataaacaacagaacttcatttcacacgattctggatcctggaaaatccaagatcaagtctctggcagatctggtgtgtggtgagaacttactatctgcttcatagatggcaccttattactatgttctcatgtgccaaaggggtaaatatgcttcctcaggtctcttttctaagggactaattccaytgatgaaggtggagcctccatgacctaatcaactcccaaaagtcccaccgcttaatatttttgcattggggtttcaacataatgaattttggagggacacaaacattcagactatagcagtgcattacatttagatgctctttatcctgttcctagccatcagaaacacaggattgggatcttggatattttcttattcatttcctgcttttatatcaatattctaaaaacacaaaaacccaagaattgtaggaaatagtttgatactgactttccgaaaattaatgccctaaatgtgtttcactggatttcataccttgtaggaaatctattttcaaaagtgaaatatcttcaaaatcactttaaacccctaagcacatttcttcaactagaagagatgcaaattttcttaaattgggttcaatctgaatgttagctgaaga

SEQ ID NO: 160779 - DNA, 633 bp, Homo sapiens
tttataaacaacagaacttcatttcacacgattctggatcctggaaaatccaagatcaagtctctggcagatctggtgtgtggtgagaacttactatctgcttcatagatggcaccttattactatgttctcatgtgccaaaggggtaaatatgcttcctcaggtctcttttctaagggactaattccactgatgaaggtggagcctccatgacctaatcaactcccaaaagtcccaccgcttaatatttttgcattggggtttcaacataatgaattttggagggacacaaacattcagactatagcagtgcattacatttagatgctctttatcctgttcctagccatcagaaacacaggattgggatcttggatattttcttattcatttcctgcttttatatcaatattctaaaaacacaaaaacccaagaattgtaggaaatagwttgatactgactttccgaaaattaatgccctaaatgtgtttcactggatttcataccttgtaggaaatctattttcaaaagtgaaatatcttcaaaatcactttaaacccctaagcacatttcttcaactagaagagatgcaaattttcttaaattgggttcaatctgaatgttagctgaaga

SEQ ID NO: 160780 - DNA, 339 bp, Homo sapiens
aatgaacattccaccagcctaacctgggtacctagttacattttgcaaacaggtttgtctcaggattgctaagttggaaggtatttaatggcaaagtcagacatgttttttctatttgccgtaagtcaaactgatctcaataaagacctcaccatttcttctctctctttgcctagtgstggaaagcaaaaaggcttatgcaaccatcttgagccctggagatgaaggctatcaggcataaagcctactaaaccaccagcaacctggttggttacttgatggtgcttgtttgtttgacagaatcttgctctgtcacccaggctggagtgcagtggcatg

SEQ ID NO: 160781 - DNA, 564 bp, Homo sapiens
agatctcataggcatcttaattttaaaatatataaattctaatttggttattggttctggaatttgattctctatccatatttctccaatctgtaattagtatcaacagaaacttgagaatttccccagacttatcttattaatcattaaattatttcattactttctatattcctgtggttactaagtctattaactattgcatcagaaatattcaaatgtagcccctaatttgtaatcttaacttgccttatggtagagctttggccttcataatttcttgtctggagtactgcaataaccccctaatagttcttttacccaccaatctggcccccaacaaagacacctttgatttctccttcctaccaagacattctcaacattctccctccaccaggtggatctggccattgattatcataaatctaattttgccttctgcttaaaatatttcagggagacccattaatgcmtttggataaaaattatttattagctgtgtgactttgggtgaaagatttgagctcatctgtaaagtaaggcaatatggcacccttgaag

SEQ ID NO: 160782 - DNA, 599 bp, Homo sapiens
ggtggctagatcggatctcccccactgccagtattttcttactgatacaatttttacaaaggtggtttcatagatataacatcactaatctgaggcttttcaaacattgaaagctcaagccaaatggcccttctcaactgcctgtgacagaccactgtctmtcttagaagtgtttagtagaaatgtattaaaaagatgctaaggacacccaaaagactagcaattgaagttatacattatccactcacatttcaaaaggattatctactcatcctctataaggaggggaaagaatgtgctaggtttcacaaatcagacccaatgctgaaattgccccagtaacatatctgaaagctcacaggctgtgattaggaaaacaatgtaggatctattgaatatgcctacatttctcatttttgatcattactagttaccaataaagattgtgtgtgtggcattctatagattctgaaaacaagatatgtatgctctatagtttggaaccaatgttcattataagttgactaacttgattaggtagaataagagatgtaccaaatgagtgaaatagatatatttgttggagcaatttagaggaa

SEQ ID NO: 160783 - DNA, 252 bp, Homo sapiens
ttcagtacactaagagacagagactctacacagagtttcaatttccccttagctcctataaaatggartatcatgctactgagatatctcatgcactgctcttgccttctgtctgaagatgggattcatgaattacctgaatcatctggatccctagaattggattagtggctcagaccactccatcttttggggcagatgatagagggtgtctatttcctacagctaggttgttgcagtaagattacataa

SEQ ID NO: 160784 - DNA, 252 bp, Homo sapiens
ttcagtacactaagagacagagactctacacagagtttcaatttccccttagctcctataaaatggaatrtcatgctactgagatatctcatgcactgctcttgccttctgtctgaagatgggattcatgaattacctgaatcatctggatccctagaattggattagtggctcagaccactccatcttttggggcagatgatagagggtgtctatttcctacagctaggttgttgcagtaagattacataa

SEQ ID NO: 160785 - DNA, 432 bp, Homo sapiens
acagagtttcaatttccccttagctcctataaaatggaatatcatgctactgagatatctcatgcactgctcttgccttctgtctgaagatgggattcatgaattacctgaatcatctggatccctagaattggattagtggctcagaccactccatcttttggggcagatgatagarggtgtctatttcctacagctaggttgttgcagtaagattacataactcttatttgatctttctcattatttttttcaggacataaattgtgttccaattctgatatccaatgatcttacctcatttggggtaggttaaagttgatactcattaggactctaagtaccatatttttctacttagtgcaaacgtcagaaagtaagtaatcatgtttaaactgacaagagctttaaccaggaagttgcctacatcac

SEQ ID NO: 160786 - DNA, 432 bp, Homo sapiens
acagagtttcaatttccccttagctcctataaaatggaatatcatgctactgagatatctcatgcactgctcttgccttctgtctgaagatgggattcatgaattacctgaatcatctggatccctagaattggattagtggctcagaccactccatcttttggggcagatgatagagggtgtctatttcctacagctaggttgttgcagtaagattacataactcttatttgatctttctcattatttttttcaggacataaattgtgttccaattctgatatccaatgatcttacctcatttggggtaggttaaagtwgatactcattaggactctaagtaccatatttttctacttagtgcaaacgtcagaaagtaagtaatcatgtttaaactgacaagagctttaaccaggaagttgcctacatcac

SEQ ID NO: 160787 - DNA, 432 bp, Homo sapiens
acagagtttcaatttccccttagctcctataaaatggaatatcatgctactgagatatctcatgcactgctcttgccttctgtctgaagatgggattcatgaattacctgaatcatctggatccctagaattggattagtggctcagaccactccatcttttggggcagatgatagagggtgtctatttcctacagctaggttgttgcagtaagattacataactcttatttgatctttctcattatttttttcaggacataaattgtgttccaattctgatatccaatgatcttacctcatttggggtaggttaaagttgatactcattaggactctaagtascatatttttctacttagtgcaaacgtcagaaagtaagtaatcatgtttaaactgacaagagctttaaccaggaagttgcctacatcac

SEQ ID NO: 160788 - DNA, 381 bp, Homo sapiens
aggtttcccccacctcaatttacatgggccttaactttcaagagattcaacatggcagctttaataataataataataataaaagaggatcttgtgtgtccttcaatagttgaytgaaagtgtggcaggccaggtctcactaacagctaaataggcaggcctctgcgacaactgtttcagcactgactgagtggttaatataaatattaaaaactgatggggccagtgtcctcatacaaaggctggaatgtaacatagcccaccaagagttttgcctaggtcttccctgggccttgaagcatgacaagataacgaaggaattcttaacaggacccatttaggattaaacaagttttattgggggtctaaaggaactcccta

SEQ ID NO: 160789 - DNA, 381 bp, Homo sapiens
aggtttcccccacctcaatttacatgggccttaactttcaagagattcaacatggcagctttaataataataataataataaaagaggatcttgtgtgtccttcaatagttgattgaaagtgtggcaggccaggtctcactaacagctaaataggcaggcctctgcgacaacwgtttcagcactgactgagtggttaatataaatattaaaaactgatggggccagtgtcctcatacaaaggctggaatgtaacatagcccaccaagagttttgcctaggtcttccctgggccttgaagcatgacaagataacgaaggaattcttaacaggacccatttaggattaaacaagttttattgggggtctaaaggaactcccta

SEQ ID NO: 160790 - DNA, 381 bp, Homo sapiens
aggtttcccccacctcaatttacatgggccttaactttcaagagattcaacatggcagctttaataataataataataataaaagaggatcttgtgtgtccttcaatagttgattgaaagtgtggcaggccaggtctcactaacagctaaataggcaggcctctgcgacaactgtttcagcactgactgagtggttaakataaatattaaaaactgatggggccagtgtcctcatacaaaggctggaatgtaacatagcccaccaagagttttgcctaggtcttccctgggccttgaagcatgacaagataacgaaggaattcttaacaggacccatttaggattaaacaagttttattgggggtctaaaggaactcccta

SEQ ID NO: 160791 - DNA, 381 bp, Homo sapiens
aggtttcccccacctcaatttacatgggccttaactttcaagagattcaacatggcagctttaataataataataataataaaagaggatcttgtgtgtccttcaatagttgattgaaagtgtggcaggccaggtctcactaacagctaaataggcaggcctctgcgacaactgtttcagcactgactgagtggttaatataaatattaaaaactgatggggccagtgtcctcatacaaaggctggaatgtaacawagcccaccaagagttttgcctaggtcttccctgggccttgaagcatgacaagataacgaaggaattcttaacaggacccatttaggattaaacaagttttattgggggtctaaaggaactcccta

SEQ ID NO: 160792 - DNA, 536 bp, Homo sapiens
gagtgaaaaaggaaacttaggaaaaaatatacccaaagagggagatttaaatagcacagtgggcagtgggggaagtgatgactaatattgctgttagtagtggtttaggaacaaaagagacaagtcagttggaaactttctggtgtcttctgctagggctccttgctaaagctgatgctggaaagcaggaaggaaggaaagatggaaggaaaagagagagagagggagcgaggaaggaaggaagggaagtcattagaatgtaagctgaacacccatttcgtgcttttggccaaacaataatackcatgtttaaaagttcattttggtgggaacccaacttaagtagaattaatgaaattcatacagaacttgaaattcactacctaaagttattcattaaaaatgcaacatgcattgaattaatgtagcagcacctgaaggaagtcaaagaaactccagtttgaattttgggagaaaagaaagtatcatttaatatgaaataaatgaagagaacctaaaagagcgaatggctaaat

SEQ ID NO: 160793 - DNA, 536 bp, Homo sapiens
gagtgaaaaaggaaacttaggaaaaaatatacccaaagagggagatttaaatagcacagtgggcagtgggggaagtgatgactaatattgctgttagtagtggtttaggaacaaaagagacaagtcagttggaaactttctggtgtcttctgctagggctccttgctaaagctgatgctggaaagcaggaaggaaggaaagatggaaggaaaagagagagagagggagcgaggaaggaaggaagggaagtcattagaatgtaagctgaacacccatttcgtgcttttggccaaacaataatactcatgtttaaaagttcattttggtgggaacccaacttaagtagaattaatgaaattcatacagaacttgaaattcactacctaaarttattcattaaaaatgcaacatgcattgaattaatgtagcagcacctgaaggaagtcaaagaaactccagtttgaattttgggagaaaagaaagtatcatttaatatgaaataaatgaagagaacctaaaagagcgaatggctaaat

SEQ ID NO: 160794 - DNA, 536 bp, Homo sapiens
gagtgaaaaaggaaacttaggaaaaaatatacccaaagagggagatttaaatagcacagtgggcagtgggggaagtgatgactaatattgctgttagtagtggtttaggaacaaaagagacaagtcagttggaaactttctggtgtcttctgctagggctccttgctaaagctgatgctggaaagcaggaaggaaggaaagatggaaggaaaagagagagagagggagcgaggaaggaaggaagggaagtcattagaatgtaagctgaacacccatttcgtgcttttggccaaacaataatactcatgtttaaaagttcattttggtgggaacccaacttaagtagaattaatgaaattcatacagaacttgaaattcactacctaaagttattcattaaaaatgcaacatgcrttgaattaatgtagcagcacctgaaggaagtcaaagaaactccagtttgaattttgggagaaaagaaagtatcatttaatatgaaataaatgaagagaacctaaaagagcgaatggctaaat

SEQ ID NO: 160795 - DNA, 589 bp, Homo sapiens
gcttgcaccatgcacctggaaaagccacaggcactcaactctagcccatgaaagcagccatgggggctgtacctggcaaagccataggggcgaagccagccatggccctgggagcctacctgttgtatcagcatgccctggatgtgaaacatggagtcaaaggagattattttggagctttaagatttaaagactgccctgctgggctttgcacttgcccagggcctgtagcccctttgttttggccaatttcttccatttggaatgggagcatttacccaatgtctgtacccccgytgtatcttggaggtaactaacttgttttttattttataggatcacaggcagaagggatttactttgtctcatatgagactttggacttggacttttgagttaatgctggaatgagttatgggggactgttgggaaggcatgattggttttgaaatgtaaaaaggacatgaaattagggagggaccggggtggaatgatatggtttggctcttgtccccacccaaatctcattgtgaattgtaatccccaggtgttggaggagatgactgaatcatggaggcagaaaaccccc

SEQ ID NO: 160796 - DNA, 378 bp, Homo sapiens
tgtattttccaaatttcttctatagtgagcatgtagtgcttttatatttagaaaaatgaaaatatataaagactatttcagttgaaatggacagaaatacaactctagttcaagccaaaaagagagagaaattgaagggagtagggagagagaaaragaattatttcctggatgaatttggcttcaggcccagatggaaattaatcgtcaggtctctctctttccccctcccccaatatctcagctccgcttcctctgtgtggtgacctcattttcttccattttccaggctgccagacaagtaggttgcccacagctctaggcttacatcatctgctttaggaatcccagtggaaagagactgctctctcccaatgt

SEQ ID NO: 160797 - DNA, 525 bp, Homo sapiens
ctttctggtctatctttaggttttgcgcrcacacacacacacacacacacacacacacacacacacacacactcaacaaagaaacatgaggagttaattgtaaaaacaggaaactttagaccagactgaggtctggaggaacttatttgaaaacctaccaattcacaattccctagtttaacagcagccttaaaaatgctttataatatctcaagagtacaaccagtaatcttctctgtctggctaaagagggattgtacattatacccagtttaatggtctttgaattgcaacatcctgtaagattaaatccaaaagtttcctatccacctttcacttaggaagaaatttcttaagatttcttcaaaatacttttgttttgtactttgtagtcatttatgtgtcctgaatgcatcctttcttggaaggttaaatccagcatgaaaggagtttggaaaaatcatacccacctggttaggatgtaagttatttgctcagctgtcttctaatctgaaactaaatggt

SEQ ID NO: 160798 - DNA, 568 bp, Homo sapiens
aatccacacatccacttcttggccaggacctcaatacctggtggtcatgtctctgtaggcgcccccagagtagccatggtctacatctctgaaaattctcctccttatactaacccagtgctcccagatcaaatctcaaaagtctctcacagttatggctccatgacctgttatctttcaaaaccaccttaggtgtcagtaataaatcttttgctttctgaagaggtaaatcaaagctttggacattactagcaaaaaatggcttttcattatttctgccttataaccacggtgttcagatggcacctttcagagctgccaaaatagtaaacaataacagaacatctttactgcctgataactasaagcaacttaccttcatcaaaataaatctcggcagatttcaacacccttggaaagagctggagaggataaaagggaaaaaacaaaccttagtggaatgatattttatttatctcctttatgtcctgctttataaaaataggcatcttacaccctagaatgtgggcaaaatctgcatccaaacagttcaggaaatttgttacct

SEQ ID NO: 160799 - DNA, 571 bp, Homo sapiens
agatgatattttcaccaccccttactgaggacaaagtctatgatcatttaaggacctaccaataacgctgctaagcctgacacaaaaagtttacagaaaaaattattacctcaaaaggagtttaaaatcattccatcaacagccactatatggacaatgcacatgctattattttaagacaacatatggataaatgtatccatcccctgagaaaagtacaatactccagtgggaacttttctccctatctgtctctctctttggaaaaagatttttatttatgggtstgaaaacaagaaaagctacctatgcattaataaggacgggcaaaacccactgttgctcacttagctacaaatagtagcccctgagaaaattatccattcaaataataatctcttaaaatgatatttgactattatatacccaatgtggtttatgttgaatttaatttccatctaaatttaaaatacaggagacatctaaagccattatttcatttcgagttgaatgaagtaagtcatttggaagtacagtttaatttttaaaagtcacagcataactaaaggag

SEQ ID NO: 160800 - DNA, 426 bp, Homo sapiens
gaaattgtattattagacctataacaaaatcacatgtaataatagtgtctgtctatagatatatgatatattacatgtgrcatagtagcctattttattcaaatctattttattcaaaccacctagtggtggtttagtgtattagtcagggttctccagagaaacagaagtgataggaaatacatatgcagttatggttatagttatatataaatatatagagttataaatagttacatatacattatatatgtgtgtatacattataaccatatgttacatatatacaatatgtatgtgaaatgtattataaggaattggctcatgtaattatggaggctgcagagtcccataatctgctgtctgccagctggagacccaggaaggccagtggtacagttctgagaaccagagggatgatgatgt

SEQ ID NO: 160801 - DNA, 605 bp, Homo sapiens
tggacgtgccaggaacagcactatctgtcaaaatacatttacatgaaaggagaaaaggtcattatgggaaagattaatgttgattttccyggcttcacttgggtttaaaatcagaagcttaactcttcattaccacaggtgattaagctgatcacaccattataactagtaatcgttcagattgtttgattagactaattcactgtcgttattcagacactcatttcttggcaatgttcttccatctacacagcacaaaagaaaaaggggagtttgtgtttatacattcataatcccttatcagaaattctgtgtcagatggtttcaaaattcagaaattttggtatttcagaaaggtgatttggtataaatccctttcagtattgtaacactcctagcagggtctggacagcaccctataatcaaacggcacaacatatcaaatgtcctattaagcaggataagtaaagattatacaagggccttatgtgcacttgggtccgtttgcctgccaaagaagtccaagtcagctcaggttttgccactaaattagaaacaaaaaactttagactttttggatcccaaaattgtagataagcaattgt

SEQ ID NO: 160802 - DNA, 577 bp, Homo sapiens
tgttcaaattcagtgtctccaccaaaactatgtacatttaacttaaaagaagagatgatggctggaaaacaaatagaggaaacaagaatgaaaaattctagataaatgttgaatctgagtaaagtgtctataaggcttcattattactattttcactattaatacttttgtgtgtgtttgagaattttcgcagtgaagtatttcatggagtccctcttactcaaagaagattgggaatcactagaccagagggtagaacggtgactcagccatttatctcgtggaggaaggcaagaatagttccactgaatagtgcttacatttctctgaggctcttgggcatcagcataaagatgttcaatrttctttggttaagaggaccatccttctcaagaatcatggtggcggattatgacttctcccccctgaaggctgagctcaatgtgcttattggcctaatgtcagttttagaaaaaactggggagaagacctttgactgtggctaactatacacaacacaaagcttgatgtggggtgaataaaacaggcagcaggggtagagacaggcagtaatttc

SEQ ID NO: 160803 - DNA, 520 bp, Homo sapiens
tatgaaatcccacctctttcacaagaattgcagtttccctttgtagttgaaacacattgtgctgtcaggagtttaaacttggtgagttcagagggactatggaccagaaagacaccaagctcacaaaacacacagatgagatggatgtaagtaggtgttatatgatgtgtaccagatgctgaaatggggactgacattatgtattattgcaaaatatggtttcctggggaacttcaaatgtgagggattctgataatcaaaacaaaaaatgagaggcctcccatgtctttgcttagaacatcatttcccaaagtatattccagtgaactataattcctggagatgtgattagtagggataagtaggaagtacatgtaagttatggttaagcacttctgggaaacacagagttaaacacagatcaakgaatttgaatgctttgagaattccttgagactataatgtactaataatgtgcattttgaatttctaagagctacatacaatatgtaatgtttcc

SEQ ID NO: 160804 - DNA, 420 bp, Homo sapiens
cagacattagccatgctcctcagcttcggtccagggcaaacagccccgctccttccacaactctctccagccctagtctcacttcatgatctcyaaactcatcactatcctcttcatccccttctggaccaccagtttgtcaaagtccctcttaaaacatggctctttacatggagcccaggaaccaaattcccagccacttctcgtgctgggcgcagtcctcctgacaagagagcctaggttggcagtgccttgggtggctgagggtgtgacactcttgcccggggcccctccagcccccaggagctaccttgtctcctccagctgcaacttcagcagttgattttttgaccctaaattcaggatgttgcatttgccccactgaggtcccctgttggaggtctgggccccgtatctgta

SEQ ID NO: 160805 - DNA, 523 bp, Homo sapiens
ataactctgtgaatataccaaaaaccactaaagtatctattttaaaaaggttaattttgtggtatgcaaatgataaatcaataaagctattataaaacaaaacaaacaaaaacaaataaatattcctttgagaacaggagaaaccagttcataaaatattcagtcctggggtcagcatagsgggggaaataacctgtggcagctagaagctgccaggtggggggacctgggaggccccatggccagcctcacagggggcaggccctggtcacctcatccccctgctgggatgaaagggatgaaagggctccagagcacccccttacctccttccccagacccccacatccagaaatctgactccatccacttttccagccctgctccccaggaaactcaaaccttactggatccatcactctccttggcccatctgcttccacaactgcattctcattttgtcttcccaggtctctctttgttgaaatttctgcatccttcaaggactatgccctacctgcaa

SEQ ID NO: 160806 - DNA, 523 bp, Homo sapiens
ataactctgtgaatataccaaaaaccactaaagtatctattttaaaaaggttaattttgtggtatgcaaatgataaatcaataaagctattataaaacaaaacaaacaaaaacaaataaatattcctttgagaacaggagaaaccagttcataaaatattcagtcctggggtcagcatagcgggggaaataacctgtggcagctagaagctgccaggtggggggacctgggaggccccatggccagcctcacagggggcaggccctggtcacctcatccccctgctgggatgaaagggatgaaagggctccagagcacccccttacctccttccccagacccccacatccagaaatctgactccatccacttttccagccctgctccccaggaaactcaaaccttastggatccatcactctccttggcccatctgcttccacaactgcattctcattttgtcttcccaggtctctctttgttgaaatttctgcatccttcaaggactatgccctacctgcaa

SEQ ID NO: 160807 - DNA, 625 bp, Homo sapiens
aaggatgtgcagcagtggctactgaaaactggataaacgactactcacctttctttatttttcttatactgccataataatgtcactactttcttaagtttttctcccataccataaacacttaytctccgtggagcaagagtcaaaactatgtcaggccacaacaccactgaacttttgtagatcaacatgaactaatggcacctctaaatggcagcatgtaggtgttatctcagtgatgcaggaacccacactcctgtaaattccctctggtatatgctctccattgtcaaatacacaccataatctattccctagtactcatcagatttgcagcagttaacaaataggagacatgcttctgggaactttttgaaaatcagatagaacctcatgtacccatattgtgcatgcagtgtgagtacatgtttgggatgtggcctactagaggaatgacactttggaagagaccagatccatggttctccatgggagctagttttatgctgcttatcagaatcgtgcagcccaataggaatgcagactttggactcatgcacacctgaattcatatcctcctaatgccttatggggtccttaggagttttaaatgaaataatacatg

SEQ ID NO: 160808 - DNA, 576 bp, Homo sapiens
tctctttttgtggctgctacagaaaagatcagcaaactagttgcttttatgtgctttctgtgacatagggctcagagctcasgcagaggcagctgaaacttcatcaaataaatagccaaaaggtgagctttgagtgtttcacaaagtattctgtcaaattcagatcatatcagagttacattttagggctagaccaccaggagtcagggcgttgtctctgggaagactttgttaagtacactttaggtgtcctgtaagaaagacacagagcagaagatctcaaattttaagcacgtaacccgccggacagtattcaagcactggttcctgggtctcgcttcttgtgattctgattcagtaagtatgagatggggggatgtgtgtccctgggaacctatattttgtaaaggatgctggtgttgaaggatctcaattttaagaaccatttctggggtttctctagcttgtttatctcattaaaggcttatgagcgcagaacacatcaggaacctggctcttagactcagggcagctgggatgagaggcagtgcctgtgtctcagggacttgtgtttga

SEQ ID NO: 160809 - DNA, 609 bp, Homo sapiens
agtatatgggaggatacgcatagattatatacaagtactacattattttatataagggacttgagcatgtgtggattttggtatctgcagggatcttggaaccaatcccccacagatatcaagggatgactggagatatacagatggagagagagagagagagaaagaaagagaaatatatatatgtatttgatatatatagcaaaccaatatatactcgattctattctttactgaggagtctaacaaatagtatggatttattagagggctatattgttattggtttctctcctgtgcttactaccctgaactgtatatatttgacttatgtcaattaaataaaatttgagaaaygtttatggctgcctattataagtcaggctctgtgctaggttatgggcacccaaaaatgactggtatactattccctgtgttacatttgaatctcaaaacaattgaggtttcatatctttttttacaaattgtaaacagtcaggaaaagaaataaaatagaggattctggttttctaagaagttaccttactgatcttctgtagttccttctgctacacacacacacacacacacacacacacacacacacac

SEQ ID NO: 160810 - DNA, 395 bp, Homo sapiens
ctttttggagtcaagtatgaataaaggtgtggcagaatataataatctggactattttctataggataattgctgggttataaaatcttaggtttgcttatgcccagtagctcctgcggaggcttaataataggcaattttgaatttgttcaaacctgtaatggcttgtaaacaaagatgaccatcagctgtttctcacatctatagtgacaataaagcgggaagtataagatttaataggaggggttaaggttcatgagaaccatggaaagatgtggtctgagatgggtgctgcaaagatcataataaagtcatttttatagacagtctaaacaaaatgggtggggatgtcrtgttttttgcccaattcagcttttgttctgcctgaacattaa

SEQ ID NO: 160811 - DNA, 522 bp, Homo sapiens
gagaactttcaagttaaaaaaacacttttcaattttttycctagtaaattatatcagaatgaatcactatgcaccagaagtttcttctaaagcctgactgaagtcataaattagtctgaaagttatactgtgagaaatttacccacatttctactaaacaaaagctaattttcttacagcttgtgaaatatagaacatgacatacccttccttcctgtactttggttaaccagtacttttttctttattctcagaacatacctcgactctaattcttaccgcaaactaaagtgatgcttgctccgtcccttccctgccccttttttgcatttgaggtctactgtcatacagcagtgttacacttctgtattaaaatcacaagaaaagcaaatgatctatggtctgctttcccgtatgacctatgtcattctgtgtagttctcaaagcattttttcaccttgtagaagatttcaaagtcatctttcctcaaataaatgtggtgtttccttcccctggactttg

SEQ ID NO: 160812 - DNA, 522 bp, Homo sapiens
gagaactttcaagttaaaaaaacacttttcaattttttccctagtaaattatatcagaatgaatcactatgcaccagaagtttcttctaaagcctgactgaagtcataaattagtctgaaagttatactgtgagaaatttacccacatttctactaaacaaaagctaattttcttacagcttgtgaaatatagaacatgacatacccttccttcctgtactttggttaaccagtacttttttctttattctcagaacatacctcgactctaattcttaccgcaaactaaagtgatgcttgctccgtcccttccctgccccttttttgcatttgaggtctactgtcatacagcagtgttacacttctgtattaaartcacaagaaaagcaaatgatctatggtctgctttcccgtatgacctatgtcattctgtgtagttctcaaagcattttttcaccttgtagaagatttcaaagtcatctttcctcaaataaatgtggtgtttccttcccctggactttg

SEQ ID NO: 160813 - DNA, 522 bp, Homo sapiens
aaggtgtactgcctagggttgggggagggatggcataatcactcccttagttgccctagctagtatccctctaggtcacatgccagcctagtccactggctcgaagcccagactagcactaggagttgcctaggaattgcagtccttttgtcctaggctgcctttcaagtttacctaggaccacagagccctttggcctgtagtggcaaggcttgtggagaaactcaaattatgaccattgggatgagcaattcccttctggctagggctggtccaaatgctctctctatgagcaggtgctggctgagcccagcatggctttattctccactgtgacaaggcagcactgagttcaacgtaaaatctcccagtcattgtgctctccctctcccagraggatacattctctctctgcgcagtgcagccactgctgggggataaggaagtggtgttggtgattcaagactctctctcgtacctacactcttcaatgtctttttcagtgacatgaagttaaaaccg

SEQ ID NO: 160814 - DNA, 628 bp, Homo sapiens
tgagagcagtagcaagggaggtaccaggctcttgaaacaatcagatctcacaggaactgatagagtggggactcrcttattattattgacagttctaccagaaccacatgaaataagggagaatcagtttgcccagaaaagggatggggtggggttctttagcctgatgcctgatgctcaaaggagaggaaaaaatgctgtacttagctcgataatcctgaagaaaccaaagaaatgctacagacatgtaaataaaattgtaacactggatttctattcactagaaagaaatgaataattctattaatctataactattaaaagtaaaccagagggatgttttggcctttgttattgaattgttgagtaatcaccattattgttttactaaaatactatatacagtgaccataagataatcttttaatgttgaattctttatcttagtaagatttagaaaaatctaatgaaagagtcctttataaaaataaaataaaggaggaaactggagggtcctacttagaaaatactcaactatagggacaatagtgaccaaatatattagatcgatataaaattaggctgtaacttttcacctttctaatctgttttctgagacagtatgtaa

SEQ ID NO: 160815 - DNA, 628 bp, Homo sapiens
tgagagcagtagcaagggaggtaccaggctcttgaaacaatcagatctcacaggaactgatagagtggggactcgcktattattattgacagttctaccagaaccacatgaaataagggagaatcagtttgcccagaaaagggatggggtggggttctttagcctgatgcctgatgctcaaaggagaggaaaaaatgctgtacttagctcgataatcctgaagaaaccaaagaaatgctacagacatgtaaataaaattgtaacactggatttctattcactagaaagaaatgaataattctattaatctataactattaaaagtaaaccagagggatgttttggcctttgttattgaattgttgagtaatcaccattattgttttactaaaatactatatacagtgaccataagataatcttttaatgttgaattctttatcttagtaagatttagaaaaatctaatgaaagagtcctttataaaaataaaataaaggaggaaactggagggtcctacttagaaaatactcaactatagggacaatagtgaccaaatatattagatcgatataaaattaggctgtaacttttcacctttctaatctgttttctgagacagtatgtaa

SEQ ID NO: 160816 - DNA, 605 bp, Homo sapiens
caataatctcttctatatttcctttttacatgtaagagaatacaagcttggaaacattaagcagcatgcccaaagtcacagagctcccagatttgccctcaacttttctcttcgatgcagagcccatgttctttccactcttccatactacttttatagacataccaacattctgcrttaaatctgtaaaagaactcagaaagcatacaatcaaaatcctcatgttaatcatgagaaacctggaatccagaccaggtaaataatctgccattctaaattgttatcaagagtgaaatgtaacaatccagggctttcaccactgaatatactcaggagtcattgagacaaaacagatggaaaattaacttgaaaccaaaattaaatgtctatgattcaggaaaaagaaactgagattaagaatcctgaggaacacaagaaaaaataagttcactacaacagattgtatcgacaatggtgaggcacagtgttgcaagaatcagatattttggtatcacggaggaggatctgaagatctttaggaaacagaaaaatgtagctgaggaacacagcctcaaaatgacccaggaatgagttttgccatgaag

SEQ ID NO: 160817 - DNA, 567 bp, Homo sapiens
ctttaggaaacagaaaaatgtagctgaggaacacagcctcaaaatgacccaggaatgagttttgccatgaaggccctgttataaatttcacttgtatattcttagaccaagcaaagctactcaaaaattagcttttaaaattcaaaagtcagcatttgcaatgtatcttttgaatatgtttgcagtccaagacccctttgtggcttcacaaacatatcrctctacaaactcagttttttaaaaaattgattgttaagtaatgtacacagtaacacacactcataaagatgcatgtacatacatagacacagacacaggaaaagctgacacatcaaaacgtcaacaggtgctatttctgaaagctagaatcattaagtaatttttttattctcattgcttttctggattttctaaatttctatcctaaatatgagattaataatagaaaagtaaatgaaaacatattttaaaatctatttggtggttataagatactatacttacaacactaatagccaaatagaatttgggacttctagctatattttcccattaaatgtaaattta

SEQ ID NO: 160818 - DNA, 519 bp, Homo sapiens
aataatctttgctggcaaggctatgctgaatctccttgggcactctctaattagatgtcctgggtcctcccaattcttagtcctttaatacctgtttttctccttctcttattccgtttagtttttcaattcatacaaaaccatatccaggccatcacyaataattctacatgacaaatgtttcttctaacaaccccacaatatcaccccttaccacaaaatcttccttcagcttgatctctcccactttaggttcccacgtcacccctaatcccgctcaaagcagccctgagaaacatcgcccattatctctccataccacccccaaaaatttttgccaccccaacactttaccactattttgttttatttttcttattaatataagaagacaagaatgtcaggcctctgagctaaagctaagccatcatatcccctgtgacctgcacatacacatccagatggccagttcctgccttaactgatgacattccaccacaaaagaagtgaaaatggtct

SEQ ID NO: 160819 - DNA, 540 bp, Homo sapiens
tcagaaggataggattataccaatctattctggtcaataaattatcactttaaattaaatcactaagcaacaagagtcatatttctatacaaatcagcaaaatacaccagaaattatctaaagattccataatttttttgaaacgtgctgttgtgagccttcataatctatataaatatgtggggttttgcaaaaaaaaaaaaaaaatatatatatatatatatacatatatatatatacagccttgagtgatcaagctgtctgaatcttatcaaagttccactgacaaaaagtgatatttatgacatacggtttgaagaatatgcaagacactcattcctcaaattagggacttctaccttgagttcttgggttctacagtycacatttttaggttcacacatcttccagatctactgatccttaagaacaagggcaggccaagttgaaagatgtcagagcctatcactcccacctaaatcaagagagttgttttacatatcagggtcggccacacatttcagttgaaaagaaaagggg

SEQ ID NO: 160820 - DNA, 534 bp, Homo sapiens
ctgatccttaagaacaagggcaggccaagttgaaagatgtcagagcctatcactcccacctaaatcaagagagttgttttacatatcagggtcggccacacatttcagttgaaaagaaaaggggattctgatacttaaaaactataaaattcgctgctgtgataatgctaaactttatacttaattttatacttaaattaatcctgagcattaagcattggaattcttcatgattacacaatatcgtattgattccaggacagtaataatattgattatttttgttkgttttttgtgtgagcgagacagagttcccctctgtcacccaggctggagtgcagtggcacaatctcagctcacttcaacctctgcctcctgggttcaagcaaatcttatgcctcagcctcctgagtagctgggattacaggcatctgccaccacacctagctaatttttgtaattttagtggaggcagggtttcaccatgttgtccaggctggtcttgaacccaccttggcctcccaaagtgcccgg

SEQ ID NO: 160821 - DNA, 637 bp, Homo sapiens
tatagtgtattttctgaaaataaaagagcaacagagacagatgtggttagacagaaaggacatataagattcgtgtttgggatggtgaaagagtggatggcacaggcaggctctgaatggactgagtttggaatcataagcaaacatttctgtggtcattcacatgygtgataatagaagggaaaagaatacaggaacaagtcatatctgtgaatcatctgtatcacttatacttgaggtaaatctcaaaataatatttatatggtccatctcttccactccacctcagccctgcccttgccagtcatatgattcagaatctctggggcccagggctcagagattggcacttatcacaagcttccccagtactcttggcctcacaatttctgaaaaccaatagggcaactctcagttttgggatgtggagaaactgtagctggaacctcttgatctttcttcctcctagctgcactttcctctcttggtcaaagtatggtcaacctcttccatccctcctgtgtaaaaggaacactctttgccaaggtactcctaatcaccacctgttcttgatcaatacctccctctctccttccccggtccacacctttcaaagccaacataaagaactaatagg

SEQ ID NO: 160822 - DNA, 438 bp, Homo sapiens
ctaaaaatgaaaactttaagaaatgaacaaattgcgatgttagatattttctcccctaacatggcagtgaaggatgaaaagcatctgagaggagatgaaggtccggaatctaaagtctccactgggtgtagaagaatgatagcagaagagaaggtgacatcaacaagaagagaaagagaatgttctagccccaaaggtgtaggtggacagtgacaaagttagggactggagccctgaagggaagcaaggaggacatcactcayaagtatggtctgtgtgatgtgagaaaaaaataagcttctcaacaaaccaactggaaagcaagtcctctggggtgggaaggtgtgaggtgggtttcagctaaagctagtaggttatgggaatcttcacacacagacacacacacacacacacacacacacacattgccctatcata

SEQ ID NO: 160823 - DNA, 564 bp, Homo sapiens
tggtcttataaatttctaatggcactgtgatggttaatattgagtgtcaacttgattggattgaaggatgcaaagtattgttcctgggtgtgtctatgagggtgttgccaaaggagattaacatgcgagtcagtggactaggagaggcggacacaccctgaatctgggtgggcaccatctaatcagctgccagtgcacctaggataaaagcaggcagacgaacgtggaaggactagcctggctaagtctccttgcctccatctttcttccatgctggatgcttcctgccctcaaacatcagactcctagtttttcagcttttggacttttggacctataccagtgatttgccagggcctctagcgtcggcctcagactgaaagctgccctgtaggcttccctacatttgaggtttggggactcatactgtcttctttgctcctcatcttgcamagagtctattgtgggacttcaccttgcaattgtgttgagtcattactccttaataaactcactttcatatatacatctgtcctgttagtcctgtccctccaaagaaccctg

SEQ ID NO: 160824 - DNA, 462 bp, Homo sapiens
tctcagagcttgaattttcacatggcaaaatcaagctcagagaattattgtatgcacagtggagaacactggagaaagggatgacttcttgtctaagaagttgtattattgctgttttcctcactacrtcaagactattcaatatcttttcctgggcataaagggatcatttacaacacatatcagcctggaccactagtagaaaagagagaataatgacaaaatttcattatttcagaggtctcaatgatttttttcatgccaaatgcaaaatatctcaagttccaagcattttgcatgatgtttctattattatatgcccaattttaaaatgtaatttagaaatctgaagctgaagctaaactaaggtcttttgttctcaatcttttgtgtccacagtaattcttgttattcaagtcaaattttccatgacgtggtgaatttttctactgctaaagggaa

SEQ ID NO: 160825 - DNA, 565 bp, Homo sapiens
agaaaactatcatatttttaatggcttccctttagaatttaatattcttttatttttttccttttttttcctcttccttttctctctcctttcctctctttctcctttcttccatttctaccagattttcatggtaggyggggattgacatgatcccctttctacaaggaatcatggtaattcctttagtagccagttaaatagagtgctgtgagggctcacaaaatgagcagaagtcatgtgaggcttcacagcaggatggcaccaagttgtagagaatgagtggtaggaaaaacctggccagctgggagctgtctttggggaatgtctttctaagcagagaaaataacattcctggccctgaaggaacccttttactcctcaaggaacttcatttatattgtttcttccatcctggttgctcccttcatatctgtcccagtctggctacactttaggactgttgataggtaggttaaaaaaattaacctaaaaaaattaactatttcagcaacaaacagtacaccttatttctacacatgtttaggtgcaagaaagacagtgt

SEQ ID NO: 160826 - DNA, 470 bp, Homo sapiens
gggtaaatacccactagttctggaaagaaatagaagcaaaaatggtctgcatctgtggggagggacagaaaatgctcttacactcaagattctaaaccaagcagaaactaagcagaaatctccctccactgagagaagggcagaaaactcattcacagaagaacaacyacagatgcaaggtaaagttgggaagtgcagggatactgacaaagctccattatcgaggcccaggctcatatgtcctttctgtgaccaacgctggacaaacatagctgagaatcccccaacttccaaaaacaattctagcagtgagtaacaagaaatagcagttattttttagaggggaaagaagagcatggagagggcatcactatggggtccagcagtgcaaagatgactgaaagcttagagtgacacacaaatagtgaaaaaaagaaaaaacaatcaaacactgcagtctttaccctagg

SEQ ID NO: 160827 - DNA, 469 bp, Homo sapiens
tagttctggaaagaaatagaagcaaaaatggtctgcatctgtggggagggacagaaaatgctcttacactcaagattctaaaccaagcagaaactaagcagaaatctccctccactgagagaagggcagaaaactcattcacagaagaacaactacagatgcaaggtaaagttgggaagtgcagggatactgacaaagctccattatcgaggcccrggctcatatgtcctttctgtgaccaacgctggacaaacatagctgagaatcccccaacttccaaaaacaattctagcagtgagtaacaagaaatagcagttattttttagaggggaaagaagagcatggagagggcatcactatggggtccagcagtgcaaagatgactgaaagcttagagtgacacacaaatagtgaaaaaaagaaaaaacaatcaaacactgcagtctttaccctaggcacaagaaatagc

SEQ ID NO: 160828 - DNA, 454 bp, Homo sapiens
aaatagaagcaaaaatggtctgcatctgtggggagggacagaaaatgctcttacactcaagattctaaaccaagcagaaactaagcagaaatctccctccactgagagaagggcagaaaactcattcacagaagaacaactacagatgcaaggtaaagttgggaagtgcagggatactgacaaagctccattatcgaggcccaggctcatatgtcctttctgtgaccaacgctrgacaaacatagctgagaatcccccaacttccaaaaacaattctagcagtgagtaacaagaaatagcagttattttttagaggggaaagaagagcatggagagggcatcactatggggtccagcagtgcaaagatgactgaaagcttagagtgacacacaaatagtgaaaaaaagaaaaaacaatcaaacactgcagtctttaccctaggcacaagaaata

SEQ ID NO: 160829 - DNA, 645 bp, Homo sapiens
cttttcaatttatttcatcagcattgcatagttttcattatagaaatccttcacttctttaattaagttaatttctaattattttattttatttgtagctattgtaattgggattactttcttgatttcttttttagattatttgctgttatcatacagaaatgctactgattttgaaatattgattttgtatccttcaacttactgaatttgtttatcagtttaaatagttttttggtcgagtctttaggtttttccaaatataatatcatatcatctgcaagcaaggataatttgacttctttctttccaactaaatgcctctcttttctaattgccrtagctagggcttccaggactatgttgaataacagtggtgaaagtaggcattcttttcatgttccagatattagaggaaagactttcagtttttttcccattcagtatgatactggctgtgggtctgttaaatatggcttttattgtgttgagtacatttgatctatacccagttttttgacagttttgatcatgaaggtatgttgaactaaaaactttttagcactaattgaaattgtcatgtgtttttttttcctttattctgttgacataatgtatcatattgattgacttgcatattttgaa

SEQ ID NO: 160830 - DNA, 574 bp, Homo sapiens
gggtgccaccatgttagccaggatggtctcaatctcctgacctcatgatccgcccacctcagcctcccaaagtgctgggattacaggtgtgagccgcygcacccagcctcaatttttttaatgttttaagacttgttttgtgacctaacatatgatcgatccttgggaatggtccatgtgctaaaagaagaatgtgtattcagcagccgttgagtgaaatggtccataaaatatttattaggtccattttgcttatagtgaagattaagtccagcgtttctttgttgactttctgtctggattatctgtccaatgctgaaagtagactgttggagtctccagctatttttgtactgaggttcatatctctctttaattctaacaatatttgctttatatatctgagtggtccaattttgggtgaatatatattttaaattgttatatcctcttggtgaattgatctatcataatataatgaccttctctgtctcttcttagagtttttgtcttgaaatcaattttttctgatataagtatagctactcctgctttttttttttttttttttttt

SEQ ID NO: 160831 - DNA, 574 bp, Homo sapiens
gggtgccaccatgttagccaggatggtctcaatctcctgacctcatgatccgcccacctcagcctcccaaagtgctgggattacaggtgtgagccgccgcacccagcctcaatttttttaatgttttaagacttgttttgtgacctaacatatgatcgatccttgrgaatggtccatgtgctaaaagaagaatgtgtattcagcagccgttgagtgaaatggtccataaaatatttattaggtccattttgcttatagtgaagattaagtccagcgtttctttgttgactttctgtctggattatctgtccaatgctgaaagtagactgttggagtctccagctatttttgtactgaggttcatatctctctttaattctaacaatatttgctttatatatctgagtggtccaattttgggtgaatatatattttaaattgttatatcctcttggtgaattgatctatcataatataatgaccttctctgtctcttcttagagtttttgtcttgaaatcaattttttctgatataagtatagctactcctgctttttttttttttttttttttt

SEQ ID NO: 160832 - DNA, 542 bp, Homo sapiens
tgtgttacagttattttagcctcctttgctccttccacggtaaccaagttattgtcctgtgcccaggaagaatgaggtacatagacaactggagagtgagcaagacaaaaaggagctttgttgagtgataaaacagttgagaggaaacccgcagggggagctcctttctgcagccagrgtgtcccaatgagtgttcagctcctaggagagtggagaccctggagtggacagctcctctctgcagctgatcatcctgacatctgctgctctctgcagagaggaggccatggtgtgggtagctcctctctgcagctgatcatcaggacatctgcccagctctggctgatcccagggcttttatgggcctcagagtggaggtagtgcatgctgattggtccattagtggccacgggcaggccagagaaggcacaacaagcccccactctggtctgcagaactggagcccagcccccagccttcaggcactccctggcctgaaggtggggcattactggggacccacccccttccacccaggaaac

SEQ ID NO: 160833 - DNA, 482 bp, Homo sapiens
tttgttaatttgtagaatacttgaagtaccattttaaatatatttgataaattacattttactagagatctgacacaagagaatattagctataagctgcatattaagtatgtacatattaatctaagcataatcactgtaagttctgacccattcatgggcaaggaatgaagttactgctttttgaacaaaatacaatattttgcaagtaaggtagaaggtaaggtagtataattaccaayatgtatctcacatagtggcatggtttggttgtggccccacccaaatctcatcttgaattgtagctcccattatccacaagtgtcatgggaaggaaccagtgggaggtaactgaatcatgggggtggattttccccacgctattctcatgacagtgaataagtctcatgagatctgatggttttataaagggcagttttcctgcacacattcttctgcctgcttccatgtaagacgcgtct

SEQ ID NO: 160834 - DNA, 543 bp, Homo sapiens
ctgtgtctatcctatgtcaagatcatactcttgattactgtggttttgtagtaagttatacaattggaaaatgtaagtcctttaaatgtgttattcttcttctaaggttgttttggaaattctgggcccttgaatttcagaatgacttttagatttggcttgcgaatttctgcaagaacaaaaaaagcactttgatcatgatagggattgcactgaaatcatagatcaattaagagatatattgccatcttaatgatattaaatctcctaatccctgaacataagattttttcccattcatttatattttatttrattttttaaaataatgttctctagttcgccgtgtctaagactttcacttattttgttaaacttattctttagtattttgttttttggggtgttattgtaaatgtaattaatcacttggtttaatttttggtttgtgaatcactaatgtatagtaatacaattgaattgtggatgtcgatcttagactctgcaacctcgatggtcttaattatcacttttagtaataat

SEQ ID NO: 160835 - DNA, 543 bp, Homo sapiens
ctgtgtctatcctatgtcaagatcatactcttgattactgtggttttgtagtaagttatacaattggaaaatgtaagtcctttaaatgtgttattcttcttctaaggttgttttggaaattctgggcccttgaatttcagaatgacttttagatttggcttgcgaatttctgcaagaacaaaaaaagcactttgatcatgatagggattgcactgaaatcatagatcaattaagagatatattgccatcttaatgatattaaatctcctaatccctgaacataagattttttcccattcatttatattttatttgattttttaaaataatgttctctagttcgccgtgtctaagactttcacttattttgttaaayttattctttagtattttgttttttggggtgttattgtaaatgtaattaatcacttggtttaatttttggtttgtgaatcactaatgtatagtaatacaattgaattgtggatgtcgatcttagactctgcaacctcgatggtcttaattatcacttttagtaataat

SEQ ID NO: 160836 - DNA, 577 bp, Homo sapiens
gcttctgtaagagattagcacttacatcaatagactgagtgagcaggaactccctcatcaatgcagatgagcattatccaatctgttgaggatcccaaaaaastggaaaaaataaagcagaagaagagattaaaaagttattccctttactggagctgggacattcaacttctcctaacaagtttatgggacttgtcaggctccataattaagtaagccaatcccttataacaactttaaaaatgatctctgtatatatcatattggttatgtttatcgagagaaccttaactaatacacttagttcaatgattaaaatgtcaatatcatccagaaacaccctcacagatatatctgggataatttttggctaaatatccagggaccccttggcccaatcaagttgttacataatcgacacagtatatgttagccttggtctctttttttaagattccacacataaaacattcacatatgcacatactgtacatatagacattagtaaatatcagatatttactaataatctagtgataattttgtaagagacatggaggaaaacatatataataat

SEQ ID NO: 160837 - DNA, 564 bp, Homo sapiens
cagctaatttttctatttttggtagatagagatgaagtttcaccatgttggccaggctggtctcaaactccygacctcaggtgacctgcccaccttggcctcccaaagtgctgggattacaggcatgagccaatgcactggactaatttattaaccttttaatccattaacccatgaagtcactaggcagatccctcatgattcagtcacctcccaaatacttcacttaacactgccacattagaaatcaagtctcaacatgagttttggagggaacattcataacattcagtactgtatcatacaaagtatatgggcttggccatcagactgcagtatattcaagtcctgtgcctgccatgggttagcagtcctcagtttgagcaatgttcttgaaaattctgaacatcagtattctcatttgtaatggagaaaaatactagtgaatttaatgaggcttaaaatagtagacatatatgtgggtgctcaatacacatttattcaaccacacccttctcatatccctttccaccattggcttaaatcaaatttaatttgtaagta

SEQ ID NO: 160838 - DNA, 564 bp, Homo sapiens
cagctaatttttctatttttggtagatagagatgaagtttcaccatgttggccaggctggtctcaaactcctgacctcaggtgacctgcccaccttggcctcccaaagtgctgggattacaggcatgagccaatgcactggactaatttattaaccttttaatccattaacccatgaagtcactaggcagatccctcatgattcagtcacctcccaaatacttcacttaacactgccacattagaaatcaagtctcaacatgagttttggagggaacattcataacattcagtactgtatcatacaaagtatatgggcttggccatcagactgcagtatattcaagtcctgtgcctgccatgggttagcmgtcctcagtttgagcaatgttcttgaaaattctgaacatcagtattctcatttgtaatggagaaaaatactagtgaatttaatgaggcttaaaatagtagacatatatgtgggtgctcaatacacatttattcaaccacacccttctcatatccctttccaccattggcttaaatcaaatttaatttgtaagta

SEQ ID NO: 160839 - DNA, 547 bp, Homo sapiens
tatcaattagtaagagacaggagtagaaatgttcaatgcaaaattaggctttgtcatgtttcctgcagtctaaacagatgtgtttcatatgttaaacatggtatataattccatatcctttattacaaatctatttgtcttggtattcaccttcaatttttgaaagatatttttacagactatggtttatagattgacatttttttttttcttttcaggattctaaaratgcttcttggcagtctcctaccttgtattgttccagatgagacatctgctgttgtctttgactgctttattcagactgcttttaagttttaacttttatctttggctttgaaaatttttattatgatgtgtcttactgaagttttcttcatgtttttctcatgcttgggatttgttgagcttcttgaatctgcccgtgtgtagagtctgtcgaatctggaaatttgcagccattgtgtcataaaatactttcccttcctctttcaagaatatcagtcacacatagccatttgacattgtcccatagctcatggatgct

SEQ ID NO: 160840 - DNA, 549 bp, Homo sapiens
ttgtgtcaatatattctccattctttctgcagaatcacaayaagtaatattgatgaaatttgctgccaagcttcagagtttgtttgtttacatgtttacttatttttcctggaaccccccacctcctttaattaattaattttgagacaaggtctcattctgttgcccaggttgcagtgcagtggcccaatcatagctcactgcaaccttgaactcccaggctcaagcaatcctcccaccacagcctcctgagtagctagaactcttggtgcacattttgttttccttttttttttttctttatagaagagacttcactttgttgattaggctcttctcaaacttctaggctcaagtaatcctcatgtcttagcctcccaaactgctaggattacaggagtgagccactgcacctggcctgcctagaacgttggatttacagatgatcttatccttacttcagagccgttcaaaaaacaaagctgttataaataaacagcaattatgcatagggtatctttcaataaagacacgtaaagtgatgataat

SEQ ID NO: 160841 - DNA, 482 bp, Homo sapiens
tgtgggttatatttatagatatggaaaatcagttttcattccttgaaacctctctcaaattaattccttatatataccattagagattaaattttttaggytgcataaaaatatgcacatttgtaacccaagggtgttttaatttgcatctgtgcttgttgcagaagcaacactggtaatttgctactattttgtgcagttagctcttaagggctttggaatctttatttttgctcccactttagaatgccctaatcatgcctgcttgcagtagtttcagaattggctcaatactagtgtagaaaacaagggtgactgatcaagcttcattattgcttacatgagcagacaactgaagtgacagaattaggactaatttaaatgaaacatgtgccttgtctcatgtgaagaaaatgtaaggcttactgacatcatgacagttaaaattatctaagggagttgaagctagatctggaaaaaga

SEQ ID NO: 160842 - DNA, 549 bp, Homo sapiens
ttgtgtcaatatattctccattctttctgcagaatcacaacaagtaatattgatgaaatttgctgccaagcttcagagtttgtttgtttacatgtttacttatttttcctggaaccccccacctcctttaattaattaattttgagacaaggtctcattctgytgcccaggttgcagtgcagtggcccaatcatagctcactgcaaccttgaactcccaggctcaagcaatcctcccaccacagcctcctgagtagctagaactcttggtgcacattttgttttccttttttttttttctttatagaagagacttcactttgttgattaggctcttctcaaacttctaggctcaagtaatcctcatgtcttagcctcccaaactgctaggattacaggagtgagccactgcacctggcctgcctagaacgttggatttacagatgatcttatccttacttcagagccgttcaaaaaacaaagctgttataaataaacagcaattatgcatagggtatctttcaataaagacacgtaaagtgatgataat

SEQ ID NO: 160843 - DNA, 559 bp, Homo sapiens
tgaaaagaagctggacttgtttctgtggcttcaagagggagactaggatccaaaagaattttattttcctgccaggtgaggtggctcacacctgtaatcccagcactttggragcccaaggtaggcaaatcacctgacgtcaggagttcaagaccagcctggccaacacagcaaagccccatctcttctaaatatacaaaaattagccagacgtggtgatacgtgcctgtagtcccaactactagggagactgaggcaggagaatcgtttgaacccaagaggcagatgttgcagtgagctaagattgtgccactgtactccagcctgggtgacagagtgagactgtgtctcaaaaaaaaaaaaaaaccagaattttatttttatcaacagaaaaatggataaagaaaatgtgatacatatatacaatgaaatattatttagccataaaaaagaacaaaatcttttatggctaaatattatttggccatattctatgtgtaacatacaatatgtgtaacatacaatatgtgtaacatattgtaacataaaaagattttaa

SEQ ID NO: 160844 - DNA, 559 bp, Homo sapiens
tgaaaagaagctggacttgtttctgtggcttcaagagggagactaggatccaaaagaattttattttcctgccaggtgaggtggctcacacctgtaatcccagcactttggaagcccaaggtaggcaaatcacctgacgtcaggagttcaagaccagcctggccaacacagcaaagccccatctcttctaaatatacaaaaattagccagacgtggtgatacgtgcctgtagtcccaactactagggagactgaggcaggagaatcgtttgaacccaagaggcagakgttgcagtgagctaagattgtgccactgtactccagcctgggtgacagagtgagactgtgtctcaaaaaaaaaaaaaaaccagaattttatttttatcaacagaaaaatggataaagaaaatgtgatacatatatacaatgaaatattatttagccataaaaaagaacaaaatcttttatggctaaatattatttggccatattctatgtgtaacatacaatatgtgtaacatacaatatgtgtaacatattgtaacataaaaagattttaa

SEQ ID NO: 160845 - DNA, 596 bp, Homo sapiens
tttcagtgaagccccaccttcaagccaggaatggcttgaggcctaggggctaggctaccagttctggagtgggaacttatgctgatttttccaggcccacccatggctgcccatggaccaatcagcatgcacttcctcccttctgagaccataaaaaccccagccagactcagacattcttcagggtgacctgmctgctggaaggagctacccacttcgggattcctctacaatcttccagacaactgcctgcagttagaagctacccactttgggtctcctctgtactctttgggatgacctgcctgcagaaaggtcctaatcactttcggtctcctctactctcactgggacaacctgcctgcagataagaggtacctttgggtctcctctacactctttgggatgacctgtctgcagataggaactactcacttcgggtcttctctactttcactgggatgacctgcctggagatatgagttgcccactttgggtctcctctacactcattgggatgatatgcctacagataggagcaacctaccttgggtctcctctctgatgagagctgttctgtcactcaataaagctcc

SEQ ID NO: 160846 - DNA, 575 bp, Homo sapiens
attctagttcccttgctatttctaccacatctgcagttacttcctccattgacgttttgaactgttcaatgtcattcatgaagttggaatcaagttcttcctaattccagttggtgttgacattctgacctcttcccataaatcatgaatgttcttaatggcatctagaatggtgattccagaaggttttcaacgtactttgcccggattccttgtaagaatcactatctatggcagctatggtctgataaaatgtattttttagtaataaatcttgaacaccgacattactccttgatttatgggctgcagaatggatattgcattggcattcatgaaaataacatttccttcyttgtacatccacatcagaggtcttgagttactaggaacattgtgagtaagcaggaatattaaaaatttttttttctgtgaagtagatctcaatagtgggctgaaagtattcagtaaaccatgctgtggaaggatgtgttgtcatccaggcttcattgttatgtttatagagcacaggcagagtagatttaaccagtttttaagggccctaggattttctg

SEQ ID NO: 160847 - DNA, 575 bp, Homo sapiens
attctagttcccttgctatttctaccacatctgcagttacttcctccattgacgttttgaactgttcaatgtcattcatgaagttggaatcaagttcttcctaattccagttggtgttgacattctgacctcttcccataaatcatgaatgttcttaatggcatctagaatggtgattccagaaggttttcaacgtactttgcccggattccttgtaagaatcactatctatggcagctatggtctgataaaatgtattttttagtaataaatcttgaacaccgacattactccttgatttatgggctgcagaatggatattgcattggcattcatgaaaataacatttccttctttgtacatccacatcagaggtcttgagttactaggaacattgtgagtaagcaggaatattaaaaawttttttttctgtgaagtagatctcaatagtgggctgaaagtattcagtaaaccatgctgtggaaggatgtgttgtcatccaggcttcattgttatgtttatagagcacaggcagagtagatttaaccagtttttaagggccctaggattttctg

SEQ ID NO: 160848 - DNA, 575 bp, Homo sapiens
attctagttcccttgctatttctaccacatctgcagttacttcctccattgacgttttgaactgttcaatgtcattcatgaagttggaatcaagttcttcctaattccagttggtgttgacattctgacctcttcccataaatcatgaatgttcttaatggcatctagaatggtgattccagaaggttttcaacgtactttgcccggattccttgtaagaatcactatctatggcagctatggtctgataaaatgtattttttagtaataaatcttgaacaccgacattactccttgatttatgggctgcagaatggatattgcattggcattcatgaaaataacatttccttctttgtacatccacatcagaggtcttgagttactaggaacattgtgagtaagcaggaatattaaaaatwtttttttctgtgaagtagatctcaatagtgggctgaaagtattcagtaaaccatgctgtggaaggatgtgttgtcatccaggcttcattgttatgtttatagagcacaggcagagtagatttaaccagtttttaagggccctaggattttctg

SEQ ID NO: 160849 - DNA, 538 bp, Homo sapiens
ctgaaatagggattaaaacaatttttatttatgtcattttgacataaataatttcaaactggcccatcaytgcaaaacttacaatcattgcagaaggtgaaggggaaactgacacattctacatcactggagcaggaaaaagagagagcaaacaggaaggtgccacacccttttaaacaatgaaatctcatgataactcactccctatcatgagaacaacaaagagaaatctgccctcccgatccaatcacttcccaccatgcccctcctcaaacactgagaattgaaattcaacatgagatttgaatgggaaaacagagccaaatcatatcatgctgtccctggcctctctaaaatctcacacccttctcacatttcaaaacacaattatgcctttcaaacagtccctgaaaatcttaaagccttttggcacaaactcaaaagttcacagtctaaagtctcatatgagacaaggcaaccccctactgcctgtgagcctgtataatcaaaaacaagatagttagttctaagatacagt

SEQ ID NO: 160850 - DNA, 580 bp, Homo sapiens
aattccggtttatctttaccttcagaacttgagtaaatgaagagtgaatggagttttttgctcaggaatatataactctccccacttggtgcaggggagattgtaccttgatgacagaagaaggtattggtggtattgatggccgccacaggctatctggagcaggtgctgccatccagccagctgcagtggggaggtgtcagtgatggcagcaggagcaactgtgggagcagcagtggtggcagtgggacccctgtgtcccacatccctgaagcagctaactatgccacctccaccctcrcacagatgggcaggacttctcccaggcctggggtctttgccatggcctcaactttgctccccgctgtattttggtagcctgaaagcacccagctgaaggcaccaccaggaaaacggggagaagagaaggacagtccccagagccttcccctgagacccccctggagaccacctccctgggagccatcgtgaggggcctggctgagtcacctgatcatcagggagcagtttgttccagcataaaggctggagcagagaagggcccccaagtggagcaggt

SEQ ID NO: 160851 - DNA, 316 bp, Homo sapiens
tacttacattacccggggcctcgagggtgactcatagagattagccctgagcgtcgacccctcggcgccgccactgcacagcgagagaaggggagtcaagagagacgcttgagtcccttgactgtcctcccctacgagctctctgggaagagagccccagacctgcgaactctgggccgctctgcggccgcttgaacacttcgcgggtcttccgccccgcgctagaggrcgcactccgtgacgggaattgcggtctcgaccgccccggcctcaggctttccgggctctgctgcctccagaaaactacaagtcccag

SEQ ID NO: 160852 - DNA, 564 bp, Homo sapiens
aattcaggatgtcatctgaaacaattacttcatttttaaaaagagattgaaggttttatgtgctaggaaagctttcagaattggtcaggaatttaagatattgatcagcctctgcctaaggccttttcttagttactggatcattttgagcaatgattttcaaactttatttttttagtcaagtcttcctttaaattaaatctgtgcagaaatccagtatgtttacagatagaataggtgatgctgctctggttgaagttagatgggatgctcacagttcactccttagctctccttggtggcccctaagacttctcctttgagcagttttaaaaacctttcatctaaaataaataaataaataattttaaaaaacaaataggaaaagaaaagaaaacctttgatctaaggttgcaaaccgtttgtccagtggstggaaaacattttaagtagtttaagaataggttggtaccaaaataagattaaatgtaaattattttaaaattacttgggtaggtgaaatgtttactcttgttctccatttcctacttgcagattattgcg

SEQ ID NO: 160853 - DNA, 435 bp, Homo sapiens
gaatatatactatctccctatccttttacacaataggtaagttgactctatttaatagaaattgaataaaaggagtatttagaaatatatgcaaaatcagtaaaacattcagttttatataaatatgtgactttttcatttcttttaacaggaaaaaattaaagagtacatctaaatatatttatcaaacattatttttgaatggtgaaaacagtgacattaagatttgtgctctaggagaagaatggagcttacacaaaatatatttatgtcaagtaagtattttttctatttgagtaacagggtagtcactgaaactcttaagtcatgttcttcctcattgcacttcacagtaatcttttgcatgaacaccatagtggttaaatcctctcatttgatmagtctgtaagaaaaatggcaaacattgttagtgaa

SEQ ID NO: 160854 - DNA, 402 bp, Homo sapiens
gaagcttgtcttactgttgagaaggtaaagtatagtgagtgaggctggctgacttgcccacggtctcagaactattaagtggtatattcaggattctagrtaattcctagaacactttcctttcatctttgcatgatcagctgcctcaagtctgattccagagctggagttcaagccactgttctatgctgctgcccatctctgaagagaacattgtcctgaatctatgtatcttcttcttttccctttttcataaaaagagaaaggcataggacccaccttttttttcagtttatcctaattctttggttacaaggacaccataattcaaaatgtagcccatgttacattcagaattatcagcataaagggtgaggagacatttggcacaaccaacccctt

SEQ ID NO: 160855 - DNA, 541 bp, Homo sapiens
catgtaatatcacatgttcacaggttttgagaatkaggatgtggatatctttggaatggggcattattcagctgatcactttgaccacgactctttattttggcagcttagtttgggatgcaaactatttaattttaaatatttaatgttcagagctgtgcttcctctgtaggctctaggggaggattcttcctgcccttccccactcctggtggcttcaggcatccctgggcttgtagccgcatcactccagtctctgcttcatctgcatatggccttcccctctgtgtttgtgtctcatcttctgtctcttataacgacaatagtcattggatttagtgcccatcctaattccaggatgagctcatcttcagatccttaattaattacctctgcaaaggtcttgatatccaaataaggtctcattccaggttctgggctttaaaatatatggacttatatttctgggggctactattcaaactactacaattgtatccagtttcttctggaggctctaggggaggatctcttctgcctc

SEQ ID NO: 160856 - DNA, 429 bp, Homo sapiens
cctatcaaattatgaggagttagcacaagcagatgcttttatggggtctttaaagaaatatctactcattcattccatttatgagattattgagagattaaatgagggggagtgtgattcctagagaacagagatcagaaaccagggatccttcatcattaagaagtcttcgacactctcttccaaggatatagtacagcatagaaagtagacaagcctgtcttgggtttcatgattaaattcacatatactgattttatgtcctgctgtaacatttagtccacaaaataggtccataagctactacattggccagtctataatgtgtaacctgatgttagaatattatcttcatttgtgaaatgaggrttaaaaaaagaaaaagaaaaaagataattatctggaaaatgtcgagtatattttatcata

SEQ ID NO: 160857 - DNA, 505 bp, Homo sapiens
ataatacctaatacaatgtatgtaaatgccacataaaatagttgttatattgtaccctttagggaataatgacgagaaaaagtctgtacatattcagtacaracaagaccgtccctaaaaggaccataagcctaaatgtaaacccaaaattataacacttctaaataaaacataggagaaaatcattgtaatattcagataagaaaataatttttttagatttatcaaaaaagttgcaagctataaaagaaaaaagtgatagattagtcattatcaaaatttaaaatttctgcttttcaaatgtcaatatcaagtaaataaacatgtgacctcagtccattagtggagaaaaaaagaaaagaaagaaaaaattaaaatattaaatatgaacttaaaagaaagtttaaaagaaaagaaaaagacaagccgtggagtagaagcaaatagtcatccctctgaactcagaggttctgcatctgcgaattcaatcaactgcagatcaaaa

SEQ ID NO: 160858 - DNA, 604 bp, Homo sapiens
ctccttctaaacagaaacccctgtctctacaagtgtctacttttcctactttctgataaagggaagacaatctaccctgtctgtttaattttttacatgcagcctctctgacacgtggaattgggagactggagtgccaaatccgtttttttcagtgtgtaattttatagctttccccagagcaaaagaggacaagtcaggcaagctgtaaagcagaggggaggaatttcatgggacaattttattatgccatgaaatcaagacagagtttgatgccaatgaccatcttggacaggcaggatgcagagagagatgaagccygtgacctgcagaagcgcacttcgaagaaggcatgctgcaccccagccgttctctttgccctgaatggttcctgccttatgggaccaaggaaacgggtattgctaaaaaggcaaaattggcagcttccaggaaaacttctggaggaatgtactgaggcccctaacaaattaacatacgttgggtggctaaaaataacaagactttattctcccccagttcagaacacccgagcctgagatcaaagcatctcagggccacgattctccagaggctctaggggagg

SEQ ID NO: 160859 - DNA, 427 bp, Homo sapiens
ccccttcctcctgcagccaggacatatattatcttacatacagctgtagactcatgtccacagtgacaycattaaatccacccagtgaggttttctactgtagtgttgactgcatggggatttggtcagcaagtccccataacctccaaatctactggatgtcctcccatgctaaagctcactgacttggaaaactctcaagttgtgaaatagattcatataaaaatggaccctccgctccacatctggaattccataattctgaatgtgtcctccttttcaggcacttccttggaccatgttttgaatgccttgcctgcacagcttacctcttccttggacactgccagtgctaccatatttgagatgatgggtcggtcgtttttgttttgcagtggtagtcagggttctccagagaaacagaaac

SEQ ID NO: 160860 - DNA, 427 bp, Homo sapiens
ccccttcctcctgcagccaggacatatattatcttacatacagctgtagactcatgtccacagtgacatcattaaatccacccagtgaggttttctactgtagtgttgactgcatggrgatttggtcagcaagtccccataacctccaaatctactggatgtcctcccatgctaaagctcactgacttggaaaactctcaagttgtgaaatagattcatataaaaatggaccctccgctccacatctggaattccataattctgaatgtgtcctccttttcaggcacttccttggaccatgttttgaatgccttgcctgcacagcttacctcttccttggacactgccagtgctaccatatttgagatgatgggtcggtcgtttttgttttgcagtggtagtcagggttctccagagaaacagaaac

SEQ ID NO: 160861 - DNA, 449 bp, Homo sapiens
ctcagttgtccagtgttgttctactgattctggtggaacaatagatgaactccagtcaagagttctattctagttgcctctcccctaaggataccagtgttccctttctcttcattaaaattttaattccttatctcatttgtgtttccaaacactcacagattgtcttggtgagtgcagagtaatttgtcattctttcaaggtaatatgcacataaaagccaccttcaacttttttttttttttttttsagacggagtctcgctctgtcgcccaggctggagtgcagtagcgcgatctcagctcactgcaagctccgcctcccgggttcacgccactctcctgcctcagcctcccgagtagctgggactacaggcgtccaccacccccaccccggctaaatttttatatttttagtagagatggagtttcaccgtgttagccaggatg

SEQ ID NO: 160862 - DNA, 610 bp, Homo sapiens
atagtgagatcctgtctccattaaaaaaaaaaaatcaaaaaaattaactgggcatagtggtgcatgcctgtagtcccagctagctgggaggctaaggtgggaggatcactgaagcctgagaggttaaggcttcagtgagcagtgattttgccactgcactccagcctgggaaacagagtagaccttttctcaaaaaatgaataaattaattttaggtactgaattttcaaattawttcaaatactgatcatatttcacttttaaattattaatactaatgacttccattgcagctaaatccttggcatgttcctggcccttggtttgattcatgtcactccagatggggtaataaacagaaaatctgggagtctgagctgaatgtaccaggatgcagaaaggtcttttggttggaagactattattaatattaattggggacagggcattgctttttaactctgtgtgaacacaatgttaaggatttcatacactttatctcatttaattctttagataactctccaatgtgcttgtcaatatttccattgtatggggaaacagaagctcagaaaatttagattacttgtcaaaaaccacacagataatg

SEQ ID NO: 160863 - DNA, 510 bp, Homo sapiens
  misc_feature (1)...(510): n = A,T,C or G
aagcattaatgggtagttgtttagacttaagaaatgcaatactgtcttctagagtggtacatgaaattaggtatttatcccttttaagaaattccacatgtaatgaataaatatgtcagtggggcagttatgatgctttttcaaagaactctttcaagacttctttgcatagtcaaacttcttcacagtcctcttaatagagtcacttctgcattgaaagtggcattgacatctagagacaggaaatcataccagaaggcaatagtagggatggcgtggttgggtaatacgggcaagaagagatgccaccnccatatgtgaccctgaatttgaggctaaaagacaagcccagtggttctctctaattcctatccacatcctactaactgaggccaaagctagcaagacacttcctggtggttagtgctttggaaagagaatggtttcttgctacaycagtggtgactgctgctgttgcaatgacagaatctcatctgaaaatggcttaag

SEQ ID NO: 160864 - DNA, 480 bp, Homo sapiens
taatgctactgtatcagtcattcatccaacaacagtwtgaatggagagtagtctggaaggagaggccagaagggcagcgggaactgaagtagaaggacgaatgcatcagatggaacattgatagcacaaagatacttacaggattcttgagaatagagattctggagaacaaccacaaaaattctatgtattacaaagaataggggataagacaggagtggcaattagataaaacttttaggttgcttcctaattttcatcaccctaattgcatgaaggcccagagtgtaccccaaggtaagcacaatccaaatgtgccttgctagaaaatccccatgtctgttccatccttctatgtctgctgcatcccctgccttgtactctgtcactgtctttctcattagtgagacctgcatctcgccagcctcccttgcaaaggaggcataaagggtgtgctccacatggctctatgtcaggctg

SEQ ID NO: 160865 - DNA, 543 bp, Homo sapiens
  misc_feature (1)...(543): n = A,T,C or G
ttttgcaatattaaacaattcagttattcttaaatttgtacatatttaggttcagatagaacataaatgaagtaggatacaaattctttacaaggatcactggatggacactgagtgctagtatagtaatagctttatttctatgaaaggtttgataagttttaaatagttttcaaaaaataagataaaagttaactttatttaagtacttttmtttaaaactgtacaaaagttaattacaatttatatattttgaatattttagaaaaaatgtgnaaatcacnaaacattaactttgttaaacctcaattttaatttacactttttattaagatacacgcagatatgatatactttggttatagttacgtattatcctcaacctttttagatcattaagaataacgagtaatattttcttaatttctagtcatataaaaatggcagaattaagcctattttaaaaattttaccattatgaaggtatggctgtgtcaagatagaaaactagtacatgttttacttaatcatttattacgttga

SEQ ID NO: 160866 - DNA, 543 bp, Homo sapiens
  misc_feature (1)...(543): n = A,T,C or G
ttttgcaatattaaacaattcagttattcttaaatttgtacatatttaggttcagatagaacataaatgaagtaggatacaaattctttacaaggatcactggatggacactgagtgctagtatagtaatagctttatttctatgaaaggtttgataagttttaaatagttttcaaaaaataagataaaagttaactttatttaagtacttttatttaaaactgtacaaaagttaattacaatttatatattttgaatattttagaaaaaatgtgnaaatcacnaaacattaactttgttaaacctcaattttaatttacactttttattaagatacacgcagatatgatatactttggttatagttaygtattatcctcaacctttttagatcattaagaataacgagtaatattttcttaatttctagtcatataaaaatggcagaattaagcctattttaaaaattttaccattatgaaggtatggctgtgtcaagatagaaaactagtacatgttttacttaatcatttattacgttga

SEQ ID NO: 160867 - DNA, 581 bp, Homo sapiens
gagtttcatttgtaccatttgcctgatgtagtcaaatttctattattttttacctatcaaagacctggttaatattgcagtgcrgcaataagtgagtggaccaatagttttagagacctttaagtttcatagactaagaaaaatgtgaaaatttctgacacatgattttagaaaaaaattaatttggctgaaaggtgaaaatacagaccttaaactatgcttccagacaccacctgtagagatttaatttcagttgaagaagttttgttttgttatgcaaaggtgaaaataaagactaggaaccaaaaaacctagaaatgattcccacatccttatgggttcactcgcaaaattctcccataggtcactctctgcccggaagactgctggctcctgtgtagacacaggaccaataactagatgtttctcttactgcacacataatcaaattatctctaagcataaaaatcaatgttaataatttagaaatacaacccagcaagacatctgatctcaaatagtacacaataaaaacagttccaaaggaccccaaatcaaattgaaacttactaataattatg

SEQ ID NO: 160868 - DNA, 581 bp, Homo sapiens
gagtttcatttgtaccatttgcctgatgtagtcaaatttctattattttttacctatcaaagacctggttaatattgcagtgcagcaataagtgagtggaccaatagttttagagacctttaagtttcatagactaagaaaaatgtgaaaatttctgacacatgattttagaaaaaaattaatttggctgaaaggtgaaaatacagaccttaaactatgcttccagacaccacctgtagagatttaatttcagttgaagaagttttgttttgttaygcaaaggtgaaaataaagactaggaaccaaaaaacctagaaatgattcccacatccttatgggttcactcgcaaaattctcccataggtcactctctgcccggaagactgctggctcctgtgtagacacaggaccaataactagatgtttctcttactgcacacataatcaaattatctctaagcataaaaatcaatgttaataatttagaaatacaacccagcaagacatctgatctcaaatagtacacaataaaaacagttccaaaggaccccaaatcaaattgaaacttactaataattatg

SEQ ID NO: 160869 - DNA, 470 bp, Homo sapiens
aacatctaagacaagtttcctcactgycattggagaagacccaaattctaggaactgggccttatcctccagaacttaaagaaagatatcagtgctaaatagccacattgagtctaggaacactttagtcattaacttatttttggctcccctctgtgtaacggcaacaacagtctttttaagggaaaaacatatttttgtaggtaaaataactatgtactgaaagtattataatcataaactccacatatctgggctctgagtaagtctattagtccattttcacactgctgataaagacgtacctgagactaggcaatttacaaaaaaagaggtttaactggactcacagttccatgtggctggggaggcctcacaatcatggcagaaggcaaggaggagcaagtcacatcttacatggatggcagctcacaaagagagtttgtgcactaaaactcccccttataata

SEQ ID NO: 160870 - DNA, 609 bp, Homo sapiens
atcaatggtaaatcagtctgctaacctatgctattatcattatatacttgtccatttatactttgcttgatttaatttaatttttgaatttatatgcagtaaaatggtctttttttggtatacagttctatgatttttaacacaggtataaacttctgtaacatttaccacaatcagaatacacaacacatccatcatctcaaaagctctctggtgccatccctttgcagttaaaccttccccttcccatagtccctggaaactgctgatctattctccatcactgtgtctttctcttttcaagagtgtctaatctaaatggaatcatgccatatgtaatcttttgagacagtcttctttatctcagtacaatgtctttgagattcatccaagtttttgcaaatatcattakttttttgagtagttttccattttattgatgtaatcccttcagcttatccattcaccagtgggtgaacatttgttttttgttttttttttctccagtttttagcaattattaatagaactgctataaacattctcatcacacttattctgtaaacataagttttcatttctctagggtaaatacccagaaatggaatt

SEQ ID NO: 160871 - DNA, 597 bp, Homo sapiens
ctgtgctctctcttgctcctgttttcgccatgtgacaagcctgctcctcttatgctttccccctgagtaaaagctccctgaggccttcccagaagccaagcaggtgctggtgccatgcttcctttacagcctgcagaaccataagccaattaaatctctttgctttataaattacacagtcttaggtattccttttagcaactcaagaatggcctaacacatgtgataattacaattcttatttcacaggcttattgtgaggatgaaagggtaaacacatgtaccactatgcttgacccacacaaaacactccataactaattactaattattatgaactattcccacttacaggtatgacaggtgtgcagaatttgtcaaagcagagacctatggtttagaactgtcctttgctcattttggctggagtttaacagcaccatctcagctagagggaggaagaacraaacaggtggaaacaactttcctggttatgttgttctatctatattcctggttcctctagtgctagttcacaccagtacaaccctgccaaagatcactcttcccagaatgcactgcttatcaatgccattc

SEQ ID NO: 160872 - DNA, 593 bp, Homo sapiens
aaagggtgtgtgggtgtttacagggtaattacctccaacatactaaccctctacctggtgagtcattaaaggattaaattaagtctcctctatcaaagaataaaggatttgccttttttttttttttaaatccttgagttatcactttggttaaatgaatgacttattttacaatgacctgtgatcctattttgtgatatcaagcattttaaacctttgatatttacaaactctccaaaatcaaatgataaattgtgtctttttctgacctaattaatcctttaagatattaggtttcctaaattccaaaaatgacatacttggcttatttggcataaaaatcatgcagaaagcattgtcaaatatgaaatgtttggctttctttgggctgtatttgtataaatatgttattggtatgtgtttcaaaattatgggaaactcgtataattctgatwtgacttagtgtatgctatcagtaataattataactattatgttaaattattgtgtgccacagagataacaaatttccttgtcaattgtgtctttgactatggctgccctaaaactttttgtcatccatggacaattgt

SEQ ID NO: 160873 - DNA, 501 bp, Homo sapiens
aggtgcgatggttcatgcctgtaatcccagcactttgggaggccgaggcgggcagatcacctgaggttgggagttccagaccagcctgaccaacatggagaaacccccccrtctctactaaaaatacaaaattagctgggcgatggtgcatgcctgtaattccatctactcgggaacctgaggcaggagaattgcttgaacctgggaggcagaggttgcagtgagccaagattgtgccattgcactccagcctgggcaacaagagtgaaactccgtctcaaaaaaaaaaaattttccatattatagaaactcttttacactatattcttcaacctaatttttgaggagagtttattttaataccaaaaccagaaaagaatagtatgagaaataaaaattacaagttaaactcacttacaaatgtgaacagataaattagttctcttgcaaactaattgcagcaatgaatgagaaaaacaaataaatttatcccaggaattc

SEQ ID NO: 160874 - DNA, 514 bp, Homo sapiens
ctcctttatgaagaaaccacaaggcccagatctgtttctgtgcaagttctaagaattcagtaaaagaaaatttccaggccaggtgcgatggttcatgcctgtaatcccagcactttgggaggccgaggcgggcagatcacctgaggttgggagttccagaccagcctgaccaacatggagaaacccccccatctctactaaaaatacaaaattagctgggcgatggtgcatgcctgtaattccatctactcgggaacctgaggcaggagaattgcttgaacctgggaggcagaggttgcagtgagccaagattgtgccattgcactccagcytgggcaacaagagtgaaactccgtctcaaaaaaaaaaaattttccatattatagaaactcttttacactatattcttcaacctaatttttgaggagagtttattttaataccaaaaccagaaaagaatagtatgagaaataaaaattacaagttaaactcacttacaaatgtgaacagataa

SEQ ID NO: 160875 - DNA, 501 bp, Homo sapiens
aggtgcgatggttcatgcctgtaatcccagcactttgggaggccgaggcgggcagatcacctgaggttgggagttccagaccagcctgaccaacatggagaaacccccccatctctactaaaaatacaaaattagctgggcgatggtgcatgcctgtaattccatctactcgggaacctgaggcaggagaattgcttgaacctgggaggcagaggttgcagtgagccaagattgtgccattgcactccagcctgggcaacaagagtgaaactccrtctcaaaaaaaaaaaattttccatattatagaaactcttttacactatattcttcaacctaatttttgaggagagtttattttaataccaaaaccagaaaagaatagtatgagaaataaaaattacaagttaaactcacttacaaatgtgaacagataaattagttctcttgcaaactaattgcagcaatgaatgagaaaaacaaataaatttatcccaggaattc

SEQ ID NO: 160876 - DNA, 505 bp, Homo sapiens
tatcttgttccagttcttacagaaaaagctttcagtttttctgcattcagtatgatgttagctgcggtatgttgagtattttctcaccatacctaatttattgagagttttyaccattacgtgttgttgaattttatcaaatgctttttctgcatctattcagatgatcacatggtttttgtccttcatattattgatgtgatgtattacatttattgatttgcatatattaaactatctttgcattcctgggataaatcctacttgatgctggtgtattatctttttcaatgtgttccctcacatattttgatgctctactgttagatgtttacatgttaataattactatgacttcttaaaaaattgaagaattgttttcagtttgtaatgtccctctttagccctgataactttcctcactctgaagtcatctctgtctgaatttaatataactattcctactttcttttcctaagtgtagcatggtatgtatttctgaatt

SEQ ID NO: 160877 - DNA, 505 bp, Homo sapiens
tatcttgttccagttcttacagaaaaagctttcagtttttctgcattcagtatgatgttagctgcggtatgttgagtattttctcaccatacctaatttattgagagttttcaccattacgwgttgttgaattttatcaaatgctttttctgcatctattcagatgatcacatggtttttgtccttcatattattgatgtgatgtattacatttattgatttgcatatattaaactatctttgcattcctgggataaatcctacttgatgctggtgtattatctttttcaatgtgttccctcacatattttgatgctctactgttagatgtttacatgttaataattactatgacttcttaaaaaattgaagaattgttttcagtttgtaatgtccctctttagccctgataactttcctcactctgaagtcatctctgtctgaatttaatataactattcctactttcttttcctaagtgtagcatggtatgtatttctgaatt

SEQ ID NO: 160878 - DNA, 582 bp, Homo sapiens
gctttgcccaccagtaagagagagtgtcattgaaatggaggaaggtgattaccatttgggcagatgccttggtaatctcaarctttcaaaagagaatatcaacactacctcaagtgattatttgttaagtcaagtggcttgttccccattaggaagcagattcagtgcactcaagctactcatctggggcacacagccttgagctcattgctactcagaatttattaaaattctattgagctaacccacacttcaggggaaagactgctatctttccctgcctgaagatacttcctcatctctaagtcaaaagaaatcagacatctaggtagctaggccttgtcacactggccatgagaatacttactctcattctagttcactttagtgtgatagtacatacatctaatgagtatcatatgaaaaataaaaaagctgtgaacacattaacggagcttatgtaaatgatgctgtcaaggataattttatgtaccgcatgcagtgattatctctgagaggaagtcctcttcggtgctcataagaaattagttgtatgtcttctgaaaatttagtttattttca

SEQ ID NO: 160879 - DNA, 582 bp, Homo sapiens
gctttgcccaccagtaagagagagtgtcattgaaatggaggaaggtgattaccatttgggcagatgccttggtaatctcaagctttcaaaagagaatatcaacactacctcaagtgattatttgttaagtcaagtggcttgttccccattaggaagcagattcagtgcactcaagctactcatctggggcacacagccttgagctcattgctactcagaatttattaaaattctattgagctaayccacacttcaggggaaagactgctatctttccctgcctgaagatacttcctcatctctaagtcaaaagaaatcagacatctaggtagctaggccttgtcacactggccatgagaatacttactctcattctagttcactttagtgtgatagtacatacatctaatgagtatcatatgaaaaataaaaaagctgtgaacacattaacggagcttatgtaaatgatgctgtcaaggataattttatgtaccgcatgcagtgattatctctgagaggaagtcctcttcggtgctcataagaaattagttgtatgtcttctgaaaatttagtttattttca

SEQ ID NO: 160880 - DNA, 582 bp, Homo sapiens
gctttgcccaccagtaagagagagtgtcattgaaatggaggaaggtgattaccatttgggcagatgccttggtaatctcaagctttcaaaagagaatatcaacactacctcaagtgattatttgttaagtcaagtggcttgttccccattaggaagcagattcagtgcactcaagctactcatctggggcacacagccttgagctcattgctactcagaatttattaaaattctattgagctaacccacacttcaggggaaagactgctatctttccctgcctgaagatacttcctcatctctaagtcaaaagaaatcagacatctaggtagctaggccttgtcacactggccatgagaatacttactctcattctagttcactttagtgtgatagyacatacatctaatgagtatcatatgaaaaataaaaaagctgtgaacacattaacggagcttatgtaaatgatgctgtcaaggataattttatgtaccgcatgcagtgattatctctgagaggaagtcctcttcggtgctcataagaaattagttgtatgtcttctgaaaatttagtttattttca

SEQ ID NO: 160881 - DNA, 505 bp, Homo sapiens
tatcttgttccagttcttacagaaaaagctttcagtttttctgcattcagtatgatgttagctgcggtatgttgagtattttctcaccatacctaatttattgagagttttcaccattacgtgttgttgaattttatcaaatgctttttctgcatctattcagatgatcacatggtttttgtccttcatattattgatgtgatgtattacatttattgatttgcatatattaaactatctttgcattcctgggataaatcctacttgatgctggtgtattatctttttcaatgtgttccctcacatattttgatgctctactgttagatgtttacatgttaataattactatgacttcttaaaaaattgaagaattgttttcagtttgtaatgyccctctttagccctgataactttcctcactctgaagtcatctctgtctgaatttaatataactattcctactttcttttcctaagtgtagcatggtatgtatttctgaatt

SEQ ID NO: 160882 - DNA, 416 bp, Homo sapiens
tttgggccaggcatggtggctcacacctgtaactctagcactttcggaggctgaggtgggtggatcacctgagttcaggagtttgagaccagcctggccaacacggtgaaaccccgtctgtactaaaaatacaaaaaattagccgggcatggtggtggacacctataatcccagctacttgggaggctgagttaggagaatcgcttgaacccrgagagcagaggttgcagtgggccaagattgcgtcacttcactccagcctgggtaaaagagcgaaatccgtctcaaataattaaaataaacaaactacgtctagaggttcctcaagaaactcataatagcagctactcatgtgatccagcaatcccactggtgagtacacacccaagagaaagctattcagcgtactgacgaaa

SEQ ID NO: 160883 - DNA, 575 bp, Homo sapiens
tcctgcatcaatcagtggacttggtgggaacggatcaataaatccccaaatcaagtgacatacacactgatgttagaaatgacctgagctccagaagatactcaagaaattctaggctgcagtaggataaatggggagagcatgtgattatctgaaatgtgcctctggaggggacatgaaaaaatagaccaggataactgaagtcattagcctgtgttcaaaatgttcctcgaatagaaagaaaaaataaaaaccatgggattgataaagaaacttatactaaccaaaagaataaagagaggaaaggatatgtcagtcttcaagacagatatacacatgtcacaacttaaatccaaaygtctatattcatatctacacaaggaagacaagtttagaatgaggatcttgtttacacgtcacttctttaggcaaatgactactttttttaagcaaaaggattttcttgccttcaaaaatgtttcagtgccatggagagaatgtaaactgtgtttgaatttccataacctctaaattttatggcagggacccagatcctattaacagttttctgtttc

SEQ ID NO: 160884 - DNA, 556 bp, Homo sapiens
aaagaaacaccacaagcaaaacaaatccagagaactgaggaaattatccaataacttaggtaagtgttgttcagaggccttgctttaagtggcgcaatcttttctttgaacacccagacccctctgataaaagtttctcttcctaccccttctaacttcatggatttaatcttagccacctcaagtgctccagacccttcagctttcttttctctgaaaagctttaatwaatcacccacctattaggttgggttccctggaagcaggtgctatgatatatatgtcagtgacttattaggaaggtgctcccagaagaaaacaaaaaaggaagagggaaacaagatgggggcaaggaaggagcctgatcccctggaggaagcctgcagagtaagttactcctcagaattaccttgatcttactagaggctaggagttggcctttcaaagccacatccctagcagttattggctaagggccatcatctgggagtagggtggaggtaggacctaaactcccagccagttctgctctctgcacactcacaagaaggcaaag

SEQ ID NO: 160885 - DNA, 556 bp, Homo sapiens
aaagaaacaccacaagcaaaacaaatccagagaactgaggaaattatccaataacttaggtaagtgttgttcagaggccttgctttaagtggcgcaatcttttctttgaacacccagacccctctgataaaagtttctcttcctaccccttctaacttcatggatttaatcttagccacctcaagtgctccagacccttcagctttcttttctctgaaaagctttaataaatcacccacctattaggttgggttccctggaagcaggtgctatgatatatatgtcagtgacttattaggaaggtgctcccagaagaaaacaaaaaaggaagagggaaacaagatgggggcaaggaaggagcctgatcccctggaggaagcctgcagagtaagttactcctcagaattaccttgatcttactagaggctaggagttggcctttcaaagccacatccctagcagttatyggctaagggccatcatctgggagtagggtggaggtaggacctaaactcccagccagttctgctctctgcacactcacaagaaggcaaag

SEQ ID NO: 160886 - DNA, 589 bp, Homo sapiens
attttcccttttacccaagtcttcttttatgtgtttcaaatatgaaactttaggttcataattttctccatcttttgttagatttatccataggcacattacttttatttttgttgttaatggcatcttatttttaatttctgttgtacttactcactgtccatccatagaaaacaatttttrtatattgaccttgtatccagcaaccttagaaactcttatcagctcaaatagtttatgaaacctcttctatctcctatacaaacaataataagtgaagaataatgactgtttcttcctctctagtatttatcttttttcttttctcatcttgctacaatgcctcagagaaggtagattagaaatcgtgatagtgagcatagttttttgtttattgattttaatagaatactattaataatttaccattaacaatgatgtttgctgtagatttttaatagaagtgcttaattaagttccacacttactcaaagttttctaggagtatttcctaataaacatagttttgaatagtataaatggtttttattcatttattggaattatcataaactttttttattttaaa

SEQ ID NO: 160887 - DNA, 619 bp, Homo sapiens
ttcttttaaactggtcacataacgaggtcaatacttractccagaggcatgagtcattagtacatcaggctcaggtatcataagaagaaggctcttgctactgcccctggaatcacaccagacaggaaggacagggagctacttttcattgtggcactgagaactgggctcaagacaaatccaccagcacctcaaattttccctttcttgcagtgttagtaaaaatgcatgtcctgtgtcaagacagtctttgggaaatcataaaatgtggtacaaaaacaatatgatgaattcattttgatatctcaccttctacttttagcccataaatatcagcttgtaaacatcccagcatgataaaaatctgtttttgtacttttacaaagtaatctactcaatcagcgatcctggccagctccctgcaaaaaattcatgctctgataaactcaaaagggtgtattggccattaatcctgtagctctgcttgccctttgatatttctgtagcaattctccttctactcatgaggaaatcacccattttactgtgtttactactatatgatcaatttacaggatctgtttctaaccaggtacctcacattatagttatttcctcc

SEQ ID NO: 160888 - DNA, 362 bp, Homo sapiens
taaacactgcgcatcttggcccatcttgccacaagtataatttgctttccaaatttcactctttcattttaatttttcaatacctctgaccaataccaaaaatactggaaggttataaagtcatttacctgaaaactgcagttcccrtcctcctgacaacaacttagcagcagaaggtgccatggaacaaagcaattcagagcaaataccctgcacagggaggcgggctccctggaaaaagggcagaatcaagccagttgttcttcccaagtttcctagtcaatatgtcccccaacttcagcaatgggaagtgagctacagggtagagaaaaggcaggagatttactcagggaaaaaaaaac

SEQ ID NO: 160889 - DNA, 482 bp, Homo sapiens
tggtgagctaaagtgttctgggtcctaaataaaactgaaaggcagtttaggtcacaaggactacaattcccgggcaagtcctggtgctgtgctgggctcagagccaacagacttggggagcacaggacctaatgaaacaccagctggggcaaccaagggactgcttgtgtcactccttccccaactcctggcagtgctgctcacagctctgraagtgactccttcgttctgcttgaggagaggagaggtgaaagcaaagaggactttatcttaaacttggataccagctcagccacaggaaaatttggcacagctaagagtcctaaggcccttattccatgccctagctcctggataacatttctagacatgccctgggccagaagggaacccattgccttgaagggaaggacccaatcctggcagaattcatcacctgctgactagagagcccttgagttctgaataatgagtagtggcca

SEQ ID NO: 160890 - DNA, 612 bp, Homo sapiens
tcttttctgcttacgtaaaggacagggaatagtaagagaacttcgtcttacagcttgggcactagctcagccacagtggggtacagcagtatgcaggttcctagagtccctgattctaggcctcagctcatttctggacctccctggggccaacagggagctcacttccctgaagggagagactgaggactcacagcattcaccacaatctgactgaagagactttgggccttaagtgaacattgacagtttccaggcagtaatcaccatgggtccagggcagtggtggccacagagagagactcttctgcctgaaaaaagtaaagggaaaaatggtgagggaagagtaggaaggacttcgtcttgcagcttgggtgccagctcagctgcagtagaatagatcaccagctagattcctaaggttcccaactctaggctctggccccttgatggcatctctaaacttgcctaggaactgggaaactcatcaccctgaaaggaaggacacagsctggctggatttactgccttctaattgtagagtcattgggccttgagtgaatatgggcagtagccaggaagtggtcaccacaggccttgggcaagatccag

SEQ ID NO: 160891 - DNA, 435 bp, Homo sapiens
tgttggcccttttacattaattatggacatataagatgaattaatcaaattctgctgtatttgctattaaggtcaattgtgtggggaaaaaaagtcactctgcagggtttacagtaggatgcagcagagaggattgtrtaaaaaaatcaaaggttttaacaatgattttatttttaaataaaccctgaacccgttgtctggatgaagcctcactagtagtctgcatgaacaccaccattttggagattcaagttaactggcagagatagtttacagtgaagcttcaaggcctcaagtttcagggccctttctttgcatgggctgtgggagaggagtttgcaaggtattcaatggccatatgtttttgtaaatttgacaaaaagatttttacctcaatcagtttagactgacatgtgccttttttcatcagacttc

SEQ ID NO: 160892 - DNA, 580 bp, Homo sapiens
tctttctttttgtttctgagacagagtctcactgtgttgccaggctggagtgcagtggaatgatctcggctcactgcaacctccacctcctggttcaagcaattcttccacctcagcctcccgagtagctgggactacaggcatatgccaccatgcccagctaatttttgtatttttagtagagatggggtttcaccacgttggccaggatggtctcgatctcttgacctcgtgatccaccagcctcggccccctaaagggctaggattacaggcatgagccaccacgccaagcgttgatttctttatctataaaatagagatcgaaatgctgtgatgattaaataaaataaggaatatcaagttctgagcacagtctggtgcataacatgtgctcgataaattttccatgatgatcattgtsctgttatctattttattattttacaactcttatctgttctcatgatgattcctccacctactgggaccatgaacagtaagctgtctgtgttcagtcaatacctagctcaatgcttagtatttggggtccttaataactatttgaatgaatgaacaaa

SEQ ID NO: 160893 - DNA, 648 bp, Homo sapiens
ggcttgtgctgttaatgatgtttttgcatcagtaaaatacataaaaactgtagttcaatatgattgatgatcctaccagctgaaaaatactaatgcaggtgggtttttaaatatttaatgagttataatcttaatctggtgtttctctgccaaacctcatgcctttcaggtatattttatcaagttactcttaatgaggagccagaaattagatagccatacaactcatgtacctttgaatatattttggcttgtgtttggctgaaatccatgaaggtggtttgataytgcctaattctggagacatctgtgtctgataaagcactctggtcagtgttaaggtattttttcaacatatggcctttggcccaaagttctcaggtttatagcagggctgctggtggagtcaaaccctcagggacactctgagtgactcacctgtatttagcagtagtaatattttagagtatgtaaaaatctacaagggtgtctgtcaatggaaggcccttcttgcgattcaggatgagatctgttttaataaaaccaaatttttgaatatgacctaatcatgaatatagactgaatatagcctccccatattgagtcttctgaatcattttgaagaaggtgcttataaagatacaaatc

SEQ ID NO: 160894 - DNA, 648 bp, Homo sapiens
ggcttgtgctgttaatgatgtttttgcatcagtaaaatacataaaaactgtagttcaatatgattgatgatcctaccagctgaaaaatactaatgcaggtgggtttttaaatatttaatgagttataatcttaatctggtgtttctctgccaaacctcatgcctttcaggtatattttatcaagttactcttaatgaggagccagaaattagatagccatacaactcatgtacctttgaatatattttggcttgtgtttggctgaaatccatgaaggtggtttgatattgcctaattctggagacatctgtgtctgataaagcactctggtcagtgttaaggtattttttcaacatatggcctttggcccaawgttctcaggtttatagcagggctgctggtggagtcaaaccctcagggacactctgagtgactcacctgtatttagcagtagtaatattttagagtatgtaaaaatctacaagggtgtctgtcaatggaaggcccttcttgcgattcaggatgagatctgttttaataaaaccaaatttttgaatatgacctaatcatgaatatagactgaatatagcctccccatattgagtcttctgaatcattttgaagaaggtgcttataaagatacaaatc

SEQ ID NO: 160895 - DNA, 477 bp, Homo sapiens
aacacactctcttgcctgccaccatgtaagacgtgcctttgctccttgtccgccttccaccatgattgtgaggcctccacagccatgtggaactgtgagtccattaaacatctttttctttataaattrcccagtctcagttatgtctttattagcagcatgagaacagactaatacatctatttacaacagaatatgaactcaaactggtgtgctattgttctctttttacactgtaaaagaaattttgacatcagcaagtagcatttatttattttgtaacaaaggatccctctcctgattcctgcagttactccacttctgcaggtctgcctccgacaatatgtgtggcagagattgtatcctctcacatgtgtgcagtgattgtattctctcacatcagcaaacacttcctgcatgtttactatgtaacaggcactataataactgttttgtatagatttttccattagatct

SEQ ID NO: 160896 - DNA, 457 bp, Homo sapiens
gcctgccaccatgtaagacgtgcctttgctccttgtccgccttccaccatgattgtgaggcctccacagccatgtggaactgtgagtccattaaacatctttttctttataaattacccagtctcagttatgtctttattagcagcatgagaacagactaatacatctatttacaacagaatatgaactcaaactggtgtgctattgttctctttttacactgtaaaagaaattttgacatcagcaagtagcatttatttattttgtaacaaaggatccctctcctgattcctgcagttactccacttctgcaggtctgcctccgacaatatgtgtggcagagattgtatcctctcacrtgtgtgcagtgattgtattctctcacatcagcaaacacttcctgcatgtttactatgtaacaggcactataataactgttttgtatagatttttccat

SEQ ID NO: 160897 - DNA, 477 bp, Homo sapiens
aacacactctcttgcctgccaccatgtaagacgtgcctttgctccttgtccgccttccaccatgattgtgaggcctccacagccatgtggaactgtgagtccattaaacatctttttctttataaattacccagtctcagttatgtctttattagcagcatgagaacagactaatacatctatttacaacagaatatgaactcaaactggtgtgctattgttctctttttacactgtaaaagaaattttgacatcagcaagtagcatttatttattttgtaacaaaggatccctctcctgattcctgcagttactccacttctgcaggtctgcctccgacaatatgtgtggcagagattgtatcctctcacatgtgtgcagtgattgtattctstcacatcagcaaacacttcctgcatgtttactatgtaacaggcactataataactgttttgtatagatttttccattagatct

SEQ ID NO: 160898 - DNA, 477 bp, Homo sapiens
aacacactctcttgcctgccaccatgtaagacgtgcctttgctccttgtccgccttccaccatgattgtgaggcctccacagccatgtggaactgtgagtccattaaacatctttttctttataaattacccagtctcagttatgtctttattagcagcatgagaacagactaatacatctatttacaacagaatatgaactcaaactggtgtgctattgttctctttttacactgtaaaagaaattttgacatcagcaagtagcatttatttattttgtaacaaaggatccctctcctgattcctgcagttactccacttctgcaggtctgcctccgacaatatgtgtggcagagattgtatcctctcacatgtgtgcagtgattgtattctctcacatcagcaaacacttcctgcatgtttactatgtaacasgcactataataactgttttgtatagatttttccattagatct

SEQ ID NO: 160899 - DNA, 351 bp, Homo sapiens
ttgacccattttattgatgaggaaatggagacacagagagtttaggtaacttgtcctaagtcacacagatagtgagtggtagagatgagattgaacctgagcagtctamtataagagcccacattcttaactaccaccactttcctcccactacaaatccaccacaaattaacagtggcccctatgtacttcctagaaaggaggagggaaatttgagaaaaatgacagagtctgaaggtcagagtggaaagacctcaaagtttattgaatccagcccctctttgctataactaaagcaaaagaggaatagggatactcatttatctgttcgcatccacctagccgtcatgg

SEQ ID NO: 160900 - DNA, 321 bp, Homo sapiens
ggtatacgacttatagggatgaaggcccattaaagattcatgttctatagacaaatttccctgcagtcctttatttaatttcacccggtgtatctagggaattgacgaatgtcactgtaaacacagaaggttcaggactccaattgtgggaaagaaaaaaatcattattgatgagaagttggargaactgagcctcaaattgcatagtaacaccccagtgttttcaacttccttacgtcaactaaatttgtgatattatttatatttaaagccttccttggtgaggatgcagatttcctgggttgaggtatagaggcagtt

SEQ ID NO: 160901 - DNA, 464 bp, Homo sapiens
gaattcaaattcttcagcaacagctgtcaaattgaatgtccgtggtatattggacaagggctagagtggctcaaaaatgcctgcttataaacatttatcagatgaattgctctgaattttctacttaccaaagataattgaatttattttagtgtggcttaaatatagtagacatcttcaataatgacagaaacagatggtttatatggtgtaatttcagagctatggaaaggtcctctgagtcttttaaaaaaacaactcctttcccagtatcccagtgtgcctaaaattygaccactactatgttgttttgattgtctctttgaggaggctgagctgaagataaattttaatgtagggggagtaggtagagaaagtgtaggacacttagaacatagtaggcactcagtaattgttgcccaagtaattgaatattttaaatataaatcaaggtacaaagtgct

SEQ ID NO: 160902 - DNA, 577 bp, Homo sapiens
atagtagacatcttcaataatgacagaaacagatggtttatatggtgtaatttcagagctatggaaaggtcctctgagtcttttaaaaaaacaactcctttcccagtatcccagtgtgcctaaaatttgaccactactatgttgttttgattgtctctttgaggaggctgagctgaagataaattttaatgtagggggagtaggtagagaaagtgtaggacacttagaacatagtaggcactcagtaattgttgcccaagtaattgaatattttaaatataaatcaaggtacaaagtgctataaaacagggaaagaattcttactgcagaggggggaagtttcataaaaatgtgacacttcaagcattgatgcatgggttgagtattaacaggcagaaactaaggtggaagagctttctaaagagaggaaatgttgcaagcttgggtgaactagtgtaaaagcaagacataatttacataaagcaatggttctcaaagtgcggtccaaggatttcaggggttctccacaacattttcagggcatccacgagataaamataaactctttttataataa

SEQ ID NO: 160903 - DNA, 557 bp, Homo sapiens
gtagctttgaactcctaggctctctcagcctcccctatagctaggaccacaggtgggggccatcatgcttggctaatttgtgtgtgtgtgtgtgtgtgtgtgtgtgtgtgtgtgtgtgtgtgtaggcacaaggtctcactgtgttgcccaggttrgtttcaaactctgggtctcaaccaatcctcccgcctcagcctcccaaagtactgagattacaggtgtgagccattgcatcctgccatggctttttgaaacctgtttgtactgaaacaatattgatcctctagcctctgcagtctcctaatgctatttatttaatgctatttacatgattactcataagccacatcacccattgtgccacctagggatactggcttccagtgaccctcgaagttgttactgtatttatttgattatgaacataaattccagtcttacccaaagtatacaggaaaatgtgaacaatgatttatatgctggtcaggttaaatttaccatttgttactttatagcctaagtacagaacaacatacctaccatctatttctcctctt

SEQ ID NO: 160904 - DNA, 477 bp, Homo sapiens
gtgaaactccatctgtactaaaaattaaaaaaaaaaaattagccaggcatggtggcaggcgcctgtagtcccagctacttgggaggctgggataggagaattgcttgaacccaggaggcagaggttgcagtgagctgagatcatgccactacactccaacctgggcgatggagtgagactgcatctcaaaaaaaaaaawtttttttttcatagatattatatgatgacatgtttcagatttaataaacttgtattatccctttacagaaaaatattttctattacaatgggccattttttaaatgccattatgaggttatacaaataatcattttggtagtaatttttaataacacttctaaagttaactatttaaaaaataatatttattattattgttattttgtttatactgggaagtgtaatatttattgatacaaatttaaatgcttatcagtttcagatatgttactatgt

SEQ ID NO: 160905 - DNA, 479 bp, Homo sapiens
gaggctaaggtgggaggattgcttgagcctgggaagttgaggctgcagtgagccacgatggcatcactgcatttcaccgggacgacagagtgagagcatgtttctacatatacattgaattaaataaaaaaataacaacggctctggtctctggtgcttgacgtgtagcgtttgccaatttctgtggtgtaaacatttctgtcgtggtctatttcaagccaccagcaggaccccctctaacagacaaaattcaagtggtaggagctggctccagtgatttgtccactagtgacactcagagagcaagtgacacgtcagcagtgcctctcttctccaaattcctataaccctcttgactayacctctggggcctcagtgcatcctctgggtgcctcagtcctgggtgggtgtctcctctttcctctagacacagcctccttcgctcctattctcaggccccgtggtcagggctcaagctt

SEQ ID NO: 160906 - DNA, 438 bp, Homo sapiens
cacaagtgccctgtggacctgagtcactccagcaggtacctatccaccccaaaaaacagaaacatggagcaggagctcagagaacggccaaaaacagcttgcctgaggggcctgggtctgccagcagcacccattagagaactagggggtcatatacaccccactgtgggtgggggctgaggcttcttcctagagaagacccaggtccagagctggcgatgccccagrccactgggctcagcagccccttcctctcttcattgcaaacccttctgaaaatgactagggggcctggagccctgtagcagctgagaggcgagatgtcaacccagggaggtctcactaagtaagataagccatgagcttccttggcttctcggagtcctggggttcattacctggagcccgcatgtggacttggcagtggggagtccctga

SEQ ID NO: 160907 - DNA, 551 bp, Homo sapiens
gaggtaggtgctagctgagaccctattctttttttttttttttcttttgagatggagtctcactctgtcgtccaggctggagtgcagtggtgcaatctcggctcactgcaactctgcctcctgggttcaagcgattctcctgcctcagcctcctgagtagctgggattacaggcacgcaccaccatgmccagctaatttttgtatttttagtagacatggggtttcaccatgttgaccaggctggtcttgaactcctgacttcaggtgatccgtctgccttgtcctcccaaagtgttgggattacaggcgtgagtcattgcgcccagccctgagcccctattcttatacttgagaatgtacattacttattggtagattggcacctgttttataaaagaacaagttaaagaataaatagacaggggatgtgtggtggaaagagtccagtgacctgtctggagagcccgcatcaaccacatgttcagactgggggcagaggcctctccggtgcagaatcctggggtttgttttctcctcagagccaaggggt

SEQ ID NO: 160908 - DNA, 452 bp, Homo sapiens
catggtgaaaccccatctctactaaaaatacaaaaattacctaggtgtggtggcacatgcctgtaaccccagctactcgggaggctgaggcaagagaatcgcttgaacccaggaggcggagattgcagtgagctgagattgttccaccctactccagcctaggtgacagagcaagactcactctcttaaaaaaaaaaaaaaaaaaaaaaaggtggatccttccttcctctcatyttttgcttaagttacagccaatactggaatacaatttcaccagcatctgcatagaatcaactataagtagaatcgctgcaccatagggcacttgcatttgtaattttgagatttccaaatttttctccacaaaggttgtgccgatttatattgccaccaataatgggagaccaccattcttttccaacactctgaaacatgacaaaatttcagtgcca

SEQ ID NO: 160909 - DNA, 514 bp, Homo sapiens
tgtggccaccatagcccaagaggcccccgctctgtgccaacatggcccaaatgttgtggaaagagcagagctgggccctgctctcagcatccagggtgtgaggagggaggagaggctgagaaagaaagaaaagcaggtttggggttcccctgaacagggtagatagaggccgtgagtacacagaccaggtgtcctgaacagccccgccccctcacctttcggcctcaggccctttcaggccagcrtcattaggagagggccctccctcctggagagctcctgcagggctcctctccaggtttcaacatcagccctttctggtcttgcctgtcacacaatttaccaggctgactcagggctctgccggtcctgctggagctccaggaggctgcacagccaccttctgccctgcccagaaggcgggctttgccatctctaagccaggaccctcttgcctcagcggggtgggtgttaaatccaacagtacagatcagccccctgtgggctaagtccc

SEQ ID NO: 160910 - DNA, 514 bp, Homo sapiens
tgtggccaccatagcccaagaggcccccgctctgtgccaacatggcccaaatgttgtggaaagagcagagctgggccctgctctcagcatccagggtgtgaggagggaggagaggctgagaaagaaagaaaagcaggtttggggttcccctgaacagggtagatagaggccgtgagtacacagaccaggtgtcctgaacagccccgccccctcacctttcggcctcaggccctttcaggccagcgtcattaggagagggccctccctcctggagagctcctgcagggctcctctccaggtttcaacatcagccctttctggtcttgcctgtcacacaatttacsaggctgactcagggctctgccggtcctgctggagctccaggaggctgcacagccaccttctgccctgcccagaaggcgggctttgccatctctaagccaggaccctcttgcctcagcggggtgggtgttaaatccaacagtacagatcagccccctgtgggctaagtccc

SEQ ID NO: 160911 - DNA, 606 bp, Homo sapiens
attggggtatatgaaaaaatatagcaaattaaaatagggtattttgcatttacatgtgagcctgcaaatcgaaagctagtaagttagtaagtaagataattagaagcataaagaagagaatatttctctttggaaggatcagagaagtttkcacaaagaagggtatttttaatttaggcctttgatggtaattaatactttcccaggaggaattcaccactttttgtagaaaagtggcctgaagttgctatatctgtctggaactgcagcgtccaggtcagagaggacatagtcccacatacataagggtagatgagtgtagaaaggcagagagaaatcaatgctttgagaatcttgtaacaaaaaatatagcaattattttgagtttttccttgttcagtctaaagtaaaatgttatttttattttgtaattcgatcatctcctttgttttactgataggagtttttaaagaagtaattaggggattacaaaaaaagtgcttgccaaagaagatggtaaaacaagggtcagtatccataaaatgaatataaatctgtgcagcttcatcttagtgtagcattgtaattatttttcataatgtgcat

SEQ ID NO: 160912 - DNA, 614 bp, Homo sapiens
ccctctctacctcattcattcgccacatcacagccggagttgtcattctaaaatacaaatttaatgaagatttttccatacttaaatctgataatggattaccaagcataaattgtaattttactagcaaggctgccaggccatttgcaatctgccccgcctacctgtccaatgttccctctttcttcctcttgcccaacccacccttccctcttytgtagactaccttcagcactccagcgttcactttgttaacattgcttccttcttccattcttacctgaaatacgttttcttccggaaagccttgtctgaccctcagtctgcgattgatgttgtttcagtgtacttacggtaatgttatgcttatcgcattatgtttcctatttattcctgatttccacacattagggagaaagtataagggtaggtgccttgttcaccctttgtcctggtgtcatacttatcacttagaaggtacttagtaaatattgactaaattgatgggataaaaaatgtgaaaagcatgagattattaagacacccaggttcttgctatcaactaactgaaaaggcttgatcaaatcgtaataacttccctgaacctatctcca

SEQ ID NO: 160913 - DNA, 582 bp, Homo sapiens
attttcttacaattttaaataggcttaaacatagctttttgaaatataacaatcccaagcaaaactgtaggagtttttaaatcaaaatcttatttatcattcgttcattggcaggatcagtgaaacattgttagaaaaatataaaaattgggtcaggatgcagtggctcatgcctgtaacccaacacttcggaaggccgaggtgggagggtcacttgaggcacaggagtttcagactagcctggaaaacatagcaagactcctggaaaacatagcaagactctatctctacaaacaataaaaaacaaaagcaacaccaaaaaaccgagcttggtggaatgcacctatagttctagctactcaggaggctgaagcaagaggatggcttgagctcaggagttcgaggccacaatgcgttatgatcgcactactgcactccagcctggtcaacagagcgagactgtctcaaaaaagaaaaatataaaagtggaattgagaagtgttagggccagatggagagaatataagagcgtggtagtgatgggrgagtgaaggaattaaaacaagcagtaaagttctgcta

SEQ ID NO: 160914 - DNA, 543 bp, Homo sapiens
tattgacgttaacatcacatatgtagatatcccaacatgcacatggaactgtgctgagatgtacacaggaaatactagaaaagtcacacatcatctccaacatcagattgaaatgttcctgagcctcttaatgcaaaatctactgtagtagattttggtcgaactttactatatccagcagagtgacatgagttgacaattttgtagcactggttatrtgttgggtacctttaatctctatagtcatcctatacagtaggttttattatcttcattttagggacagggtaacaaaagtacggagagggtatgtgatttacttaattctacagtcatggcagaaagcttaggacaaatgtgagctaaatctcatgtgtgaattcaaatcccatgttcttctgtgtcatgtcatctcttgagaagatgagctgattaatcatttccttttcaccaaaacttgcctatagtcaatgaaaaggatgccttctttatatgtgaaatgtacaaggtaagatattcagaatagttgaagtcttccttgac

SEQ ID NO: 160915 - DNA, 509 bp, Homo sapiens
atttgaacacgactattagttcataagctatagatacatgagcattcctgttttcatgcagaaatttgtctgtagtaaattcaatgaataaagaaggtaaaatcagactgtgaaatctagtgctttgatctgcagtttagaaaaaaaaatgctagaaaattgaatactgtctaagtgaaccttttgtacgtaaacagtcttcgaagtcagcctttcaaagtaaggtcatttttagatatgacaggaagtcaactgagcaataatgaaagaactgttgctttattcaattatagctccattaatggttctttaggtcatattgacttaataagaaggtaggaaggaaaacaacctcaaagtaacaaaggtcctctcagggataatagatgtaaattgcagacaaataagtattgaaatgtcattcctgcttccagttcamcctgccatgcctctgcactggacgtttttatattctatgccatgtgtcccagtgtacaagaatgaaaaaa

SEQ ID NO: 160916 - DNA, 363 bp, Homo sapiens
actttctcttatccagtggtaaagcaattaaaataatattttatagacaggtgcaaaggcaaatggatatgactccacaaatctccatatttttagacctgagttaaaacatgtttgtatacatgtttcaatcagtaataaccaagttgctttccttggggttgagccacagtaatttgggtttaagattgagattagtttagtagaccagtgataaagtagttccaagatttcatgtttcagtttatctcttattatttatgccagcaaagcacatttgtttatgtttatattcttctcttrcaaatatagaacaagtatgatggcactgatatgcatccccgtgttctgctacactgacaa

SEQ ID NO: 160917 - DNA, 563 bp, Homo sapiens
gagacatgtgcagcattgagaggttgcctagaaaataaagaccaggaagayggagagtacttcacctgcagccagttcagttgttgaggaaggaggaacagactttgaatgggttatgaaaaccgagaagatacaagcagacttccgatgctggggccaatgcaaggcagtagagatccgtggagctgggtgcaagtcgttcccagtcatgaggctgtcccagacaagtttccggaaagaagttgtctgcctctgactattatagttccccactgtttgtcctgtgggaggcccagatgagatggagtcttcagcgaactcacctctgtttcagtcacttctccttctttatattcccctcttctaccatcttcctaagcttttttttgtgggaagagtcactcaggtcatacccgactacccatctgattatgctactcccagaaggttacaaaagctggtctttattttaactttgaggttggtacccaaacaaaaattacaccattacatttcagaagttgtctatattgtgaattttagaatgttgatttttctgaatt

SEQ ID NO: 160918 - DNA, 526 bp, Homo sapiens
ggggacgagacatgtgcagcattgagaggttgcctagaaaataaagaccaggaagatggagagtacttcacctgcagccagttcagttgttgaggaaggaggaacagactttgaatgggttatgaaaacygagaagatacaagcagacttccgatgctggggccaatgcaaggcagtagagatccgtggagctgggtgcaagtcgttcccagtcatgaggctgtcccagacaagtttccggaaagaagttgtctgcctctgactattatagttccccactgtttgtcctgtgggaggcccagatgagatggagtcttcagcgaactcacctctgtttcagtcacttctccttctttatattcccctcttctaccatcttcctaagcttttttttgtgggaagagtcactcaggtcatacccgactacccatctgattatgctactcccagaaggttacaaaagctggtctttattttaactttgaggttggtacccaaacaaaaattacaccattacatttcagaa

SEQ ID NO: 160919 - DNA, 563 bp, Homo sapiens
gagacatgtgcagcattgagaggttgcctagaaaataaagaccaggaagatggagagtacttcacctgcagccagttcagttgttgaggaaggaggaacagactttgaatgggttatgaaaaccgagaagatacaagcagacttcmgatgctggggccaatgcaaggcagtagagatccgtggagctgggtgcaagtcgttcccagtcatgaggctgtcccagacaagtttccggaaagaagttgtctgcctctgactattatagttccccactgtttgtcctgtgggaggcccagatgagatggagtcttcagcgaactcacctctgtttcagtcacttctccttctttatattcccctcttctaccatcttcctaagcttttttttgtgggaagagtcactcaggtcatacccgactacccatctgattatgctactcccagaaggttacaaaagctggtctttattttaactttgaggttggtacccaaacaaaaattacaccattacatttcagaagttgtctatattgtgaattttagaatgttgatttttctgaatt

SEQ ID NO: 160920 - DNA, 526 bp, Homo sapiens
ggggacgagacatgtgcagcattgagaggttgcctagaaaataaagaccaggaagatggagagtacttcacctgcagccagttcagttgttgaggaaggaggaacagactttgaatgggttatgaaaaccgagaagatacaagcagacttccgatgctggggccaatgcaaggcagtagagatccgtggagctgggtgcaagtcgttcccagtcatgaggctgtcccagacaagtttccggaaagaagttgtctgcctctgactattatagytccccactgtttgtcctgtgggaggcccagatgagatggagtcttcagcgaactcacctctgtttcagtcacttctccttctttatattcccctcttctaccatcttcctaagcttttttttgtgggaagagtcactcaggtcatacccgactacccatctgattatgctactcccagaaggttacaaaagctggtctttattttaactttgaggttggtacccaaacaaaaattacaccattacatttcagaa

SEQ ID NO: 160921 - DNA, 646 bp, Homo sapiens
tgttacattatctcaaaaatttttctaaaatatttccaatttatttgaactccctgaaatcacaattctttttttactgatttrtttctctgtcatgcttatgagccacacttttttggtgaaaaggggccaatgcattctcactacaatccagagagattagaaaatgtattttctttgcaacatcaaaaagacacaattttggtatgtaagatcaccttagactaaactgtgttgctatggcacagatgatttggagcaagggctaaaaacagttgccgactcatttctcctaaggccgttgaaatacttgtcaacaggaaatgtggagtcttgattagactagtgtaattgtattcccataacataacttctgtgagccaaatttctctcatctgcaagaaatgaagctaaaaatacctaccaggaggattttttttgaagattaaatggtgtaggatatacaaaatacccagtctgtaacaggaactcaaaaatgtttctccatttcttcatatttgtctgagtacacgtgaataaagcccaatttagaaacaactgaaattatttttaaaagatagatactaatattttttgaaagaattttgtgctaactttcttacaaacatctgtgaataaaaatagc

SEQ ID NO: 160922 - DNA, 646 bp, Homo sapiens
tgttacattatctcaaaaatttttctaaaatatttccaatttatttgaactccctgaaatcacaattctttttttactgatttgtttctctgtcatgcttatgagccacacttttttggtgaaaaggggccaatgcattctcactacaatccagagagattagaaaatgtattttctttgcaacatcaaaaagacacaattttggtatgtaagatcaccttagactaaactgtgttgctatggcacagatgatttggagcaagggctaaaaacagttgccgactcatttctcctaaggccgttgaaatacttgtcaacaggaaatgtggagtcttgattagactagtgtaattgtattcccataacataacttctgtgagccaaatttctctcatctgcaagaaatgaagctaaaaatacctaccaggaggattttttttgaagattaaatggtgtaggatatacaaaatacccagtctgtaacaggaactcaaaaatgtttctccatttcttcatatttgtctgagtacacgtgaataaagcccaatttagaaamaactgaaattatttttaaaagatagatactaatattttttgaaagaattttgtgctaactttcttacaaacatctgtgaataaaaatagc

SEQ ID NO: 160923 - DNA, 491 bp, Homo sapiens
catttactcagatccactacctactaatcttaggagatatttgcccttccagtttctcagtgcctagttactctgcaaatggccacaagtacattttgtttcagaatcttactttcacaggctgtaggtaattgtttatttcaagctttaatatgctaaaaaatcaacttcttaaacccactctccagtgcacaggtcaacatattaaatgccaaattctgaatyagacctactgctttgataaatttggcccagttcaacttaatacactgtgttatttgatttgacatccttaagggtgacaagatcttgtaattttctttgatgtacaggctatcttctgtagaaaccttgcatttcccagtctggagtctaagaccagaggcagtgagtgataatgggaatgtatctttacaaaaataaacacctgctggaaataaagtttaagaatatttggagaaaagattcacaattttggctctagctaccaa

SEQ ID NO: 160924 - DNA, 641 bp, Homo sapiens
aaattaaatacattttcacagagagttcaggacatttttccatagacatgctatttgagctgattttttaaaaaacaacattagaaaaaaatggaataacatttaaaacaatggtgcatacttgtgaacttcatgtagctcacagaattagagcaaggatgtaccaagatagagaagttgaagtagaagctgtcaagaaaaacaaagctggtctatgagaggttcatatattacacaaaaataattaggcctttctcctgtacgttttaaacagttcaatawtgtgattagagctataatctagaaacactattgtagtcatgtgtggaggttaaagcatctctgtcgtggatgataatccaccatgttgacttctgtttgaccccagttccaggaaggcctctaaaatttctactttatctactgtttcttgtataagagcacgtacttactgtaaatcctaccattatgtcaaaacaagcttaatcataaattctgctcttagacagattcatgtagcattcttgcctttccctacaattgtcctacactcttctttcctcaggcctatgagctctgggtctaggggataatggtgcagggatccaccatcttgtcttgctgctgccctagatacaaag

SEQ ID NO: 160925 - DNA, 639 bp, Homo sapiens
ctagtcttcatacattgcagatgtgtaaaacaatatgaagatgaaagagtgccctttaaatgtgtctgctggaaagtcactggggatcttagcacagcagtcacagtggaaaggtgagagttgaatcaaggtcctcaaggaggaggagaaatattcaagagaacatgtagaagataactggggtaggaagaataatggccacccaaagaggcccacattttaattaccagaacatgtgcttatcttaagatgcatgagaaggaagagttaaatcttttcatgaaattacatttgccagttagctgaccttgaaatagagtgagtatcctggatcatccaggtaggcacartgtaatcataaggtttcttaaaagtgagagaaggaggaaaaggaggtcaaagtcagaagaagtaactacagaagaatagtctgggagatgtaacattgctagctttgaagatagaaagaggcatggaatgtgagtggtctctagatgtttggaaagagcaaggagatgaatttgcccctcgagatatgagaaagaaatgcagacctgctgacgccttgattttaggccaataaaacctatgttagtcttctaacctacacaactgttaaggtttgtgtggtgttaaggc

SEQ ID NO: 160926 - DNA, 639 bp, Homo sapiens
ctagtcttcatacattgcagatgtgtaaaacaatatgaagatgaaagagtgccctttaaatgtgtctgctggaaagtcactggggatcttagcacagcagtcacagtggaaaggtgagagttgaatcaaggtcctcaaggaggaggagaaatattcaagagaacatgtagaagataactggggtaggaagaataatggccacccaaagaggcccacattttaattaccagaacatgtgcttatcttaagatgcatgagaaggaagagttaaatcttttcatgaaattacatttgccagttagctgaccttgaaatagagtgagtatcctggatcatccaggtaggcacaatgtaatcataaggkttcttaaaagtgagagaaggaggaaaaggaggtcaaagtcagaagaagtaactacagaagaatagtctgggagatgtaacattgctagctttgaagatagaaagaggcatggaatgtgagtggtctctagatgtttggaaagagcaaggagatgaatttgcccctcgagatatgagaaagaaatgcagacctgctgacgccttgattttaggccaataaaacctatgttagtcttctaacctacacaactgttaaggtttgtgtggtgttaaggc

SEQ ID NO: 160927 - DNA, 514 bp, Homo sapiens
gtgaaaactctttaatgaatgtgtgtttacatagttttgacttttattaggcattcatttactttttatttaattttaaaagaagtagaacattcacatggtttcaaaaatctgtaaaaatatacatagtgtaaattatcccatcccgtttttattttcatctcatttgcctagttccaagaaactcctctttacatgtcatcactrtccttattttcttaagtatctttccagagtattgttgtgcttataacaaaaaaactgaattcttttttctttcattatttcttttcatttaattttttaattattatatttaattcttttttaaatttaattttattttaagtcctgggatacatgtgcaggacatgcaggtttgcttcacaggtaaacgtatgccatggtggttttctgcacctatcaatgcattacctaggtattaagctcagcaagcattagctatttatcctgatgctctccctcccgctgctccctggacaggccccacctt

SEQ ID NO: 160928 - DNA, 502 bp, Homo sapiens
ttgtgtgtgtaatgatatcttaatctttaaaaatcaattttcaaactgttcaagtcagcaagaaaaaaaccacaaacaaataaacaaaggaatgaagtcctgatacattctataatatggatgaacctaaaaacattatgctaattgaaaggtcagtcataaaggtgcacattttgtatgattgcatttacatgaaatatccagagtacgcaaatgtctccagacaggaagtagattattggttgctttgtaatattgatagaggcagggaactgggaaaaatggtgagcgattgctaacagatgctggatttcttttttgggtgattcaaaaagtcctaaatttgattgtggtgactgttatacaatatgtgaatatactaaaaaacattgaattgtaatcttaaaatgagtgaatkgtaggccatataaattatatctcaataagtatattatgctttgaaaaaccaaacttgttattctctcaaggaaatatatgccat

SEQ ID NO: 160929 - DNA, 563 bp, Homo sapiens
ccacattttatctgtgaattgacacttgtgctgcttacagtttttagctattgtggataatgctgccataaacatgtatacaaatatctctttgagattctgcttttagttattttgggtatatacccaaaagtggaattgttggatcatatggtaattctatttttaattttttaagaaattgtcatactgatttccacagcagctgtaccattttacattctcactaatggtgaaaaagggttccaatttctccatatcatcatcgacactttttgtttgtttgtttctttttgtttttttttttttttgattttttgttttgtttttaatggccatcctgaaatgtcacgtggtatctcattgtagttttggtttgcatttcccaattgattagtsatgttgagcatcctttcaggtgcttattcgctattcatatattttcttcggagaaatgtctattcaagttccttgcccatttcttaatttagttgtttgttgttttcctgtcattgagttttagaaattcgtaatatattctgaatattagtccttcatcaaaa

SEQ ID NO: 160930 - DNA, 563 bp, Homo sapiens
ccacattttatctgtgaattgacacttgtgctgcttacagtttttagctattgtggataatgctgccataaacatgtatacaaatatctctttgagattctgcttttagttattttgggtatatacccaaaagtggaattgttggatcatatggtaattctatttttaattttttaagaaattgtcatactgatttccacagcagctgtaccattttacattctcactaatggtgaaaaagggttccaatttctccatatcatcatcgacactttttgtttgtttgtttctttttgtttttttttttttttgattttttgttttgtttttaatggccatcctgaaatgtcacgtggtatctcattgtagttttggtttgcatttcccaattgattagtcatgttgagcatcctttcaggtgcttattcgctattcatatattttcttcrgagaaatgtctattcaagttccttgcccatttcttaatttagttgtttgttgttttcctgtcattgagttttagaaattcgtaatatattctgaatattagtccttcatcaaaa

SEQ ID NO: 160931 - DNA, 590 bp, Homo sapiens
ttcccagtttgaaagattactgtgattgctttcctccagtaccatgccaggccttaatggttttaaagattaattgacagcatgtgaaagccaactagctaatggctgcatgtcacctaagtgccctgaagaatgtgtgttcacagcgctcaggtagtgaggactcatgcatttgtttacagtgttttgttcattgctgtgtgtcttctgcatatctgttcctattatatagactgctaactatgtgtcagtagctcctcatagctactttgtaaattaacatttttttatgtttagtagtaagaatcttacctataccaattaaaattcctagcacttcaataattattataacatcttcttacatataacatgtattttgagatgttacatataacatctcatgtctaaattttgtttatggtgaattttaaaatgaagattaattatgtgaaaacctatctattcagagttctatgaaatagacaaagcacttgatctcaaaatrtttcctttatagaaaaaattaaaaaaaaaaaacacagaccattctagccacagatcagtaaaagttgttttgagtttaaagc

SEQ ID NO: 160932 - DNA, 525 bp, Homo sapiens
tagtgttaataatcttgatttgtccttacaaaacaaaattggactaagattatagccaaattactcttaacaacattgtatgattaaatacattgtaataaattggrccaacaaacatgagaggagaaggaggtgaaactgtcttcccaacaggttaacttatatttgcatgtttgtcaattaatgacatttacagtttagaaaagtgtttgaaagctcacaatgtaagaagaggttcctatcctattaggtttaaatatcaaaatgctctgaatattcttaaaacattctcaactttaaaaatggcaacacattttctacggatatcatttaccaaaaagtgtaacagataaaagaagatttgagaaagaatttggaagatttgagacgtcagaaagaatatgtattagtctgttctcacagtgctataaagaactgcccaagactgagtaatttataaaggaaagaggtttaattgactcacagttctgcatggctttggaggactcaggaaacttacaatca

SEQ ID NO: 160933 - DNA, 189 bp, Homo sapiens
ttgaccttcctgtttcgtggagggtatttcttttgctcttttttagataccagctctcttgggttttctcttactgttgtggctgctgcttctcagttccatttattttyctatacctagaccttaaattctagtttcagtgttatactctcctctcttcttcctctacgcaatcttctttggagatct

SEQ ID NO: 160934 - DNA, 332 bp, Homo sapiens
gccgtcttccttcttggatttcctgctgatactgaatgcaaacttgtaaaatatcaagtggcatatttttatcacttggaaacaatatatacatgaaatgacagtttagttgaattcttacttgtggttaaytttatttctgatactttgagtataaacaaacgtccttcaatagaagacattctttgtttttttcttgagcccatcttctgcagaatacattttgattcataataggggtttatttattgggcgtattcatgatcagattatatgaagaagaagcagttgtttactttgcagaattatcaagaaattggaaggtctagcaa

SEQ ID NO: 160935 - DNA, 367 bp, Homo sapiens
actgaaatgtaggagttgtttgttactacaacatggcctgttctgactaatactataagactgtgttagaggaagatttttggtagaaatgaggggttttgttctgaataatttaagycaaaattattgatatatggtggcttcatcaagttataatcttcagtaaaactggcaccaattgtaaatgtaatgggattcattcatttttcattttagatgcttgaactaaaccttgttactaggaagaatctgaagttgcttgtccatgtaaatgtaaggtgggaagacactcagaaactatttgatattgacaatgagcatttcaattttacattttagctgcatgtctccattctataatttcatc

SEQ ID NO: 160936 - DNA, 564 bp, Homo sapiens
gaattctttcttgtgtgagatccaagaatcctctcttggggtctggatcgggacctctttcctataacagtgtcataggttagtgtatttaacaagataattcacagctgcagcaagagctgaataaaatccagacatctaggtaagcttcagaaggttcctcagtcatcctaactgtagtagttttttttttttgtttgtttgtttgtttgtgagccggagtttcactcttgttgcctaggctggagtgcaatggcgcgatctcagctcactgcaacctccgcctcctgggttcaagcgattttcctgcctcagcctcccaagtagctgggattacaggcatgtgccaccatgcccggctagttttgtatttttagtagagacggggtttctccatgttggtcaggctggtctcgagctcccgacctcaggtgatccrcccacctcggcctcccaaagtgctgggattacaggcatgagccaccacgcccggtctgtagtagtttttatccaatttcaccaccccctctcccgccgaggtttgagcaaaaggcttttctcctc

SEQ ID NO: 160937 - DNA, 564 bp, Homo sapiens
ggtgtgcttgtctagaaatcacaactcaaattggctcactgtcacacacaactaatacgaccagcagtaggatagccttcaagtaaggcttgattaggctctggttccccttctctacaatggctccagatctgttctcctccatatggctttcttcctggtagaacaatgtttacacaggttgagcatccctaawctgaaaatctgaaattcaaaatgccccaaaatccaaaactttttgagggccaccacgatgccacaagtggaaaatttcacacctgaccttatgtgacagaatgccatcaaaagtcaagcaaataacacacagattattcagtttaccaaatggaaaaaaaggccctcccagcccccttcagctgcaatgtagctttcttgcacccaaccagattttccagcacaagcacacccacaaagggtaataaaataaaaacttggtttcatgcagaaaattatttaaatgttgtataaaattacctacctcaggtgatgtaaataaggtgtatatgaaacacaaatgagttttacattagacttgggtcccac

SEQ ID NO: 160938 - DNA, 461 bp, Homo sapiens
ggatatttaataatttttgttattaatacaaaagcaaagaagtccattaacatttgatgaaattkaatttttttaaaaaaaactatgtaaaatatgacaatatttgaatctaaaactactgccacaatctcttggcattggccaatttcaggagaaaaatagagatttgaaaaaagaagatattcagaggcaaaatgtacagtagtccctcggcataagtagggggttggtttcgggtcccctgcctatacccaaatccatgtggattcatccctccatgtgccaggtttcacatctgcaaatactgtattttcatcctgaatttggttgaaaaaaacacagatcaaacccatgctgttcaagggccaattgtataatatttaaaaatttaaaaagcatagcgacactaaaaatcagtggtctccagagattggggaaagatgaggagggatgaatagacg

SEQ ID NO: 160939 - DNA, 461 bp, Homo sapiens
ggatatttaataatttttgttattaatacaaaagcaaagaagtccattaacatttgatgaaattgaatttttttaaaaaaaactatgtaaaatatgacaatatttgaatctaaaactactgccacaatctcttggcattggccaatttcaggagaaaaatagagatttgaaaaaagaagatattcagaggcaaaatgtacagtagtccctcggcataagtagggggttggtttcgggtcccctgcctatacccaaatccatgtggattcatccctccatgtgccaggtttcacatctgcaaatactgtattttcatcctgaatttggttgaaaaaaacacagatcaaacccatgctgttcaagggccaattgtataatatttaaaaatttaaaaascatagcgacactaaaaatcagtggtctccagagattggggaaagatgaggagggatgaatagacg

SEQ ID NO: 160940 - DNA, 373 bp, Homo sapiens
gaattcaaataagggatactagctcagagtggtagagttaagagcatttccctgaggataatagtgcctgggctacttgaaggatcatggggattatccagttgaggaaggatgagaagggaatttcaaagaaaatggaaccatttgggaaactgaatggagacttcaaatagcctattctatgaggagaattaaaaactggttttcttcgaaacayggagacagccatggagaacgtcaagaaggataaaagggaagacaggtggagctctgtgcatcactaaacacctcagatgcaagctaggggcctgctctttattctctagttgatgagaaccaacacaagagtttcatatttctgattgggacaggt

SEQ ID NO: 160941 - DNA, 568 bp, Homo sapiens
acacattacacagaggtataggtaatagatataggaaacaggtaaaggaaatatgttaaaaaactcaaggaagaatctaggtttttattagattttaaaagaggatgatacagattatatatargtataagaagttcagattatatatatatataaagtacagattatatatatatataatcttatacacacacacacatacacacagttgacccttgaacaacatgggtgtttggggacactgaccccttgtacagttgaaagtgtgcatataacttttgattcccccaaaaacttaactactaacagcctactgttgacaggaagccttactgataacatgaatgataaattaacacatatttgtatgttatatgtattatacatattattattcctccaataaagtaagctagagaaaagaaaatgttattaagaaaatcatgtggaagagaaagtatatttgctattcattaagtgggagtggatcatcaaaaagatgatgtatcataaagatcttcatcataaaggtcctcatcctcattgaggaggctgaggaggaggagga

SEQ ID NO: 160942 - DNA, 561 bp, Homo sapiens
tctaccccatcttccacgtcatgrttgtgatgaaaccccaaatgctgccacacttttagtgattttcctttctggtttgaacccagattcatccacatgctcacaaagctctgacggttaactcagtcacagtcagccaaactgtggcctcaaagctcatgaaccttctccctcagaaagacaaacagaagagcaaaacccctccctaaatagcattcttagttctcaaattctttagtaaccaccctcaccctcaaatgcacaatggtatacatttatttgttggtttacatgtatgccctttgtctaccttactggactaaagttgcagaggtggctggcaaacttagccccatttagtctaacagtgctgtaaggagtaagtcagatagcccctgggacaagttgcctgataggatacatgttaacccattgaatttgtatttcagaaaagcaataaatgtgtttttttttttaagtataagcatgtcccatgcaatatttgggatatgcttaaactaaaagtgatttgttatttatttggcattcaaatttaactgg

SEQ ID NO: 160943 - DNA, 473 bp, Homo sapiens
ttcctccctctgcccctccaaataaagcactatattcacattcagattgtttgtaagaggaattccaaaaagtctttcagaaacaggtaaatctaatgcaattctctcaaactatgtcacggctttatcagctaagtttatgtaatattttaaattctttattgtaatttcaacaatatttatagcatcttcacgaggagtagatttcatgtcaagaaaccactttctttgctcatctttaagaagcagctccgcatccactcaagttttatcacgagatcacagcaattcagtcacatcttcaggctccatttctaactccagatctcctgcagtttcccctacattgggaattacttccttcactcaagtcttgagccwctcaaagtcaatcataagggccagaatcaacttctatgaaatccctgttaatgtaaatgttatgacttcttcccataaattacaaatgttct

SEQ ID NO: 160944 - DNA, 426 bp, Homo sapiens
aatggattttgaagtttcacatatgtgttttatttttctgtgtttgcttatatatgcgtgtaatatacacctaaaaggttacaatatacacctaatataatttaatatacaactgaaattatggatctattaatataaaaagaaagaacattagaggagaaataattgaaggtaaaawtaactttgaaattactcttaattgattcaatagataactgttcaaaataataatatcaacagtatattagattatcatagcttatgggtaagtgaaacaaatgatagcaatattataaaggaagggaggaaggaattgcaaatcctcttctgaactacccatgaaatgggataatatgattttcaggtatatttagattagtgtaactctggtataaattcatggtcaaccactgcagttgtttaaaa

SEQ ID NO: 160945 - DNA, 503 bp, Homo sapiens
aagtttgctgaaggaggccaatacatttggccaaagaatcagaaaccactagtgtagcagaaacagaatgaaaggcctaagagttaattccaaatgctcggcaacagcgctaccaaagttgtagaatgatggccagagtgtcatgttcttgctctgaggaatggtttaattgaggtatgaggcagaggcacaattttttcaggcacaaggaattgggggtacaatgctccggtttttttttttcctctttcctttcacttattggaggcagcgtgcctagcgagasgatgtgttctagtctgaccctctatgctctaagttttacagggtcacattcccacttaatatgcggggactgggatggtttaacatcgctcttgattgggtgggaaaataaattcttctgggatttggatttattctgtcattgataagacacaatagcaataaaatgtctatgtagaaataactagttcccactgaaatctactgagatccttagg

SEQ ID NO: 160946 - DNA, 503 bp, Homo sapiens
aagtttgctgaaggaggccaatacatttggccaaagaatcagaaaccactagtgtagcagaaacagaatgaaaggcctaagagttaattccaaatgctcggcaacagcgctaccaaagttgtagaatgatggccagagtgtcatgttcttgctctgaggaatggtttaattgaggtatgaggcagaggcacaattttttcaggcacaaggaattgggggtacaatgctccggtttttttttttcctctttcctttcacttattggaggcagcgtgcctagcgagacsatgtgttctagtctgaccctctatgctctaagttttacagggtcacattcccacttaatatgcggggactgggatggtttaacatcgctcttgattgggtgggaaaataaattcttctgggatttggatttattctgtcattgataagacacaatagcaataaaatgtctatgtagaaataactagttcccactgaaatctactgagatccttagg

SEQ ID NO: 160947 - DNA, 448 bp, Homo sapiens
gcactaagacttcatgcatgttactttttgtgtctctgtttcttctgtgttaaatgggggatgataatagaagctaatctggaggattgtcctgaagagtaaccgagttaatacaaaaaaagcatttagaaaagtctttggcatgtaataacagcccagtaaatcctaggggattatgagaagaagggcttacaggtggtgatctggatggaaggaggctggaggggacaatgttgaagctgggtttgcttagactacgcgttttgggtggtgaatgggccctccacttcctgtactacttgcttgcgargagagcagacagctggcctttctcttggacccggagcagttttcagccctcagcatgtttcttaggcaacagataaagacttctggtgactctgtgttttctggtccggcttggctttctcatggggccagggaggga

SEQ ID NO: 160948 - DNA, 449 bp, Homo sapiens
gaattcatctcgtcagatttttcattcttctcctgcaagttcctggagctgattctatcatttcttgcatttcatttctcctcagcggcagagcctagctctggtctgaagaaagccgagattgatcttccaacaaactgacagctcttcccaggaatatttatttctcccctccttccttttcccaaatctcctaggccaggtgacttcctgaggaccaggtttgtaagcaaaatcctgacaagctatgaaaccaatctggggcaagttgcttcccttttctggtccatcttgcaggcagccaacctttttctgcccttaggacaagtttctaacagcaccttgagtsgcctgagggcctagtgtctttctgtgccatgctggaaacctgaggaagggggtagatctgaggctacagaaaccacatatgcctcattcatcaccatgtt

SEQ ID NO: 160949 - DNA, 432 bp, Homo sapiens
gagctgattctatcatttcttgcatttcatttctcctcagcggcagagcctagctctggtctgaagaaagccgagattgatcttccaacaaactgacagctcttcccaggaatatttatttctcccctccttccttttcccaaatctcctaggccaggtgacttcctgaggaccaggtttgtaagcaaaatcctgacaagctatgaaaccaatctggggcaagttgcttcccttttctggtccatcttgcaggcagccaacctttttctgcccttaggacaagtttctaacagcaccttgagtcscctgagggcctagtgtctttctgtgccatgctggaaacctgaggaagggggtagatctgaggctacagaaaccacatatgcctcattcatcaccatgttcccacatcctagctcatagtaggaattc

SEQ ID NO: 160950 - DNA, 485 bp, Homo sapiens
ataaggtaggtgtgtatgtgctgatatgaggagctccgcaagatacagtaagtgaataaaagcaaacaaaacaagtgtaaaacaatgtagcgaatacattaaaaaggatatgcacatatttgccttcagcaaacaaatatgtgtaatgtttttcttagaaggatacaggaggaaaaatcagctaactgtggctctctctgcagagaaaaggtgtaggagtgatttctgcttttcatttcaagctttctgtactgtctgacttttctaatcataagcaaacagttatctgagtcttggagtttggggccatttgtttctcttttgggttcacttttacgtgcatcctcagtttaaaagaaacgatactggttttagaaagtagtgctatgcratgcttacgaaagggcagtgaaatgagccctctcatatgctactgcatagaacatcaaggctttcaagaggtcacacctttggacttaggaatt

SEQ ID NO: 160951 - DNA, 437 bp, Homo sapiens
tcccaagaccttcatgtatcttttgttgcttgttttgaggagtctttttaaaaactgtttttacggatatgaatacttgacatatttatagagygcgtgtgatattttgttatgtgcatagatggtgtaatggttcaatcagggtatttggggtactcatcacctcaagtatttatcattactatgtgtcagaaacatttcaagttctccgttctagctattttgaaatatataatacgttcttcttaactatggtcactttactatcaaacattagagcttattgcttgtgtctaactgcatatctgtatccattaaccagcctctctttactgtctctccattctcttcctagcctctgctatctgtcattctactctctatctccatgagatcaacttttttagctccctcatgagtgtgagaacatgaggtat

SEQ ID NO: 160952 - DNA, 437 bp, Homo sapiens
tcccaagaccttcatgtatcttttgttgcttgttttgaggagtctttttaaaaactgtttttacggatatgaatacttgacatatttatagagtgcgtgtgatattttgttatgtgcatagatggtgtaatggttcaatcagggtatttggggtactcatcacctcaagtatttatcattactaygtgtcagaaacatttcaagttctccgttctagctattttgaaatatataatacgttcttcttaactatggtcactttactatcaaacattagagcttattgcttgtgtctaactgcatatctgtatccattaaccagcctctctttactgtctctccattctcttcctagcctctgctatctgtcattctactctctatctccatgagatcaacttttttagctccctcatgagtgtgagaacatgaggtat

SEQ ID NO: 160953 - DNA, 542 bp, Homo sapiens
agatctacacgtggaaaaatgactgttacataccattcagtgaataaaggttgtagaatgttacatttatccgtatttcatagacgtaaaatttatatatgtctaaatacatatgtgtratcagggaatactatgcagccatgaaaaatgagttcatgtcctttgcagggacatggatgaagctggaaaccatcatcctcagcaaactaacacaggaacagaaaaccatacaccatatgttcttactcataagtgggagttgaacagtgagaacacatggacacagggaggggaacatcatacaccatggcctatcagggggtggggggacaggggagagagagcattaggacaaatacctagtgcatgtggggcttaaaacctagatgacgggttgatgggtgcagcaaaccaccatggcacatgtatacctatgtaacaaacctgcacgttcagcacatgtatcccagaacttaaaaagaaaaaatgtgttaaattagacatattaaatatatatgcgtgtgtgtatacatacatgtgta

SEQ ID NO: 160954 - DNA, 501 bp, Homo sapiens
ttttgttattttatttgtaaaattacaatgcagttttctttaaaacaaaaactgttccagttgtagtrctcgtttctgtatttctgcttaattttgtaacaatagtatacctttattttaaacttaaaaatttatccacatataattgtttaactagaaaactagtcaaattataattaaaatgctatacatatcaagttaattgcagacatggtctggctctgtgtctccacccaaatctcatcttgaagtgtaatccccacgtgtcagaggaggggcctgatgggaggtgattgaatcatgggggtggacttcccccttgttgttctcttgatagtgagttctcacaagatctgatggttgaaaactgtgtggcactaccccctttgcactttctctctctctctctctctcctgccaccacgtaagatgtgcctttctttcctttcaccatccaccatgattgtaagtgtcttgaggcgttccctgccatacagaacc

SEQ ID NO: 160955 - DNA, 501 bp, Homo sapiens
ttttgttattttatttgtaaaattacaatgcagttttctttaaaacaaaaactgttccagttgtagtgctcgtttctgtatttctgcttaattttgtaacaatagtatacctttattttaaacttaaaaatttatccacatataattgtttaactagaaaactagtcaaattataattaaaatgctatacatatcaagttaattgcagayatggtctggctctgtgtctccacccaaatctcatcttgaagtgtaatccccacgtgtcagaggaggggcctgatgggaggtgattgaatcatgggggtggacttcccccttgttgttctcttgatagtgagttctcacaagatctgatggttgaaaactgtgtggcactaccccctttgcactttctctctctctctctctctcctgccaccacgtaagatgtgcctttctttcctttcaccatccaccatgattgtaagtgtcttgaggcgttccctgccatacagaacc

SEQ ID NO: 160956 - DNA, 443 bp, Homo sapiens
cagaggccccttataagagaaaattatgttttcctcccctgtaacatggtggggtagggggaaggatgggcatctggcccatggttgtttttctgctagcatcctctgctgaagtaactcatcccatctattctttgccccttaactcataacctaaggaattcactagtcaggttctcctgtccttggagatcctgtctctggttgatataggctgctctgtgccttcttcatgctcatcacaaagcctcttgggcaatccacattcattttggttactatctcatgcttttgtggcatttccagagactagacctgggaacttagaccccttttgcctaaacataccactttcttcattctgccttgatcagcacccccawacctggggttccatatgcagtctctctcaaatatacaccagaaatagagacacaactgtt

SEQ ID NO: 160957 - DNA, 566 bp, Homo sapiens
cattttaaccatattaattcttccaacccatgagcattggaaatcttttcatttttgtgttcttttcagtttctttcatcagtttttaaatagttttcattgtagaattttttttacttctttggttaaatttattcctagatattttatattttgtttagctttctaaatgggrttgttttcttcatttctttttcagattgttcactgttggcatttataaatgctattaattttttatgttgattttatatcttgcaacttttctgaatttgtttattagttttaacagttttttggtagtctttaggtttttctaaatatgctatgttatctgtgaacaaggctaatttgactttttccttaccaatttggatgcccttatttctttcttctgcctaattgttcttgcgaggacttccagtgctgtgttaaataaaacttgtgaaaggggtcttccttttcttgttctagatcttagaggaaagcctttcaatttttttttcagttcggtatgatgttagctgtaagtttgttagatgtaacctttattattttgaggtatg

SEQ ID NO: 160958 - DNA, 568 bp, Homo sapiens
aatttcatcttttcaaaaatcaactttttgttttgtctgtacttggtattgttttttagtctctgttcatttcatctggctctcgtctttattattattttctttctattagttttgggtttcattcgctcttgcttttktagtttcttgaggtgcaccattaggttgtttatttgaactctttctgttttttggaacatttattgctataaacatccctcttagtactgcttacaccatagcccatagattttattattgtgtttccatttcttttgtttcaaaatattaaaaaatttccttcttaatttcttcatgggcccattgatcattcaggaacatgtttaatttccatgtgtttgtataatttcttcagatcctcttgttaataatttctagttgtattctattgtggtcagaaaagatattcgatataattttggcttttttgaatctgttgagacttgttttgtgacttaaaatatgatctatcctagaaaatgttccatgtgctgatgataacaatgcatattccatatcacttggatgaaatgttctgtaaatatta

SEQ ID NO: 160959 - DNA, 564 bp, Homo sapiens
gtatatactcagaatccttaaagggataaacacaggaaatgcaatagataaaaakattagaatatgtaaatcatggaagaggaaattcaagttgtcagtaagcccaaacttactgcattcagggaaatgcaagttaacataacaaatattgcttctggcataacagtccagcaaaattcaactgagataacctttactacttgcagaaatggtcataaaaatatgctctgatatttgttcttgttattttaatttttagaactctttgagaaagctgttggtaatacatattaaattaagtgtatacatatattgtgagtcaaaaacctctgaacatttatcaaatagagactttgtacataagggtacattaaaaagtatatcagtggcttcatgatttgataatagcaaaagaatacaaatgacctgaattcctgtaagcaggtaatgctagagtaaattatgatataatcaagctactgaaaggaaagatacagatatatagggactgagttagagttctaagaagtagtgttgagtgcaaaaagaagaaagaatggttta

SEQ ID NO: 160960 - DNA, 504 bp, Homo sapiens
ccactagtatatagtgtatacatatatagagagataaagtttggttatacatacaatatatgattttatatagratatattgcataatatttgacagatgttacaaaatgtagatattagaaagatctcagtttaattttaatataacatgccctatatataatgctgttcattttaatgaacaaatttggtgttagatctgagtatattttatatactcacatatgatactttatgcttgaattttagatccctcttaaagtgataatattaaaaacctacaatttgaagcattataatattatcaaaatccaataacttcagaaaaataaagcctcaaaactgttgtaggccccacggggctcccctacaccctgagccttcatgtcctctgcacactcaggccactggttgcagattgtctgctttcccagcaactgcagaccagcttcagcttgggcaaaccagcactgttctctgccacccagagggctgcttctccaa

SEQ ID NO: 160961 - DNA, 593 bp, Homo sapiens
taactgatacatatgtttaatctttttttcttagcaagccagtcattgtcttaagtctgtgtggtgggtctctgcctctgtggagggacacagtgggctctcaataagtaaccgtctcctagaagacccttcaatttgtgtcagtgttgttgggaggccttacaaaggtgactgtagggcttattccctacgggtataatcagatagtatctgtcttttaagtcttccttccttctttatctcttttaaatatttctctttcacttttccttcagaatatgtgtttttttcttagcgttatttatgctaatctctcaccatattatgacaactctgtgcctcatggaagatatgagtttacccaggacaaggacactgacttgtctttccgaggttgaagaccactccctcaagaatttcctctgcctttcttcattcacctgatggggacctcttagcatgttttggggagtagactggttgctgttatcagacagactctccaataaaaggagaaatagatgttcagtgctcttcyagattacagagatccttccaatgagggtatgacccaaaaaggcatactttgtatg

SEQ ID NO: 160962 - DNA, 557 bp, Homo sapiens
ccttatataaaattgctccccattttccatctctaaactctcctttcttctttcctgccttctttttttattaggccttatcacctcacacataatacattgtgttttctctttctttayttttttagtgtatgaattcctgcaaaaccatgtattaaataaaatttttgtgtgctttgttcgctgttatttttctaacatctagcattgtgtctggcatacaataatgctcaatgaatgttttttgaatgaaaaaattgattaaatggatgcatgaattaacaaatgttagtttattctgtatacttactccttgattttgaatttttatacaatggttgctaaatccagtaaggtcatagttcgttctttagatcattcagtgttggactcactctgcaccagtgtcagatgacctaattacatgttcaggagggaggccatgactcgaagaatgcacagcctgagttacaccggatggtctttggatcaggctgctctaccctgattattcccctagggggagacagaggtctaagcactctgtaagtgtatga

SEQ ID NO: 160963 - DNA, 496 bp, Homo sapiens
ctgcttcagctcatgctcggtgggctgcacccactgttctgcacccattgtccaacaagctccagtgagatgaacccagtacctcagctggaaatgcagaaatcacccatcttctgcatcactcacactgggagctgtagactggagctgttcctatttagccatcttggaactgccccaggctctttttcataaaggcatcagtagaattttcatgtccctgatagataccagacagctggtttaattgatagacataacrgtctcctcaaacaatcctttttcaaatttcttcccataaaatggaccgtggaatgtgtctctatattgccccaggccttaatctcccttaaatcaaggacgtttcagtgactcacgtctcacaccaattttttaaaaactttcccattgccctttcctacatttaaaggggggatatatctccccttcacatatataaatattcattacacgtgagactcctaaatatatcttc

SEQ ID NO: 160964 - DNA, 440 bp, Homo sapiens
attaagttctagaatttcagctttgctaggtgtgcacccacaaggccctacatgtaagaaatatttacaagtcaaacttccagttccaatgttgtcttcaaattatgcaaacagctcagacttgttattataccataaaagacacaaacayaatacccacatcaacctgagcaggtctctacttggaatgtattccccattcccacattccagatggcatcacctcagcccaggagctcacttctgtaagtgacaccacctcagatgacatcatcccagagcaagacttcatctttggaaattactttgcaccctgtgctggagatgtatttaccccagacattaaaacctctattccagtaatgtccatggactgcttctcctaaggtgctaaaaaattgtacacagaacatttattgctcttctttttttgatattag

SEQ ID NO: 160965 - DNA, 337 bp, Homo sapiens
aatttgagtgttacctcctgtctccttgccagycaactcactataaaggccctccttttctcaaaagctggtgctatagcattgactgctatatgcattgggcagagagctcattgctcagtaacaaagtatacccaatgaaagtatctaagaagatgaaccatctccattgtgttaactaccttgaggccatcatactgaggtagttcaagctgcaaagaaaggccatgtgtgggcattctggccgacagtcccagctgagctcaaccttaatgtcatctgagaccaagtgcaagaaatatgtctgaaggatcctccaaatgatttctacctccag

SEQ ID NO: 160966 - DNA, 577 bp, Homo sapiens
caaagtatacccaatgaaagtatctaagaagatgaaccatctccattgtgttaactaccttgaggccatcatactgaggtagttcaagctgcaaagaaaggccatgtgtgggcattctggccgacagtcccagctgagctcaaccttaatgtcatctgagaccaagtgcaagaaatatgtctgaaggatcctccaaatgatttctacctccagccatttaattagtccccaagtgtgcctcatacatagtcaagaagagataagacattccttcagtgccttacccagcttcttcacccacagtgtctgtgagtctattaaaatwgtttttgtgtagtgtcatgatattttgcagtggtttttttctgcagaaataagtgatcaaaataaaatttggcatcaaaattgggatgctgtaataacaaaaacataaaacatgtagctttggctttggacaaattgcaagaaagaagatgtaaaagatatgtggagaaaatagtccaacacctgacaagactaaagcttgttgttgagggcttaaaggaaattgagtaagatgttattaacggctgggaga

SEQ ID NO: 160967 - DNA, 380 bp, Homo sapiens
caaagaagcaaaacaattcaatggtaaagaagacagccttttcaacaaatggtactggagcaattgcacattcaaagaaaaaaaagaaaaaatttttgacctacctaaatctcataactgatgcaaaaaataactctaaattgaccagagagctaatgtaaaaatgtgaaactataaaacttakaaaataaacaagagaaaatctttggtattgagggctaggcaaacagttctttgatttggcacaaaagtgaatagtgtaatgcaggtataactgcattacatgagcagtatggaatactactcagcaataaaaaggaatggactactgatcatgcaacatggtaggtgatgctctagagtattatggtgaatggaaa

SEQ ID NO: 160968 - DNA, 562 bp, Homo sapiens
ttgtcaattaaaaatgaataaattttaaaaataaaaataaaattaactgtagccattttctatctacaaggtcaatatacaaaactaaattgtatttatatatatatatatgcagcaaacaactagaatttttaaygatgtaatttatagaaacagcaatgtaaccaagtaaatagtaataaatacagatgttcaaagcatctctgcaggaactatccaaaataaatggagggataaaatacaaatgaacaggaaaactcaatattataaagatgttgttctctccaaagtaatttatagattgaaggcaattgcataaattgtagggaatttgtttttggaaactaattagttgattcttttctatattaaaattcaaagccacatagagtcaagataatcttgaagaaaaattacagaaattgctctaatacttgtatagaattattaaggcctgtaactgtaaaactccaagaagaaaacataagagaatgcctcctgaatgttgattatggtgataattttttgggtatgataccaaaagcacaggcaacaaaagcaa

SEQ ID NO: 160969 - DNA, 263 bp, Homo sapiens
aaatggagagaaatagtctttttcagacaagcaaatgctgagggagtttgtcactaccagaccagtcctacaagaaatgctaaaaggagttcccaatcctgaaacaaaagatggatatgcaccagaatagaaccacttgaagcataaaactcacagagcctataaaacaataaygcaatgaagatagcaaagtatcaaggtaacaatcaatatgatgactgaaactactacttcatgtctcaatgttaaatatgtatatgaat

SEQ ID NO: 160970 - DNA, 416 bp, Homo sapiens
gttactaggtactccactttaaatggcagccaaattacaaatgggcctttttgttcataaagtggtgccacacagaggtaatgaatgtgactttgtaaaaaacccacctatatatcacaaatctatgttcttttcagtcctcagaacttttcccctggcatttggaacttaagaaaatgaaagggcagtttaaaatctttccatggcaatagaacaagacttcagtatcactacccaagccttgggagcactccagtcagaagtcaacagtccagcttctgctgtactttagaactgctgcagcctgaatgtgctgacagcccaacagggaggagcttgtgcagctattggtgacaaatgctgtttctacataaaccgctcasggcaagtagagactgatctgcacctcttgaagg

SEQ ID NO: 160971 - DNA, 497 bp, Homo sapiens
aacttctacaccatcttttaatctttccatcttttttgtttgtcctcagaatgtgtttattgagcactgtattatgccctgatatacattaatttaaaaagaaatatataaccttttctgtcaattctaactccttgctgcctcttacattctgatggtagccctgtttctcatggtagagatgaggttatctaagatgtgatggtcaacctgtattcttgagtttacagatcattctctcaggatatccatgtgccctgctcaatttatctgatggagacctgctaccacctcttgataattccagtatctgcagttgcctgatgaattctgtgaaaacaagaagaggcttgttcagtgttgctccaaagggcagatacccacmcagcgagtgggtatccttgtcagacaattccaacatctgatttctttcagtattataaagtttttttttttttctgaaaaagaagaacctttaagccaccagagttatccag

SEQ ID NO: 160972 - DNA, 497 bp, Homo sapiens
aacttctacaccatcttttaatctttccatcttttttgtttgtcctcagaatgtgtttattgagcactgtattatgccctgatatacattaatttaaaaagaaatatataaccttttctgtcaattctaactccttgctgcctcttacattctgatggtagccctgtttctcatggtagagatgaggttatctaagatgtgatggtcaacctgtattcttgagtttacagatcattctctcaggatatccatgtgccctgctcaatttatctgatggagacctgctaccacctcttgataattccagtatctgcagttgcctgatgaattctgtgaaaacaagaagaggcttgttcagtgttgctccaaagggcagatacccacccagcragtgggtatccttgtcagacaattccaacatctgatttctttcagtattataaagtttttttttttttctgaaaaagaagaacctttaagccaccagagttatccag

SEQ ID NO: 160973 - DNA, 466 bp, Homo sapiens
gaattttagaatttttttttctaattctgtgaagaatgatggtggcattttgatggggattgcattgaatttgtagattgcttttggtagtatggtcattttcacaatactgattctacccatcmatgagcatggtttgtgtttccatttgtttgtgtcatctatgatttctttcggcagtgttttgtagttttcctcgtagaggtctttcaactcctcggttaggtatattactaagtatttgttttaattttttttgcagctattgtaaaaggggttgagttcttgatttgattctctgcttggtcgttgttggtgtatagaagagctactgattagtgtacattaatcttgtatccagaaattttgctgaattattgtatcagttcttggagccttctggaggagtctttagggttttcgaggtaaacaatcatatcatcagcgaacagtgacagtttgaatt

SEQ ID NO: 160974 - DNA, 361 bp, Homo sapiens
aaagaaacaagacttaactacatgctgcctacaagaaacccacttcacccataaaggcacatacagactgaaagtgaagggtggaaaaagrtatctatgcaactggaaaccaaaaaaaacaggagtagctacatctatatcagacaaaatagactacaagtcaaagactgtgaaaagagaccaagtcactatataatgaaaaatggaccaactcagctagaggatataacaattgtaaatatctatgcacccaacacagcattatccaagtatataaatcaatcattaataaatctaaagggagaaattgactgcagtacaataacagtagagacttcaacattccactctcagtaatggc

SEQ ID NO: 160975 - DNA, 361 bp, Homo sapiens
aaagaaacaagacttaactacatgctgcctacaagaaacccacttcacccataaaggcacatacagactgaaagtgaagggtggaaaaagatatctatgcaactggaaaccaaaaaaaacaggagtagctacatctatatcagayaaaatagactacaagtcaaagactgtgaaaagagaccaagtcactatataatgaaaaatggaccaactcagctagaggatataacaattgtaaatatctatgcacccaacacagcattatccaagtatataaatcaatcattaataaatctaaagggagaaattgactgcagtacaataacagtagagacttcaacattccactctcagtaatggc

SEQ ID NO: 160976 - DNA, 631 bp, Homo sapiens
tttatatcaatacttatcaattgttcactttaaatatatgcaacttattacatgtcgattacacatcaataaagctattttttaaaaaagcattcaccaccaaatggaactgacactaaaaaaaagaggttaatttgaatcataaaaaaataaggaaaattaatttatttttatacatgggtgaaatgtatactcattaaacaacatatagtgttaaaaattatgatgaaattgggacagaactttaggttagattggtagttaagggtgaagaggaaaggatgcagtaaagatagctttttaaagaaattttaaaacacacacatactatacatgtgtacttctcttcatagctgcrgtgtctttccaatttctttttacccaaattatttaacaatgggtcttctcttttatctgacagaaccacatacccacatagagtactgtgctgtaatagagaatgggataggctgatgctgtttacctgctgttttataagagacaatttctctttgtgttgtagggacaccagtaaattataaccaaattgaaagcaatacttcagaaacagaactagagtaaacttaacataccaagaaattttctaaaatttgactttttttaaaagaaa

SEQ ID NO: 160977 - DNA, 631 bp, Homo sapiens
tttatatcaatacttatcaattgttcactttaaatatatgcaacttattacatgtcgattacacatcaataaagctattttttaaaaaagcattcaccaccaaatggaactgacactaaaaaaaagaggttaatttgaatcataaaaaaataaggaaaattaatttatttttatacatgggtgaaatgtatactcattaaacaacatatagtgttaaaaattatgatgaaattgggacagaactttaggttagattggtagttaagggtgaagaggaaaggatgcagtaaagatagctttttaaagaaattttaaaacacacacatactatacatgtgtacttctcttcatagctgcagtgtctttccaatttctttttacccaaattatttaacaatgggtcttctcttttatctgacagaaccacatacccacatagagtactgtgctgtaatagagaatgggataggctgatgctgtttaccwgctgttttataagagacaatttctctttgtgttgtagggacaccagtaaattataaccaaattgaaagcaatacttcagaaacagaactagagtaaacttaacataccaagaaattttctaaaatttgactttttttaaaagaaa

SEQ ID NO: 160978 - DNA, 492 bp, Homo sapiens
tatttcaaggcaccccctcattaagggaaggttggaggatttaaaattaaacacacacaccccagcctgcggttgccctgcatctttctagggatgtaacttacccagctctgtaattactttattaagggaaagagctgtctctggaagctgggctccgtttgttctcctcgtaggtacgtgccacctgaatggcacaggcaaggctgctgtgcagttcaagggccaggcccgtccttcctgccagccttgacccagacatcctggctgaccccagccaaggcctgaccatcaaggagacctgccagccaggccctgttacacatrtaatgaaactgggaggtttatggggttggctagccctccgtaggccaggtcttggaccacattagcaggtgacacctgctgccctcctcttccaagggaacagtgagtctttagtgactgccccctcacacctcaagcatagacagggttaggctttggggtaac

SEQ ID NO: 160979 - DNA, 407 bp, Homo sapiens
cagctagacttacttgtattgtacttgcactccaaataggttactatgtggactctgacgacaaaatctttcacgtaaaattctttgtacctgatgaaaataaagtgaataaatataaataaaaatattacacatgatataaaaaataaataagaaagcacatttacaatagtcagaattaggtattaatgaatcaattcaaccctccctaaattcttatcctctagagttctggcaccattttcataygttaaaaaattaatggatttcttacctatctcaagtcccataggaagaatgagaatttagttgtgaaggtttcaacaagagggagaatcactgactttagctatattagcaacttaagggccattgtaatgcatgtgaacgagttaagaaaagaattc

SEQ ID NO: 160980 - DNA, 599 bp, Homo sapiens
agtggattacaacaccactgttttcccctccataatgtaaaaatatgagctggtaactttcagttggtaactttggttcaaatctcatgtttacttataaaatttagttggaaaaagttaaaaaaaaaagtgagctacaatgaagataatctactttcattaggtcaaaccaatagttacaatgcygaacttggactacagttagggtaaaataattctgctatccagccatccaaagtttgcaaaaagttgttactcatctaatgttggtgtttgtaatttgtcatcacatattaatatgattaattttagtcaaagctcctaatcttgggaaaaacccagaagtctaaaaaaaatttaggcctaacagggacaattgagtttgggatagaatggatccccacatagacataaaatcaccaactcaatgtggcatccatttttatggtagcaaaaccatgttctcaatgaaaggagaaaatctttgaaacagttttttttttaagcagctgcatttggagtatacataatgtctctgtgtgtgtgtatgtgtatatgtatatatatatgaacattcttctcaattatttacacattcc

SEQ ID NO: 160981 - DNA, 432 bp, Homo sapiens
tcctgcaaagaaggcagctgcatgtgtctaggtgtaggggaaatgctatgcaatgtagatctccttcccaaacttttaatgtcttagggttttagcccaaggaccgttccctctcttattaatgtgactggtttggggaacaccacaaaggcttttatttgaaagtgttctttttcacacccaaacaagaactgtttttcagaattgtgtcaagtaagaagcccttgacatagtcatttacagttaaagactttcttaaactctttaaataatttgggaacttaaaaccaatttgatgcctaattgatgtttaatgtytgcctcacaaatgtagtaggattatgggaagtagagctcagcaggattccattggtcgcttttacttctgaattcatgaagataatcatgtatatgggaagttagcaagagtga

SEQ ID NO: 160982 - DNA, 597 bp, Homo sapiens
aatacttactgagtataaccgtatgagttgaaaaccccttcttgaagagtggattggaatccatctcccagagccaagtaaatcaggacttttctaactattgttccttcacgtccctagccataagcagaaatctagaatctaaggaattggacatttggtttgcttccagccttcgggtattatacaagaagcatttaaaagctcataaacttcaactctaagcaactgtaagaaatcataaggtttagcttacttctgctaagtagatagataggcacagaggcagcctgataatgtgaaacgamtaggggccttagagtcaaacaaacctaggtggaatcctggatccattacttatcagctatgtttcctttagaaagtaacttaatattttgaaatctcagctcatctgtggaaatagatttaaaaactctactgatacataggttatgagtgccacattaaatgattcaacatatgcaaaacatttagcatatgctaaatatgcgaaatgctcaataaatagcaataattttcacagagtagatttttaaacaactgcttcagtgacatataattgccataccattcacc

SEQ ID NO: 160983 - DNA, 579 bp, Homo sapiens
agggtccgttgcaataacagtggcaacctcagttgcactctgtcatctagtgcaaaagagcattaaggaagggatcatggagggaaaataacacatacttacatagcttaaaatgtaaattaaaaggaaaaacatataaagggtatagatgcacagaactaattttctttaagcatgtggaaaatctctrtggaagagactgaactgtttgctcatatttctgtgatggttttcaagctgtcattcatcatgtattatgatagatacatctttgcatgcctacaaactgcactgaattccatttggttgggcatggagatgctaatgtggaatacaggaaaacagaggtcacccttcagtatttctacactaacaatgtgctttaattaaaacaaacaaacaaacactacagaagcagccctgctacctacgatgccttccttgcaggcagaggcaaaaaggtattggtcatgatctctccatgggaacctttcttcttgtcgtcatgattcagagtagggatgtaatgtttaaagaagatggttttggctctggcatgtggaaaagaaaggaaaaatt

SEQ ID NO: 160984 - DNA, 374 bp, Homo sapiens
tttcttcccttccattttgaacactctttatttctttctcttgtctgatttcactagcttggacttccagcactatgttgaataagagtgctgagtgggcatccttgtcttgttccagatcttagaggaaaggccttcagtctttctatattcagtatgttactagttgttggtctgtcattttatggcttttattatgttgtgatatgttccttctawacccagtttttttttttttttcgtgagtttttgtcatgaagggatgttgaatttttttaaatgcttttgcagcatctattgaaattgttatatggtctttcacctccattcttttgacttgatgtatcacattgattgatttgtgtatggtgaaa

SEQ ID NO: 160985 - DNA, 341 bp, Homo sapiens
catttctgttggggagccttatcatcatatgtcaaatgcaaaaattgactatatatgtggtaactgaggtagagtttgatagtcttacattcactcctggatcaaaatataggcactgtcagttacttatatccattaagaagaatgtgcatggataatatgacaaataacattattcaaaaccgtatggtaaattatatagtttggctgaagatttcattttctgactattacatttaatctgatgttggtattatttttttccccaacccctactcaataatcaytgtatgtggcacctcagtaaaagtgctggagtctggaagagaaataagcaaatt

SEQ ID NO: 160986 - DNA, 341 bp, Homo sapiens
catttctgttggggagccttatcatcatatgtcaaatgcaaaaattgactatatatgtggtaactgaggtagagtttgatagtcttacattcactcctggatcaaaatataggcactgtcagttacttatatccattaagaagaatgtgcatggataatatgacaaataacattattcaaaaccgtatggtaaattatatagtttggctgaagatttcattttctgactattacatttaatctgatgttggtattatttttttccccaacccctactcaataatcactgtatgtggcacctcagtaaaagtgytggagtctggaagagaaataagcaaatt

SEQ ID NO: 160987 - DNA, 566 bp, Homo sapiens
tgttcttaattttctagtttcttgatgtgcatcattaggctatttagttgaagtttttctacattaataatataggcattgattgctataaactttcctcttagtactgcttttgccatattccatagattttggtatcttgtatttccattttcattttaacacattgttaactaaagttggcactttattcagaatttttgatatttatttaayttttttccattgcgtacttttatccaggatactacattacatttagtcattgcatgtccttgactgtgacagtttctcagacgttcctaatttttgatgatcttgacagttttgaggaggattgatcatgtattttgtagaactctttcaactgggatttgtcttatgtttttcttttagttaaattggggttatatgtttttaagataaaaacaagaaaggtaaagtgccatttttatcatatgatatcaagggtacgtattatgaacatgatttttgactgttgatgttgattttggtcacctggttgtatttttcaagtttctccatcataaagttattcccctccc

SEQ ID NO: 160988 - DNA, 555 bp, Homo sapiens
aggcctttatttataaaattggaagataagaaaataatactcgtgaattatcatatggcaactatttgctggagctgaatagtgactttgtacttagcatgtgctttcccattcaccagagtttccctcactctgttttctgtcttatacaggactttctccatatactctatatttctgacccttgtaggtatatgaccttggccccttactaccttaaacagtatcaaatttgtatgacactgaatttcagtttttctccagtgatatagattaagaaaaaaacaattcatcactgtttacataccagggcctctgrttctctcacctcagactcctagtgtcccatcacctaagtactctccatgggcaactgagtgtccattcatgccctccaaaatgcttttccttgctattggtgtgcatgcagttttctcagcctcactcataaaaatgaactgtcacaggttatcagggaatgtctgaaattatcttgggctaaagtaaagaaggaaaagattggcttgattttcagaatcttgggaaaatatgctg

SEQ ID NO: 160989 - DNA, 511 bp, Homo sapiens
gttgtgaatatgagcgttggagtaaagccagatttgggtttaaattctggctctgcaacctaaytactgcaaataagagcaagctgctttacttttactttttaggtttcccttcgtttgtctctgaaatgggaataaaattcctatcacagaattgttgaaagaagtaaatctatatagaacatttggagtctggaaaaccctagatgttaactcattatttttatctcaatttctgatccaaacacagtcggagaagcagatacagtagattacaatcagcagatcaataagtgtggtccaaaattagttttgctgctgtaaagactgataatagagaatggtggcaaattgctttattgtttctatttattgtttcttttttattttaattttcttaagtgtcatattgactttttctcttcttttatattttactctctttttacaaattgaaataaatgagtgttaaatattcattagaagaaattaaactataaaataggtactg

SEQ ID NO: 160990 - DNA, 490 bp, Homo sapiens
ctaactgtaagattaaatttgctttcctctcttttcatggccttgaatttttattgtaattttaatcataatttagttattaacttattgagataggataataaaaatatgtaacatatggctgttaataattaaatatatatgtttctaaasaaatatttagaaatatatatttctatgtagacagaaatttgtgtgtgtgtgtatgtgtgtgaagaaactcaaatacattttgagaaagagtctaggtctgagcaaataacacagagtgaaaatggtaaattttccctttggctaaatctgcctcttggttcacctcatgcaagctttcttgactattccatccctgccaccccccgcacacacatactgattatactcttgctcctccatatctcttgatcattctatttctagtttatttgattgcataagttgtctacttcagtgattgccaagcctggatgatcatcagagtcattgaagaagc

SEQ ID NO: 160991 - DNA, 565 bp, Homo sapiens
ctgttcatgtcctttgcccattttttaagaggttgttttttacttgtaaatttaagtttcttatagcttctggatattagacctttgtcagatgtgtcagatgcatagtttgcaaatattttcttccattttgaaggtgttacaattgtttttggtatcctcgtcatgaaatattggccaggtcctatgtcaagaatggtatttcttaggttttcttgtgtttttatagtttgaggttttccatttgaatctttaatccatcttaagtttatttttgtatatggtataatgaaaggttatagttttaaacttctgaatatkgctagtcagttatcccagcaacattgattgaatagggagtcctatccccattggttgcatttgttaacttgtcaaaaatcagatggttgcaggtgtgcaacattatttatgggttgtctattgtattacatttgtctgtgtgtttgtgtttgtacctgtagtatgctgttatggttactgtagccttgtagtattgtttgaaactgggtaatgtgataccgccagctttttttttttttttttt

SEQ ID NO: 160992 - DNA, 627 bp, Homo sapiens
taaacaaaaccacctgctggactccagaacgctacctctagtataacatgaccactgagaaaaataggaactgtcttggtcttcttcagagtcagcatgagcttaaacactacagagtgggtactgctgagtacctgagtcagcggagacaactaaaacccttttggaggagccccatccactgctgcattgagaccaagtaggaatccagtgatctgaaggtgaggagggaggcgggaaatgtattttaggactatagtgcatagcagttaagcagactayttctagagccgttcatatgtgaaaagaagctgccttttgggtcttgtgaagtattttgtgtaggtactcaccaatggggaattataccttgcatctgtaactatgtactttgaggtttacaaacagaaataaaggctacgaactttttaattaaaattctatagaatgcaaaatgatggatctaaagaagaccattcccacactagcatcactgagaaaaaatatagctctgcctagattgttcacttggagagaaaaaaaaaaagataatccaggataaactatatgtgaaacagagagaattcacactttttatgaaattattttttctgggatacacccagg

SEQ ID NO: 160993 - DNA, 559 bp, Homo sapiens
gcaaaactatgtctaactacccaaatgatttgacctacttaaaacacactataataaaaggaaacagtttgataccaacatgtaaggatttttccctctttaaccaattgtttgagcatcatgtaaggtaggcagcatagtactagattaaaaactcatgtggctctgactggaagaattgtgggtgattttaaaatatattttaagttacttgtgttttcaaattttggtcaatgaaaatgtattacttctgtaatttttaatgtaaagtaataaatatcttataaaattttatatcagaagatttggaaaatcttaaaatgtcatcaaaagatcttttgctcattatccctgttttaaagcatacctggagccaaatttactaaactagtagccttctggtttacaaagcacttcattacttaaacccctttattttacagatgaggcaacaaaaacccagggtggataaatrtcttgctccctggcagggcacatagccaattggtggcagagactaagaaggatcactaaaacttgacataatcatcatttcatc

SEQ ID NO: 160994 - DNA, 547 bp, Homo sapiens
tatggtcaatgattctgttaaaatgtaagccaggttatgtcgtgttgctacttaaatccctccaaactcatcccaggggccttcaaggccttacataatctttttccctgttatctttcttcatttctttcctgttactctctacctgaatcactgtaacaatcacagtgacttctgtgtttgaactacacctctaggccttttcatttgtttactgtgtcaggaatgttatttccccagacatctacttacttccaagaatctgtactcaagtgtcacttaaagatgtctttctygatctatataaaaatagcaacacccacctaccctgtcccatccccagaactcccttactatgctttatttttcttcattttacttctcaccatctttctgtcttctgcactgggatgtaaggacctaagttcagaaacttgggtgtttttgttttgttttgttttgttttgttcactaatgtatcctaatccctaaaacaagatctggcaaatagtagaaacttagtaaatatctgttgaatgtattaatg

SEQ ID NO: 160995 - DNA, 562 bp, Homo sapiens
tagatttttgtcattgtaggagctagaggtagaaaaagacatggaaaggaatgaaccaatgaggaaacaccgctgcttgcaggccagcatcttgaatgtcctcatcacacgagtgtgtcctggatcccacccaaggccctccaggagtggatctgcctctagatttcctgctcttatccactctgttgytagatcacagaagcagcgccatgatttattatttaataacctacaaaacattattatagaaatgaaacattcaacaggaactgtgaagccatttacaatggaatcaacaagacaacaagacgtttgatgtaagagagaaggactgcttaggaaacaaataatccgtgaagcgtggagccgccccatcctaaaaacaaatacactttagagtaactgaatttaaatacttctaaatcagatacagtttttaaaaatgtatccttttatattatagtcatgctgaattaagtttgaggactattgctctgcagctatacacagatacattgcaaaatgactaacagcttaagctaaaatggttttccttttactg

SEQ ID NO: 160996 - DNA, 591 bp, Homo sapiens
gtttgtgctggatgaatgtgggcagtgaccctgtgtgatgtcagtaagctttgctgtgcctttgtagtcccagggatggattcgactaagccatgtcctctccttccaagtagttctttgggcactggtgaatatgtgcgtgttgttacctataattaggtgtgcaatttacaaataatctatactcgtgtctttttctgagctgtgcttgctggcccagaagaggtgaagggtggcttcagtccyatttatgtcacttaatgaatggaaggaattggctgggataaacctccatgctatcaaggagactctgcaaagatctctgcctcactgatgttctaatggagcatttgctcagttgcagcatgttgcccagagcagagagtagccgtcctgtagatggcaagaactaaggaggtggatcccaggctgcctttgtgggcattgcagaccaaattcgggtgcagggccctctgcaaactcaggttgaaaatgcaaatcaggtaatggagtcagtgataaattgatgagcgaagatgaagtatatctagcttttaaaaaataaaagggaggatctgccacaagtggtaa

SEQ ID NO: 160997 - DNA, 591 bp, Homo sapiens
gtttgtgctggatgaatgtgggcagtgaccctgtgtgatgtcagtaagctttgctgtgcctttgtagtcccagggatggattcgactaagccatgtcctctccttccaagtagttctttgggcactggtgaatatgtgcgtgttgttacctataattaggtgtgcaatttacaaataatctatactcgtgtctttttctgagctgtgcttgctggcccagaagaggtgaagggtggcttcagtcctatttatgtcacttaatgaatggaaggaattggctgggataaacctccatgctatcaaggagactctgcaaagatctctgcctcactgatgttctaatggagcatttgctcagttgcagcatgttgcccagagcagagagtagccgtcctgtagatggcaagaactaaggaggtggatcccaggctgcctttgtgggcattgcagaccaaattcgggtgcagggccctctgcaaactcaggttgaaaatgcaaatcaggtaatggagtcagtgataaattgatgagcgaagrtgaagtatatctagcttttaaaaaataaaagggaggatctgccacaagtggtaa

SEQ ID NO: 160998 - DNA, 575 bp, Homo sapiens
aaaaccccatctctactaaaattacaaaatttggccaagtgtgctggtgcgcacctgtaatcccagctactggggagactgaggcatgagaatcgcttgaacctgggaggtggagattgcagtgatccgagattgcgccactgcacttcagcctgggcaatagagtgagactccatcttaaaaaaaaaaaagtgcagctccctccatcctgcctgaacctgggttcattttccattctttaagggatttcttctcttattttccatcatgttcctagtaatatccttatatgaacatttgattattcsttctcagctacattgatgcctcctggaaacgctagactttccctgtcttacactctacgcattttccccttttgttcccccgctcaccttccaaaacaatcatgaaccaagatttggtcagatacacattccctgcttacaatgttacagtcatgtaattactgaactttgcagaatgtcctagtgtgacctgcttaccttatggggaggaggtcgcatagattatgtttgtccagaaggcgattaagtccctttaaaagaaaataa

SEQ ID NO: 160999 - DNA, 575 bp, Homo sapiens
aaaaccccatctctactaaaattacaaaatttggccaagtgtgctggtgcgcacctgtaatcccagctactggggagactgaggcatgagaatcgcttgaacctgggaggtggagattgcagtgatccgagattgcgccactgcacttcagcctgggcaatagagtgagactccatcttaaaaaaaaaaaagtgcagctccctccatcctgcctgaacctgggttcattttccattctttaagggatttcttctcttattttccatcatgttcctagtaatatccttatatgaacatttgattattccttctcagctacattgatgcctcctggaaacgctagactttccctgtcttacactctacscattttccccttttgttcccccgctcaccttccaaaacaatcatgaaccaagatttggtcagatacacattccctgcttacaatgttacagtcatgtaattactgaactttgcagaatgtcctagtgtgacctgcttaccttatggggaggaggtcgcatagattatgtttgtccagaaggcgattaagtccctttaaaagaaaataa

SEQ ID NO: 161000 - DNA, 591 bp, Homo sapiens
ttctcttcttctgctagtaccacacggtcttgattactgtagttgtatgtataartcttatagtcaggtaaagtaataaactactacttattcttctctttaaaaaatttttttagctactctgatttctttgcctttctatatgaatttagaatacatttttatagctatgggatttgggtagatattatattaaactaacaggttagcgttatgattagagcagtgacatctgaaatattgaatcttccaatccatgaaaaaaggatgtctttctgtttatatctttgatttttaaaattcgtgttttttactttcagcatatagatcctatatagattttgacatttttaaagctatatatttcatattttacagtgattggaaactgtaacaggtttgttatttatattgcattcctgaaatgaaattcctttggtagaactagtgattttttttaattagttcatttttttcccctactgatttttttccattacttctttctttctaatttcattgatttctgctgtgatttttatattttctttggaaaaattttgctattcttttttcttaaggtaggagctt

SEQ ID NO: 161001 - DNA, 591 bp, Homo sapiens
ttctcttcttctgctagtaccacacggtcttgattactgtagttgtatgtataaatcttatagtcaggtaaagtaataaactactacttattcttctctttaaaaaatttttttagctactctgatttctttgcctttctatatraatttagaatacatttttatagctatgggatttgggtagatattatattaaactaacaggttagcgttatgattagagcagtgacatctgaaatattgaatcttccaatccatgaaaaaaggatgtctttctgtttatatctttgatttttaaaattcgtgttttttactttcagcatatagatcctatatagattttgacatttttaaagctatatatttcatattttacagtgattggaaactgtaacaggtttgttatttatattgcattcctgaaatgaaattcctttggtagaactagtgattttttttaattagttcatttttttcccctactgatttttttccattacttctttctttctaatttcattgatttctgctgtgatttttatattttctttggaaaaattttgctattcttttttcttaaggtaggagctt

SEQ ID NO: 161002 - DNA, 406 bp, Homo sapiens
gaattcagtagatgcttaaagtaacccactctgcacgcgtctggtttgaactgcagtcaaggtgagtgtggtgtgagcagctgtcatcttacccgggcgtccacctggagcctccttcttgcctcgttccagaacccatgtctccatgaataaagttagcatgtggccaactcactggattgaatgtagccatcagttaggaccaaggaagagacccgggatacttcagtgccttggggtaaattggggcagctgttctcctgccagaccatgttctgagtgctgggactagaggcttttccctacaattctgcttttaatcattcagtcttgacttggggataggagacaasaaggcctggctgaaaaaggtgaggccgttattctccttttcttgatgaatatg

SEQ ID NO: 161003 - DNA, 608 bp, Homo sapiens
ttttagtgaaaaatgttaccatttattaaacattccttctgaaataagatgaaatagtcaggcccatggtggttaaatttgctccygtgatctcttctactacctgtccagaggaaatgagctgggagagccacttacctcctcactccctcggaggctgtggtcaggaggggcaggactgccaggaagcacagccagaagctggtaggctgctgtgggcatcagtccagctgaatggcacccaggccccaggcacctcctcttgtccctggagtggaagagatgggggcttgggttctggagaccccgatcacttgtgttggaagctgctcccacccagaggcttggtcatgtgagagccttggctcactggggagagggtggggaaggcctcctggaggacaggggctgtgtttgtattttgctttgtgcccacatacctgtgtgttaggcttctattttaatttccagtggttttatttcgtggaacctttctagcgagcgtgaaaacctttctagcgagcataaaaaagtggacaagggtgtctgtcttagtcagctcaggatgctctaacagaataccttgtccctggagtggaagagaattc

SEQ ID NO: 161004 - DNA, 528 bp, Homo sapiens
gccttgctgtattttcccactcagtctatgaccattagatcacaccctttttgtttaatcatatttctacacaactgtccatattttgttgaaactaattataaaaacagacaatctcccccgtgtctctgggtcttcagtctgaaggttattgtatatacatgttaaataaatgtgtatgtcttttctcctattaaccttccttttgtgaaccgacttttcagcaaaccttcggagagccaaagagaaagctcttccttggccccgtacagttcatttaccaagagcaagtattaaatgagtgaataatacttatcacgtttggagaacytgtgatatgccaagcatggctttccaggatttgtttaagctaatcttttcagcatccttgcagagtttttgtcaagagattgaaatgcacatcacagttgttaaggagcatcccacaactagtgaactgcaaaaactagtcagacaaccaggtaggtgtgactcacacaaccaaaccatcaactctttccacacaat

SEQ ID NO: 161005 - DNA, 555 bp, Homo sapiens
ttattatatgacttttatttgagacaggctctgtcatccaggctggagtacagtcatrcaatcatggctcaccacagcctccacctcccgggctcaagtgattttcctatcttagcctcccaagtagctgggactataggtacatgccaccataccaggcttttaaaaaattattttatttttgtagagatggtgtctgactgtgttgaccaggttggtttttaattcctgggctcaaggaatccttcccacctcaacctccccaagtgttgagattgcagacatgagccactgcaccaagcatgactgtttttaattgatgagctgagaacacacacattttctgttttgtattactttgaggaatacttcactagaggcataagtgaatgacgatatgggtaagaaggaacaatagcattatcaggcataatagctggttgaatgtatgtcgtttttgctggcttaaggtaatctatatggtaaaataaaataaagaatcacttcaactttacatttaaaactttttctactttatttttacctacaaaacat

SEQ ID NO: 161006 - DNA, 429 bp, Homo sapiens
tgtgttttattgttggatcagtttcaaattaggcacagatccactgaactctccttggacataggcttctttcaaagagaaaagtacctaatttatagttagctttataagctgatcaacctgaagggggraaatcagcgcaacaagacttcatatgttctaatttgtcatttttaaattctggacacagtctaataattgcaaactattattaaggtgataattaactgactataaaggatgctttttcagaagcatctcagtgacctgagtaatttatatttaccctcctaaaactaagaggctaagtatatgctagagaaaattggcctagagaatgcattatttcacaatatgctgtgattatacatgggctgacagtcatcagcatttgttgagttattttatgtaaagcctaatgctacgtac

SEQ ID NO: 161007 - DNA, 630 bp, Homo sapiens
taattttattcaacaatttcacccttcctcatttagaatttatgttaagattgtattctttcagagtgcattgttttacattgaatactgaaggaatatttcaaatcagtctcttccatgaactcattatttagaattctcaaaatatattcaagtgtggcattgttaatcagaatgaattatctactacttgtcttgctgtaagttccacaatacatggggtggtttgatgtaggaataataaggtagataattaattaatgtttttttaaaatagtcaaattaattacaattaaaggagcaggataatagaaatagttatgtatatatctgaacttgatttgcatttaacatattccaaatttcatttaaaccaagtttgtacgtaagtaaacttgaaggaaaaaatattattgctcmaattatagaaccagatcccagaatgcaatgtgaatatataatatttatgaaagaaaggtgggagttgtgttatctatcaaaattcaactttaatacgcatagtatgaaagcaatacacatatatttttacaatggttaccttttaagagttgtgtgatagacactgattgttcacagttattgccttcaatccatgacaaggtcttccct

SEQ ID NO: 161008 - DNA, 597 bp, Homo sapiens
ccatcctgatcaacatggtgaaactccatctctactaaaaatacaaaaattagctgggcrtggtggcaggtgcatataatcccagctagtcgggaagctgaggcaggagaatcacttgagcccatgaggtggaggttatggtgagccaagatcacgccactgcactccaccctgggcaacagagtgagactccatctctaaaaaacaaaaacaaaacaaaaactggcttggtttaggtggagagaacaagttaggaattttccatttcaagcctactggaggctgtagtgatgctacatttcatctgtatggaaaaccttcttacaacaattaaatagagcatattttaatttagtttccaataagtttagattgtgtaattcaaggttacttttcttttttcaggagacattctcgcacatcatggtttagtatctaatccagtgagttcaatggttgttaaaggacaattcaatgcagatttgaaccatcaaagttttacattcaatggacaaagaggtgaggctaagagatgcaatcaagtagctgggtaatgtcccttggaatataagaagatgatcacaaggttgactgtag

SEQ ID NO: 161009 - DNA, 529 bp, Homo sapiens
ttgaggaccttctctcttgcaattgcatatggccttataactgaattctgactttatgtctctcttaggatagacagataaaaatttttcatatgtgatcttctttctgtccyctacctctcagctatgagcctgaaacagcagattcagtagaacagagtttctcaggaatggcagagccacaagttgggaggagcccagctctgtccaacaacctggaacatccatcaaccaggaaaactgttgcactttatgtgattaagaaacattttttaaggaaaaaagcagtaaatttttgggttatatttgttgcaatagctgtgttactttcctaatgcacaatcacaaatgtaaaatgccacacacagagtgtgaggaaatatattgctattggactacttgtagtctatttaatttttttatatagctatagccagatctggggtgaaatggtttagaataataatttccaatagtatacatcatacctttaaaaagacttttatggatggataaatatctaattatg

SEQ ID NO: 161010 - DNA, 625 bp, Homo sapiens
tagtatgatctcattcatagaaagcccacaaaaattataagaatacttggcaacactgtttagacaggagagagatagtttaaaatttaaatgaaaaaacactttgggccccaaaactttkaaaggctggaagtagctaggaaaactactcacttacaggtacaggtcatttgttacagaaaagaaaagaggatttggagagtagattcaagagcttagagagcaaaatcaagaaccacagataatcaaaaccagggaggaaaattgagcccttatcaacaatcttttttgccctcagagtagggagaactggacatgagtctaactgaacttctgaattgctgcgaaccagtgacttctatgttcctccccttcctctagcccccactgtttgaacgagactgtacatcacactttacctgcccctgacctgccagtgtatattgggtttgtgcggttgcagataaactgtacttttaattcaaagcctttgcatatgaggaattgcaacctaggagctgtgcctgagaaactgcaccaagatgcctcattgcacatgggcgtgacttagataatgaaaccttgatttcaatctgatattgccatgtcatgaaacttttgggga

SEQ ID NO: 161011 - DNA, 480 bp, Homo sapiens
acttatttgataactgtgtacgatgtagcaaccaagtcttaagacctgcccctcattcttcctccaaattccatctataaatgcagactcaaggcaacccaaaaagggtcatcacrctggccacaaatctttgttgaaaaatgcacaagtcaatgaagcatacattgtcgcactaatagtagtctcataaccacttatattatgttctgccaaagaaatatcttatcatatttgcaatgtgctgatctttcaaaagaaaacatctagtcttggtcctagaaaaagacaggtatttttccagtaaaattgaatgggaacggaataaacgtttgtctactagctgttataaaccggctttgtaccaagcattccatgcattttttaatttaatcttcatcataacctacacagtgagatttatttgatctctcctgtaaagatagagaaagtgggtcacagcagtgttttgttatttcatca

SEQ ID NO: 161012 - DNA, 588 bp, Homo sapiens
ttctgtaatatctctcataagcaagtaaagatccctccttagactcccttaattcacctccaactactgctttgttcctcagcaaccctttagagaaaaacctctaaatagagttgtctgttcttactgtcttcacttccttggctctcattgtggtttcagcacacactgattgagtgttcacccctctcactcccctgaacttggccttctccagacaccagtgatctccatcttaatttacctgtaaccatcattgtarcaggttatcacctccttccccttgaaaattcttcagatctcactggacatctccattctgcctctattgatgactcctttacttcttccaacattttacctcagtcttcaacactcttgtctatctactcccctctccttgagtggtctcactcagttccatggctttaaatacatttagatattgaatctcaaacctacatctttacattggcttaaatctccagctgcctacttgacatctatgcttggtgaaccctagtcagcctctccacacttccttgtttcaataaatggccccaatattcacctagtttttcagactca

SEQ ID NO: 161013 - DNA, 582 bp, Homo sapiens
tacatatcaaaatatgagggcacagaatggtgtgtctgctgctggatagacacgggtgagttgctggctgctgtcaatagaatcacaagagaaaggacagttgttatagtgtctttgcacagacagkgtgtggcgctcacctgaatggagattggattttatgaggcactgacgtggctcctgacgctaagtcagatgtctcaccccagcctcgatgacctctctccctcgtcatgctcctgcctctccctgcaggaactccagcctcttctgtaatatctagcccagatcttccttctggttatgacttcctcaatgtcctgatttcccacatgaaatgtcacaaagcattttttctgatttttctaatataatatctttccataaaacaatgaatacctccaggtctaaatggggctgtgtggctgtgtgatacagtagcccctagccatatgtggctatttaaatgtaaatttatcaatattaaacaaattttaaaatttaattcctagtcacagtatcacatttcaagtgctcactatcctggtggtaaaggactactatattgcacaatgcaagtag

SEQ ID NO: 161014 - DNA, 582 bp, Homo sapiens
tacatatcaaaatatgagggcacagaatggtgtgtctgctgctggatagacacgggtgagttgctggctgctgtcaatagaatcacaagagaaaggacagttgttatagtgtctttgcacagacagtgtgtggcgctcacctgaatggagattggattttatgaggcactgacgtggctcctgacgstaagtcagatgtctcaccccagcctcgatgacctctctccctcgtcatgctcctgcctctccctgcaggaactccagcctcttctgtaatatctagcccagatcttccttctggttatgacttcctcaatgtcctgatttcccacatgaaatgtcacaaagcattttttctgatttttctaatataatatctttccataaaacaatgaatacctccaggtctaaatggggctgtgtggctgtgtgatacagtagcccctagccatatgtggctatttaaatgtaaatttatcaatattaaacaaattttaaaatttaattcctagtcacagtatcacatttcaagtgctcactatcctggtggtaaaggactactatattgcacaatgcaagtag

SEQ ID NO: 161015 - DNA, 388 bp, Homo sapiens
gcgtcagatctgctgcattaaattctcacaggagtgcgaaccctattgtgaactgcgcatgcgcaggaccaagactagcttttgctctccttttgagaatctattgcgtgcctgattatttgatttctaacaccttcatcccgaaaccatccccacayccctctccatccgtagaaaaattgtattccactaaactggtccctggtgccaaaaacgttgcggatctctgctttaaatggtttaaatgttacattgtaacgaagagtggaggaccgcctcacttggagccgacggacctgcgcacaggaactggttgaagggcccccgacgggtgggacaggtgtagcctcctcacctcattttcccctgcgcttcacagacatctagc

SEQ ID NO: 161016 - DNA, 507 bp, Homo sapiens
ataaacaacaaagaatggaaagaagtaagaaaggattagaaaaatactggcaaatattgttgataattcctttcatttaaatacaaattatgattacatttaagcaagagraccacatacaatacattttgaatactcaaatccattaaaaatgaatataaactctctttctttaccaagcattttttttgtaagacagctttcatgggaagtctggctacatatttccaattacttagcatctcacctagcaataaggagatatactcattaattttaaatcgtttattccagactaacaatgagctggcatactgtttgtgctggaaaggttgacatggaaagagctttattcaatatttgtttttattattatcttcataccgtcttactaaatagattacttatgaatatggtaatgaataatttggactcatagtttgctttgttaaacaaagcatcagcatctgcctcaggggaatctcttacttgagtcttagcttaaaa

SEQ ID NO: 161017 - DNA, 609 bp, Homo sapiens
aaaagactgggacttttttccacctcccccccgcccccccgccaccccgccccagcttctttgtcaaacagaatatcatcaaagaactcccggactctggaagatgaaggcattgccgccatggcctgaggagattttactctttgtcaataatcacrcctaagagatgttcagggtccggttgggtgtgacatatgccactttcaaaacaaatgctcttttaaaaatacacaaatgttggcagctgaaaagattgggggtttctctgcttttgcaatacacaatatttttcaacattctttaacactggactccagagtgatttaaaacacactatgttcacggattcctttggccagtactgaaacgcacaaataagacagacatgcatgtatagaaagattattacagtttccaatcaagaagtaggataggtaaatttaaatgttgtcacagtcaatgtggttgcaaatgcacagaggattcctggattggtttaagattcagttgacctacacctttcaaaattaccgagttcaaggagggacaggataaaatgcggattctcaggcccagtgtaaattaacattcccatggatgggttatagt

SEQ ID NO: 161018 - DNA, 577 bp, Homo sapiens
ggaaatttggtaatactgagccattgctaacttgcctctggtcagctctgatgcaattagcagcaggtaaatgtgcattttgcacttcacaagccctgagattgagctaaaataagcccaagatggtccctaccaaaacctccagctcccgttagtgatagctgcctaaatcatttattgaaaggctgctagcaaactcaataagggagccagttttgttccacggatgattatgtctcctgctacacatataaaacctcgttgtgtcttcacagcgtcctcctgaaaagtctgcgtgactatttctttccttcaaaaagcagaaagaaaaaaaatgtgtgrtgttatatctcagtgaggtaagaactcaattctgctttataactgagcttactgcccacctcaccaaatgaatcaacctgattagctgtcgagtacaaactgctctcgcccaccacagagcagtcacctttacacttaacagcacaggaaaattacaatttcaaaaaaaaaaaaaaacatttagtcacttactttaaaatagcaaatccagtcattgtcatgaatgttgcttaac

SEQ ID NO: 161019 - DNA, 502 bp, Homo sapiens
gtgacaaccaaaaaggagcttcctccagatactgccaagtgtcccccctagggcacagttggccatgtgtgaatcattgattgaagttaacttcagtacttaggatgaacttcccaaaagaaacaaaaygtgcaatagattttacctagcatatttttatgtctgggtcatatattattcagccaatcacttagaaacagtagttagaaacctatccttaatgattggctctacagttgactctacagctaaagccattgggacccaacacatttccctagaacagtcattccctagatctttttgagtttcaccctgatttttgtgatgaaattaagaatgtaaagcagaggactggtctgacccaagatattggatcctcaatatcacaacctcttaagcccattaaaccattcctaagaactggggacaaccctactgagctcagacctctgactcaccaggaaacttggatgggatcgagctgcagtgggtggcaatc

SEQ ID NO: 161020 - DNA, 527 bp, Homo sapiens
ctgtctttgtgctttatctkataggaaaggttgtaattagtacatgtcagttaaatatttgacagacctcatccttgtgagtgagagattaactttagtttataggcctagtttttattactcatatgtccaaactgaagcaatcttgagtcactttaaaaacatatttttttttaggttttcctttttttgacagttcagtgaactattggggtcatcaaattctagaattatttccctcttttgggagaaggagatgccggcatggtttttctctttaaaaaatcttatcccagtaaatgagctggagcagactccaccagcaagaaaagatgagtatcctgtaaaaatcccaagcagaaagtaatagattgggacagaaatgctatcaatggcttattagagactgccaccctttggatgttttattactctgaggtaggggcagatggggttgaactgatagggttgttcctgtgtctctgagaacagttagaatcttattgccaatctgaagagtaatctcc

SEQ ID NO: 161021 - DNA, 499 bp, Homo sapiens
tgactatcaagaaaaccagaaccattctgtattgaaggtagagtgaatacatgagagatgaatagagcaaaaataaaatctgagtaatatttgctgaactctgcaagttcagcaggtggacctgaagagaattatatttctagagcaatgttatgtatctcaagtgcttttttcccctggctccttgactctgatttagctgggtatgacaagaatgacctaattagtatgatcaactttcacagtataatggagggacccaattcttcctctctatcgtcataaggttcattcttcttatagtataaagtccacatttcttygttcaaatctattgagagaagaaatataacagctctccaagaaagagtcctggaactcaaccaagttagaccacagaagtcacatctatccctgaaccagtggttgtggctacaagaatgaaacatgctgactgtcaagaaaaccagaaccattgtgtattgaaggcagagtgaac

SEQ ID NO: 161022 - DNA, 412 bp, Homo sapiens
taggaatacttcggtttcaagtccctgggccaggagcctgagctccaaaacagaagaagataagatatgagaattaaaggaaatttaaagtgaaaacttataaaactcagggacgccaaccagggagtaggaagtatcctctcctcacacccccatracatcctttacctccataggcctaggccagtcccaaactggaatttgagaagtttgctttctacctgacattttgtaatgtaatgcttaactcattttcattcattttctttcatcataaaataagctcatcaccattttgagattttataaagggttatattttaggcaaaagttgagagtcttttgacttttttaacctttttaaaaattttgacccatgtgtagatcaataaaactaccataaatttaaaca

SEQ ID NO: 161023 - DNA, 412 bp, Homo sapiens
taggaatacttcggtttcaagtccctgggccaggagcctgagctccaaaacagaagaagataagatatgagaattaaaggaaatttaaagtgaaaacttataaaactcagggacgccaaccagggagtaggaagtatcctctcctcacacccccataacatcctttacctccataggcctaggccagtcycaaactggaatttgagaagtttgctttctacctgacattttgtaatgtaatgcttaactcattttcattcattttctttcatcataaaataagctcatcaccattttgagattttataaagggttatattttaggcaaaagttgagagtcttttgacttttttaacctttttaaaaattttgacccatgtgtagatcaataaaactaccataaatttaaaca

SEQ ID NO: 161024 - DNA, 503 bp, Homo sapiens
gcaaattaatgcaggaacagaaaaccaaataccatatatattctcacttataagtaggagttacaaactgtatactcaaggacataaagatagcaacaatagacagtggggactactaaagcagggaggatgggggggtgtaagagttgataaactaataggtactatgctcactacctggatgatggaatcatttgtattccaaacctcagcakcatgaaatatacccatgtaacaaacctgtacatgtaccccctggatcaaaaataaaaattgaaattattaaaataaataaatgaattaattaattaaatacgattggccattggatgcaactgcaaattgaaacaagcccagaactgattatgctagagcaagagagaaaatttgccagtggggtggaagaaatcgccaaatgagacaagaaatgaccatcaggtagagaagaaaagccaaaaacaaggacaatcatgttgtatagagaaagaggggaaaaaaagatg

SEQ ID NO: 161025 - DNA, 503 bp, Homo sapiens
gcaaattaatgcaggaacagaaaaccaaataccatatatattctcacttataagtaggagttacaaactgtatactcaaggacataaagatagcaacaatagacagtggggactactaaagcagggaggatgggggggtgtaagagttgataaactaataggtactatgctcactacctggatgatggaatcatttgtattccaaacctcagcagcatgaaatatacccatgtaacaaacctgtacatgtaccccctggatcaaaaataaaaattgaaattattaaaataaataaatgaattaattaattaaatacgattggccattggatgcaactgcaaattgaaacaagcccagaactgattatgctagagcaagagagaaaatttgccagtggggtggaagaaatmgccaaatgagacaagaaatgaccatcaggtagagaagaaaagccaaaaacaaggacaatcatgttgtatagagaaagaggggaaaaaaagatg

SEQ ID NO: 161026 - DNA, 583 bp, Homo sapiens
gtaagcaaacaggcactcaaagctttgagaggaatgtataacaatatatttttatgacttggtaaagatgtccctcaaatacccttctagcagatgagcttatttattagtagaagataagtgcattagcaattagtatttgatcactctagtatttcaagyggaaggagaattaatacaaacagtattaattcttgcttatcaaactatcagacatgctggaggaatagaggtccggaaatacagactcttgctatcagtgatggccattacctctcaaacattcagaaatttgcagtaaccacaggaagacactgacaacaatcagagctgcctctagcactgaggtggatcattcccagggccatatctggaagcccctgcaaaatccgacatcacttgaagcccacatttctgatcactactgccaagaggagcaataatggatttccgcgtttctttcactttccaaatctcatatcttctatgtgaagcaaatttctgccttcccctctatgtcagaaactagaagttttcaggcagcatcaagtcttccaatcactaaagatttttggcagaaaaa

SEQ ID NO: 161027 - DNA, 632 bp, Homo sapiens
ttttctttctaggtgtggcctgttttacttcctcttaattgctacctttcatatgcagcattgaattaaaatcattaagtggcttctgtaaaaatattggcaacgttttcaaatttttattaaaatttcgatcttttaaagttttaaattatgtcctccgaggaaaggtattggcaatcctctgtgagttttctgcaaagtaaaattaatctttaataattaagaataggaaaggcaacttggaactctgcaaaagtaggagacttacctatccatctggtgcaatttgtgccagttataccaattagtacaaatttaacacttatgagaaaatttctataataagtagaaaacgaagctatattatcctaacctagcttgctaaatttcaggaatcatctctggtatttgtaccatgcagggattaggagagaggaaactgtaacccctgtcttctttaagccaggggtagtttttgttttgttttgttttgttttcttttttctatcttctatacacttctttcaatctctgttaaaagacaccaaaatattctttcctctccttccygcacattgcaagtctgggtcagataaagcaacaaaaggcactggttaaggggaaaggtttca

SEQ ID NO: 161028 - DNA, 622 bp, Homo sapiens
tccattccggattcaacagtttacagcagtatttcctcaaagtatattctgtggaccactaatcccaataaatacttcatgggtcaagagttctatagtcaaataagtgtaggaactttacatagcatatcccactcttaaagttttgcaatatgcattggcatctttgagaagcctsgtgttaaagacacttgtttaactttatttactcttgcatttctaagccttatttgaccacaaaaaattctttttcaaatggagcttacctttatgggcatgtagcagtcatagatagagtcagttctcatagccatttatcccttcttcatttttacaataaatcccattttagctgggtacattgccattcagccaaaaagttttcttgcccagatccccttgctgctacatctggtcaagtaactaagttctgaccaatgagatgtaagtggacataatgtgtgtggcaacttagaaatacccttaaaggcaaggagcattcctatctttcagttgcccccttcctcctttcagctgatcagaatgcagtgttggctacagcctcagaagttgaaccaggaggaggggctcactaaagacaagaaagttgcaagacagcagg

SEQ ID NO: 161029 - DNA, 451 bp, Homo sapiens
aatttcaaattacatccagcttgagagttttggataaaaggtgatggatcgtattactgttgattgaaaaaggaaaatagagacaactactttgaggagacaaatagttgatgagagatatgttgagtttgaggtaatgagagcacagaagtgaaactattttctaggtgattggtgatacctgattggattttcaagcaaataagcaggatacacatagaagtgaaatttcaagtcatgagtaggaatgaartctcctagaaagacaaggggaaggcaatgggaagaaagctgtaaggggattattgaaacaaggtgtatgtatgcaccgcatgtaacaaaaagctctggctaagctatcaaaaagccggtgtttagtagggttgaagctgagtctgtaagaataggttgagatggaaaagaagcaggagagtgccatacttgccaagga

SEQ ID NO: 161030 - DNA, 449 bp, Homo sapiens
aattcatggaaagtacttttgtaagtactcttaagtacaggtttctaataactttggagattatacaatttgattaggtaaaaatcacaaaatttttaggactctaattaaaaagctgatgcattcatggcaactgctaacgcaacatcaagcagaagaagagttaattacattggctaaaagtaacagaaaacygaaatcattttaatgactttttttgtttgaacattgctgattatttttgttttttttttcagagttaaaacactttttttagggctatttatatcttacaacagattggataaagcatacttttgtgaacaaaatttgaagcatatttctttctacctgccttcttcagaatttagaaactatttgtgagcatttttagtttctaggaatataatgttttgtgtaagttcagcaagaatatgttttgtttttta

SEQ ID NO: 161031 - DNA, 482 bp, Homo sapiens
aaatgcacatttatatgtcagarctctaataggctaaaaataaagatacacacctgcacagtatcagaggctagattcagaataggaaacactaaattcagttgaaactaaatcaatagaaataatttaaactgaaatatagagaggaaaaaggaatgcagagaaaattagaccacccaagaggtgtgggaaatatcagctgagctaacatataagtaattggagtaacagaaaaggaaaagagagagaatgggaccaaaaaaaaaatttggaaaggtaatggctgttttctcccaaaattcatgaaagaaaacaaccaagaatcttagagaatcccaaacaagataaatacaaagtaaagtatagttaagcacatcatagatagatgatagctgacttcccatcacacactaggcaattcaaaatcaaatatataattaattttaaaatattaaaagaagaaaagttgtcacctcagaatt

SEQ ID NO: 161032 - DNA, 382 bp, Homo sapiens
cctctgcactgctttagtagaggttctccatgagggctcagctactgcagcaggcttttgcctggacatccaggctttgccgtacatctctaaaatctaggtggaggctctcaagccccaactcttgcactctgtgcacccacaggtttaacaccacatggaagctgccaaggctcatggcttgcactccctgaagcagcagcctgagctgtatctggggtccttttagacgtggctggagctgaarcaactgagctgtgaagagcagtgtccagaggctgcaaagggtattggggcccttgccctggcccacaaaaccatccttccgtcctagacctctgggcatatgatgggagggactgcccctaaaggtctctgtaat

SEQ ID NO: 161033 - DNA, 382 bp, Homo sapiens
cctctgcactgctttagtagaggttctccatgagggctcagctactgcagcaggcttttgcctggacatccaggctttgccgtacatctctaaaatctaggtggaggctctcaagccccaactcttgcactctgtgcacccacaggtttaacaccacatggaagctgccaaggctcatggcttgcactccctgaagcagcagcctgagctgtatctggggtccttttagacgtggctggagctgaagcaactgagctgtgaagagcagtgtccagaggctgcawagggtattggggcccttgccctggcccacaaaaccatccttccgtcctagacctctgggcatatgatgggagggactgcccctaaaggtctctgtaat

SEQ ID NO: 161034 - DNA, 555 bp, Homo sapiens
cagcatgggggtagccacccccatgattcaattacctcccactggtccttcccataacacgaggggatcatgggaactaaaattcaagacaacatttggatggggacacagacaaaccatataattccatccctggcccctcccaaatctcatatcttcccatttcaaaacaygatcatcccttcccagcagtcccacaaaatcttaactcattccagcattaacctaaaagtccaagtccaaagttcatttgagacaaggcagttctcttctgcctatgagcctgaaaatcaaaagcaaattagttacttcctagatacaatgtggggggacaggcattgggtaaatacacctgttccaaataggagacattggtcaaaatgaaggggctacaggccccatgcaagtctgaaatccagtggggcagtaaattcttaaagctccaaattaatctcctttgacttcatgtctcacatccaggtcatcccctcttggctgctttcacgagctggtgttgaatgtctgtggcttttccaggtgcacagcaaaagatct

SEQ ID NO: 161035 - DNA, 555 bp, Homo sapiens
cagcatgggggtagccacccccatgattcaattacctcccactggtccttcccataacacgaggggatcatgggaactaaaattcaagacaacatttggatggggacacagacaaaccatataattccatccctggcccctcccaaatctcatatcttcccatttcaaaacatgatcatcccttcccagcagtcccacaaaatcttaactcattccagcattaacctaaaagtccaagtccaaagttcatttgagacaaggcagttctcttctgcctatgagcctgaaaatcaaaagcaaattagttacttcctagatacaatrtggggggacaggcattgggtaaatacacctgttccaaataggagacattggtcaaaatgaaggggctacaggccccatgcaagtctgaaatccagtggggcagtaaattcttaaagctccaaattaatctcctttgacttcatgtctcacatccaggtcatcccctcttggctgctttcacgagctggtgttgaatgtctgtggcttttccaggtgcacagcaaaagatct

SEQ ID NO: 161036 - DNA, 629 bp, Homo sapiens
gttttccaccagtactggccatcccctcaccctcctacaccttttactgttccaatttagcaataagatctcctgattccacagtctgccagaattccccagaatrctggctctttttacagtttctttctatgagttgaagggcactgtttaaagttatgtttcttaataactttcccaattcactattttcttttttccccttcatctccatcttgagtatgcatatcttcatgtacttacatgtgtatccatttagatatctatgtgtgtgtaatttatctttatgtctattccttccccttggttttgagtttctggcaggatagcaactgtttctatttctacacagcacctaatatagtgattgccgcatgacagatactgaatatatgttatttaggtaaatcaagcaaaataatgttatagattataagaatataattgacaaaaagaattagctccctgaatatttaagattttaaaccacgtttcaatgaaaaagtggaacataaaaaataaaagaagtaaagcatttcttctatacaccctatgaagttgaatgttaaaataaagattcaaacaaaaagccaacagagaagcaggaccctaaaatcctgaagaggcat

SEQ ID NO: 161037 - DNA, 642 bp, Homo sapiens
tattaggcaatttcctggggttaaaaaacatacagagaaacttagatttttagactatcaaaaataatctgcttcaactttaaattggtacagtcaaatttaaaaataattacagcattaaacaatattccttttccagactcttccctctgtcataacacaggaattttggcttccatctatccaatccttatggtaattttaagttgtcagcatgttaaactattaagttgaaacaataattctttatttttttaaactaatattctgtctaaattgcttcagagcttcaaactcaacatgtttaaaagaaacctctcagtcattcaatatttagtttcctaagtaattttccttctaggcagaaaagtaattggtctcagaagctgattttgttctcccttctttgcactggctgccagaaagctcagaaccaaatgtgcggttaatgtatatgacctagagtacgcatgttgtttatcaacctcactccaagcttcctgctatttttcctgtacttatattctaatttccttacttgtcttactttgcacattttgtgattatattctgtatttatatgtcayattaaattgcttaattttttaagttgggtataaatacactcaaaaataaattaat

SEQ ID NO: 161038 - DNA, 482 bp, Homo sapiens
tcttacagtgacagaaaacagcctaccatacatcataacgcaagtctgttgaggctggtgaaacaaaatctggtgactatatcacattaatttttgatgatgctaatattggtgatgataatgacagtaagcacacatagcaatttgctatttggtagggattcttctaagcatttatatataaastaatttagttaccaaaattatcctaagaggcaggtaccattattgtttctattttgtgtttggaaaaaaaagctataatgcatagttaacaaccagcagcaatgatgttttgaaaggaccagctctcacatccagctcttattgtgtgcacctctattttgaaatcaatctacttctagacttactgtaaaactcagtcttagctatgatgtccatggctagtaaaatttaaacttggaatatgtttaaatgtaaggctgttggttgagtaattgcagattatcaccacccaatga

SEQ ID NO: 161039 - DNA, 497 bp, Homo sapiens
ggcacaaatgtctaatcaacacctgcagtctgggtatacattggttagtttactctgcatgctgctgaggagggtaacctaacgatgcttctgatagactaaacatttgcaaatgatccctccagtgcctaagttatccatgcagtataaagcaagtaggcctggtttgaagtactttgcctttctttatttattatgacaaataggttggtattatttaaacacaccagcagctcatgtgtctttcatttaagatgctacctatttatgtgattgagagaaaaagcagcagaatggcacaacttaagttaactggcactttctatgcattttcaatgtgtttttttttacataatgtgaatgatacttttcatttatttgaagaattttataaattgcttgttaaaacatggatttatttattaatttggtattttaaaataataataaattayatagtacaacaatagttttttatgccataaataagtaatgca

SEQ ID NO: 161040 - DNA, 603 bp, Homo sapiens
ttaggtgattttgtcgtgggagcatctcagaatgtagttacatgaacctagatggtatagcctactatacacctaggctatatggtaggctctattgctcctaggctaaaagcctgtatagcatgtgactctactgaatcctataggcaattgtagcacaatagtaagtgcttgtgtatctaaatatagaaaagatacagtaaaaatacagcataaaatataacaaattttacagtayctttataggcatttacccttaatggagttgcaggactggaagctgctctggctgagttagcgagtgagtggtcaatgaattcggtgaatggcctagggcattactgtatattactgtagactttagaaacactgtacacttaggctacactgaatctataacaaaaattttgtttcttcaataataaattaatcttaacttactgtaacttttttactttatacactttattttttaaaattttttgactttttgacacaacgcattgtatggctgtacaaaaaataatttttattcttttcttttccttttttttttttgtttgagactgaggtctcgctctgtcactgaggttagagtacaat

SEQ ID NO: 161041 - DNA, 603 bp, Homo sapiens
ttaggtgattttgtcgtgggagcatctcagaatgtagttacatgaacctagatggtatagcctactatacacctaggctatatggtaggctctattgctcctaggctaaaagcctgtatagcatgtgactctactgaatcctataggcaattgtagcacaatagtaagtgcttgtgtatctaaatatagaaaagatacagtaaaaatacagcataaaatataacaaattttacagtacctttataggcatttacccttaatggagttgcaggactggaagctgctctggctgagttagcgagtgagtggtcaatgaattcggtgaatggcctagggcattactgtatattactgtagactttagaaacactgtacacttaggctacactgaatctataacaaaaattttgtttcttcaataataaattaatcttaacttactgtaacttttttactttatacactttattttttaaaattttttgactttttgacacracgcattgtatggctgtacaaaaaataatttttattcttttcttttccttttttttttttgtttgagactgaggtctcgctctgtcactgaggttagagtacaat

SEQ ID NO: 161042 - DNA, 511 bp, Homo sapiens
ggcttttcaaaatcttggtggaagccaaaaacaccatttactcctctttacctttggtgacctttgcatctctccagacactgagaactctgctggagctgctcaccaaaataamtgagtggcttgtggcagataaacatgtaagatggaaggtaaagatacacattgttttttcaccgacaaagggagaagtgggttacaacagatgtttctggcaaagctgtaacagaaaccaacaaaagtctaccccaaacaagcaggaggtaatctggtaggagagggaatcaggagaatcttagagttactgagaaaggaggatgagttctgtcttaaatagaatcccagatttgttcatctgaacatgtaacatgtaattaatgtccggcatttagaaaaaatgaggttcccagttaaattgctttgggatcctttagaagagaggctgaaagtcaaacacacggacagtttgagaatttaaccttaccttatctaggcttcaccacccgcttca

SEQ ID NO: 161043 - DNA, 549 bp, Homo sapiens
attgtattttgtaacccacagtgtggtccacaggggaaatgagcagttgataagtatatatccagtacacttattctaagtgataattaaaatcggagcagagaaacgcagaaggagccatggratgaaattgtcaatctaaaaattgtcaatttgaaaatctcgcctgatttttctgcaatcagcagttcaaggaaccttatcaaggacccatctctgccttcctaggttcaatttggaagagaattaaaaaaggagaaagaaagtttatattgcataaaggcctgctggtgctacgatagttaagatgatattggtgtttccattacattctggggtgaaatactgcataaaaggtcaaagacatgggtgacttgttccttacattaattaattaattaattgacttatttattttttactcagatggaaaatattattcttctcctttaaagaaaactttgaattgttttgtatttcaaatgtgtattattcaaatataacctaacacattccctcctgaaattagacttttatgtatgtatgcat

SEQ ID NO: 161044 - DNA, 578 bp, Homo sapiens
ataccatcagctcttgattgttcacaagccattctggaaggtgtgagcaccctgctcrtcatccctccccccagccgcctctaggcactgtggctgctctgccagagggagggccttggaaaacaaagagctgcgacttcaaatcaatccattgttccacatgttatcagccctgaaaaaggctttgcggagaaaaatgttgcaattccagtttaaaatatggtttgggaattacagtggaatttatctatacgcttacaattgctgattcctgcatgcagtcaggaggtaaacacaaaggtggtgatagaaaaaaaaaaaaggctatgtcaatagtcacagacctttaattattttaacgtttgatctatttttagttctaagcaatctgtagatatctcttttaaaattctttcgaaatttttctttaaaagacataaatgtggctttgaatcctctgatttaaaaacaaaaacaaaaaaaaaaacgctcactgaatttggttgagggtttcttgaattattgagccctgacctaggaaaataatcaagtattaaaacaaaagaagacgtcatatc

SEQ ID NO: 161045 - DNA, 490 bp, Homo sapiens
gttgcatatttattcaggtctgttacacagaatagattgtacaggtgcagtttggccaattattgtaactgttttcttcagagtcttttctgctttactcatcamgctcactaggaaacagtcattcctttttcactgtttcttttatacccaggcttccatatattaccttgaaatcctaaatacgttccaaggctccccccatgtccaactgatcaggtgttagagcaaatgttaatgttggtatccttgttcttttggaggaatgatgatgtgccaaatgctagcaagttgaaagtgcttagatatgcagaactaaatattttctgcaaggatagctctctctttaaatcttacccatagcacttttatttcctatatccatccggcagtaattttccaggagaaatataaatcctacaatgaattcatttgttacattggttgttctaaaacaaaaaacaatacctaatagaaataatatgaaaag

SEQ ID NO: 161046 - DNA, 342 bp, Homo sapiens
agcaattatttgaaagtcttacacagaagtttggcccttagctgacatctggcagcctggattttgagaaggttccctccacccagactcataatgggtcactgtgccaaaactgtgcaaacaacatagtgatgctgaacatctgctttccttctgggactctggaatttggtgtgtctcaggcagaggctgccatgtgagcattctccagtcaaaatcccgggtactgagtctcccacaagctcccctggcagacaacatttcacacgttgttgcaactcattgcygggggaatgaagggcatcctgtgtgacttctctaggagagaacccttggaagctt

SEQ ID NO: 161047 - DNA, 597 bp, Homo sapiens
cttttcttatctatatcataatgactcagtatacaacaattttataatagatwacagatccttccataaaatatatgttttttcatagcagacactcttctgagtgttgtctgtcgtgcatttagaggtgtctgtgcttatatacgtataatatgtaaacatccttaagttgacctacatgcgtcatcaaaagatctagcactgggttttgttaaatttattgtttcctttatccatggaaattattatgaacctgctgatacacaaagcagaaccacagatctttcatgtaggaggagtcttccaacaataagatgagcttttaaatgggtagcagcttttgtgcaagctgtatgtcaagatacttgacagagttaagtaatacaattgtaaagttaaataacagaagggagaggcagtaagaggcaaagaaaagatagaaaattcgtgttttcagatgagaactgtgaggaggaggagagtcatctgagtagagagacataagaaccctctacagttaacagaagctgaagagaaattgatttggaaagaataggggcataatcatgatgttgaatagcgcattcaataatgagc

SEQ ID NO: 161048 - DNA, 597 bp, Homo sapiens
cttttcttatctatatcataatgactcagtatacaacaattttataatagattacagatccttccataaaatatatgtwttttcatagcagacactcttctgagtgttgtctgtcgtgcatttagaggtgtctgtgcttatatacgtataatatgtaaacatccttaagttgacctacatgcgtcatcaaaagatctagcactgggttttgttaaatttattgtttcctttatccatggaaattattatgaacctgctgatacacaaagcagaaccacagatctttcatgtaggaggagtcttccaacaataagatgagcttttaaatgggtagcagcttttgtgcaagctgtatgtcaagatacttgacagagttaagtaatacaattgtaaagttaaataacagaagggagaggcagtaagaggcaaagaaaagatagaaaattcgtgttttcagatgagaactgtgaggaggaggagagtcatctgagtagagagacataagaaccctctacagttaacagaagctgaagagaaattgatttggaaagaataggggcataatcatgatgttgaatagcgcattcaataatgagc

SEQ ID NO: 161049 - DNA, 597 bp, Homo sapiens
cttttcttatctatatcataatgactcagtatacaacaattttataatagattacagatccttccataaaatatatgttttttcatagcagacactcttctgagtgttgtctgtcgtgcatttagaggtgtctgtgcttatatacgtataatatgtaaacatccttaagttgacctacatgcgtcatcaaaagatctarcactgggttttgttaaatttattgtttcctttatccatggaaattattatgaacctgctgatacacaaagcagaaccacagatctttcatgtaggaggagtcttccaacaataagatgagcttttaaatgggtagcagcttttgtgcaagctgtatgtcaagatacttgacagagttaagtaatacaattgtaaagttaaataacagaagggagaggcagtaagaggcaaagaaaagatagaaaattcgtgttttcagatgagaactgtgaggaggaggagagtcatctgagtagagagacataagaaccctctacagttaacagaagctgaagagaaattgatttggaaagaataggggcataatcatgatgttgaatagcgcattcaataatgagc

SEQ ID NO: 161050 - DNA, 597 bp, Homo sapiens
cttttcttatctatatcataatgactcagtatacaacaattttataatagattacagatccttccataaaatatatgttttttcatagcagacactcttctgagtgttgtctgtcgtgcatttagaggtgtctgtgcttatatacgtataatatgtaaacatccttaagttgacctacatgcgtcatcaaaagatctagcactgggttttgttaaatttattgtytcctttatccatggaaattattatgaacctgctgatacacaaagcagaaccacagatctttcatgtaggaggagtcttccaacaataagatgagcttttaaatgggtagcagcttttgtgcaagctgtatgtcaagatacttgacagagttaagtaatacaattgtaaagttaaataacagaagggagaggcagtaagaggcaaagaaaagatagaaaattcgtgttttcagatgagaactgtgaggaggaggagagtcatctgagtagagagacataagaaccctctacagttaacagaagctgaagagaaattgatttggaaagaataggggcataatcatgatgttgaatagcgcattcaataatgagc

SEQ ID NO: 161051 - DNA, 521 bp, Homo sapiens
agtggttagccctttcatctcactgagactaatctaccttaccctttgctccactcaaatgtctctacacatcacacaaagacaggtggtagcagaaactgatgtttacttgattcttgaatcaacaagatttatatgaggtgacatcctcttatgaatttaactagtcttatgtatagcaaacagaatcttaaaatagtagttatcctttttaggaaktcgtgcataaaatcactgggctcccggacaaatatgctgaacttggttagtgaccttacacagactcagaacaaggcatcacaactcttgccccttgtcttgaagagccatttttaagtacatttttaagaatctagtctaataaattagctagaataagttatcagtgctgaaaaatgtttggactccagcagaacatattcttattgtgttttactttcaaatgaagagtatataggggaagggagtctaaggattgagtaagaaaagcttttaaagcaaacgcatatccctgttgaaat

SEQ ID NO: 161052 - DNA, 566 bp, Homo sapiens
aaagccagatggctcagtgtgaatttgtctttttaattttaattttatttatttttgttttttttctctttttttgagacagagtttcgctcttgttgcccaggttggagtgcaatggcgcgatcttggctcactgcaacctccgcctcctgggttcaagcgattctcctgcctcagcctcccgagtagctgggattacaggcatgcgccaccacgcccagctaattttgtatttttagtagaggtggggtttctccatgttggccaggctggtctcgaactccccacctcaggtgatctgcctgcctcggcctcccaaagtgctgggattacagacgtgagccaccgtgcccggccttattttatttattattttttaagagacaaggcctcagtatgttgcccaggctgatctcgaactcctaagctcaagcaaggccacctcggcctcccaaagtgctaggattacaggygtgagccacagcacccagctgcagtctttttttttttttttttaattgtgattccacttccacccttaatgcttgcaaattagtttgccatag

SEQ ID NO: 161053 - DNA, 592 bp, Homo sapiens
ccacaaaccatctgctcgtgggaactttgctgggaattgatatggaacatcacattttctgaaatcaattttcctgggtatttgactactgtccagactgtagtccttctattccccacagcccctcaaagatcggtgacctctctctttccgtcacacctgtcccgtccttcattctccccctggcccttgaccgtactgaactctccgtaagcgcttgtcgaggagtaagaatgggaaccatcagtggcttgacttactgggctgctgctatccaggcaggcaagcatctgttttcatcatattattaagtgtttttttttttttttcagcacttggcaggaggtaggcaagtttgggccatagctttcaggccctgagtccaggcaaggaaagmactgaccccagagagccaatccagccctggtgcatcttgagtattctggaaatggcagatctaaaaggacaaaatcatttcatattcatcatgagtatagcttggtggttaagagtgcagactacggagccatcacgatgggttcagatcccagctcctctacttcctagtgataaaagaaaaaactcaaccaaa

SEQ ID NO: 161054 - DNA, 592 bp, Homo sapiens
ccacaaaccatctgctcgtgggaactttgctgggaattgatatggaacatcacattttctgaaatcaattttcctgggtatttgactactgtccagactgtagtccttctattccccacagcccctcaaagatcggtgacctctctctttccgtcacacctgtcccgtccttcattctccccctggcccttgaccgtactgaactctccgtaagcgcttgtcgaggagtaagaatgggaaccatcagtggcttgacttactgggctgctgctatccaggcaggcaagcatctgttttcatcatattattaagtgtttttttttttttttcagcacttggcaggaggtaggcaagtttgggccatagctttcaggccctgagtccaggcaaggaaagaactgaccccagagagccaatccagccctggtgcatcttgagtattctggaaatggcagatctaaaaggacaaaatcatttcatattcatcrtgagtatagcttggtggttaagagtgcagactacggagccatcacgatgggttcagatcccagctcctctacttcctagtgataaaagaaaaaactcaaccaaa

SEQ ID NO: 161055 - DNA, 379 bp, Homo sapiens
ctggagtaggaatgttgcttaaaattgtcctggctcagttccctttctctggaagagtaaaagacackcatttgcccaatacatggactttggagtcaagctgacagtactggaagagctgttaacagagtccagatcatcactttatggttagagggatgacgttttattatgggcccacaaactgtcctccaactgtggctgaaaaccctgtcatgagaggccagaaggaagatcattgtatgttcttctcccaggccaaggagacaggatgtccttcatcagaaccagttgtcagcataagaagaacacacaccaaggaaatccatttcctggaaacatctctcaacagttcccatgtggagaaactgtgaagctt

SEQ ID NO: 161056 - DNA, 379 bp, Homo sapiens
ctggagtaggaatgttgcttaaaattgtcctggctcagttccctttctctggaagagtaaaagacactcatttgcccaatacatggactttggagtcaagctgacagtactggaagagctgttaacagagtccagatyatcactttatggttagagggatgacgttttattatgggcccacaaactgtcctccaactgtggctgaaaaccctgtcatgagaggccagaaggaagatcattgtatgttcttctcccaggccaaggagacaggatgtccttcatcagaaccagttgtcagcataagaagaacacacaccaaggaaatccatttcctggaaacatctctcaacagttcccatgtggagaaactgtgaagctt

SEQ ID NO: 161057 - DNA, 379 bp, Homo sapiens
ctggagtaggaatgttgcttaaaattgtcctggctcagttccctttctctggaagagtaaaagacactcatttgcccaatacatggactttggagtcaagctgacagtactggaagagctgttaacagagtccagatcatcactttatggttagagggatgaygttttattatgggcccacaaactgtcctccaactgtggctgaaaaccctgtcatgagaggccagaaggaagatcattgtatgttcttctcccaggccaaggagacaggatgtccttcatcagaaccagttgtcagcataagaagaacacacaccaaggaaatccatttcctggaaacatctctcaacagttcccatgtggagaaactgtgaagctt

SEQ ID NO: 161058 - DNA, 379 bp, Homo sapiens
ctggagtaggaatgttgcttaaaattgtcctggctcagttccctttctctggaagagtaaaagacactcatttgcccaatacatggactttggagtcaagctgacagtactggaagagctgttaacagagtccagatcatcactttatggttagagggatgacgttttattatgggcccacaaactgtcctccaactgtggctgaaaaccctgtcatgagaggccagaaggaagatcattrtatgttcttctcccaggccaaggagacaggatgtccttcatcagaaccagttgtcagcataagaagaacacacaccaaggaaatccatttcctggaaacatctctcaacagttcccatgtggagaaactgtgaagctt

SEQ ID NO: 161059 - DNA, 524 bp, Homo sapiens
gggagaaaatgtgttgtaaatggtctaaatctaggtaatattggaaaaaaactagattataaataagagagtaaaaaccctggaagtgtccagtaacatcctaaaaaaaatgggctgtaggagtttagatctcagaagtttaatagatactgtgactctagttaatgaaacaatttagtgttactggagtgaagaaagtgagaaattcactggggttcataaagtcacagtggtctaaggttaaagtggggatgtttattttcccactcacttttaaatcgttctggaagatagtggaattaatggargagagaaagtttataagccaggggccatagtccttaaagaatgtgatggaaggagtttgagagaggtcagcctgtaacaaggataaggtctgggtggcatgaggctcaatgaagagagttttataagagggcacaagaggtttagtaatggctattaagaaaatgaacacatttggctgtcattgcttcatgctattaagtattcaaatcaccttt

SEQ ID NO: 161060 - DNA, 551 bp, Homo sapiens
tcagatattttaacaagttctgagaaattggttgttccttatctggatttacataagcctggtagcttggatttgatgtttccaaatgcatgtcttcagatggattatatattttatatatatatatattatatatatatatagaatcactatacatacacatgcatacacacatacatgcatacacttgagtcttgattattttatgtcagaggcatctagaaatctggcaaaaaatgttttgtgtaatgttcacggagctgggaattttaataaaggccatataatcaagacaagtactattacttaaacagagcatgttgccatattaggccttgttcctctgtctggttaacaaaaatctttaatatgaaagcataaacatctaaactgatgaaatattttccattatagatttgcatgcattcagcaaaagaacaatgcttgagtgtactactattacataaaaatccagaaaayatatttctagaaatgcattttcttattcaactatgaactttaagcataatagagctttgcagaaagaaaac

SEQ ID NO: 161061 - DNA, 597 bp, Homo sapiens
gaaacatgaagtctaaaactttagtagaccaataataagtaatgagatcaaagccataataaaaagtktcctgcaaagaaatgctcaggacttgatgtcaattttaccaaatatttaaataagaaataatatcagtcctactcagaatattatgaaaaatggagcagaagagaatacatccaaacttattctacaaggccagcattagcctgataccaaaaccaaagacacttcaaaaatgaaaactacaatatccttcataaacactaatgcaaaaatcctcaataaaatgctgacaaaccaaattcaacaccacaaaaaagatcattcatcataaccaagtaggatgtatcctagggatgcaaggatggcttaacgtatgcaaatcaaccaatgtaatacatcatatcaacagaatgaaggaaaaactttatgattatttcaattgatgctgaaaagcatctgataaaattcaacattccttcatgatgaaaaccctcaaaaaactggaaatagaaggaacataccttgacacaataaaacccatataagacagacccacagctgctattatactgaacagggaaaaactgaaag

SEQ ID NO: 161062 - DNA, 515 bp, Homo sapiens
aatggtatttctggttctagatccttgaggaatcgccacactgtcttccacaattgttgaactaatttacattcccaccaacaatgtaaaagcaaaactcctgagataaggggtaactaacttgttggaacagcctgggctctgtttcagtcccttctagaaaaaggatatcctgcagtattttagcctgaagtgttatggcgtcccttaggaatagaattcagggtgggctgcttttcaaggttcttcaactgcaatgcaagtggtgtatgcacaggcaatattttatttgccctgggcagcattcttgagccttgaaggacgtactygtcctgaaccgtaggcttttaccgtccttgctccctgtctgggagtcatgaagttgcttttcttaacctgtgtgagtgttctatctcaatagtctcatgcaaagaatataaattacagtgtaaaattcagtgggcttaagtggtaagcagtgcaaagtgagcctgcttcacaagaaggaaaatgat

SEQ ID NO: 161063 - DNA, 468 bp, Homo sapiens
gaattccttaacataaatgaagtaaatttgcaagcatatagtaatagtctactaaatttagaactttgtaggaaatatccagaggggaaagttagaagaaaaaggtgtgattctccaatcttgtcaatgaaaactgaaactttgtggttataaatcacaagtggctttagacttcgcaggcatgaccgttgttgttaaraaacagtgtttcaggtatgtttaaagagttctcttaatgctttcactgctgcttttattattaaaaaatccaatttgtctgtgacatatgggtagccagagcagctgcttgctagcctcacatacattctactaagatcaaggaggctttatggtccagtctagtgtttgctgcattgagtatgtttcagtcttaagctctttggggagcaaatgcagtatggatgaagatggataatgtgcactttctaagctcctcccagcccctct

SEQ ID NO: 161064 - DNA, 486 bp, Homo sapiens
agtaatagtctactaaatttagaactttgtaggaaatatccagaggggaaagttagaagaaaaaggtgtgattctccaatcttgtcaatgaaaactgaaactttgtggttataaatcacaagtggctttagacttcgcaggcatgaccgttgttgttaagaaacagtgtttcaggtatgtttaaagagttctcttaatgctttcactgctgcttttattattaaaaaatccaatttgtctgtgacatatgggtagccagagcagctgcttgctagcctcacatmcattctactaagatcaaggaggctttatggtccagtctagtgtttgctgcattgagtatgtttcagtcttaagctctttggggagcaaatgcagtatggatgaagatggataatgtgcactttctaagctcctcccagcccctctctatggacctgttgatatggtttggctgtgtccccacccacacctcatcttgaattc

SEQ ID NO: 161065 - DNA, 418 bp, Homo sapiens
gttctcatctactgccacagagcttgaggctgcttgtgttttggggttcaggcctccatgtctttcttatcatcttttttaggtgctaaaattctacaaacatacacacaaatacacataatccaaatatatatatatataatatatatgtgtgtgtgcgtktgtgtttgtgtgtgtatgtatatatgatatttaccttgagaatttataattaaactattttaccatatattttaggattattaggtcatttagacaagtgcgctacttcacaggctcataaaaccacctttacagacagcttgaaatgtcctgaattagaaaacattttgaatacttaaattattaactttcttaaatatcagcagctgcatttactaaatagagatctttttaaaatagctaccacttactgaat

SEQ ID NO: 161066 - DNA, 577 bp, Homo sapiens
aagcttgttttgctgttagaactaatgagtttccaattgataaattacattaaatagtaaacatcacatcaataaatgtcttgtcctaagatattaaaaaattaacatgaagccaataacaacatatgtgaaatgttcagtttattaataaagtaatgaagaaaattctatttgattgctgtgcatgtaccatatagttgaccagaatttacaatgcacgtatatagtttatacctgacagcatttaaygggcttgggaagaccctataaaccaaaattatctttctcacacctgccaggtcatctgtaatatttcacatcaaatttatttcgttagagtaagacagacattgcccactgaagttgagtgtaaaaaaaaaaaaaattcttttctaggaaagttatgcatccaaacaactggtaaattatattagttttgtccaaacagccctatctcttagatgtggccaaagcctttaaagaacaagataaggcagataaaggttaatattaggcaaaggctgagatatgggagattgccccaagggactgactgctacaggagacattctgcagt

SEQ ID NO: 161067 - DNA, 554 bp, Homo sapiens
taaatgagtttgcactcactctttgatacctttaactaacagaattctgactaaatgcagaaattggtactggaaagtggaatattgcatgagagaggaattcaaatatgaatttagctaggtcaaggtaagcagtaggacagaaatgatttcccatctcttactgggaagtttatcaacctccttatgtgatggtagagaatatggttaagtttttacctgttgtatcttgaaaatcagacaatgtaaataaagtgtctgggagctttagggcacattagagccaagcaaacaagcaagcaggcaaacaaacaaacaaaacaaaaacatctgttttgatgctagagtttattgaatgcttcctggagmctttagtaaggtcctaagaccaattttggcttaaactaacttccctcaaagcagagagtagcaaccatttctccctaacaaaggtgacatccaagatatcaaagttgccaaaatttatatgagcatgtcttacaggttgaaaaagccaaatcatataaatatgattccaagacagtcagtgaaag

SEQ ID NO: 161068 - DNA, 574 bp, Homo sapiens
aatgagcaataagcaatcacctgaagttataaagctcagtggtaataggaagtacacagaaaaacacagaatactataacactgtaagtgtggtgtataaactactcttatcctaagtggaaagaattaacaatgaaccaatcaaaaaataagcatgacaacttttcaagacacaacccatacaataagatataaatagaaacaataaaaagttaaaaagcagggggacgaagttcaggtgtagagtttttaacagttttctttttgcttatttatttgtgaaaataatgttgttatcaggttaagataatggattatgatagtatttgaaagcctcatggtaacctcacactattaaacacgcaatgcatatgcaaaaaaattaaagataggaagaaaaataatttcaccaaagacaatcaggttcactagaagaagacagaaaaaaaagaaggcagataacaccacaaagcaaacagaaaacagataacaaaatgacaagagtaagttcttacttatcastaatagcattgaatgtaaatggacaaaaatctccaatcaaaagagatacatt

SEQ ID NO: 161069 - DNA, 585 bp, Homo sapiens
atcctccagtatatttacatttgttctctagataatttatttgcaagattaaaaggcataaaatttktaaggttcttgataaatacagttgtgttgccttataaaacaatgcatgctgttaaagaatcaattttttgttctgcaaatcatgccagatagggaagaaatagtaatatctatcttccaattataaaatgaaacaagtggactagtttttgagaataaaaaagtattttcttgaccttaacactagaatacatttcttattctgagaaaattaaataaaatatgaattaaaaacatgaacaatgtatttagcagcagttttaagggaacttaagaattagttcatgtggcaacttcaatataacaccatttctacaagcgtaaaatcaggcatccggatgccaggaattaagtcccacttcttccaccaggatatgatgttatttaagtaaattattgaatttctctgagtctcagtttcctaatttgtaaagtaggattaatatgcatttttttcaaaaggtgtctcagaggattaaattaaaaagtgtgtattattaacttagcaatgagtgcagg

SEQ ID NO: 161070 - DNA, 478 bp, Homo sapiens
atgtctagatatctagcaaggtcaagaaagtttcccacaattattccatcaaatagggttcccagacttttattagatttctcttctttctcagtaacaccagttatttttatgtttggctgtttaacataatcccggatttctaggaggcttcatttttttttttttttcttcttctgtctgattgggttatttgaagccttgtcttcaagctctgaacttctttcttctatttgttctagtcaattcttgacacttttcactgcattttgtatttctgtaagtgtgtctttcatttctatgtatgaaatgaaagtatgattgttttctccttatgatatctatttctctggagaacttttcatccatatcctatatattttttttaaatttmtttaagttgtgtttcacctttctctggtatctccttaagaagtttaataatcagccttctgaattctttttctggcaattcaga

SEQ ID NO: 161071 - DNA, 440 bp, Homo sapiens
aggggtgtacttgatatgatttctattttttgaattaattgagatttttttattaccaagcatgtggtcaattttaaagtatgttgcwtgtgcaaatgagaagaatgtatattttgtggtggttgggtatagtattctgaagatgtctattggggctaactggatgactgccaagtttaagttcagaatttctttgttagttttctgcctagatgataagtctaacactgtcactggaatgttgaaattcccactattattgtattgctgtgtaaatctttttggaggccaagaagaacttttcttagtaatttgagtgctccaatcttgaaccatttatcattatttaatgcacttatttgtccttccaagttactgttggtttaaagtctgtatttttctgatataagaagggtgactcttgctttttttttatgata

SEQ ID NO: 161072 - DNA, 472 bp, Homo sapiens
aatttgagtgctccaatcttgaaccatttatcattatttaatgcacttatttgtccttccaagttactgttggtttaaagtctgtatttttctgatataagaagggtgactcttgctttttttttatgatagakctttctgcatccctttactttgagcgttgttacatgtgaaatgggtcttctgaagacagcagatgttgggtcttgtcttttcatccaatttgcctctctatgtcttttaagtaagatgtttagactatttacattgagggttaataatggttaatagtgatatatgagatttttaacctatcattgtcttgttagctggttgttttgtagatgtgactgtgtaattgcaatttatattgtctgtgggctatgtgcttaagtgtgtttttgtggtagcaggtattgatctttcatttccatgattagcatttcttaaagacctcttgtaaggctggact

SEQ ID NO: 161073 - DNA, 561 bp, Homo sapiens
ttctctttgtgtttctgtttagcaatttctgttgatatattgaagttcactgaattatttccttggctgtgttgggtctactgatgagcactttcaagacattcttcttttcttttactatgttttttatataaagatttattttatattctgtattattttaatctctaagtagatatatattctacatttgatgttgcatgttttatacattctcaattagaacctttaatatatcaatcatrgttactttaaattttttttctgatagttctaactcctgtttcatatctaaatatgcttctgatgattgttttatttataagactgttttggtatgttttttaaattgataaacatgcatgcatatatcaatagatatgggcttcagtgtgagaatgttaaaatgtcctggagttgggttggactgtgtttgatgtttcttaaactatggatgtcagacatttcaaatgcctcaagtgaccttgttcttagctctagatttaaaaacatattagttctgggactttgctttgtactctctcatagttttctaagcta

SEQ ID NO: 161074 - DNA, 567 bp, Homo sapiens
tgattaggaatgatgaatgctaggaggatttggagagagcaccaacagcctctaatagagctgccattttttaagtaaatttacccaagagcttgtggagagagaagaaaagcctccacacatgtccaactctctgtctactttcttccctctaaggatggattgctatcgtcttggctaatttgcaaaatataaaaagtgctacatttgtgagtagacagcatattgtgcttgcaaaaattgtgtttttgtttatagttgtctttgggattctctttcatctttcctgcaggtccaaccccaggaacagcttaaccatgctgacctctctctctttttaagcattcttaaattaatgattgcttcaggttcttacaccaagcatctgattataggygataagttctaagatttagatattggcttcgagaaagctgagatgcttcatattatgtgctgatttggacagggcataataccaagctatttaatttaacaataatctatatgtcactgtgaaggtgttctgtagatgtaggtaacagctacaactagttaactttaaga

SEQ ID NO: 161075 - DNA, 590 bp, Homo sapiens
cccttttcaggcatggaactttctgggtgtcactgagagagaagtgagtaaatgtgaagacctaggacattacactttttyaatgaccggtagtgcagtaggtttttttacacaagtatcaccacaaacatgtaagtaatgagttttgctataactttaaatggctatgatgtcactagacgaaatgaatttttcagctccattataatcttatgggaccactgcaatataggtggtctttcattgaccaaaatgtcacatatagcacatggctgtgtgtgtgtgcatatatatacatacacatatatatatgtgtgtgtgtatatatatatgtgtgtgtgtgtgtttgtgcacagttttttctcctgttggttttgttttttggcagaatcgtgacatatataaggagataatagaccctaactgatctttcggaggaaggaatttgttcagatccagtattaccagagccttgaagttgagtatcaggttacgggcccatctaaaaatgagacagcattttctcccattatgttattggaccttttttgtgtatctcactcagaaattttacagaaaaagaagcaaat

SEQ ID NO: 161076 - DNA, 590 bp, Homo sapiens
cccttttcaggcatggaactttctgggtgtcactgagagagaagtgagtaaatgtgaagacctaggacattacactttttcaatgaccggtagtgcagtaggtttttttacacaagtatcaccacaaacatgtaagtaatgagttttgctataactttaaatggctatgatgtcactagacgaaatgaatttttcagctccattataatcttatgggaccactgcaatataggtggtctttcattgaccaaaatgtcacatatagcacatggctgtgtgtgtgtgcatatatatacatacacatatatatatgtgtgtgtgtatatatatatgtgtgtgtgtgtgtttgtgcacagttttttctcctgttggttttgttttttggcagaatcgtgacatatataaggagataatagaccctaactgatctttcggaggaaggaatttgttcagatcyagtattaccagagccttgaagttgagtatcaggttacgggcccatctaaaaatgagacagcattttctcccattatgttattggaccttttttgtgtatctcactcagaaattttacagaaaaagaagcaaat

SEQ ID NO: 161077 - DNA, 651 bp, Homo sapiens
atttgtaatatacctgaaatacatgttactaggttggtgcagttacttttacaccttgtggctggggaggtctcacaatcatggcggaaggtagaaggagcaagtcacatactacatggatgggagcagacaaagagagagagcttgtgcatggaaactcccatttttaaaactatcagatttcatgagacttattcactatcacgaggacagcacgggaaagatccacccctgtgattcaattacctcccactgagtttctcccacaacacgtgggaattgtggcagttacaattcaaaatgagatttgagtggggacacagccaaatcctatcagacatcaagtcaaataccatataatattaccaaaacacatttttactcgtagttgactcatgattcttagaatagtttgagaaagtttgtcttttatatatgacactctctttaattctaccacttcagcaatagcaacaaatcaaccagtatttctgtctcagctttctagaacacatttactccaattaactcctttgagcataaacagagtttatattaaattagtgcaaaagtaattgtggtttttgccattacttttaatggtgaaaaccacaattagttttgcrccaacctgtatttcaggtatattac

SEQ ID NO: 161078 - DNA, 450 bp, Homo sapiens
atatgatctaaacagagatgtttaaaactatttgtaactgcatgtgatcctgcagttatctgacaaaaagtcacccttcaggggcattgacctccaggatatgttttgcatgctcaaaggaacaagagataatagaggttttaatgcagctattcggaaactaacagagcattttagacctcagaaaaaawtgttccctctgagagacatatgcccatggagatgaatgaagagcatggttagcctgttgagtccttggttaactgcctgacttgctagtctcatcacatgatttaaggcataaaaattagaccctgctatagagttgaatatataccgggttcattttccggggctagcccacaaggagattagcagcctaggattttatttcattgggggtatgtaagttattagaccatgaaggtagtatactagcaagatagatgt

SEQ ID NO: 161079 - DNA, 550 bp, Homo sapiens
tgcagatattgaagaacattttctcaaacctctgctatgataactctggcagtgtgttcaagagtacttggcactcagaaaagcaaagtcactcttgcatctccaatatctattgacatcagaacatattcacgttatgcaccaaatatttaatataaataaaatgagtaaatgccattgaactggagtcactttcacaaagtctgatttgaagctgaatttagaacattcctctacagcataaaatacttatggttctaaacagtgacagaaaacaaaacattttgaataatatttcatgtgtgcttcaaagaaacttcaaataaattagcttataatatgtaaagcacaccaaaatgaactagattagttgtatctagagatggaggagccctatataaatgaaacaaatataactttcatagcaaaatctaccacaaatagataacacctgttgagcaactrtaagttagagaaagttattggagagctcaactgttttgctattaattctgtaaaaaaagtatttttcactaagttatacatttta

SEQ ID NO: 161080 - DNA, 521 bp, Homo sapiens
atgagaatgaaaggctgatcctctgtccaatcagagttataatgccctgggttttaaaacagagttaggagaggtctgataatttgtctggtagctcctattcttatggagtttcacaagagtgtggtttttcttgtagttataggaatttagaaattttccatgtcagccaggcactgaacccttgaaccatgggtaacttttgtttctttaaccttcagatctatctcagttgataaaggggcaactattttggtctgkcaaaccatgcacatatgtacatatagttgacacttgaatgcttgaacaatgtaggggcttaactaataatagtcacttaacaaataaatgactggaagcttttatcaatcatgtaaacagttgattaacacatattatatgtgttatacatgttacatgttgtattcccacagtaaaataaggcagggaaaagaaaatgttaagaaaaccgtaaggaagataaaatatatttactatttattaagtggaagtggattatc

SEQ ID NO: 161081 - DNA, 496 bp, Homo sapiens
acctaatgatagaggcttccttttattaaaggatttcaaagctgcttctgaaaaaggagaaggggggaaaattttgcattttaccataagctcaagattttattgccttcataaaagaaaagatgacayttagaactggatcacttgttcctttctcttatctccttccagttcaaaatgcttgcatcttttttttttgagacagagtgtcactctgttgcccaggctggagtggcacaatcttggctcactgcaacctctgcctcccaggttcaagcgattctcctgcctcagcttcctgagtagctgggactataggcatacaccaccatgcccagctaagttttgtatttttagtagagatggggtttcaccattttggccaggctggtctcagactcctgaccttgtgatccgcccacctcggcctcccaaagtgttgggattacaggcgtgagccaccgcgcttggctgcttgtatcttttaatagccagc

SEQ ID NO: 161082 - DNA, 607 bp, Homo sapiens
gtttattagtgacttaatgatatattgtgctcaatatctgtattccagctatacataataaggttggayaaaagttacaatgggaagccaatatgccaggtaggttggctattggattctttccctgtaaagttaaataataggatgcatttgacaagctaagtagaaattatgttttcaaaataatgcctaatagttcacttatgtaaaaaaattaaagatccctaatgaagtactttaaaatatttccctggattgctttaattaggatccagagaaaataagtattaaaaataaaattttactctcaatctgcaaggtggtattaaatcattgctttgctaaatttgtgaccttagctatgttagtctttctgaatcacagcacctactgcgggcctaatgtacattagactctcagtaaatatttgcgcaataaatgaatacatcttaatttctttatatgtaagatgacttagaccatagggagggtctgggaaatgcaaatttctcattagggcaagctggccaaaatgtgtgaattaatctaatgacaggtaaggaagcttatgttggggtctgtagggaaatggaggtattaaaatttt

SEQ ID NO: 161083 - DNA, 556 bp, Homo sapiens
ctaaatctacaaatgaagaaactgagacttacccatgatgacatgagatagaaaaggctggccttaaatctattggtttctgcattctagatcagtgcccatttcgtggccctcagaaacctcttaaagatcaaatgttctgaattgttgtttaccaactaccaggttttctagccccttgcagtgtctgaagaccttgcctttgattgcctatatatcaggggctgctgtcactgattttgttgggaacactgaacagctaataattcaccatactcaatattctcattgcaaggccattggccatctgtctcctccccttagttcctctttctccaagctstgctttcttttatctgacacacactctcccttctttctctccactgggcctgccagaaattttgttccctgtcagataaggtttactaaatcctcaaacactgtctaaagatacttctttgtctttgctcaactcacacctagcttttcctacaaggacaaccaccacttcttatgaaacttttagaaaagaagaatgaatgcatcttgaatt

SEQ ID NO: 161084 - DNA, 520 bp, Homo sapiens
agtcttttaaaaatgtatgacatagtataggattatgcaaataatttacacaccaaattataattatagaaaattaaaatatccagctgtaaaacaaagaggaagacaactattaccctaatacttttcctatgggaatttggcatggcataggtaatataraaggatgatgctatgatcacattaataaattcacacttttcttaaccctgtcagccagctctgtgaacatggtgacatgtggaaatgtgttttctcacaaccaaaggaaatatttccataaaatttgcagatttttataaacgaccttttttagcacaactgatatgcactaacaagtatttcaaaaatattacagctgtttcagaatttctttgaaaaaaacaatgctattctgacagaatcagatgtgcccatgaggggcagccattcttctaattttcattttattatttttacaattttaattttcaagtaaacccctcctatgacaagtaatgtgtccacaagataggcaaaa

SEQ ID NO: 161085 - DNA, 520 bp, Homo sapiens
agtcttttaaaaatgtatgacatagtataggattatgcaaataatttacacaccaaattataattatagaaaattaaaatatccagctgtaaaacaaagaggaagacaactattaccctaatacttttcctatgggaatttggcatggcataggtaatatagaaggatgatgctatgatcacattaataaattcacacttttcttaaccctgtcagccagctctgtgaacatggtgacatgtggaaatgtgttttctcacaaccaaaggaaatatttccataaaatttgcagatttttayaaacgaccttttttagcacaactgatatgcactaacaagtatttcaaaaatattacagctgtttcagaatttctttgaaaaaaacaatgctattctgacagaatcagatgtgcccatgaggggcagccattcttctaattttcattttattatttttacaattttaattttcaagtaaacccctcctatgacaagtaatgtgtccacaagataggcaaaa

SEQ ID NO: 161086 - DNA, 585 bp, Homo sapiens
aagcttgtttggcattccctgcaacaagtattacaatggttctaattgtttctttttcacttattccaaattaaatcctacaggactgcctgattccacacatgataagtccagagtcaatgaaatatcaagaggtgaattcctccctaagagatcactctttcaggatgctaatcaacagctctgctcaaagtgtttctgttcagtcttcatttgccattcatgaatcctttacacgcrtccttgctcccctgacttgaggtgcattgtttgcaggcatttgacaagagctcacttcaaccaggaaatatagggtgcaaccagtttgtggcaaatgtttgtaacacatcaagaacacttgtgtcctgtcacctgcatttctccttggtgtgagcaaaaaaaaaaaaactagtgaaaataacgtttccagaacagcactgtatgtctaaaactgtaataaaatcagggaccctggtcctagctaaaaatattaagactatagaagaatggaggctgggaaaggtgttaatccgtgctgatttcagccaacggcctgcaaagcatatgagatgatatataggattt

SEQ ID NO: 161087 - DNA, 539 bp, Homo sapiens
tgccaggcttaatattaaaaacaagtagttggacagcgatttagtgagcataaggaacataatgacaggtaaggagagaggagatgatttcacctacccgtgctaaaaatggctttggaatgatttatatgccatcaactcattacagccctaactatcaccaaggatcaccaaggcaacgaggattattcttcacacacatccctcargctttatctccatcttctaaagcaattttgctattccttccaacctgattatttacacatggatggcagtatttaggtggggcaaaatggatatgctattgccatccacccatgtccagatttaatcttagacagtcatatgtctcttatgcagacaacaaaaactgtattgttttatgcttattgagagctgttatggcagaaatacagaaagtgaggtattccttgaattcaaacttggagtcagagattcaattttagttcttaccagctaagttcttatattttgcccacatgtatcactgagcagagggagtcaaacgtacgctg

SEQ ID NO: 161088 - DNA, 610 bp, Homo sapiens
tgttgctaaatctaatgaatgcaaatttcctactcaaactctcagaaatatttatatatttcaccaccctctcatttgtgaaattacttccccccttgaagtaaacracggttctttcctggtcttcatgctatatccgtggcccttgatatttcccctaacatctaatcactgatttccccaggacatggtattagggacacatattttttgtctcatcatatcctattatccaatttatgtcacaccacccctagaagaccactcctctgcgctccagacaggaatcatcacctatgtacctcagatacaccccaaacatcccagtttccactaacccaatcttccctggccatccttaaattaatacacatcaacgttgtaaacaaaccagctactcaagtaaacttcctaagcattcgtgagtttcccttctcccatattgcatacatcaaatgtttcagctaagtccaatcaattgtatctacaaaatacatctcctctccctccatttttctgtcttcattgtcaccaccaaaattctggccactaccctctttcaccagcactattgaaatgccttcttcaatgctctctgggcttacgccat

SEQ ID NO: 161089 - DNA, 559 bp, Homo sapiens
tctttaagataaacattatattttattttacagttaatggagttagacgaagtctatctttctgagtgtcaaatcagtgcacttttgtaatcaggaaatagataatatattactgggtttctatgaacacacctagtagcctcatctgctatttaacatcaagtttcttcatccaaaaatacccactttttatttttggtaagctcttaaaagctttgttmaaaacatgcaagggcttctgtgtggctctggaagcctcacgacctcatgtgcagtattaatattctaaagaggacagcttctgcaaatattaaattacacaggagtttcagtgcaggcctgcagcctcaactcgtgggcatggagatcaaacgggcaattctgacctgtggcttctatcaatttccagtgaaaaaaaatcagtttttcatcatttactaaaacctgaattccaggttcaggttctggcaaaaaaaaaaaaaaaagcatgaggcactttagaagtgttttgttttgctttgttttaatgcttgttgtcctcatgatttgtctgaacata

SEQ ID NO: 161090 - DNA, 559 bp, Homo sapiens
tctttaagataaacattatattttattttacagttaatggagttagacgaagtctatctttctgagtgtcaaatcagtgcacttttgtaatcaggaaatagataatatattactgggtttctatgaacacacctagtagcctcatctgctatttaacatcaagtttcttcatccaaaaatacccactttttatttttggtaagctcttaaaagctttgttaaaaacatgcaagggcttctgtgtggctctggaagcctcacgacctcatgtgcagtattaatattctaaagaggacagcttctgcaaatattaaattacacaggagtttcagtgcaggcctgcagcctcaactcgtgggcatggagatcaaacgggcaattctgacctgtggcttctatcaatttccagtgaaaaaaaatcagtttttcatcatttactaaaaccygaattccaggttcaggttctggcaaaaaaaaaaaaaaaagcatgaggcactttagaagtgttttgttttgctttgttttaatgcttgttgtcctcatgatttgtctgaacata

SEQ ID NO: 161091 - DNA, 500 bp, Homo sapiens
ataataatttataagcattgattatttaacccaagaattcagtcttagagtatagttggctggaatagaaattatccaagtaactaagttctgactaaagtggatccaggcctgaaattaatgaagaaggcatcaatgattcatcttgacacaacttttaatctcattcagastaagctcaatttaatgccaaaattctcacaacaggcccccaaaagctcactggccctgacatatcgagtgcctctacttgagtgttgaatggatagagaattaaaaagttattgctctactgaacacttacagctatatactcttagtaatctcccgttccattccccaatcagatcaccacatgcatttagtaacttgcagcaatttttagattaatttttgaagccattcttacagatgcacttggtatatttaatgaagagcttttctataagatcataattttatcatgacatgaatccagtgttcttgttagatttgtaaac

SEQ ID NO: 161092 - DNA, 560 bp, Homo sapiens
ataatcccttttttattttttgtatgtatagtgtctgagaagttgctaaaccgtccagtttgcagctacttttttctcaaaccaactcagttcaatttaattgatatttattgagtgcctcccataaagcataagttggctcatgtcattcctctgttagacatcttcagtatttctcatcttatgcagagttataccattatatgagtctggcagaacctggtaccactstgcctcctctccacctgctggacccctcactgcgtgtttcccagggtcactggaatctttgctgttatttcaacagacaactccccacccctaaggcctctgagttgttgttgttgttctcattacaggtattcaactgtctctccaactcgtcttcttacttctttcaaaaaaatgaccaaatgtcaccttctcaatgaggcctatcctgaccctctgtgtagaagctttcccaggcatttgcagcatctgaatgagtgaaactgctatgatcccagttttcttggcagtccgacggggtggaggaagagtggtttgggaaggccaca

SEQ ID NO: 161093 - DNA, 500 bp, Homo sapiens
ataataatttataagcattgattatttaacccaagaattcagtcttagagtatagttggctggaatagaaattatccaagtaactaagttctgactaaagtggatccaggcctgaaattaatgaagaaggcatcaatgattcatcttgacacaacttttaatctcattcagagtaagctcaatttaatgccaaaattctcacaacaggcccccaaaagctcactggccctgacatatcgagtgcctctacttgagtgttgaatggatagagaattaaaaakttattgctctactgaacacttacagctatatactcttagtaatctcccgttccattccccaatcagatcaccacatgcatttagtaacttgcagcaatttttagattaatttttgaagccattcttacagatgcacttggtatatttaatgaagagcttttctataagatcataattttatcatgacatgaatccagtgttcttgttagatttgtaaac

SEQ ID NO: 161094 - DNA, 416 bp, Homo sapiens
aagcacaacagaaacaccattccctaaaacatggcaataggttgaagccctgtaaattgggcatatcaccactgacagtatttcacatgctggcatcgctactaagctacagttgtagaactgccacaaagattgcatcactgacaacaaagtgaaatatygatacagtaattcgttttctgcaccatatgtcttgatttgtacataaagttattatgcagcacagattcctgggcagatgattaggagagcaggaataacagcaagatgtaacatttttgctggaatgaaccacagccttccacaacatgaaccaaagagatgcaggttaatttcctactgcaccagccatctttgatgtagtacaacagattttcaaagagtatatggacctggcagggaagaagcaagtagaa

SEQ ID NO: 161095 - DNA, 420 bp, Homo sapiens
taagcacaacagaaacaccattccctaaaacatggcaataggttgaagccctgtaaattgggcatatcaccactgacagtatttcacatgctggcatcgctactaagctacagttgtagaactgccacaaagattgcatcactgacaacaaagtgaaatattgatacagtaattcgttttctgcaccatatgtcttgatttgtacataaagttattatgcagcacagattcctgggcagaygattaggagagcaggaataacagcaagatgtaacatttttgctggaatgaaccacagccttccacaacatgaaccaaagagatgcaggttaatttcctactgcaccagccatctttgatgtagtacaacagattttcaaagagtatatggacctggcagggaagaagcaagtagaacaa

SEQ ID NO: 161096 - DNA, 420 bp, Homo sapiens
taagcacaacagaaacaccattccctaaaacatggcaataggttgaagccctgtaaattgggcatatcaccactgacagtatttcacatgctggcatcgctactaagctacagttgtagaactgccacaaagattgcatcactgacaacaaagtgaaatattgatacagtaattcgttttctgcaccatatgtcttgatttgtacataaagttattatgcagcacagattcctgggcagatgattaggagagcaggaataacagcaagatgtaacatttttgctggaatgaaccacagccttccacaacatgaaccaaagagatkcaggttaatttcctactgcaccagccatctttgatgtagtacaacagattttcaaagagtatatggacctggcagggaagaagcaagtagaacaa

SEQ ID NO: 161097 - DNA, 380 bp, Homo sapiens
ttaatgtacattatacaaagcccttacattaaaactatgaaactttgctgagagatattaaagaaaacgtaatacaataaatacagaaatatatcataaatatcaagtgaagactctatatttaaaaatattaaataaccccaaattaatctataatttggtgaatttcaataaaaataccaagatttgttgttagaaaaaccgacaagctgatttaaattgtatatagaaatgtaaaacactctgtagttgtcaacagtctcagaaaaaaaagaacaaatgtagaagaattacataattgatgcttttaytgtggtcaaaaacacgtaaaatttactatcataaccttatgtgtacattactgttaactatttgcacgt

SEQ ID NO: 161098 - DNA, 414 bp, Homo sapiens
gatggagacaaaatgaggaattctgtttccttctgagtcttggtggcatatcagttattagactctgaggtcccttttgtgtttaaaatgtattaaatataatctgttgtatacatacactcacacatgcattaatatattaatatattaaatcttatatactgyatagtaaatttatgtaatatagttacatattacataattagaaataaatatgtatcagtgctatttaattgtacattgacatatgtgtgcagatgtagtcaaagtattcaaaaattatagagaaaaatttgttttttaattatatgcttaagctggacagtatttcattcaaatataaggaatatctataataataaattgaataacttacaaatatgggtaatctgttgggataataaactcttacca

SEQ ID NO: 161099 - DNA, 590 bp, Homo sapiens
gtatgttttgaaacgtggtggtagcttctgccaatgggcttgagttggcctttctcagatgaccgctctgctgaaacctaatgacaagtatggacccatcctacaaagactgattaacaaagaacaagaggtcagtgaatgacataggacagagatgcaccttgagcgttcgcaaaacagtaagatcatcaatatgtctgaataaagtgagctgagaatgtgagagcagagatgaggcaggagcagttgctatgagcagagcttataaataatattggycttccgtgtccagtcctcagtatctatgggttccacatcttcgaattcaaacaaccacggagaaaaaatattttttaaaaatacaattaaaaaaatacaataaagaagtaaaaatattaaaaatacagtataacaactgtttatagaacatttactttgtatttaggtattaatattataagtaatctggagagatttaaagtatatgggggtgtgtgcatagattatatgcaaatacagtagtataccattttatgtaacggacttgagcatttgtggattgtggtagtcttgtgagttccggaaccagt

SEQ ID NO: 161100 - DNA, 590 bp, Homo sapiens
gtatgttttgaaacgtggtggtagcttctgccaatgggcttgagttggcctttctcagatgaccgctctgctgaaacctaatgacaagtatggacccatcctacaaagactgattaacaaagaacaagaggtcagtgaatgacataggacagagatgcaccttgagcgttcgcaaaacagtaagatcatcaatatgtctgaataaagtgagctgagaatgtgagagcagagatgaggcaggagcagttgctatgagcagagcttataaataatattggtcttccgtgtccagtcctcagtatctatgggttccacatcttcgaattcaaacaaccacggagaaaaaatattttttaaaaatacaattaaaaaaatacaataaagaagtaaaaatattaaaaatacagtataacaactgtttatagaacatttactttgtatttaggtattaatattataagtaatctggagagatttaaagtatatgggggtgtgtgcatagattatatgcmaatacagtagtataccattttatgtaacggacttgagcatttgtggattgtggtagtcttgtgagttccggaaccagt

SEQ ID NO: 161101 - DNA, 418 bp, Homo sapiens
gagaattcacaaataaagtcacacaggaacagccactttatcttcggcaaagctgacaaaattaaataatggggaatgaactctctattcaataaatgatgctggaatatctagctaaccatatgcagaagaatgaaactaaacccttaacttttaccatatacaaaaattaactcaagatggattaatgattcaaatgtaagacctcaaaatgtcagaattatcgaagaatacatagcaaacaccattctagacatcaatcatggaaaataatgtattattaagtcctcaaaagcacttacaacaaaaacaaaaattgaaaaatgaaacctaattaaacttaagtgcttctgcacagcaaaagaamctgtcaacaaacagacaaccaagagaatgggagaaaatatttgcaaactat

SEQ ID NO: 161102 - DNA, 585 bp, Homo sapiens
tatacaataatcaaaagctagcaatggttaaactcttcagtggtttcctgttattctgaaaaaatatcccaagttttgtgacatgagatactaaggccttcacaactacctttccactagctctggtcctgactggctgttaatttaccatgccgattatacttctaagtccttaacatgtcaaggccttgaggattgaccttgtcccttctacctgaaattcttaatccttccttatggctaatttagtgttagaaactctctccatgtttgcatagcacactatacctaaccatgtattctaataatttttccacttctcatctcatgctgtaatttgtatgagtgcagagatgtgtcamttgtattaatattctatcaccagtttatagctcagtgcttactctggagtgctccatgacttcatttcagacatgaaatagtgaatgcattaatcaatgtaatcattcatgttaattttacagtagagaagttattagctatttctagttttcatatccatttgaaatttttcttctcaaaattatttgtcattttggataacttttcaagtacataataata

SEQ ID NO: 161103 - DNA, 606 bp, Homo sapiens
ttcaaatctctttattttttaatttatttttgttgttgttcttttgagatgaagtttcactcttgttgcccaggctggagtgcaatggtgtgatctcggctcactgccatctctgcctccagtgttcaagtgattctcctgcctcaacctcctgagtagctgggattacaggcatgtctcaccatgcccagctaattttgtatttttagtagatccggggtttctccatgttggtcaagctggtctcaaaatccygatgtcaggtgatctgcccgcctcagcctcccaaagtcctgggattacaagtgtgagccactgcacccagccttcaaatctctttataaacatcattggcaatcattttcacttggttttacaaaagaggttttcttccgtttcccacctatatgtaattaatttataccttttcataatgcttctcaaatatattttattaggaatgattttcttttcacttttgcaatataattatatttttcaaatcctaatgcatttgtccttctggaagactgccgaatactctgtcctccttagtagtttgtcctttttgtaaccaacccccccattgtagtctctttatcagag

SEQ ID NO: 161104 - DNA, 450 bp, Homo sapiens
aacatttatatatcgctgtatttcaagtcaaataaattgataaaatgcaactcaaaaacgcaccacattgcatcgctaatgctttttaagtagaaatgttttctttcccagtcctaatgcaaaggggccatttcttattctattcagtgaaaacaagaccacttcaatatttaatttggaaaatggcactaaaaatattaaaataagatatatgcacttaagcagacaagccaagactctttagctactttagtattgtgtactgctgccacagaatatgctaaacctgctaagattttattctctactaaggctcctacaagctaataatctgtsaattcattcaatttccattagagatgtaagaagctgcaggtgatattgggaaagtagcattagcacactgatgtatgcaaatggtgctttggaggtgcctttcattttcatgaa

SEQ ID NO: 161105 - DNA, 597 bp, Homo sapiens
tttatcaagtgataatgtattatcataaaatataataattttttcttactcagcattttaaaaaccttcttctctgatatagagtggatgatgctgaatacctaagttaggagaggctacataaagaccgccaaggatgtgtgtgtgtatgtgcgtatatgtgtgtgcacatatgtgtgcatgtgaatatgtgtgtgtgtgtgtttcatgggtgtatgtgctttcagatcaatcaaatataggataacattcattcaccacaaaagtgttttctattatatggaaaatcagaaggaataatcaatttaatagtgttttaataccaaagaggctctctataagtttaatttaaacgtgtcttttatactgttacatttttattatctttcagggcttatcaaagtattatctattaataatttcccataatccatataaaatattacttkttattttaattaactttttgtaaactttgcattgtcttttaggttatttgtcttacacattcatgtcactgtaaatatctcaaggtcaagaccaagattacttacttgtatgtcttctagtattgctgcaaagtgttttacacaaagg

SEQ ID NO: 161106 - DNA, 646 bp, Homo sapiens
gcatggtgtatcttccgacaaagaagagaacaaaacattatgccatattctagccagaatgattccattcastccattacaccagttatatcttctagaatcaaagatataaaggaaaggaacacaattaacatcaaaaacagcaagcaaacaatgaaatgtgaaggcagaacatccaggatggacaagtgtcctgtgtcttcaaaagttattccccgaaacaacaacaacaaaaaagaaactctgatgaattaagaaacttacaagagaaaaaaaatgaggaaatgtaagtctggaccaggtaaactatctgataagcatattttgtagtcaattagaaaaacttgaacaaagtctgggaattgaataaaatattttctaaaacaaagctgggggtcatattgcctgaaaagaaaaacatgttaataaagaagatgaatggtaaagtctcatttggttttaacaagggtagatgctagctatcagaaataaaatgattttattgcttgaaatttttcatttgttttattctttttctctgaaataatacaaataaactagaaaaaattaaatagttgttcagagtaaaatgttttgtccatgaaagtacaaaggttagaacggtaatttgtgctgttagttgaat

SEQ ID NO: 161107 - DNA, 646 bp, Homo sapiens
gcatggtgtatcttccgacaaagaagagaacaaaacattatgccatattctagccagaatgattccattcagtccattacaccagttatatcttctagaatcaaagatataaaggaaaggaacacaattaacatcaaaaacagcaagcaaacaatgaaatgtgaaggcagaacatccaggatggacaagtgtcctgtgtcttcaaaagttattccccgaaacaacaacaacaaaaaagaaactctgatgaattaagaaacttacaagagaaaaaaaatgaggaaatgtaagtctggaccaggtaaactatctgataagcatattttgtagtcaattagaaaaacttgaacaaagtctgggaattgaataaaatattttctaaaacaaagctgggggtcatattgcctgaaaagaaaaacatgttaataaagaagatgaatggtaaagtctcatttggttttaacaagggtagatgctagctatcagaaataaaatgattttattgcttgaaatttttcatttgttttattctttttctctgaaataatacaaataaactagaaaaaattaaatagttgttcagagtaaaatgttttgtccatgaaagtacaaaggttagaackgtaatttgtgctgttagttgaat

SEQ ID NO: 161108 - DNA, 593 bp, Homo sapiens
agatctgcaaactttgcctcaggcttttgcaatcagaaactcagggtttgctggagctctacaaaggattttgacatagcctgaggtgagaaccatgaaaatgwgttctgttatggaggaatgtggtaaatgtcctacacgggttagcttcatcatgtgccccagagctgacctgagctgtccggtgggtacctagttcaacagcagcccaggcctgcggttgcagccctgcatgcaccctgcattacctgcgcgctttcaaacactgctgggcacagccctaccctagaccatgtgtacacaccacggttattggtcttcaccgtgcatcagaatggtctgcagagagtttaaaaacaacaggtgtgtgagacccactgcttggagactgtgtttcacatggtcacgggtggggtccaggtgttcatatattttggaaaccgggttggtgatttcaatgagcagccatcattgagtaacactggtgtgtgtccgtgtgtgcacacacacgcataggcagtataaacacgtatgttaacatgggctccactgcagcctcggctgagcgttaaacatggacctacctgtgtgac

SEQ ID NO: 161109 - DNA, 404 bp, Homo sapiens
catgataaatgcagatgtttaagggtcaytttgtaaattatccttctacaatgttttcagttctcaataatcaactacttgatactcacgagaaaagcagaattcttcttaagccttctgattcaaaatgcttctcctaaaaatgtcttcctctgctaataaagtgtttcacatcattacaacacggagaaaacatgtagatcccaggcagtccaggctatgatgaatatctccagcttttcagaaagacaaagttgattccacatcactgtgactcctaatgaccagttgtctcaagggaggtctgagtcacagtcccagcagtgtctccaaaggcagtacggtgctcatggataattacagtttcatatgttggtaaaaacacaatccacccagtgatctca

SEQ ID NO: 161110 - DNA, 632 bp, Homo sapiens
catgtgtgtgacatgtgtctccctcaaagcttgttaccacatccgtacagcacccataggatgttgggggggtgggtggggaaggaaaaacaagaagaaaaggaaaaagagaacatgagtagatgtgtgttttcgaaagtcaactctggcaagtatgtagaagttggaggaggcaggcctagaaacctatcrcaaggttattgccataattggaacaaaaaaatgtgagtgtgagcgaaggcaatggtgagaatagaagaaacagggatgggttggaaagagcaacaagcctacaaatatgttttgtaagtttagcatctgtaagaacctgaaaatggatgaagcttaaaacttgagatgagagttagacatagatatgaattccagaaaaatcaatatatgacatttcttgcccatttacatctccaaatatcttttctttgtagtgttctaatcaaaacatcagcaaaggaaatacaaagcaaagtaaacaaacaaacatccttccatctcctcatccaccctgcttctcctctaaatgatgaactcattcttttcaaaatatattaatggaataaattcaacacttaatgtacatctgaacctaattttgtaaataagacatattttac

SEQ ID NO: 161111 - DNA, 632 bp, Homo sapiens
catgtgtgtgacatgtgtctccctcaaagcttgttaccacatccgtacagcacccataggatgttgggggggtgggtggggaaggaaaaacaagaagaaaaggaaaaagagaacatgagtagatgtgtgttttcgaaagtcaactctggcaagtatgtagaagttggaggaggcaggcctagaaacctatcacaaggttattgccataattggaacaaaaaaatgtgagtgtgagygaaggcaatggtgagaatagaagaaacagggatgggttggaaagagcaacaagcctacaaatatgttttgtaagtttagcatctgtaagaacctgaaaatggatgaagcttaaaacttgagatgagagttagacatagatatgaattccagaaaaatcaatatatgacatttcttgcccatttacatctccaaatatcttttctttgtagtgttctaatcaaaacatcagcaaaggaaatacaaagcaaagtaaacaaacaaacatccttccatctcctcatccaccctgcttctcctctaaatgatgaactcattcttttcaaaatatattaatggaataaattcaacacttaatgtacatctgaacctaattttgtaaataagacatattttac

SEQ ID NO: 161112 - DNA, 632 bp, Homo sapiens
catgtgtgtgacatgtgtctccctcaaagcttgttaccacatccgtacagcacccataggatgttgggggggtgggtggggaaggaaaaacaagaagaaaaggaaaaagagaacatgagtagatgtgtgttttcgaaagtcaactctggcaagtatgtagaagttggaggaggcaggcctagaaacctatcacaaggttattgccataattggaacaaaaaaatgtgagtgtgagcgaaggcaatggtgagaatagaagaaacagggatgggttggaaagagcaacaagcctacaaatatgttttgtaagtttagcatctgtaagaacctgaaaatggatgaagcttaaaacttgagatgagagttagacatagatatgaattccagaaaaatcaatatatgacatttcttgcccatttacatctccaaatatcttttctttgtagtgttctaatcaaaacatcagcaaaggaaatacaaagcaaagtaaacaaacaaacatccttccatctcctcatccaccctrcttctcctctaaatgatgaactcattcttttcaaaatatattaatggaataaattcaacacttaatgtacatctgaacctaattttgtaaataagacatattttac

SEQ ID NO: 161113 - DNA, 570 bp, Homo sapiens
gatgaaagtgctgcaaagaaataaacaatttcatgggaagtgaaattggatatgattagaagattttaaaatgggaatagcaaagtttaagatttgaagagacctagctttgaataaatcatactgcagaagcctaatcaatacttttttaaaaggtaagtttctttaacatctttttaaattgcacaaaggaaagaaagcactctggttggattgaagattgtaatttttgaaaagttatttagctaatattcaggtcaaagtgttgatgttccttcccacctgaaaagaaaatggtaattacaaaagaaaggaagaagacactttttactgccagaaaaatctgttttcaaaagttggcagaaactgattaatgttaagccatcttgtgaagcttccagagcaaacggtgtcctgctatgaaatgttcacctagattccaaggactggttaaacaaggggacatgatcgttgtcaaatattctatgygaataaaagtgtttgtgatgaaaaagatgaaaatgtcccagaggaagtgatcctggcaaaataatttacgctaaagaattc

SEQ ID NO: 161114 - DNA, 570 bp, Homo sapiens
gatgaaagtgctgcaaagaaataaacaatttcatgggaagtgaaattggatatgattagaagattttaaaatgggaatagcaaagtttaagatttgaagagacctagctttgaataaatcatactgcagaagcctaatcaatacttttttaaaaggtaagtttctttaacatctttttaaattgcacaaaggaaagaaagcactctggttggattgaagattgtaatttttgaaaagttatttagctaatattcaggtcaaagtgttgatgttccttcccacctgaaaagaaaatggtaattacaaaagaaaggaagaagacactttttactgccagaaaaatctgttttcaaaagttggcagaaactgattaatgttaagccatcttgtgaagcttccagagcaaacggtgtcctgctatgaaatgttcacctagattccaaggactggttaaacaaggggacatgatcgttgtcaaatattctatgtgaataaaagtgtttgtgatgaaaaagatgaaaatgtcccagagraagtgatcctggcaaaataatttacgctaaagaattc

SEQ ID NO: 161115 - DNA, 565 bp, Homo sapiens
aggaattcaacatctggataacaggarttctagcaagaaacagttaagaaaacaaaaggaagaaaaccataaaaaataatttttaaaaagttctcatgagtttccagaatagaagtatgacgttaagacacacaattggctcatggtcgtggaatttcagcaaattaaaaataaagcactttcttggtttggtgagatagctcattcttataatttcagcattttgggaggttaaggtgggagaattacttgaggccaggagtttgagaccagcctgggcagcatagcaagatcctcatcactacaaaaaaatgaaaattaaaaaattagccaggcatggtggggcatgcttgtagtccctgctacttgggaggctgagcctagaagtttgaggctgcagttggccttaaatgaatcaagaccctgcctcttgaaaaaaaaaaaaagttctttaaacttctggaaagaaaactatgaatttcatataaaggatcaagaatttggatggtatgtttctcaataacaatactagaagctggaaggtagtggaaaaatgtctttgaag

SEQ ID NO: 161116 - DNA, 555 bp, Homo sapiens
taacaggaattctagcaagaaacagttaagaaaacaaaaggaagaaaaccataaaaaataatttttaaaaagttctcatgagtttccagaatagaagtatgacgttaagacacacaattggctcatggtcgtggaatttcagcaaattaaaaataaagcactttcttggtttggtgagatagctcattcttataatttcagcattttgggaggttaaggtgggagaattacttgaggccaggagtttgagaccagcctgggcagcatagcaagatcctcatcactacaaaaaaatgaaaattaaaaaattagccaggcatggtggggcatgcttgtagtccctgctacttgggaggctgagcctagaagtttgaggctgcagttggccttaaatgaatcaagaccctgcctcttgaaaaaaaaaaaaagttctttaaacttctggaaagaaaactatgaatttcatataaaggatcaagaatttggatggtatgtttctcaataacaatactagaagctggaagrtagtggaaaaatgtctttgaagttctgaga

SEQ ID NO: 161117 - DNA, 527 bp, Homo sapiens
aagctcttcagggtgagaagaagaaaggggcattggagagggagaaattcatctaatgagtttgctctctcagtcaggctacataacagccctgtggaatagatattgtcatccctgagtttttagattagaaatttgaattccagagatgaattcytttggattccagcctgggtctgtggctccacagcctgtgccgtaccacaatggggtggatcgaaaggatccttggtggtaaactattgctgcaagccttctgtaatatagaagcaaaaactctttgaaaaatggtgcagtgttgtgaagagcttggtgatttaggaattagactgaagggtatatgtaatagaataggtgtgaaagaccattttcagacccgtcagaaaagcttcatcctcgccctggctcttctagaaaccagctggctccaccgccttcttttttaaaggaaggttttgcctgggattctaaggtctctctccttgctctttaattataaacaaaggcacttagaaattttgccctta

SEQ ID NO: 161118 - DNA, 527 bp, Homo sapiens
aagctcttcagggtgagaagaagaaaggggcattggagagggagaaattcatctaatgagtttgctctctcagtcaggctacataacagccctgtggaatagatattgtcatccctgagtttttagattagaaatttgaattccagagatgaattcctttggattccagcctgggtctgtggctccacagcctgtgccgtaccacaatggggtggatcgaaaggatccttggtggtaaactattgctgcaagccttctgtaatatagaagcaaaaactctttgaaaaatggtgcagtgttgtgaagagcttggtgatttaggaattagactgaagggtatatgtaatagaataggtgtgaaagaccattttcagacccrtcagaaaagcttcatcctcgccctggctcttctagaaaccagctggctccaccgccttcttttttaaaggaaggttttgcctgggattctaaggtctctctccttgctctttaattataaacaaaggcacttagaaattttgccctta

SEQ ID NO: 161119 - DNA, 566 bp, Homo sapiens
gcaggcttgtggctggcctaaattggtacccttagatagagagactgcttttctggactagtagcccaaactgaatatactgccaagtcccaaagttttgaaactagaacatggtctgataatttctttcctggccttggtactttgcagattgccatagttcttggtagtagaatccacctggggctagtaagaagcgtaagaagcagwagagtgaggtggcacctctcctgggctacatctgcatggcagaagtgcttatttctttctcaggccacagaggcagaggtggtgcttgggataggttacatctctatgtctcccacctccaggcagagtgagccctctgagcagtgccatatgttttcctctctggcctttcagacagtccagtttcacagcaagcttatctttttcttgtaaatccttaagaaataaccaacccatactctggcatcttgaatttttttcaaattctctaatgccacaggcataaaggtccaagtctcaagataccacgggccatggtttagtccactatttcactattaaatagcgaagatgat

SEQ ID NO: 161120 - DNA, 519 bp, Homo sapiens
attattttatatcatagatagctctcttttctagatagccaactctctttatctgttggagctgcgataccaaaataccataaactaggtggcttataaacaacagaaatttgtttctcaacagttctagagtctgggaagtccacggtgaaggggctggcatattcagtgtctgatgaggacctgctttctggctcacagatggcgccttctmactgtgtcctcacatggtggaagaggaatactccttcataagggcactaatcccattcatgagagctctgtccttatgacctagtcacctctcaaagccccacctcctagaaccatcacattggtgactagctttcaatatataaactttagggagatagaaacattgagaccacagcaccaaacatgtttcaaggatgattttgagtaatgtatttatgagatagtagtcatcctctaggaattgaccttttcattcttctcactttgtattggtggaggtgggggaaggttgatggtaacaag

SEQ ID NO: 161121 - DNA, 214 bp, Homo sapiens
gaaaacttactcctacacaaaatygcatatgaatgctagtagcagctttattcataatagccaaaaatgaataaacaaactagggtacatctgtacaaaagaatattattcagcagcaaaaagaaatgagctattaagccatgcaaagacacaaaggaaccttaaaaacatattgccaagtgaaagaagccagtctaagaaggccacggcctat

SEQ ID NO: 161122 - DNA, 531 bp, Homo sapiens
aagggctacagacattggttttcaaccctggttccacattagtttatgttgggtctctttcaaaaaagtactgacccctggccgttccctacatcattgaagtagaatctctgaggattggagttctgaaagaactttcttatagaataaaacacgtggcctttaggttatattttgactactcaaaggcttttcktttggcttctgaacagtggtctggggagtggaggtggctagattgaatgtcctccagaaaagacctctgttttcatggtaattatgctaagaacactcaagtattatttgattatttacaagacatctgttttggaatgctagagatacttgaaatctaggaaggtcgagatggttttgacttaagaatgtttgtgcattcttgattcagtgtctgcccttgagaaatgaaatataaccttgctatctgtatgtgccaattatagaaaggtagagcttgttttcttctccctcttccctttttcttctctttcattcttgtttgcttctcttccc

SEQ ID NO: 161123 - DNA, 609 bp, Homo sapiens
ccaagaaaaatcctgagtgttgggttgtgtgatggtgtttgggtaaaaggaccaaacaataccttcagtttgtaatttttgcagacaatgttcaccagatgcgtgggataggccagtgatttcacttactctggaaagtcacttgtttgatttttctgaagaaggtcacttgttagtgtaaataattccttcacagtacctgtagattctgtttgtctgctcctttagagttcttcgttgacgtgcttaagagatgccgaaatgatttggccactttataccactacaattttgttttctagtstgaatgactgaaacataacactggaaaagtttgcctggatttggtagatccgtggtagaaccgggttattcaaccctagaacttttattcctccaaataaaaatatctgaaaaagaaagttggagagagaatacccagaaattatcacaaacaataccttaaactttttatttctcaaaaaacttttttatttattcttatgttacatttactgattcaagacaaatatgttcaccatttacattctcatgtccactactgagtttaaaggaaagagaaatatgctaagttgggccaagtcatgt

SEQ ID NO: 161124 - DNA, 609 bp, Homo sapiens
ccaagaaaaatcctgagtgttgggttgtgtgatggtgtttgggtaaaaggaccaaacaataccttcagtttgtaatttttgcagacaatgttcaccagatgcgtgggataggccagtgatttcacttactctggaaagtcacttgtttgatttttctgaagaaggtcacttgttagtgtaaataattccttcacagtacctgtagattctgtttgtctgctcctttagagttcttcgttgacgtgcttaagagatgccgaaatgatttggccactttataccactacaattttgttttctagtctgaatgactgaaacataacactggaaaagtttgcctggatttggtagatccgtggtagaaccgggttattcaaccctagaacttttattcctccaaataaaaatatctgaaaaagaaagttggagagagaatacccagaaattatcacaaacaataccttaaactttttatttctcaaaaaacttttttatttattcttatgttacatttactgattcaagacaaatatgttcaccatttacattctcatgtccacyactgagtttaaaggaaagagaaatatgctaagttgggccaagtcatgt

SEQ ID NO: 161125 - DNA, 652 bp, Homo sapiens
ttgttttagtttctcttgataatgcagcatgcagcgatatatttgggctgtttggaactaaagattatttattatttaaatgtatgaaaatggttattaatgaataaatctgctggtatattttaccagtcaagcaaattctgatcattttgttttcttctagaagtagatattgcaagtgwtcttgtttcattttgccttaagacaaataatatctgaaatttgttttataaagttatcctgatagttaagcccctgtgatgaaatactttatttgatacctgaatattttaaattctagtcctcaaagccccacttctcaaagtatggtgcttggaccaattgtatcagaattcccccaggggcttatgaaaaaatctggattcctaggtcttacttctcataagccaggaatctacatttttcacaagctttctgggtgattcttaggcgcatgtaagtctgagaacgtgttgctttagatctatatttaagatgtttttctttcctttcttaactacttactgcaatttgtgatctttaacaataataatagtaataataaaagtatttatggctaatattttattaagtacttactattctgctctaaatactttatacgttttataactcatttcattctgaaaat

SEQ ID NO: 161126 - DNA, 652 bp, Homo sapiens
ttgttttagtttctcttgataatgcagcatgcagcgatatatttgggctgtttggaactaaagattatttattatttaaatgtatgaaaatggttattaatgaataaatctgctggtatattttaccagtcaagcaaattctgatcattttgttttcttctagaagtagatattgcaagtgttcttgtttcattttgccttaagacaaataatatctgaaatttgttttataaagttatcctgatagttaagcccctgtgatgaaatactttatttgatacctgaatattttaaattctagtcctcaaagccccacttctcaaagtatggtgcttggaccaattgtatcagaattcccccaggggcttatgaaaaaatctggattcctaggtcttacttctcataagccakgaatctacatttttcacaagctttctgggtgattcttaggcgcatgtaagtctgagaacgtgttgctttagatctatatttaagatgtttttctttcctttcttaactacttactgcaatttgtgatctttaacaataataatagtaataataaaagtatttatggctaatattttattaagtacttactattctgctctaaatactttatacgttttataactcatttcattctgaaaat

SEQ ID NO: 161127 - DNA, 465 bp, Homo sapiens
catctcttctgtgagtatattgaacattcattggtatcaagatggcttaacctactagctgaggattttgtgtgtattttcttgtaaccctatggcctttcttccattttgcagctagacgatgggccatccactggctcagagaaaaaaaagaagtgtttctctgacttgagttcaaatatataaagcctacagggaacaaggcattctcaggagaagttagtagatttgagaggatacgcaatgacgcaggaacaagatttcccactgcaaaggatcatttgatgggtcaagagtagtaagtgtccctgactatcagaggggaaataaaaaccatgagctgctggtttgttttggctgggagacaacagtaatctcaggagggaagtagagattgctgcccctagttgcacagagagcttgaagagkcttcaagatgtcagaatagaaatggctatggggtgt

SEQ ID NO: 161128 - DNA, 420 bp, Homo sapiens
tattcacttgtcccaacttatgtcaccattgtaccacgttttggggggatcatttcgtagataacactgctatagtcacttcacygtagctttttaggttctgtcactgcctggcttcctgtgggaatgtgcattccatgtgagccgtacttggttcactctcaactgtgtcttgtgcttttaccttgttgttctggatcgttccttccccccagaagcccctctcccctatcacactggcacatctttcagtgcccagctttgtgcctgtcttctctgtcagttttcccagactcaggttgcgcttgttcttctgaacttaactgtttcacaacttaaaaaaaaaaaagaaaatatttgaagcacaatgaaatgttgaaagtaaccttacacattcatatggttaaattattggaattc

SEQ ID NO: 161129 - DNA, 560 bp, Homo sapiens
atgaattcattgcggagaacaaagtgtgataggtatctggagttgggaaaaatattttgatacaaactgattcaagtaagtcaattgctgaatggaatttttaactcagagcacacgtaaagcattttttattgaaagggccagactttgttgagattttagcagaaggcaaaggagaaagacaagggggaggaagaggaggcagagagaaagaagaaaggaaggaagtcagtttgcttagaattccagaaactagggtttaaatatcatcagccaatcttagaggactaaccacagagatttgtactatgaaccacagacttgagaggacccaaaaaatgatgtaaaagccattttcatactcaaaaaaataagtgcttaaggcaggaagaaggcttggagaaaggtaagaagtttggatgcagatgagtgtttctgaatgggggctgtggtcctgccccctcctaaygttgaaaccctgaagagggaaggaaggacttaggtttgagggtctggagaaagccctgcctctcccctggagtgctaggaggaagaaaacc

SEQ ID NO: 161130 - DNA, 508 bp, Homo sapiens
agccctgcctctcccctggagtgctaggaggaagaaaaccctccaagtgtcctatgccaacatgaagtaaccagcatggagtagaaatagtggcagggctgacctagacagagagaggacccactgtttctcagatgacagctgagagkgagtggaagagttcaccagggcaaggggcacagcaacctgaattggagggcccaagtcacagagagacctcaagggatcttccagaactgaggagaggcccaaaactcccagagacccttaggcacaggtcaagccaagaaaatggaccagctgcgacctttggcaatcaaggaaagaggccactaccaaaggccaagcaggacaaggctgtttagcagaggccagccttgtttcatgcagcccacagacaaaatacccatccctaaagccatgaggtcatctgaacctcttaaacccaaaagaaacccagaggaataggagaacaaccctgaaagatgcaaattttcttcacattttt

SEQ ID NO: 161131 - DNA, 461 bp, Homo sapiens
cattttctttctagacctctaactggtccattaaatcactggccatttcccatgagtatatatatgttcttatcttggccacttgtctttccatgcaaagtagatgaccagatgcattacttgcagctccatccatcaacaatatttttcttctctactttatttagagcctaccctgagtgtggtggttaatatagtagctgttcattttcagcctgtatttgtatactgagccaacccaaatayaaaccaagctaaggcttttttcttttccttagctggtcctatgggatcccacatatggccacagatgtgagctgagggaggggtgctgatgcagttgtgatgggcgacatggggaccgttgctccctgcccatgcagcttctcatgtcctctagtcttgcttgggctcagttctagttgtaccttttccatcttacaatggattgctacttagct

SEQ ID NO: 161132 - DNA, 548 bp, Homo sapiens
aaaaaaagaaagaaaaaaacactaagtgttcctgggtttgtttttgttttgttttgttttgttttttgagatggagtcttgctctgtcacccaggctggagtgcagtggcatgatctccattctctgttcactgcaacctccacccctgaggctcaaatgatcctcccacctcagactcccaagtagctgggactacaggtgtgtgccaccacactcagctaatttttgtattttttgtagagatkatgtctcttcatgttgcccaagctgttctcaaactcctgggctcaagcaatcagcccgccttggcctctcaaagtgctgggactacaggcattagccactgtacgttgccaagtgttctgtttagagtagatagttaacaaatgtttcctttttttccccctaaatctctacccctctacaatttttctgagtgcctaagaatctccgtcttgactcctaatattcaaggaattttctgtctctctgaccctctaagtctactgatcatcagttttgcccaagtctttagacagccagttta

SEQ ID NO: 161133 - DNA, 548 bp, Homo sapiens
aaaaaaagaaagaaaaaaacactaagtgttcctgggtttgtttttgttttgttttgttttgttttttgagatggagtcttgctctgtcacccaggctggagtgcagtggcatgatctccattctctgttcactgcaacctccacccctgaggctcaaatgatcctcccacctcagactcccaagtagctgggactacaggtgtgtgccaccacactcagctaatttttgtattttttgtagagattatgtctcttcatgttgcccaagctgttctcaaactcctgggctcaagcaatcagcccgccttggcctctcaaagtgctgggactayaggcattagccactgtacgttgccaagtgttctgtttagagtagatagttaacaaatgtttcctttttttccccctaaatctctacccctctacaatttttctgagtgcctaagaatctccgtcttgactcctaatattcaaggaattttctgtctctctgaccctctaagtctactgatcatcagttttgcccaagtctttagacagccagttta

SEQ ID NO: 161134 - DNA, 408 bp, Homo sapiens
taaatctgttattcccttgccctccctcagcatggaagagcagactggggtaattcaggcccctacaggagtgggtagggtggggttgtgtgtgcaagctctgatccccttagctacaaaccacaaataatccataaagtatgcaaattagctcccaattaatagcacttactaacatcttgaactgtgtaaggagaagctgtgtttgccagagaggaaagcaacactcatgcacctcattgcaaaacacgtctggtcaggcgraaaaccctggacttgctgggagggagggaagaatgaagttgaaactgaaaggctgctttggtgccctcaggtcatctggaaaagtgtccacacagttcaggcttgaggagtaatttgatgtgagatgaggattcagatgagaat

SEQ ID NO: 161135 - DNA, 453 bp, Homo sapiens
cttttgctgtgtggaagctctttagtttaatcaggtctcacttgtcaatttttgtttttgtttcatttgcttttaaggtcatcataattttttttgcctaagccaatgtctggaagaatatttcctagattttctcctagaatttttgtagtttgaggttttacatttaagtctttaatctattttgaattaatttttgtatatggtaaatggtccagtttcattcttctgcgtatggttagccrgttttcccagcaccatttattgaatagggtgtccttcctcattgcttagttttgttgactttgttgaatacgagtttgttgtaagtgtgcagctttatttcaggggtctctattctcttccattggtctatgtgtctatttttgtagcagtaccatgctgttttgcttactgtggccttgtatatcatttgaagttgggtaatgtggt

SEQ ID NO: 161136 - DNA, 608 bp, Homo sapiens
ctcacatcagttgacagctatgctcaattacagcacttgtcacattgtgttataattgtttttctacttgtctaacttctccactagattggaactttccaaaggcatcatcagtgtctggcacaggacttagcactcagaccaaattccttagcaaattttattgaactcacactgtgtgctaaacactagcactgtgtacatagagctatggacaaaaccaaattccctgcttsagtgggcagagacacacaatccacaaacaatcataaataatttgttagatggaaagtgctatataaagaaaaataaggcacagtacagccttagagaatgctgctgttcacaggtggcgtatatttgagcatggatctaaatgaggtgaaggattgagatggctgcttggggaagaactttccaggcatgaatgaatgcctgaattgagcatctccacttcctgatatgagagaagagacgtaacaaagattcctccagaaccaaaaggatccgagataaggctaacttgattaacgtgcttaatgtgaatgccacaccttgggtttcccaggaagaagactctcagatgaagaccagtgtttaggaagctt

SEQ ID NO: 161137 - DNA, 563 bp, Homo sapiens
ttttcttttctttttttattatagaatttttgtccaaagtgacttcgtattcttgtttagaagattttttgttgatgttgttgtctagtaacataaaatgagtatttgccaattaggcacwtccaatattgtaatactttctccaaccttatattatagtaagaattttaagcttccttcctttataatattgggtttctgccagggattactcacttatccttggaagtcttttgtgatggcatcaatcatcccctctcttaagtagggaaaaattagcagtaaaatgtctcacctctggggaaaaaataactaatcacttaataaagtaaaccatgtcttgtttcctgaatttgtgcacttttaataagaaactgttaggggaggaactctgtcttctctaatagcttgtataaagccaattacccatcatcagtcctcaaataaataaaagataataatagtgaaaaattgaaatattgaaaccaaacattttcactaattcaatcttcatttccgtaatatgtggtataactttagctaggctatttatgactaaaata

SEQ ID NO: 161138 - DNA, 412 bp, Homo sapiens
gagctttaaaggagccattcacatatgaaaaaaggaatcaactgccattgtacagcactgcctatcagcagcagatgtgaattaaatgcttcattattagcttgtgtatcttaagttgttccaaactttggtgaagaaaatcagtgatgtttaattgatctccttaagctccaacaaacatttcagtcctggtaataataatgtcctcctacctaagacaagatcattctctggtctagagaaatgctatacaaactggtaccgagcatttatttatttacacatttttgaattctgaaaaagtctactggaatggaattgtcaatacttttctttacacagtcacaagtggtgacyattttaacaaaatgtccctattaactttctcagatcttggatatatttcaaataa

SEQ ID NO: 161139 - DNA, 542 bp, Homo sapiens
tttgttgaggagttttgcattgatgttcatccaggatattggactgaagttttcttttcttactgtatctctgccaggttttgctatcagtatgattctggccttatagtgtgggtgaaggatgagtccctcctccttaaatgtttggaacaatttcagtacaaatagtaccmccagctcttctttgtacatgtgatagcattcagctatgaatttgtttggtcctgggttttttttttttttttgtaggctatttattattttcccaatttcagagcttattattggtctgttcagggatttaaattctttctgattaagtcctgggagggtgtatgtgtctaggatttatctgtttttttctatattttctagtttatgtgcatagatatgttcatattttctgatggttgtttgtatttctgtggggtgagtggtaatatcccccttcttgtttctaactgtgtttatttgaatggtttttcatgtctcaatctccttcagttctgctctgattttggttatttcttgtcttctgctag

SEQ ID NO: 161140 - DNA, 466 bp, Homo sapiens
tgcattgatgttcatccaggatattggactgaagttttcttttcttactgtatctctgccaggttttgctatcagtatgattctggccttatagtgtgggtgaaggatgagtccctcctccttaaatgtttggaacaatttcagtacaaatagtacccccagctyttctttgtacatgtgatagcattcagctatgaatttgtttggtcctgggttttttttttttttttgtaggctatttattattttcccaatttcagagcttattattggtctgttcagggatttaaattctttctgattaagtcctgggagggtgtatgtgtctaggatttatctgtttttttctatattttctagtttatgtgcatagatatgttcatattttctgatggttgtttgtatttctgtggggtgagtggtaatatcccccttcttgtttctaactgtgtttatttgaatggtt

SEQ ID NO: 161141 - DNA, 419 bp, Homo sapiens
atataaaataaactttatgtattaaaacatctctaaaatgcatatgtattttacatgcatacaattggccatagatgttctyacagatatcacttttatatctaagtaatattaaattgatgctttcaatatttgtaaattaaacattctaaaggataataaaaatgttgtaccataattcatttaatatacatttttaaattttttgatgttacataaaacaatgatacttctaaaaggtcaaattcatgttaaagctgataaaacatagttttacttaatggttttagttactgaaagttttttttctaaagtgtatcatttgtcatttaattgacattttgtatctttgttaacaaaaaatacttaatttcaaggtaataaaacccgggtttcattttcttttatatgcttttgaa

SEQ ID NO: 161142 - DNA, 419 bp, Homo sapiens
atataaaataaactttatgtattaaaacatctctaaaatgcatatgtattttacatgcatacaattggccatagatgttcttacagatatcacttttatatctaagtaatattaaattgatgctttcaatatttgtaaattaaacattctaaaggataataaaaatgttgtaccataattcatttaatatacatttttaaattttttgatgttacataaaacaatgatacttctaaaaggtcaaattcatgttaaagctgataaaacatagttttacttaatggttttagttactgaaagttttttttytaaagtgtatcatttgtcatttaattgacattttgtatctttgttaacaaaaaatacttaatttcaaggtaataaaacccgggtttcattttcttttatatgcttttgaa

SEQ ID NO: 161143 - DNA, 599 bp, Homo sapiens
atcatacgtgtttcactggagaaaaacaaaaacctccttaatttatttttatcttttcttaatatgatttatctatcatgcattggtaggcaaactatcagaagacagtaattttttatttcattctcaaaagcattagaaaaatgacttttttttcaaaataacattaaacatgaaaacctttcacacttagtcacactgacatagtgattgttgtcatgaaccatcaactcgtttatatccttaacctctttttaccaaaaagttttactggtagaaatatttaaaaataattttatacaacactgtattaacatagtctatatgtagaatgctaaatcyggaaatgagagaaaaataatcaggataaagaaatcattttttcccaaaatcagggctcaaaaatttagcccctaaaacagagctagaaaattttttgacaacaaatatcttaaattaagtggcaaataaggaaaacagctcagaaaaggtaaaggctctaggattacattgaaggcctatatttgtgttcagtttacctaaatagcaaggggaaaaaacaacatttaattaatgctaatgaccatgtctgtgaaatg

SEQ ID NO: 161144 - DNA, 504 bp, Homo sapiens
attaactaaaagtattccttacgggaaacaaagggataggccgaaataaagggatgggtctggctagttatctgcagcaggagcatgtccttaaggcacaggtcgctcatgctattgtttgtggtttaggaacgtctttaagcggttttccgccctgggtgggccagatgttccttgccttcattccggtaaacccacaactttcagcgtggycatcatggccatcacgaacatgtcacagtgctgcagaaattttgtttatggccagttttggggccagtttacggccagattttggggcctgttcccaacactttataacgtgataattggaaggataatggtacaatttcatagaattgtgagatgcaaatgacttaacatttgtaacctgtttagaacattgactgatgtgtattagtcctgaaagtataagctataattttattatgttattaattatggaactggacctcttctacatgactttgatcttttatttct

SEQ ID NO: 161145 - DNA, 580 bp, Homo sapiens
ttgtatttctactctcaattaaattcttatttaagaactaagatgcattataattgctttggatgagtatatattaaagagaaargatagtgtcctctttctctgaatcatcctttacaaggattctgaccaaattactatttcttgagaagaaaagctattttctcacagtatgaaataggatcataaataaaatttcaaaatctgcattgttcattccagtttccttattcgttaagcacattctttcaagtatataaacaggacaacatatcataaagcagatcagaatttctcaaactttgtcccatgaaacattattagttggatgtattctgtgaaaaatattaacactctaagatgtaaataaataaatttaatataattgttcccattatttcccaaacaaactttcttacaaaatacttgttgatattgaagatattcacttctaagaactggttcttctagaacatgcatttgaaaataatgaaaatttactaaatgtatgatagtgatgctaggcattcaaggggcaaagtttcaaatagcatgaaaatttaggggcccagccactaca

SEQ ID NO: 161146 - DNA, 507 bp, Homo sapiens
gtatagccaatgtatggtagacctaagaaccaaatgcaggtctaggcatttattaccatattattctgccttgcagctataatcagttatacttgagtgtgtataactgatctagtatctactagagtagcaagtcattaaggactggatttcataaaaactcaaatcatttgatttatattgatttgaataggcataggaagcttaataaacacatttccattctgttcttttaaatatagcttttgtttctatcatttaggarttaagaattaaataatattcctatacgttatcattttattccatcttatttccattcatcagccatctcagtgactcatagacagatatgtgacttctgaagtgggaagcaattctttaattctgtagaataaacccattattctacactgaaacaatggagccataattgagctagcctgattattttaatctcttattcacaacttagggcaagtacctgaggaggcatgtttggaactg

SEQ ID NO: 161147 - DNA, 413 bp, Homo sapiens
agctcctgagttatgacacgtgccatggcatgtgttgggtatagggtaatcgacagttccttctttcacaaattttagatcatagcttagtgggtacatatatattttgtatggaaatgagttcaggtttatttataagtcttaaagratgctattggtgctgtttttttttttttttttctaaggcggggacttcgatggaaattttaccttgtatcgagcagtttctgaaatataaattagttataaggtctgtaatttggaagacagcaaaaggagatcacattagtatttactggatgatatggttaggctatgtccccatccaaatttcatcttgaattgtagctcccataatccccacatgtcatgggagggaccctgtgcagggagagtaattgaatagtggggca

SEQ ID NO: 161148 - DNA, 413 bp, Homo sapiens
agctcctgagttatgacacgtgccatggcatgtgttgggtatagggtaatcgacagttccttctttcacaaattttagatcatagcttagtgggtacatatatattttgtatggaaatgagttcaggtttatttataagtcttaaagaatgctattggtgctgtttttttttttttttttctaakgcggggacttcgatggaaattttaccttgtatcgagcagtttctgaaatataaattagttataaggtctgtaatttggaagacagcaaaaggagatcacattagtatttactggatgatatggttaggctatgtccccatccaaatttcatcttgaattgtagctcccataatccccacatgtcatgggagggaccctgtgcagggagagtaattgaatagtggggca

SEQ ID NO: 161149 - DNA, 413 bp, Homo sapiens
agctcctgagttatgacacgtgccatggcatgtgttgggtatagggtaatcgacagttccttctttcacaaattttagatcatagcttagtgggtacatatatattttgtatggaaatgagttcaggtttatttataagtcttaaagaatgctattggtgctgtttttttttttttttttctaaggckgggacttcgatggaaattttaccttgtatcgagcagtttctgaaatataaattagttataaggtctgtaatttggaagacagcaaaaggagatcacattagtatttactggatgatatggttaggctatgtccccatccaaatttcatcttgaattgtagctcccataatccccacatgtcatgggagggaccctgtgcagggagagtaattgaatagtggggca

SEQ ID NO: 161150 - DNA, 378 bp, Homo sapiens
aaagccaattcccaactcattgaactaccgtactccttccttacaaggaagaaaaacaaaacacctgaatatgttgtctgtagccaataaacattactaactagattgcagcctaaagtgtcaagtatttctaataattacattaaaaatacagcagcaagacagttccttggatcttactttttccctytcattggaactgaattgtagatattgggcactgtacctagcaagtcacagaagatctgaattaggatgccttaattacacttggcctattttaatgattttaaaattagatcttaaatgtgaaagtaaataaaagcagtaagggaaacactacacaatgagtatgtacggttgctggctgcagaattc

SEQ ID NO: 161151 - DNA, 592 bp, Homo sapiens
ccccagttatagaaagcaatggcttcctaatcaaaataatacaagccagagcatgatggaatagcatcgtaaagtcctgaatgaaaataaatgccaaattagaactctatactcagagcaagaatcccacagaatttaagaaaatcaagtcattttcgaaaaacaaaaacaaagaacactttttaccagaagatctccaatgaaagaaacataaaagagaggtcttccaaaagaaatacattaatcccatatggaagcatagaatttcaggaagaaaagaaaaataacagcaagggtaattttacattattagtaattgtataaaacaataaaaatgttttgtgtacctattatgtacgtagaattaaaatacttggcatagatagcacaaaagacaggagtgggtaagtggggtttaaaatgttccaaggtccttggattgattattgattataacatgataaaagtatcamttttaaattagattctaacatattaaggttgaatactgtaatctctaaggtaactactgaaacaagagtcacaggatgtataaataataattttaaaaggggagtaataaaaaagtgat

SEQ ID NO: 161152 - DNA, 592 bp, Homo sapiens
ccccagttatagaaagcaatggcttcctaatcaaaataatacaagccagagcatgatggaatagcatcgtaaagtcctgaatgaaaataaatgccaaattagaactctatactcagagcaagaatcccacagaatttaagaaaatcaagtcattttcgaaaaacaaaaacaaagaacactttttaccagaagatctccaatgaaagaaacataaaagagaggtcttccaaaagaaatacattaatcccatatggaagcatagaatttcaggaagaaaagaaaaataacagcaagggtaattttacattattagtaattgtataaaacaataaaaatgttttgtgtacctattatgtacgtagaattaaaatacttggcatagatagcacaaaagacaggagtgggtaagtggggtttaaaatgttccaaggtccttggattgattattgattataacatgataaaagtatcacytttaaattagattctaacatattaaggttgaatactgtaatctctaaggtaactactgaaacaagagtcacaggatgtataaataataattttaaaaggggagtaataaaaaagtgat

SEQ ID NO: 161153 - DNA, 642 bp, Homo sapiens
ttgattcatctaattagttcaggtagttagctgatcatttttcttgtaattcaaacaaacccttccccaattcttagtaatagctgttgattgagtgccgattgtggacagtaaacataatttgcatagtcaatatagcttggagattaagcactcggctctgtagtctgggttgcaatcctggctctgccatctgctctctgtgtaacctggggtatgtttctttacctctctgccattgttcctcaactgtacaatgaaataatgatagcatgcatgaaatcayacaggcatgttgtgagaatttaataagtcaatgaacataaggtgcttagaaccaagcttagggtatggaaaacagagaatagatgtttcttgttattcttaaaccttacaacaaccgttcaagttaggcagcattatctgcattttatacatgtggaagcaaatattcagggaaatcaagtcccaaatacacaactgctaaatcacttggttaacaagaagaggaatcagattcaaactccaaaactgccatgtttctcactacacggcaggcttgggtggaaaacaggttaaacctgggagaaagagtcctcttttagggataaaaattgggattgttcagctggtgtggtgtgt

SEQ ID NO: 161154 - DNA, 642 bp, Homo sapiens
ttgattcatctaattagttcaggtagttagctgatcatttttcttgtaattcaaacaaacccttccccaattcttagtaatagctgttgattgagtgccgattgtggacagtaaacataatttgcatagtcaatatagcttggagattaagcactcggctctgtagtctgggttgcaatcctggctctgccatctgctctctgtgtaacctggggtatgtttctttacctctctgccattgttcctcaactgtacaatgaaataatgatagcatgcatgaaatcatacaggcatgttgtgagaatttaataagtcaatgaacataaggtgcttagaaccaagcttagggtatggaaaacagagaatagatgtttcttgttattcttaaaccttacaacaaccgttcaagttaggcagcattatctgcattttatacatgtggaagcaaatattcagggaaatcaagtcccaaatacacaactgctaaatcayttggttaacaagaagaggaatcagattcaaactccaaaactgccatgtttctcactacacggcaggcttgggtggaaaacaggttaaacctgggagaaagagtcctcttttagggataaaaattgggattgttcagctggtgtggtgtgt

SEQ ID NO: 161155 - DNA, 642 bp, Homo sapiens
ttgattcatctaattagttcaggtagttagctgatcatttttcttgtaattcaaacaaacccttccccaattcttagtaatagctgttgattgagtgccgattgtggacagtaaacataatttgcatagtcaatatagcttggagattaagcactcggctctgtagtctgggttgcaatcctggctctgccatctgctctctgtgtaacctggggtatgtttctttacctctctgccattgttcctcaactgtacaatgaaataatgatagcatgcatgaaatcatacaggcatgttgtgagaatttaataagtcaatgaacataaggtgcttagaaccaagcttagggtatggaaaacagagaatagatgtttcttgttattcttaaaccttacaacaaccgttcaagttaggcagcattatctgcattttatacatgtggaagcaaatattcagggaaatcaagtcccaaatacacaactgctaaatcacttggttaacaagaagaggaatcagattcaaactccaaaactgcyatgtttctcactacacggcaggcttgggtggaaaacaggttaaacctgggagaaagagtcctcttttagggataaaaattgggattgttcagctggtgtggtgtgt

SEQ ID NO: 161156 - DNA, 480 bp, Homo sapiens
aagtgaggtatatcatcagtaatatgggctaataactgtgctagtagtaacatttcatgattgtttacactgcatcagcttccagtgctaagcacttttgtcttttattgtatgattctcacaaatcctcataaggtaggtaatgcttttatccctttctcccttctcaaaggattcttaggaagcctaggtgtgacactaattatagatgcactttgtaaccattaagggttaatgcaaaaaatgaaatattattgtgatgttcaataatagtaccatgatgttcaacaagtacatatttaaygaataactgcatttgttgaatgccatgacagttgtgggctataattaaatgagtctcaaaatattttgtgtctgtctcctgaacaaaccaaataaaaagcaatagaaggaatgaaaaacgttgtcatcaccaatttgctaattgtatgccatgccggaccacagaagagagaattc

SEQ ID NO: 161157 - DNA, 490 bp, Homo sapiens
tgaattctactacttcactgtgcaaacttgaggaagtgaggtatatcatcagtaatatgggctaataactgtgctagtagtaacatttcatgattgtttacactgcatcagcttccagtgctaagcacttttgtcttttattgtatgattctcacaaatcctcataaggtaggtaatgcttttatccctttctcccttctcaaaggattcttaggaagcctaggtgtgacactaattatagatgcactttgtaaccattaagggttaatgcaaaaaatgaaatattattgtgatgttcaataatagtaccatgatgttcaacaagtacatatttaatgaataactgcayttgttgaatgccatgacagttgtgggctataattaaatgagtctcaaaatattttgtgtctgtctcctgaacaaaccaaataaaaagcaatagaaggaatgaaaaacgttgtcatcaccaatttgctaattgtatgccatg

SEQ ID NO: 161158 - DNA, 541 bp, Homo sapiens
gacccaaagaactatgtgtgagaaaaaacacaataccctgttacacccycttcaattgtgggcaggtagattatttactttgtgggttgatgtaacacaatttttaatcccatgttggctacgctctgccacttccccccaccgttagtgggtgtgtgctcaggcagtgtaaactcaggaaggtaatgcaaaaccaggaaagtaaatctgcttcttatacctctcaccccacatcagcctcctcctctctttttacttcattctcttcagctttaaaaaaacagaggtaaatgtattttcagttgtctttggcacagccctgttttggaaatcatagacagccagctggaccaggagtcaggaagccaggggctctcatctggatctgacattggttaactgtgggccttcaggaaagttagatcagtcctccaggcttttgttccttttctgtacaatgaaaagaagactagagtatttatgaagtgcttactgtgcaccatgtgacatcaattgtattactttatttaatccataagag

SEQ ID NO: 161159 - DNA, 541 bp, Homo sapiens
gacccaaagaactatgtgtgagaaaaaacacaataccctgttacacccccttcaaytgtgggcaggtagattatttactttgtgggttgatgtaacacaatttttaatcccatgttggctacgctctgccacttccccccaccgttagtgggtgtgtgctcaggcagtgtaaactcaggaaggtaatgcaaaaccaggaaagtaaatctgcttcttatacctctcaccccacatcagcctcctcctctctttttacttcattctcttcagctttaaaaaaacagaggtaaatgtattttcagttgtctttggcacagccctgttttggaaatcatagacagccagctggaccaggagtcaggaagccaggggctctcatctggatctgacattggttaactgtgggccttcaggaaagttagatcagtcctccaggcttttgttccttttctgtacaatgaaaagaagactagagtatttatgaagtgcttactgtgcaccatgtgacatcaattgtattactttatttaatccataagag

SEQ ID NO: 161160 - DNA, 554 bp, Homo sapiens
aagaactatgtgtgagaaaaaacacaataccctgttacacccccttcaattgtgggcaggtagattatttactttgtgggttgatgtaacacaatttttaatcccatgttggctacgctctgccacttccccccaccgttagtgggtgtgtgctcaggcagtgtaaactcaggaaggtaatgcaaaaccaggaaagtaaatctgcttcttatacctctcaccccacatcagcctcctcctctctttttacttcattctcttcagctttaaaaaaacagaggtaaatgtattttcagttgtctttggcacagccctgttttggaaatcatagacagccagctggaccaggagtcaggaagccaggggctytcatctggatctgacattggttaactgtgggccttcaggaaagttagatcagtcctccaggcttttgttccttttctgtacaatgaaaagaagactagagtatttatgaagtgcttactgtgcaccatgtgacatcaattgtattactttatttaatccataagagaaagaactctactagctag

SEQ ID NO: 161161 - DNA, 554 bp, Homo sapiens
aagaactatgtgtgagaaaaaacacaataccctgttacacccccttcaattgtgggcaggtagattatttactttgtgggttgatgtaacacaatttttaatcccatgttggctacgctctgccacttccccccaccgttagtgggtgtgtgctcaggcagtgtaaactcaggaaggtaatgcaaaaccaggaaagtaaatctgcttcttatacctctcaccccacatcagcctcctcctctctttttacttcattctcttcagctttaaaaaaacagaggtaaatgtattttcagttgtctttggcacagccctgttttggaaatcatagacagccagctggaccaggagtcaggaagccaggggctctcatctggatctgacattggttaactgtgggccttcaggaaagttagatcagtcctccaggcttttgttccttttctgtacaatgaaaagaagactagagtatttatgaagtgctyactgtgcaccatgtgacatcaattgtattactttatttaatccataagagaaagaactctactagctag

SEQ ID NO: 161162 - DNA, 506 bp, Homo sapiens
tcaactttaggcacttcatttaagctgtttactcatctattasgggtcctaatgaatgagctctagagggtctttttgcctgacaatcctcaaactccattctcaaaacttcctgcaatcgggagtctccctcccctccatggagagggcgggacagaggcatgtagacagggaggcgatcctcaggtcagctagggcttactcaaacaaggtcctgtgggggcaacagggagagtggatggggactcaagccagagccctggtgggatgggccggtaattataaggaaacactgcagagaaagtttctgttgtggttgttccctttgtttactttaggcagttctgtcattttttaactgacccttcccagatgagatagtcagttttcagctgggtaaagtcagggccttgcaactgatggggtatttgaatcctctgtggctcagttgctggagggaggccagggcagctgaaactcccccgccctttcagggaagtgaagct

SEQ ID NO: 161163 - DNA, 506 bp, Homo sapiens
tcaactttaggcacttcatttaagctgtttactcatctattaggggtcctaatgaatgagctctagagggtctttttgcctgacaatcctcaaactccattctcaaaacttcctgcaatcgggagtctccctcccctccatggagagggygggacagaggcatgtagacagggaggcgatcctcaggtcagctagggcttactcaaacaaggtcctgtgggggcaacagggagagtggatggggactcaagccagagccctggtgggatgggccggtaattataaggaaacactgcagagaaagtttctgttgtggttgttccctttgtttactttaggcagttctgtcattttttaactgacccttcccagatgagatagtcagttttcagctgggtaaagtcagggccttgcaactgatggggtatttgaatcctctgtggctcagttgctggagggaggccagggcagctgaaactcccccgccctttcagggaagtgaagct

SEQ ID NO: 161164 - DNA, 404 bp, Homo sapiens
agatctctctcatctgcagctcccagactrtgctacaccacattgccacagccactgtgcacatcacagcttacagtaacatactttccacttttcaaattatgacccaattttcataatcactacttttgtggatgtattcactcattcagtaaattatttattaagcagctactctgtgccaggaatagtcaagacactgaggatatagtagtgagcaaaatacataaatccttgctctcatagagcatgggttacagggggaggaatagacaacagcccagaaaaataagtcaggtaaaatgataagcgttggaagaataaagcaaggaagaacaggatatgctagaggctgagggatgggaggaagatagcaagtttaaatacgattgtcaggaaaagaa

SEQ ID NO: 161165 - DNA, 383 bp, Homo sapiens
cactgtgcacatcacagcttacagtaacrtactttccacttttcaaattatgacccaattttcataatcactacttttgtggatgtattcactcattcagtaaattatttattaagcagctactctgtgccaggaatagtcaagacactgaggatatagtagtgagcaaaatacataaatccttgctctcatagagcatgggttacagggggaggaatagacaacagcccagaaaaataagtcaggtaaaatgataagcgttggaagaataaagcaaggaagaacaggatatgctagaggctgagggatgggaggaagatagcaagtttaaatacgattgtcaggaaaagaaagtatcattggttacatttgaacaaagatct

SEQ ID NO: 161166 - DNA, 386 bp, Homo sapiens
gctacaccacattgccacagccactgtgcacatcacagcttacagtaacatactttccacttttcaaattatgacccaattttcataatcactmcttttgtggatgtattcactcattcagtaaattatttattaagcagctactctgtgccaggaatagtcaagacactgaggatatagtagtgagcaaaatacataaatccttgctctcatagagcatgggttacagggggaggaatagacaacagcccagaaaaataagtcaggtaaaatgataagcgttggaagaataaagcaaggaagaacaggatatgctagaggctgagggatgggaggaagatagcaagtttaaatacgattgtcaggaaaagaaagtatcattggtt

SEQ ID NO: 161167 - DNA, 603 bp, Homo sapiens
tctaagtatctagctttacttccaggttctctagtctgttccactggtctatgcatctacttttatatcagtaccatgctgtttcgattactataaccttgtagtataatttgaagttgggtaatgtgatgcctccagatttgttctttttgcttaggattgctttggctatttaggcccttttatgattccatatgaattttacatttaagtttttaaaggactgctaagagtgctgtgttgagagtagacygggggtggggaacaagggtgaaagcagaaatgccagttgggaggccattgcaataattcagatgaggaataatagtgacttgatccagagtaatacagaatgcagtgaaaagtgatgcaattcagagtatattttgacagtgaagctagtattataatctgccatctttacatgccatgatgtcataaaacatgcttctattttggtgatttaggttgttcctgtttgcactattataggtaatattttcattaacattcccactcacactttttgcctgtcttatttccttacataaattcccaggaattggatcactgagttgaagatgtgatcatccttatgactct

SEQ ID NO: 161168 - DNA, 603 bp, Homo sapiens
tctaagtatctagctttacttccaggttctctagtctgttccactggtctatgcatctacttttatatcagtaccatgctgtttcgattactataaccttgtagtataatttgaagttgggtaatgtgatgcctccagatttgttctttttgcttaggattgctttggctatttaggcccttttatgattccatatgaattttacatttaagtttttaaaggactgctaagagtgctgtgttgagagtagactgggggtggggaacaagggtgaaagcagaaatgccagttgggaggccattgcaataattcagatgaggaataatagtgacttgatccagagtaatacagaatgcagtgaaaagtgatrcaattcagagtatattttgacagtgaagctagtattataatctgccatctttacatgccatgatgtcataaaacatgcttctattttggtgatttaggttgttcctgtttgcactattataggtaatattttcattaacattcccactcacactttttgcctgtcttatttccttacataaattcccaggaattggatcactgagttgaagatgtgatcatccttatgactct

SEQ ID NO: 161169 - DNA, 501 bp, Homo sapiens
cacagtttgtgaatatttctaaaattttctccaaacattagmtctttttagagacatgttggatttgacatgtgtccatgttttaagtaagatttttaaaataagaatacagggcaagttgaaataaatggtaactcattgcatctagtaagtcacacacatacacacaccatcctccaaaagctcaaagcatgtcaagatacaaatcacaccagtgttagcctcttatttatgtgtcttagccctgcctactcaagagcctgtctcctcttgacagctctgtcatatagggtagaaaatatagaacagctgtgaccagggcttactcatctgtacagtcactagatgataatagttataaaaattaacatgtgtaaagggctttgtggcatataagccactactgggcatatgattttaattcaattttaatctttatagaaactcctctcctctcctcctcacctcggatgggggtatcaaagcttaggaatgaagtga

SEQ ID NO: 161170 - DNA, 501 bp, Homo sapiens
cacagtttgtgaatatttctaaaattttctccaaacattagatctttttagagacatgttggatttgacatgtgtccatgttttaagtaagatttttaaaataagaatacagggcaagttgaaataaatggtaactcattgcatctagtaagtcasacacatacacacaccatcctccaaaagctcaaagcatgtcaagatacaaatcacaccagtgttagcctcttatttatgtgtcttagccctgcctactcaagagcctgtctcctcttgacagctctgtcatatagggtagaaaatatagaacagctgtgaccagggcttactcatctgtacagtcactagatgataatagttataaaaattaacatgtgtaaagggctttgtggcatataagccactactgggcatatgattttaattcaattttaatctttatagaaactcctctcctctcctcctcacctcggatgggggtatcaaagcttaggaatgaagtga

SEQ ID NO: 161171 - DNA, 643 bp, Homo sapiens
tacatgccacattttctttatccagtctatcaccgttgggcatttgggttggttccaagtctttcctactgtaaatagtgctgmagtaaacacacatgtgcatgtgtccttatagtagaatgatttataatcctttgggtatatactcagtaatgggattgctgggccaaatggtatttctggttctagatccttgaggaatcgccacactgaaatttttaaaggagagaaccagtgtcttcttatttaacataaatagataagaaacatgtgcatgatggtatctacttagcaccttttagtttaagaaacacattgctgaacaataactacaccaggcactgtactaggcattaactatgcaaaaaatgcataagactaagacctcacattctagcaaaagaaacacatcaacaaatgaccataatgcaatggggttaactaccacaagagttgcataacagaataaagcaagcaactaaggcaccaaatgccacaaaaagactaaacaagatttcagtggcctactctaaggtattaagttccctcccttattatctccagttgtatctccattcttagaggagaatgcaccacgtttttttttcccccagctagaaaaactaaatgagcagcccataat

SEQ ID NO: 161172 - DNA, 643 bp, Homo sapiens
tacatgccacattttctttatccagtctatcaccgttgggcatttgggttggttccaagtctttcctactgtaaatagtgctgcagtaaacacacatgtgcatgtgtccttatagyagaatgatttataatcctttgggtatatactcagtaatgggattgctgggccaaatggtatttctggttctagatccttgaggaatcgccacactgaaatttttaaaggagagaaccagtgtcttcttatttaacataaatagataagaaacatgtgcatgatggtatctacttagcaccttttagtttaagaaacacattgctgaacaataactacaccaggcactgtactaggcattaactatgcaaaaaatgcataagactaagacctcacattctagcaaaagaaacacatcaacaaatgaccataatgcaatggggttaactaccacaagagttgcataacagaataaagcaagcaactaaggcaccaaatgccacaaaaagactaaacaagatttcagtggcctactctaaggtattaagttccctcccttattatctccagttgtatctccattcttagaggagaatgcaccacgtttttttttcccccagctagaaaaactaaatgagcagcccataat

SEQ ID NO: 161173 - DNA, 643 bp, Homo sapiens
tacatgccacattttctttatccagtctatcaccgttgggcatttgggttggttccaagtctttcctactgtaaatagtgctgcagtaaacacacatgtgcatgtgtccttatagtagaatgatttataatcctttgggtatatactcagtaatgggattgctgggccaaatggtatttctggttctagatccttgaggaatcgccacactgaaatttttaaaggagagaaccagtgtcttcttatttaacataaatagataagaaacatgtgcatgayggtatctacttagcaccttttagtttaagaaacacattgctgaacaataactacaccaggcactgtactaggcattaactatgcaaaaaatgcataagactaagacctcacattctagcaaaagaaacacatcaacaaatgaccataatgcaatggggttaactaccacaagagttgcataacagaataaagcaagcaactaaggcaccaaatgccacaaaaagactaaacaagatttcagtggcctactctaaggtattaagttccctcccttattatctccagttgtatctccattcttagaggagaatgcaccacgtttttttttcccccagctagaaaaactaaatgagcagcccataat

SEQ ID NO: 161174 - DNA, 643 bp, Homo sapiens
tacatgccacattttctttatccagtctatcaccgttgggcatttgggttggttccaagtctttcctactgtaaatagtgctgcagtaaacacacatgtgcatgtgtccttatagtagaatgatttataatcctttgggtatatactcagtaatgggattgctgggccaaatggtatttctggttctagatccttgaggaatcgccacactgaaatttttaaaggagagaaccagtgtcttcttatttaacataaatagataagaaacatgtgcatgatggtatctacttagcaccttttagtttaagaaacacattgctgaacaataactacaccaggcactgtamtaggcattaactatgcaaaaaatgcataagactaagacctcacattctagcaaaagaaacacatcaacaaatgaccataatgcaatggggttaactaccacaagagttgcataacagaataaagcaagcaactaaggcaccaaatgccacaaaaagactaaacaagatttcagtggcctactctaaggtattaagttccctcccttattatctccagttgtatctccattcttagaggagaatgcaccacgtttttttttcccccagctagaaaaactaaatgagcagcccataat

SEQ ID NO: 161175 - DNA, 476 bp, Homo sapiens
acctttatttccaatgttatctttattccaatccaaacaacctattgttaagctttactgtcatcacagcttaaaatattttcactttagtgaagaaaattatttctgacttgaaaaaaaaaatcttgtttataacattaaaaaactaaatcctggtgtcagaacagatctcactggaaaaaagttgtaattacattcctggtaagaaataaaaatgtgttggataaactcacttaaaatgcttactaagcaagtacctccaccaaagcaaagaasaactactcctcacaaaaatgaaggaaaagaagagaaatttcatattaccaaattttatttctccagcatcttccctgaaataaaaagaatggatacatattcctcttaaaaattttcaattgaggcagaagaaaaaaaaattatttgcaggaaacctagaaaagctattatgaaattatctcacagccttcctcaaacaa

SEQ ID NO: 161176 - DNA, 476 bp, Homo sapiens
acctttatttccaatgttatctttattccaatccaaacaacctattgttaagctttactgtcatcacagcttaaaatattttcactttagtgaagaaaattatttctgacttgaaaaaaaaaatcttgtttataacattaaaaaactaaatcctggtgtcagaacagatctcactggaaaaaagttgtaattacattcctggtaagaaataaaaatgtgttggataaactcacttaaaatgcttactaagcaagtacctccaccaaagcaaagaacaactactcctcacaaaaatgaaggaaaagaagagaaatttcatattaccaaattttatttctccagcatcttccctgaaataaamagaatggatacatattcctcttaaaaattttcaattgaggcagaagaaaaaaaaattatttgcaggaaacctagaaaagctattatgaaattatctcacagccttcctcaaacaa

SEQ ID NO: 161177 - DNA, 604 bp, Homo sapiens
tgttggccaggctgatcttgaactcctgacctcgtgattcgcccaacwcagcctcctgaagtgctgggattaccagcatgagccaccatgcctggtctaccccatatacattaactagccactcactgaaaagtctttttcatagtgagaaagataacagtaagatagtaagaagttcttattagccaattatctggcatccacatccttccatcctcacccccaaccaaaatctgtaccaggaaagctcaagaaccagtaacattccacagaagcattaaaaatagaggagtagaatcaaatcttgtccagtgttctatcgcaaaaagaaaatatatgaagagaaaaacttacttgcagtatcctgtgccattgtggtaggtaacacacattccttcatttacacagggttcatagccatctcgacactgcaatgctaaaaataaaaacaaatgcacattagaagtaagtcactaatcataaccctcagacaccaaagaagtgtaatccaatccagatcagcattcattcccacctaatctgggtttctttttagagttttaatcagttttttatgttctggcttctagcacagaagcccatc

SEQ ID NO: 161178 - DNA, 604 bp, Homo sapiens
tgttggccaggctgatcttgaactcctgacctcgtgattcgcccaacacagcctcctgaagtgctgggattaccagcatgagccaccatgcctggtctaccccatatacattaactagccactcactgaaaagtctttttcatagtgagaaagataacagtaagatagtaagaagttcttattagccaattatctggcatccacatccttccatcctcacccccaaccaaaatctgtaccaggaaagctcaagaaccagtaacattccacagaagcattaaaaatagaggagtagaatcaaatcttgtccagtgttctatcgcaaaaagaaaatatatgaagagaaaaacttacttgcagtatcctgtgccattgtggtaggtaacacacattccttcatttacacagggttcatagccatctcgacactgcaatgctaaaaataaaaacaaatgcacattagaagtaagtcactaatcataaccctcagacaccaaagaagtgtaatccaatccagatcagcattcattcccacctaatctgggtttctttttagagttttaatcagttttttatgttytggcttctagcacagaagcccatc

SEQ ID NO: 161179 - DNA, 410 bp, Homo sapiens
catgaggaattttaggtaaaagaccgtatcctgagattcatgcaagtctttggcattatgttactatttaaagtaagtaatatgtagtggcttctctgacatattctttctaagagagttaaggaaaatagttgtaactaaaaacaaacattgaaacagtttaaggtargtttacgtagcaacagaattattcgttatgtttacagataattaactcgtatttatactttgctgattttctctggcacctttacaagatttttttatttttgtaaaataaaaagtaattatgtttgaaaaagtagttaaggatgtttgaagaatctagaaaagcataaataaaatgtccacaatcatgctgccattaattttttggtatacgtctttggtttttttacccttagatttag

SEQ ID NO: 161180 - DNA, 406 bp, Homo sapiens
ctgcattagtttagcatctaaagaacacctgtctaaaaatcaaaatatctaaatcctatcctttgagtcaacttgactaacactcaacttgactacctaaaagctagctaataatcgcagcacctcagcagagcagaggtggagggcatagttttaygcactgagatcctataataaaagaagccctatgtgtcagagtaatcccatttctgatatcatattatttaatacttaatttttcaaatcactttacaattatatttattattccctacaattctctaaagcaggttattcctttagtcctgcttcataggtgaggagactacatatcatgaagattaagttatttaccaaaacaagttaatgatagaccaaggattattaccctcagactgtctcattg

SEQ ID NO: 161181 - DNA, 406 bp, Homo sapiens
ctgcattagtttagcatctaaagaacacctgtctaaaaatcaaaatatctaaatcctatcctttgagtcaacttgactaacactcaacttgactacctaaaagctagctaataatcgcagcacctcagcagagcagaggtggagggcatagttttatgcactgagatcctataataaaagaagccctatgtgtcagagtaatcccatttctgatatcatattatttaatacttaatttttcaaatcactttacaatyatatttattattccctacaattctctaaagcaggttattcctttagtcctgcttcataggtgaggagactacatatcatgaagattaagttatttaccaaaacaagttaatgatagaccaaggattattaccctcagactgtctcattg

SEQ ID NO: 161182 - DNA, 575 bp, Homo sapiens
cctttccttggtccaaccgtgttagaaacatccaaccayaaagaagctttctaaggaagccctttgaattaacgtatccactttttctcacccgcccgtgccccacccccagccatgccaaaggagcagcaaatgctgctgccaggttggaggaattggtgatcgtcacaccacattcctgggtctggacacagcctgaaacagcagcagagctccgcgcctcggaaagaataacagcagttgagatttttaaatcatgtgcctcagcatgcagccacaccagttgccctacttctcctgcctccacctttcaaagacgcgagcagcacacacggctcccccggactttcggtggggttggagtgtcaaaactcaggcgcgccgcaaaaccccgtccccatccaaaccaagcccacacacccggcccatgtgccgccccctggcaaaggcgaggctggctgcgacggtgcaggccgtttggcttggcggccctgcccccgctctccacgccagaatctggcattccttcgctcagcccctccgaggcccgccgtcggctctcgctcgaccccaag

SEQ ID NO: 161183 - DNA, 575 bp, Homo sapiens
cctttccttggtccaaccgtgttagaaacatccaaccataaagaagctttctaaggaagccctttgaattaacgtatccactttttctcacccgcccgtgccccacccccagccatgccaaaggagcagcaaatgctgctgccaggttggaggaattggtgatcgtcacaccacattcctgggtctggacacagcctgaaacagcagcagagctccgcgcctcggaaagaataacagcagttgagatttttaaatcatgtgcctcagcatgcagccacaccagttgccctacttctcctgcctccacctttcaaagacgcgagcagcacacmcggctcccccggactttcggtggggttggagtgtcaaaactcaggcgcgccgcaaaaccccgtccccatccaaaccaagcccacacacccggcccatgtgccgccccctggcaaaggcgaggctggctgcgacggtgcaggccgtttggcttggcggccctgcccccgctctccacgccagaatctggcattccttcgctcagcccctccgaggcccgccgtcggctctcgctcgaccccaag

SEQ ID NO: 161184 - DNA, 575 bp, Homo sapiens
cctttccttggtccaaccgtgttagaaacatccaaccataaagaagctttctaaggaagccctttgaattaacgtatccactttttctcacccgcccgtgccccacccccagccatgccaaaggagcagcaaatgctgctgccaggttggaggaattggtgatcgtcacaccacattcctgggtctggacacagcctgaaacagcagcagagctccgcgcctcggaaagaataacagcagttgagatttttaaatcatgtgcctcagcatgcagccacaccagttgccctacttctcctgcctccacctttcaaagacgcgagcagcacacacggctccyccggactttcggtggggttggagtgtcaaaactcaggcgcgccgcaaaaccccgtccccatccaaaccaagcccacacacccggcccatgtgccgccccctggcaaaggcgaggctggctgcgacggtgcaggccgtttggcttggcggccctgcccccgctctccacgccagaatctggcattccttcgctcagcccctccgaggcccgccgtcggctctcgctcgaccccaag

SEQ ID NO: 161185 - DNA, 575 bp, Homo sapiens
cctttccttggtccaaccgtgttagaaacatccaaccataaagaagctttctaaggaagccctttgaattaacgtatccactttttctcacccgcccgtgccccacccccagccatgccaaaggagcagcaaatgctgctgccaggttggaggaattggtgatcgtcacaccacattcctgggtctggacacagcctgaaacagcagcagagctccgcgcctcggaaagaataacagcagttgagatttttaaatcatgtgcctcagcatgcagccacaccagttgccctacttctcctgcctccacctttcaaagacgcgagcagcacacacggctcccccggactttcggtggggttggagtgtcaaaactcaggcgcgccgcaaaaccccgtccccatccaaaccaagcccacacacccggcccatgtgccgccccctggcaaaggcgaggctggctgcgamggtgcaggccgtttggcttggcggccctgcccccgctctccacgccagaatctggcattccttcgctcagcccctccgaggcccgccgtcggctctcgctcgaccccaag

SEQ ID NO: 161186 - DNA, 542 bp, Homo sapiens
cccaggtggcagccccgggcgccgcggacagcgcccctcagcccgatactcaccatgcgcgggggycgcgcagcacagccagagcgccagcagcgcccacagcagagcggggcgcagggcgggcatcttctcggtcgcctcctcctccgccgccgccgccgccgcctgggcagatccacatggggagggggtcccgatagaggagccccactctctcctcccctcctcctgcttcaaaggctcaggccctggcgctacgctccgaagcccaggcgcaaatgcctcgactccccgcgccccgagtccgccgctcctcggccgccgcctcagccgccgcccgaagtttggctgaaactttctcgggtgtgcaacgaagcagcctcgtgtgtccttccgcctcagccgcctcctcccaccgcaagccccgccccactgtcgccgcggcctcggccccgccgccttgggcacccaggggtttcccgcaggaagaagcgccggcccgagctccgcgcggagggatctactacgagtcactggacccg

SEQ ID NO: 161187 - DNA, 542 bp, Homo sapiens
cccaggtggcagccccgggcgccgcggacagcgcccctcagcccgatactcaccatgcgcgggggccgcgcagcacagccagagcgccagcagcgcccacagcagagcggggcgcagggcgggcatcttctcggtcgcctcctcctccgccgccgccgccgccgcctgggcagatccacatggggagggggtcccgatagaggagccccactctctcctcccctcctcctgcttcaaaggctcaggccctggcgctacgstccgaagcccaggcgcaaatgcctcgactccccgcgccccgagtccgccgctcctcggccgccgcctcagccgccgcccgaagtttggctgaaactttctcgggtgtgcaacgaagcagcctcgtgtgtccttccgcctcagccgcctcctcccaccgcaagccccgccccactgtcgccgcggcctcggccccgccgccttgggcacccaggggtttcccgcaggaagaagcgccggcccgagctccgcgcggagggatctactacgagtcactggacccg

SEQ ID NO: 161188 - DNA, 542 bp, Homo sapiens
cccaggtggcagccccgggcgccgcggacagcgcccctcagcccgatactcaccatgcgcgggggccgcgcagcacagccagagcgccagcagcgcccacagcagagcggggcgcagggcgggcatcttctcggtcgcctcctcctccgccgccgccgccgccgcctgggcagatccacatggggagggggtcccgatagaggagccccactctctcctcccctcctcctgcttcaaaggctcaggccctggcgctacgctccgaagcmcaggcgcaaatgcctcgactccccgcgccccgagtccgccgctcctcggccgccgcctcagccgccgcccgaagtttggctgaaactttctcgggtgtgcaacgaagcagcctcgtgtgtccttccgcctcagccgcctcctcccaccgcaagccccgccccactgtcgccgcggcctcggccccgccgccttgggcacccaggggtttcccgcaggaagaagcgccggcccgagctccgcgcggagggatctactacgagtcactggacccg

SEQ ID NO: 161189 - DNA, 542 bp, Homo sapiens
cccaggtggcagccccgggcgccgcggacagcgcccctcagcccgatactcaccatgcgcgggggccgcgcagcacagccagagcgccagcagcgcccacagcagagcggggcgcagggcgggcatcttctcggtcgcctcctcctccgccgccgccgccgccgcctgggcagatccacatggggagggggtcccgatagaggagccccactctctcctcccctcctcctgcttcaaaggctcaggccctggcgctacgctccgaagcccaggcgcaaatgcctcgactccccgcgccccgagtccgccgctcctcggccgccgcctcagccgccgcccgaagtttggctgaaactttctcgggtgtgcarcgaagcagcctcgtgtgtccttccgcctcagccgcctcctcccaccgcaagccccgccccactgtcgccgcggcctcggccccgccgccttgggcacccaggggtttcccgcaggaagaagcgccggcccgagctccgcgcggagggatctactacgagtcactggacccg

SEQ ID NO: 161190 - DNA, 511 bp, Homo sapiens
ccaaaagaaagtaaattaagtggaagaaagctagaaagagaaataggctcacctataagcatcaataaacagtaggactgttgtcaggttaacccaggactatgctcactgaaattctacaaacaaaggggttttgcttactttcttcacaatatcccctcgcaacttaagcagtgcccagcacacaataggtacatatatttgttgaatgaatgaaaacatctggaggctcacctctatgcagtggaggtgctgtgaagagatcccagcaacgcctgcacagcacccctgcccaaaaatccaaacaccttgagattgytgtaagccagtgactctcaaagtgtactttcccaaacagcagcagtattacctggacgctttttagaaatgcaatctaccaggtcccgctccagacctaccagatcagaaactctgggggtgagcccagcaatctgtattctaacaagtcctccaaaacttgatgtgcactcaagtttgaaaaccagcatta

SEQ ID NO: 161191 - DNA, 575 bp, Homo sapiens
catcttgatttgtgtgactttgggcaaggcccttatttctttgagttgcagtttcttgtgtaaaatggtgctaataccaatttacatgcctcatagtgttgttgtggggatcaaatgagatcactgtttatgagcagccttctcaggagtgagaaatagagggttgtgagctgactttctgatttgtttggctgaggtgttcacacaagccatagaatgctttgtagrcttgggtggaggaatgtagatggaaatcagctgaaaatccctgcctattagaagctgagatgttaatcctaaatatattgtatggagtactatcagatgccttgcttttcttcatgatgccctattagcttcatcttcaggtagcataggtgcctgttactctcattttacttgaagaaactgaccagccaactgatttaggatatggctggctatcttctggaactcacattagagttactccttgagagtaaagtcttgtattttctgaaggttgctgcttttggggtattttccgtggaggtgggtgggcacacacaaaaactcactgtgctcaaatttataaa

SEQ ID NO: 161192 - DNA, 575 bp, Homo sapiens
catcttgatttgtgtgactttgggcaaggcccttatttctttgagttgcagtttcttgtgtaaaatggtgctaataccaatttacatgcctcatagtgttgttgtggggatcaaatgagatcactgtttatgagcagccttctcaggagtgagaaatagagggttgtgagctgactttctgatttgtttggctgaggtgttcacacaagccatagaatgctttgtagacttgggtggaggaatgtagatggaaatcagctgaaaatccctgcctattagaagctgagatgttaatcctaaatatattstatggagtactatcagatgccttgcttttcttcatgatgccctattagcttcatcttcaggtagcataggtgcctgttactctcattttacttgaagaaactgaccagccaactgatttaggatatggctggctatcttctggaactcacattagagttactccttgagagtaaagtcttgtattttctgaaggttgctgcttttggggtattttccgtggaggtgggtgggcacacacaaaaactcactgtgctcaaatttataaa

SEQ ID NO: 161193 - DNA, 398 bp, Homo sapiens
taaagtgacgggaaatttgaagccattgtagaagatacgaattggagatggaactacccaaaattaccttctataaggatcttctagattaaatgcaagctaacttattcttaaaattgttttgttcattatgatatgaacagagtctatatcagaacctggaacatggcaggcactaaataaatattttatgaatattgaattagttgttctaacaacatcrtggagaatagcttgagaagggtaaaggctagaatcagaaaaagtggctaggaagactttaaagactgtctagacataggttgatgggtggattagcctagtggatacagagattcagaaaatatgaatctaagaaatattgggaggaacttccagtttttcccatgtcagtaagc

SEQ ID NO: 161194 - DNA, 447 bp, Homo sapiens
atatacatacaatgcataaactgatatcacaatatatctgcgtgtattagggctctccagagaaacagaactgatagcatatattatatatagatacacagaaatagatttattacgagagattggctcatgcaattatggaacctgtgaagtcccatgatcagctgtctgcaaattggaagcccaggaaagttagtggtgtattatgactccagtccaagccagaaggcytgagaaccaggagagccaatcctgtaagtcccagtccaagtccaaaggccccaaaaccagaaacactactgatatccaagggcaggaggagatggatgtcccagctccagaagagagagtgaacttgtgcttcctccacctctctgttttattcaggccttcaagggattgcatgatgcccactcacactgccaagggtgatcttttactcactct

SEQ ID NO: 161195 - DNA, 353 bp, Homo sapiens
tttgtttgtagaagctcctttcatggcagcctttcaacagkttgggtaatttaaaagatgcagttgtaatcgtgactaactcattaagatgcttgatgaacatcttaatgagttaaaaaacctggacatttttaacgcacttttggaaagaggcaagaaaaatataagagtgggaataatccaaggaaaacatttcaagtctttgaacaatagaccctagaatttccttagcttgagataggttaggacaagaaaacagaatgttgcttaaaagaagcccagtgatcatttgtgtctacttgcacttctggaatatgacttttgttgttagtaggttcattttgacttaaaaa

SEQ ID NO: 161196 - DNA, 353 bp, Homo sapiens
tttgtttgtagaagctcctttcatggcagcctttcaacaggttgggtaatttaaaagatgcagttgtaatcgtgactaactcattaagatgcttgatgarcatcttaatgagttaaaaaacctggacatttttaacgcacttttggaaagaggcaagaaaaatataagagtgggaataatccaaggaaaacatttcaagtctttgaacaatagaccctagaatttccttagcttgagataggttaggacaagaaaacagaatgttgcttaaaagaagcccagtgatcatttgtgtctacttgcacttctggaatatgacttttgttgttagtaggttcattttgacttaaaaa

SEQ ID NO: 161197 - DNA, 470 bp, Homo sapiens
ttggaagctgacaagcaagaggttggatgccacgatatagaagagcacaaaagaggtatatgacctagcccttgactcacagtaaacttgagagactaggcttacaataaatgattcgaggataacttattcagttatctaaacaacggatgggactggatcactgaggcagtgacctgtgggcaggcgggacaatgcagaggtcaattatgtgccatcggagttgatcagatggacctgggcttaaatccctgtgccactgcttagcagctgtgtgatctaagacaacttactcaggtttcattttctgcactgtaaagtagaaataataatacctwctcataagctgttgaagcattacaaacaataaagcaggtaaagtgcttaatacaatgtttgacacacaaaattgccattatcgttattaacgttttattgttgcatcatctatgagtatttatgatggagga

SEQ ID NO: 161198 - DNA, 470 bp, Homo sapiens
ttggaagctgacaagcaagaggttggatgccacgatatagaagagcacaaaagaggtatatgacctagcccttgactcacagtaaacttgagagactaggcttacaataaatgattcgaggataacttattcagttatctaaacaacggatgggactggatcactgaggcagtgacctgtgggcaggcgggacaatgcagaggtcaattatgtgccatcggagttgatcagatggacctgggcttaaatccctgtgccactgcttagcagctgtgtgatctaagacaacttactcaggtttcattttctgcactgtaaagtagaaataataatacctactcataagctgttgaagcattacaaacaataaagcaggtaaagtgcttaatacaatgtttgacacacaaaattgccattatcgttattaacgytttattgttgcatcatctatgagtatttatgatggagga

SEQ ID NO: 161199 - DNA, 454 bp, Homo sapiens
taaacattctaggtcttaccaccatctgttcttctttttctgcttagactgttagtacctgttataagaggaaaggaggcaaaagtgtgaaagaraaatggttggatcagtggtctgagaaagaggataaagtagtcatgtgacattattcttaacagagattagaatgattaaaaacaaaaacaagttggtatccaggatattcaggtacaaccacccctcacctgctgattccaatttcacattccattccacattgatgaataataataatgatgtacttttagctttgtcagaaatcctatctgcatatttataaggtcattatgtttagttgttgctgatacctggtctgagtccagcaattaccacctctgtctctttgcacacactggtagacatacacaccactgatttgtactttcctataaaattactcttcccctttttaatt

SEQ ID NO: 161200 - DNA, 454 bp, Homo sapiens
taaacattctaggtcttaccaccatctgttcttctttttctgcttagactgttagtacctgttataagaggaaaggaggcaaaagtgtgaaagagaaatggttggatcagtggtctgagaaagaggataaagtagtcatgtgacattattcttaacagagattagaatgattaaaaacaaaaacaagttggtatccaggatattcaggtacaaccacccctyacctgctgattccaatttcacattccattccacattgatgaataataataatgatgtacttttagctttgtcagaaatcctatctgcatatttataaggtcattatgtttagttgttgctgatacctggtctgagtccagcaattaccacctctgtctctttgcacacactggtagacatacacaccactgatttgtactttcctataaaattactcttcccctttttaatt

SEQ ID NO: 161201 - DNA, 519 bp, Homo sapiens
atgagggatccagagtaaggaagcatctgttagccaagtctttggttaccccaaattagctcaggtcctttactgcttgtttcctctgattatatagtacatatccaaaccctcaattttccagaataaactaggtctgcctattctgtgtggaaaacatttgatggtggttaagattctcttgcctagacgatggtagtgccttagtcgtttaactgcctgtcactttaagattttgaaatactggttctygttgtgtaagccagacacatcttgagaatattttacggggcaacttgccctttctgaaacctcagtcatcctgaaaagtaactctgtacctccttgactttaatttttctgtcttaattctatttgtatacaatgtttgtggtgtctgattctctgtctcgtattgctgaaactcatggccttgaatttctgggtcactcttaaaaaatagacataacttgattactaatgaaaaagtgactcattttcttccaggcaaaggctgac

SEQ ID NO: 161202 - DNA, 534 bp, Homo sapiens
gagatcttctttaattttcaatggcagtcactacagaatctagcagttcatgctattgaggccactttgtaggatttttttttttcttagtcagggctccaggtccctggtggtttatgtagtcagtcttttatcaacaaccgatgaaagacyaataaaagtgcaagagggaatgaggactgtgtgtgtgtatgtctgcacatgcacacatgcctctctgtgtgtgttggttaacttcatatttggtaggtgggagggaaggtgattaaaaaataatctactttgcatggagttggcccaatttgactgatataggggtgagtgggggttaagaagtagtctatatatcaggaatcttaattagttttgaaaatcctttaggtaaatagctcaacccagttgttcccaaacttcaagtgtatttatagggtctttttaaggggtaaagattccacagagcccttcattttgaccttgtgcttctgcactgaatagttgaatgccttctatatgccagtcattgtgttaggcact

SEQ ID NO: 161203 - DNA, 586 bp, Homo sapiens
ttgaatgccttctatatgccagtcattgtgttaggcactgggagtatgagaattaataattttagtctgttgacagataatcataataagggctaatgagtaacacaggctcagggttataagaacagagggggtrtcaaggctgtttttcacaggaaataacatttaagttgagacttaatgaaattttagggcttagccatgagaaagtggggaaaagcattttgggctgactgaacagcgtgtacagaggtctggaagtgagaagtagtgtactatagcattttctaggagctgaaaggcgtttagcaagagtatagtgcataaaggagagagcttgagatgaaacaatttctcagtgtgttgtttgaatacaatgtatactgtcaaaatctaagaattcaagaatcatttaatatatctttatgttttactagtcataaaagcatatacatatatttaaatatggacaagatactgtttagtagtttagaaagtgatttataaggattgcaatcccttgcaataactccacagcccataccttgggaacaactgagctaactcattcagttttgtccattac

SEQ ID NO: 161204 - DNA, 586 bp, Homo sapiens
ttgaatgccttctatatgccagtcattgtgttaggcactgggagtatgagaattaataattttagtctgttgacagataatcataataagggctaatgagtaacacaggctcagggttataagaacagagggggtatcaaggctgtttttcacaggaaataacatttaagttgagacttaatgaaattttagggcttagccatgagaargtggggaaaagcattttgggctgactgaacagcgtgtacagaggtctggaagtgagaagtagtgtactatagcattttctaggagctgaaaggcgtttagcaagagtatagtgcataaaggagagagcttgagatgaaacaatttctcagtgtgttgtttgaatacaatgtatactgtcaaaatctaagaattcaagaatcatttaatatatctttatgttttactagtcataaaagcatatacatatatttaaatatggacaagatactgtttagtagtttagaaagtgatttataaggattgcaatcccttgcaataactccacagcccataccttgggaacaactgagctaactcattcagttttgtccattac

SEQ ID NO: 161205 - DNA, 585 bp, Homo sapiens
ttctggaacacagaggaaagaccaccttctgttatagcaacaacacaagtcttttaacactgtgtgccccttcccaatctttcaagtgatgattgaagagactaggtgctcagctcagcctttgagttctgataaatgagcccagactgtaaactggaagataaggatgtttgtaaagttcttgtataaataaagcatggtttctcattgcagtggttactgatttcatagtctgagtgaagatgaatgatgctgtgaatcaacagctttaaagtccgtaycacttcagcttctttttggtttaggtttcttaaaatcagtgtgtatttaatgctttattcagatgagggggtgaaaaacctaacacatgtaaactaagtgaggtggggtttcagagataattcccagcctcacaattcctcgtgaagttcttttcctgtgggaaacttttaatttggaagcatgcaacctaatgtgggaaccaagattaacattttctgaaatacttctacaagaaaagcagaaatggtctgtccaggaagctgaatttacatagtagaaaaatgagctgccctgcagtatttg

SEQ ID NO: 161206 - DNA, 585 bp, Homo sapiens
ttctggaacacagaggaaagaccaccttctgttatagcaacaacacaagtcttttaacactgtgtgccccttcccaatctttcaagtgatgattgaagagactaggtgctcagctcagcctttgagttctgataaatgagcccagactgtaaactggaagataaggatgtttgtaaagttcttgtataaataaagcatggtttctcattgcagtggttactgatttcatagtctgagtgaagatgaatgatgctgtgaatcaacagctttaaagtccgtatcacttcagcttctttttggtttaggtttcttaaaatcagtgtgtatttaatgctttattcagatgagggggtgaaaaacctaacacatgtaaactaagtgaggtggggtttcagagataattcccagcctcacaattcctcrtgaagttcttttcctgtgggaaacttttaatttggaagcatgcaacctaatgtgggaaccaagattaacattttctgaaatacttctacaagaaaagcagaaatggtctgtccaggaagctgaatttacatagtagaaaaatgagctgccctgcagtatttg

SEQ ID NO: 161207 - DNA, 401 bp, Homo sapiens
aggtttggaatttgaatttactctacctatgtgctctagcaacatccagataaggaattaacataaaartgttcacatttcataatacccatagggagactttcaaaggaaataaaaaaaaacttactgaagattcattttcaacccatgctattgaaagcacaaaagataaagccccactcaagactgattgaatccaaaatacaagacacaacacaaagaaacaatcccatataagcaagagtcagtagatacaaacaaagtagcacaagtcttctgatcttgttacataatagaaatattggagaaaagggactaaataaatattttttaaatgataaaaagtataagaaaatgatggataaaaaatgagaagtgagcaagatactatgactaaaaat

SEQ ID NO: 161208 - DNA, 610 bp, Homo sapiens
tgtggtgatggccttcttcctgcttcatccaatggcaaaaggtgggcaggcacaaaagcacaaggaacagcaagaggggcacaaactcatctttttctaaggaactcacttctgtgataatgaactcactcactcctgtgacagtggcattgattcattaatcagatatttaatgatttaatgattaacagcattaatccaggtgtttaggttgacacctcaacatctcttaaagatctcacctcccagtacctccacaccggggatcaactttccaacacatgaacttggaggggcratgacttcacatcattttcaatctccaggtaaataaataaagaacaatgactatggccaattctttgagaaatgaaatacatcataagtatttggtcttaaacagtaacaattatctatttttatttaatattatcattataaataactgtaagaattactgttattactttggtatatcttataggttaaaattaaatcacacatatattattgttattgaaaattctaacagcctcagcagaaagacatcatcattgtcatctgaacagaaggagctgaggccaagagagtttaaatatcatgttcaaag

SEQ ID NO: 161209 - DNA, 540 bp, Homo sapiens
ggataatttgaactaaactcacttgaggttgacattttgtgttttgttgtcattcttatcaatgaaattttgccataatagctcaatgtgacatcaaatgtataattgtaaggctgcaaaataagtacttcataaaattgaaggtactctctttaagcatatactcttcagtagagctctaagtgtatcattaacctcagtctaccactctggattttcagtgtcaaatgtgcaattacttgataaaggygccatgaaggaaactaaaaccctgataaaactttcttaacaatccccatggtgtagcagtgaggcaacaataaaagctttgcccgtagacattaatgggagtaaatatcatacagctaattcctggaaacaaggctgagagataacaccaggtgtgccatttaaatgagatgggcatgccagttaactattattaggagtcatttaaatgcactgaactaagtctctgccttgctgattattgcaattaggcaggcatgccatttaacagggtaatgagtaagtggaact

SEQ ID NO: 161210 - DNA, 458 bp, Homo sapiens
ggttctttttttcttttaaaaatactactaggatgatataccttgttatttgagaagattttcatgttaaatctgcataaaattataaaaacatttttcatgagcatgtagctttaagtaacacttcaagttcttcayattattaaagtatttatttactaattatttgtttgacagactgtggttttgaagcagcaaaatgtgtaatctatgttaactcaaattaaagattcaaaaacaaacatacgcacaagcatagataatacttggtagtatatttaaagccgtttgccaatgtatcccttcacaaaagaaaatataacattatacatgttacacatcccagaatatgcgtaatagcataaccagaacgtattcttttccaagccaatttaagaggaagccaaattgtaatcagaaatttgctttaaaaggtgaaattgaagtcaaagaaattg

SEQ ID NO: 161211 - DNA, 671 bp, Homo sapiens
gggggcttctttaagaaaaagaatataaaattttgatgacaggcttatgcaattgaggatcacagaagcttcagctttatcaacttcatagaaattcacctctgtagttgggtttgaccttgagcttcagtgtgaggtgaccttaaacaagttatttaactttcttgagactgttttctcctatgtaaaatgaggattaaaaatgtcccttacatgattgttgtgacagttagatgggactatcaatgtatgtaagtgcctggcacagagtgaactcatgctaaatggtagctgatggtgccgtcagacagcaggccccattgtcagacttctaagtaatttwtatagaccacagcagtcagtagctgcttcctatatttttcatcctccagaaaagtgcacatgctcagttgatttgccagaagcccagacaaatgctggaatgaccaagcaagtttaaacaatacagcaactctctggaaaggaatagcagagtatacctggctttagggagtctttactgcttagttaattggattcactgaactggctttcacaatgacgaaaagcaaatgtttaggatagaaaactttcctcagtggagcagagcaccaacatttcaaataaacattttgatcaaacatttcatcacatagatcctgtttgcccac

SEQ ID NO: 161212 - DNA, 494 bp, Homo sapiens
tcaataaaactactttctacatagtgttttagatccaaaaatataaaaagaaattagctagagtctcttctctcaagttgcacamagcttagtagaagagattaacaaaagagtaatgatttcactatattatgaataattctgtcatagagacacatcctgcatcttaaggaagtacgggacaaaaagtgcttcaatgtaccagggaatagaataaggtcagaatggatcaggacaaaaagaaaataacagtgaagccaagttttagggagtagataaagtcttattaagagagtacaaatggccattaattgccaagacggaagaatatgcagaaatctcctagcaagaaagtgcatcagaggaagtagaaagagcttggtaaagctgaagcctgaggtgtgcatgggactagaaaaatagattgtgtctggatttttaagatttttatgtcatgctgagtttagtttttattctttagaaaattaggtaac

SEQ ID NO: 161213 - DNA, 379 bp, Homo sapiens
atgtgcttggaagagggggagaaatgtatgtcagagaacactagaaatgtcttccactagacaccttgatgggttgaatagctccatttttgaaacaggtggcttaaatctctttaatgtcacattggttcatgcagaagatagggtatcagccactttaatggttaggacagtgaatataagggagggggtttagatgacraaaaagatagctggcccattgagagctagaggatattccctaagaaaccagaagttttcaaagtgagagattagaacctctagagacctccaagaccatttcaggtcactcatgaagtcttcccttttccaaatgcctatctatgggaggccaaattttatgtacttcacataacac

SEQ ID NO: 161214 - DNA, 516 bp, Homo sapiens
tttcctgaagttcttttctctaagtgacaactttgtttttggaactgaatacttrgtgggatggagtgggcaaaagccttaagtcttttttggtttgccttttccaacatggaaccactgccttataagccgtaatgagggcagttggggccccagtattctcagcaacaccatgcttaagacagaccttccatcccacaaatagaggctgggcagaagaagggaacccctatttctcatccacatttgcccagggcttagcctgagcaacaagtagatggtccaggataagaaatactgatattctgcccctcccaggaagataaccatctaggagctgagggatgtgggagcctatgttcttagacatgcactgtctggattggaatttctaccatgctgagctggaaagggaaatggaaggagaagattcttgttcaaataccgtagatttttgttgtcctgtcaattttagtagatttttgaataaatgttttctcattttctctatgcact

SEQ ID NO: 161215 - DNA, 469 bp, Homo sapiens
gtttttggaactgaatacttggtgggatggagtgggcaaaagccttaagtcttttttggtttgccttttccaacatggaaccactgccttataagccgtaatgagggcagttggggccccagtattctcagcaacaccatgcttaagacagaccttccatcccacaaatagaggctgggcagaagaagggaacccctatttctcatccacatttgcccagggcttagcctgagcaacaagtagatggtccaggataagaaatactgatattctgcccctcccaggaagataaccatctaggagctgagggatgtgggagcctatgttcttagacatgcactgtctggattggaatttctaccatgctgagctggaaagggaaatggaaggagmagattcttgttcaaataccgtagatttttgttgtcctgtcaattttagtagatttttgaataaatgttttctcatt

SEQ ID NO: 161216 - DNA, 579 bp, Homo sapiens
ctttagctacaacaaacttttyacctcgccttgaattgctatcctctttcataactgcatactattgcgttagctgtttctgctacctgaaatgtcctttctctcctcttcactgattaaatcataacaagttcttaagatccaatgcaaatgttttctgttctctaaagcctcccctgaattgctagccattattggaagtccccaaagcacccattttttattatagcatttacaaaacaagagcttgcctctttctattgttcacgtatgtcaactacactaagcagggccatgtctaatttgtctttagattccaagtgttgaagacagagatgcctaggaattgctggctgagtggctaaatgaatgaattaatgaatgaatgggtttttcacttttttttctgctgtcttgaactccttttcctcactctaaatattttttacagcatttactatcttctaacatattataaaatttcttgtttacttatatttattctcaatatcctcctattaagtcagagtgtctgcccttggtctgcattaatatgtatttaaggaattgataaattag

SEQ ID NO: 161217 - DNA, 513 bp, Homo sapiens
tgaatcagcaatataagctccggtcagctgactactttttctggtcttggctagacttctttatgaattcatggtcagctataggtcagttggtcagttgtagagcagctttagcgatcttagttgagctctcacatgtctagggccctgggtgggataaatggtgtggtttggctctaatccacgtagtgtctcatcctgcagcaggttcacacaggtttgttcatggcagctgggcagtgttctaagagagtgaacagttgcaggcaaggcctcttgatacctaggctcaggatgagcacactgtcacctccwctatattctgttggccaaaacaagttgcagggccattctagccagaggaagtggagaaatacactctgcaccttacagagaggagctgcaaagccacattgcaaatggtatggacacaggaagaagtggagaattggagccctttctgcaagcgataaaccgaaacttcctctttattgctgttctctatctcttgcc

SEQ ID NO: 161218 - DNA, 513 bp, Homo sapiens
tgaatcagcaatataagctccggtcagctgactactttttctggtcttggctagacttctttatgaattcatggtcagctataggtcagttggtcagttgtagagcagctttagcgatcttagttgagctctcacatgtctagggccctgggtgggataaatggtgtggtttggctctaatccacgtagtgtctcatcctgcagcaggttcacacaggtttgttcatggcagctgggcagtgttctaagagagtgaacagttgcaggcaaggcctcttgatacctaggctcaggatgagcacactgtcacctccactatattctgttggccaaaacaagttgcagggccattctagccagaggaagtggagaaatacactctgcaccttacagagaggagctgcaaagccacattgcaaatggtrtggacacaggaagaagtggagaattggagccctttctgcaagcgataaaccgaaacttcctctttattgctgttctctatctcttgcc

SEQ ID NO: 161219 - DNA, 601 bp, Homo sapiens
ttctctgcatttgtcactggaaatatgatttagtcctgtcagggtagtcaaacacatctttttattgtttatctctggttccctactaattaaccatgcagaactggagatgaccgcarttgtgctattaacagatgcccagtctcttccattaactgtgctcttcgagagtgacattttccttttatttattttagtattctcaggtcctgataccaggagctcaattatgcttattggatgaataaatgaggtgcaaatgtaagctggggcaagaagggtttgctttgtcaacagatttagtgactaaaaaaccacactgaaggaaacttaaggacagcattcatattttattcatcattagacccactaaggaccatgggcatagtgttggctgcttactgactgggccatgatcccaggttccatcttatactcctgagaggcagagccagagttaacacatttagcctttagaaagacacaccatagtgctgaccattctccctgaagattttggttttctgcagatatttacaaaatcttcacaaggattgtgacaatcttctttgatttttctggtcccatcagtgccaaaact

SEQ ID NO: 161220 - DNA, 533 bp, Homo sapiens
agtcagagtgtctgcccttggtctgcattaatatgtatttaaggaattgataaattagttctgctgcatatttttctttctaatctcatgtccttgattttcattgtttaggaagtgggttgaatttctgtattatcccatttcctggttgtttccctgcagattttgtacctttgtctgcaattccacacgatctaaataggattctttggaataaggctttgcaagtttctgttcaatgttcaactattagttaaacattatcaccttttatcagccttaacaagttacctcaaatatgtttatcagataggccctagtagaaaacgtgggaagggacagcattcattcattcattcaacagaaaactatctagcgctgcctgtgtgccttygtttaatatgttggacgtggtcaccaccctaacagaatttacttctactcctgaggtcctcaatcatctgctacttgcaataaacttgcaaatgctagaattattggtagcctaaaaaaattttaaatgttcataatgc

SEQ ID NO: 161221 - DNA, 511 bp, Homo sapiens
cttactaaaacaactactctttgaggagtattttctacttttcatcggttttctctgttttaaacctgtaacttttctgtcaaagagatttgtagtgtcttgtttttccgaaaggtttttaagggtcttcctgaagtttgagttctcttcatgttttctccctttgatttttattttttgtcgcctgtggcagtactttttaaggattttttcttttttttattgaagtcagcattttgaactgtgcttcatatggacagttttctgacatcaagcttgcgtgtgtcagctggctccaagttagccttcagctttgaagaagaggcttaaaatcagcttcctgtgcatgaactttagtggttgataagtcgatcatgtacccctgtcttgccagctttggtcatcactaactttatcrtaaagctcaaattcggtctggtaagtaaaactgtagagaacttgggaagagatattgtcctgcaaaatgttaattcttgaatttatggtacat

SEQ ID NO: 161222 - DNA, 524 bp, Homo sapiens
gaacctgttaacatccacaactcatcaaaaatttgctcttttattctccgttactcccatcttgatctcctacttcctgtcactctaaaccaatcattttaccttccctaacttctacttggttgttccctctcctttcttgctgctcggtgaagacatgagaatggcagagggaaccctgcttggtttgtgtaatagcagcagatccttgttctgatatctgaggtcaygaatacccacttttttcctccctgttgcaccctggagagcccctggcatttcccaatcttgagcagagtagaacatcaacccttagtcttacagtcttctcagatttggtagatctgccctttatcactgggaatgtcaccaactctggagacttgaggaagaaggtacaaagctatttcatatacaccctgccccctccatgtgcttcttagcagatggtaagagtatgtttagttttgtcagaaactgtcaaactgtcttcaaggtggctgtatcattttgtgtttgcacca

SEQ ID NO: 161223 - DNA, 437 bp, Homo sapiens
tgacttcttccagctgctgcctttttctttctccacagataaaaattcccaggtgtctttctcatggctctaggactaaagatctatttgttttctaattaaaaacaccccaagcatcagatgctatttctttgtcttagtggctcagaatatctaggtgccctgtggtgtgctatgcttttargtctctccatgtggtcttaaaaaaatgggggatgcagtttatggtcatggataatacatactgaaatttgacaaaggtcagtaattgtgccccaagatgccttgtgctatacaggttgtgagggtgtgctggtgtgcagatattggctcagtctgtcacagctgatctcctttatttcccatttgtctgctgtcatttgtccagactctatactttatatgcatactgttcacttctgcatacctttggtact

SEQ ID NO: 161224 - DNA, 577 bp, Homo sapiens
gcactcttgggaacacagattccttggccccaaggaaagcacaatctattggagaaaatacaaatattggcagctaaatataattcgtattatagtaccaaggagcccttttggctttgtatctaagtttaagtttctgctatatgtgagaaaattagaatgggttcaggtatactctggggggtgaggggtcaaatcaaaggacataaaggtgaaatatggggccttacaatgtgtttcactttcataaatgagtttaggcaactctgtgtgcttttagtgtgccctggakaattaggtagatcattattgttgttgttgctattttattctccaatgacgagtttacagcgtattctcttcagtggtttgtgtccctgaaagcaaaataaactcaacattttcttcctgcaacctctcatgaatattaatgatgtctttatttactgtttggcaaaatatgacaaaaataaaaatgcactacagcaaaaaagaacatgtatataccaaaaatatctagctactgtcagaatacttgtgtcatcatcattatcaataaatgcgcacttgacaagga

SEQ ID NO: 161225 - DNA, 418 bp, Homo sapiens
taaaaactgagacatctgtcatcattacgtacgtatttcatgccattaattgcagtaggcatttgtgtaatatatatcaaagaaataatgatctattgaagaaacaaagaacactggcaaagcagtgatgtcaaaatcacttacagctgaactctaatataccaattttctctcccggcccatcttccccatctctcatcccttttctaccctctctcacacacaagtgtgttgagttacaaatcacaaaataaaatatgggcacaaacagaataaatacatgagtgaaataaaattcagaaatgctacttgtgaaaaagcaagttatgaataaactctttacagagcttatgttaactcttatttattaagtgcttrgactatggtaaggcactgggaatgtaagagacgtacccat

SEQ ID NO: 161226 - DNA, 418 bp, Homo sapiens
taaaaactgagacatctgtcatcattacgtacgtatttcatgccattaattgcagtaggcatttgtgtaatatatatcaaagaaataatgatctattgaagaaacaaagaacactggcaaagcagtgatgtcaaaatcacttacagctgaactctaatataccaattttctctcccggcccatcttccccatctctcatcccttttctaccctctctcacacacaagtgtgttgagttacaaatcacaaaataaaatatgggcacaaacagaataaatacatgagtgaaataaaattcagaaatgctacttgtgaaaaagcaagttatgaataaactctttacagagcttatgttaactcttatttattaagtgcttagactatgstaaggcactgggaatgtaagagacgtacccat

SEQ ID NO: 161227 - DNA, 224 bp, Homo sapiens
tggtggaaccacaaacggaaaagagtcttgggtcytgaatcatggtttggagaagacctttatgcctattaggagccaaaagcctaaaactctaaacttaaaacacaagcaatagaatgttgattctgtcctgtctgcagtatacaggattagctttttctgttaagataaaactaggaaataaagttgtgtgtggaagcaataaaaatctgaactattcctac

SEQ ID NO: 161228 - DNA, 604 bp, Homo sapiens
agaatttatttatgatcatacagctgctagtggcagagccaacatataaacccaggccatctggcttctgaagcattgcattaaacctgtgcttttaggtgttcagggtagcttctggctctagggcagaggtcaggaaactttttctataaagggccagatagtaaatattttargctttgtgggctaagaggtaaaactgagattgttatgtagatacttaaataactagagagaaataaaatttgcacgaaaattttattgacaaaattcaaaacaataatttagaacaattttttttgtaatacgggtttactaatgaaaagaattaaatatttacagggaggatcaaagttaatgtttcgtgtcattaaagttgattgtaagtactcatttgttaatgctgatctgtaataagattttatgtattttacttctgaaaattccttgcagataggtattgtcaaatacttacattaatccatgagaatatgatttttgttgagcatattcatcacttgaaaggttacttcttctctggatattttccttttagcatgttattacattgcagcttaatcacttccaattgaagactaggcag

SEQ ID NO: 161229 - DNA, 488 bp, Homo sapiens
gcgtgcaagccacaggggcaggactctcccggcgcttgtcgcgcgcgcgcgcgcgcgcgcgacgactgggcacctgttctggcctctgcacagattccctctcggggactctcgctcaggagtgaagcacagagacggattcccttcgggaaaatctctgcgcgcgcacacccatacacacagagagagacttggggataaacacgccgcgagctccggctgtctcgctaatttcgggcgcgggaagaaagcgggcgggcaggctagcaaagctcccacacacccscgtctctacccctccaaacccgagccaccctgagcacctgccctcgcgtgcgcaaaggctgaacccggaattcacaacttgcggtcgcttctccctcccctgcattcctaggctagctggaatgcgcgagcagattccctcacaaggagcagtcagtttcccgcggcgcacgcggcgggcgccgcgggcagtagcggctggg

SEQ ID NO: 161230 - DNA, 596 bp, Homo sapiens
ccaccatgaaacatttcacagagcgtttgtgtttgtttgatcgattttaattatttgaaaaatggtgttttctatccctttcgtcacggaagatcaaaagggtaaaggaaaaaaaaattccactaaagagactaatatgagagccaacatatccgacaatgacttctaaaatatatttaagaaaaggcacctttctggggaaaggagtcagaatttcagatctttccattggaatcataatgctgatgtgctacttaaatatttttaaaactttgtactgataggaatgtttaggccgggcacggtggctcacacctgtaatcccagcactttgggaggccaaggtgagaggattacttgaacccagaagttcgagaccagtctgggcaacatagtgagcccctayctctattataataattttaaaagggaataatgtttatttaacgatgctctgagaccagattaatattttgtaaagtttgtactttgatgtgccagcttgatgtgcctcctgtgaggcttttgctttttaactccctttgctttttaactgccttctggatgaagtgttctttttgtttcatgctttgact

SEQ ID NO: 161231 - DNA, 393 bp, Homo sapiens
attatcaaatggcttggctccagattgagagaatcagcaattaacctctgcctttcgtgttttatttctggagatacctgtctcttaaccaaccactaacatcacacgtagcacatccagaatttagaaaggatttgctctgggcacagtagatgagcacacagattctacagagagattgaagtgatttatttgtgacaaatttttgcaagtcttggggattgagtgtaagggagtattcaagcagttggacttactatgtgaaagaagacataagacatatttactgctcagcctgatgcctggcacatagtaagtgcttaattacaattattcctactgccaagcaccaycattatctttactttcactgcaattaacatagaatgagct

SEQ ID NO: 161232 - DNA, 615 bp, Homo sapiens
gttgatttagaaattattatgactatcataaatacttgaggatatttaaagataaactaataatgcagggcatttttaatagtttaccacaaagaccagtcatgtttgttccctttaaaatatgatttaatcaaaaagaagaataaaagtttctgttatgggttgagttgtgtcccccaaaaagataggttgaaatcctaaggcctagtacctgagaatgtggccttgtttggaaataggctgtttacagatgtaacaaagttaagatgaggtcatactgaattgggatggacctaatccaatgactggtacccttccatagaaagaggaaatttgatcacagagacacaggcacatggaagagaagccatggaaagatggaagcagatattggagcgacgcatacacaaaccaaggaacactgagaactgctggaagccaccagaagctagaagaaataattattttctataaccattgaaggtagcatggccctgctaacaccttgatttcagactctcagcctccagaactgtgaaagaataaatttctgttgttttaagccacccagtttacagtactttggtayggcagccctcaggaattaatacagat

SEQ ID NO: 161233 - DNA, 562 bp, Homo sapiens
tttcctctggaatctgtcatctgtccctggaaaacagagattccatatgtctaaatcattctgcccagtgcctagcaaagaagcaaagataagtgcaggctatcaccatgcctgttctctgatcaaaccgatggtgacaggaatgttcacgtgatggcaatgatcccattcactttaatctgtacctccttttaaaagctagagtcatcagtggctcaaagacttcaaatcagtgcacctgaaagtgctaaggaatgtgtaaagggctggctctataaaggcgaagtggtggtaacaaaaaaaaaaagakagaaaaatggcaaacactcatacagggagtgaaaactcaaggaattaggactgtgtagcagaaatgtagaaagaggacggaacttggagtcagacaggcctggattagaatccttgtttggtcacattctaactgtctgatcctggacaagttgcttaacttctctgagccttcattccctaagcttagaaagatgtcaaaaagctcatctcagagggctctcctgaacatgaacctgtaaggcgtttggcc

SEQ ID NO: 161234 - DNA, 497 bp, Homo sapiens
gctccctgcccatggagagcaggaggatatccctgcgtgagctgtcggaggccagcttcagcgagtgtaggttcagcctgtcactcacagacctctgcatcatcattttctctggtgtggccgtgtccattgcggccatcatctccagcttcttcctggccactgtggtgcagtgcttccagaggtgcgcacccaacaaagatgcggaggatgaagacgaggacgaggatgactgagccacctcctccctcctgcctcttactctccagcaccgaaccagaagctctctccaagacgagagggaaatgctgaaaatggaaaagcaytggccaccatctgtgaactgaacagagcctgttccgtgtcttggcccctgggtacacctgctgggaccactgatctcagagtttagaatcagcagagcacagaagcccaggaaggatggagggaattattcctggagcataacctgcctctcagatcgaggtgtgtgttgg

SEQ ID NO: 161235 - DNA, 586 bp, Homo sapiens
cttatgcaagaaagccagagattgctcaaactagaccacaggcatagatgcccagaggagggagttccaggacaccttgaaaaatggaccctacaggtttagcccatccaatgccccgactcccagcagcaggtgaggcttccctgatagggggagggatgtaccccagaaaggggtggggtttcagctcaagggaagggcttccttgcccgggtggctctaggtccaggagctgcctccatcaatgggtgtcctctctgttttggaagttctagctgtattttatttttttattttattttttgagaygaagtctcgctctgtcgctcaggctggagtgcagtggtgcaatcttggctcaccacaacctcccctcctgcgttcaagcaattctcctgcctcagcctcccgagtagctgggattacaggcgtgccccactatgcccggctaattgctgtattttttttaaaagaatgtttattcaagacttggcagggccaggcgcttacgcttgtaatcccaacactttgggaggccgaggcagacagattgcttgagcccaggaattcaagaccagtctgagca

SEQ ID NO: 161236 - DNA, 586 bp, Homo sapiens
cttatgcaagaaagccagagattgctcaaactagaccacaggcatagatgcccagaggagggagttccaggacaccttgaaaaatggaccctacaggtttagcccatccaatgccccgactcccagcagcaggtgaggcttccctgatagggggagggatgtaccccagaaaggggtggggtttcagctcaagggaagggcttccttgcccgggtggctctaggtccaggagctgcctccatcaatgggtgtcctctctgttttggaagttctagctgtattttatttttttattttattttttgagacgaagtctcgctctgtcgctcaggctggagtgcagtggtgyaatcttggctcaccacaacctcccctcctgcgttcaagcaattctcctgcctcagcctcccgagtagctgggattacaggcgtgccccactatgcccggctaattgctgtattttttttaaaagaatgtttattcaagacttggcagggccaggcgcttacgcttgtaatcccaacactttgggaggccgaggcagacagattgcttgagcccaggaattcaagaccagtctgagca

SEQ ID NO: 161237 - DNA, 586 bp, Homo sapiens
cttatgcaagaaagccagagattgctcaaactagaccacaggcatagatgcccagaggagggagttccaggacaccttgaaaaatggaccctacaggtttagcccatccaatgccccgactcccagcagcaggtgaggcttccctgatagggggagggatgtaccccagaaaggggtggggtttcagctcaagggaagggcttccttgcccgggtggctctaggtccaggagctgcctccatcaatgggtgtcctctctgttttggaagttctagctgtattttatttttttattttattttttgagacgaagtctcgctctgtcgctcaggctggagtgcagtggtgcaatcttggctcaccacaacctcccctcctgcgttcaagcaattctcctgcctcagcctcccgagtasctgggattacaggcgtgccccactatgcccggctaattgctgtattttttttaaaagaatgtttattcaagacttggcagggccaggcgcttacgcttgtaatcccaacactttgggaggccgaggcagacagattgcttgagcccaggaattcaagaccagtctgagca

SEQ ID NO: 161238 - DNA, 475 bp, Homo sapiens
aaatattcagcaaatttgttgaactgaacagaaattatgagttactttttgagcagaaatgacattgtaactataatttatctgaaacgccatgattaaatttctttgggcattgaacatttcacactggtaatttatttgtcatgcaaatcagcaaatgcatattgtttcaacagtacaatttaaaaactcagatcaccaaggtaacttgaaaaaatatgataatcagtagaggcctgaaacataatttcttttagcaccttcagaaaagtcaaggattagaatatgtcatacaggtgtgaagattttacatgaacacacacagaatattagtcattttgtgtatttaggcaaggtaaaggaaaatawaatataaaaacctagttttagagttgacattctcctttgggattaaaatattcctcatataatgagctaactcattgtacatttctaatctatgtctctggatatg

SEQ ID NO: 161239 - DNA, 535 bp, Homo sapiens
agattaatccacccatcccaaactttttcaaatatagcttgtttctaattgttattgtgagatatttggtttttcactgaaggcctaaatgtgctcagaaatgtccattcgtagatactagaaaaagagtgttttcaaacagaagaagaaaaaaagtgtttcggttaggtgagatgaatccacaactcacaaagcattttcacagatagcttgtttttagtttttatcacagggtattcggtttttcactgtaggccacaattggctcagaaatgttccttcgtagatactagaaaaagrgtgtttcccacaaggtgaatcaaatcacaggtttcattctgtgaggtgaatcgataaatcacaaagcattttcacagacagtgggatattcgtttttttactatcgcctacaaagggctcagaaatgtcccttcatagatactacaaaaagagggtttcccaccaggtgaatcaaatgacaggttccattctgtgagatgaatccacacatcaaaaagtatttacgcagatagct

SEQ ID NO: 161240 - DNA, 523 bp, Homo sapiens
gtcaaattgggaatggaaataggtgaaatacatgatgagacaaagcagacctggaaaagaacaggcttgtcagaayggattagaatatggttttttagtctcccttctcaaagctctttccattttaccaaacatctcctcagcaactgccggggtcagttccagtcctattgctttatgattcttgaattgaaaacagatttatgccagttgagtagcaattattcagaattcatttggccaccgaaatgttcctgcggtctgcaggattatgttatgctcatataaggagcgatacatcaacacggatgaaccacaaagacaggaaaataaaatcagatggaaaaatgtaatagcccagctgtttcaggaaaatatcagttttctttctaagggttttcttagatatttttttcaacattgataaggcaaaaattatttttgctaggatgttcagaagaccaaaatctatttcttgctgtctactaataaggtttgccagtaacacctgcagtgtcagata

SEQ ID NO: 161241 - DNA, 659 bp, Homo sapiens
atatacatgaaaggcctggcacatgcaygtccaatacaagtttactattcttatgatttttatcattaactttattattaatattttacaaagtgtcttagtctatcttgtgttgctaaaacaaaattcctgaaattgagtaatttataaagaacagaaatttatttcttattcctctggtggctgcaaagtccactatcaaggggccagcatctggtgagggcttctttgctgcgtccctacatggtgagaggggtaaaggcaagagggaatcaattccctctgttaagcttttttataagggcaccaaatcccattcaagaggaaggagtcttcatagtataatcacttattaaaggccccgccttttaacactgtcacattgataatacctgagtatctgaggggacacactcaacccatagcacaaattctgcaacaatgatacttgatggacaagtgttgtggccctaaaatttgattaagttgcctaaaatacacattaaaagagcctggaacctacagtgttaattcaatcttctacttctctgaaatttactcttcttattttttcactgtataatttataattttctatacataaaactattgctacttgtgggtaatatacttaatgtagtaaatctatgaaaacttag

SEQ ID NO: 161242 - DNA, 659 bp, Homo sapiens
atatacatgaaaggcctggcacatgcacgtccaatacaagtttactattcttatgatttttatcattaactttattattaatattttacaaagtgtcttagtctatcttgtgttgctaaaacaaaattcctgaaattgagtaatttataaagaacagaaatttatttcttattcctctggtggctgcaaagtccactatcaaggggccagcatctggtgagggcttctttgctgcgtccctacayggtgagaggggtaaaggcaagagggaatcaattccctctgttaagcttttttataagggcaccaaatcccattcaagaggaaggagtcttcatagtataatcacttattaaaggccccgccttttaacactgtcacattgataatacctgagtatctgaggggacacactcaacccatagcacaaattctgcaacaatgatacttgatggacaagtgttgtggccctaaaatttgattaagttgcctaaaatacacattaaaagagcctggaacctacagtgttaattcaatcttctacttctctgaaatttactcttcttattttttcactgtataatttataattttctatacataaaactattgctacttgtgggtaatatacttaatgtagtaaatctatgaaaacttag

SEQ ID NO: 161243 - DNA, 659 bp, Homo sapiens
atatacatgaaaggcctggcacatgcacgtccaatacaagtttactattcttatgatttttatcattaactttattattaatattttacaaagtgtcttagtctatcttgtgttgctaaaacaaaattcctgaaattgagtaatttataaagaacagaaatttatttcttattcctctggtggctgcaaagtccactatcaaggggccagcatctggtgagggcttctttgctgcgtccctacatggtgagaggggtaaaggcaagagggaatcaaytccctctgttaagcttttttataagggcaccaaatcccattcaagaggaaggagtcttcatagtataatcacttattaaaggccccgccttttaacactgtcacattgataatacctgagtatctgaggggacacactcaacccatagcacaaattctgcaacaatgatacttgatggacaagtgttgtggccctaaaatttgattaagttgcctaaaatacacattaaaagagcctggaacctacagtgttaattcaatcttctacttctctgaaatttactcttcttattttttcactgtataatttataattttctatacataaaactattgctacttgtgggtaatatacttaatgtagtaaatctatgaaaacttag

SEQ ID NO: 161244 - DNA, 549 bp, Homo sapiens
taaacctgagtgtttttttagagtagctgtgacaaagaatggatagtcattccattgggcaaaaagcatgatctaatgataacatactggggaaaaatttgcaaggtgtatttgttcagattttttctgtgtccctgtgtcttcggagataagggtgtttcttttgtatgggtgtaaggacagcatctctcacatgagagtcttaaaacctgctttagggaaagatctgaaaatgcttcytaagcttcatgacctgcttcaaggtagaagcgcagggggaaggtcaaagtgattttcctgctactcccgtttactcaaattccttctgcttaaaatattcaatatgccaagatgctatatttggggatagcatgtccagaatcccatcaaagacaaaggagtaacactctaaagattcagagaaacagcagacttctgaaaactatttactacaggatctaaacaaaaatgtttaaaagccattttgtaagttcagtaagatgcaagaatattcagactttatcaaacagaagcaggaagcaataaaaa

SEQ ID NO: 161245 - DNA, 570 bp, Homo sapiens
taatctaatcattctgaccatgttcatatccagtcccagtcaccactgccaaattgtttaatggcgacagagctgcattattaattggatggcctggcctggaattaaattgtaaagctctagtgtgacatgcagaaaaaaaaaaaaaaaaaaaaaaaggaatctgagcttaataaaaagaaagtaagtaaattagttctgggcaactatgtcctatattagaacycaggatccctcattgctaaatcattctttacttggttccttctaagcatcacttttttcatctataaagtaggagtagatatatgcaaactttcaagattttcaacaaaattattggttgtgatgactttctaaactacaaagggatatatacccacatgtatgtgtgttcgtgtgtgtgtgttatataaacaactgtcagaatttatgccataagattaaaagtagtaatctcaaaatgaaagggttataggtagtgttgccagataaacacaagacgctcagttaaatatgaatttcagataaacgacaaataatattttagaatatcttatgcaatattag

SEQ ID NO: 161246 - DNA, 504 bp, Homo sapiens
atctgttgagtttggcaattacacagacaaagattaattagcatcatttgttagaaaaattatgaagaaacaaacaaacccattggttaactaaaaataaaaatraaaagaagcaagggggtggggaagaggatctctgagctttttggcagtaaaactatctcagtagaaacagaggagacatggacccacctgatgtgcagtctggacagcactgtcccttcacctctaaggccagtgtgcccactggacatggtgggcaagagggctcgtagcaagttacctgagcccctcggcactcacacaccttgcaagggccatcttcccacttctctccctcctacgcaaaaaagtgaagaacagcattgtcatcaggatgcagtaattcagaagagagcttgctgctgaagaacttacaatttccataagaacaaagtgaaggcagctaatcagtactctgccaaatctaactctgaaacagaacaatagcaaaagagtcctaaa

SEQ ID NO: 161247 - DNA, 331 bp, Homo sapiens
ctgtagcttgactaagggtgtcttaaggcaagaaatttgcaacttgtatggaaaatggactaacrtaaggagagattagagtcagggagaagagttagaaggtaggacctgaattatatccttcatgatggcttttttatttaaaatgtaactctgaatgtgggccctaaaaattttatgctagggcatatttaaaaaatacatgtttatataaggagattagaaaaatttaatttttaatgagctctgttctaatgtccagagtgttctttgatagtaaattaggtgattaggacctgcattaattttttaaggctaatagggaaccttt

SEQ ID NO: 161248 - DNA, 554 bp, Homo sapiens
gaattctttgcctttttctaactgtctttttaatctctgcagtcccctggtgagttgctttactttaaatactctgtcaagctcagtgggggaatgttcctggtttctttgtcattaggattgcccttgagagctgtttctatccttaggtgctttcatcctagcccagctggtttttgtatgtataaaattgtttaggggaggaaagtctgggtagatctagctcttctctgtccatgcctctttccgctgggagccagcagatggatggtaccataagcagcagggcacccaggtcactggaaatattctgatagggaggaagaactgggtgttggaaatcatccagagaatgctatgtcttttggataggcgctttcaacattgagagcctcaggaatgtaggaggggtgagagtgctatccttctaatcagcagtttattttcttgcttgcttgcttttttttttycttaaataactccttatcttctcttggcctcttgccagaatccagaggctttacttgaaatctgtgcctttgcttcccaccagc

SEQ ID NO: 161249 - DNA, 619 bp, Homo sapiens
cctaaattaaattattattttattttagacagagtttcactctgctgtccaggctggagtgcagtggtgygatctctgctcactgtaacctctgcctctcgggttcaagtgattctcctgcctcagcctcccaagtagctgggattacaggcatgtgccaccacatccagctaattttgtattttttaggagagacggggtttcaccatgatggccaggctggtctctaactcctgacctcaagtgatccaaccacctcagcctcccaaagtgctgggattataggtgtgagccaccatgcttggcttgttactgttaataacttgtttttctttttatcattttttacctttttgaagcaatttgttttggctatggattgactagaaataacctagtgtcaatggcaatgctgaaagacatattttatcatctgtcatttatccattctataatcacaggtcgtggattctatatccgtatcttatattcatatagaatagctagctggatagggacagaaagacagacagacagaaaaagattgagagaaagaacacaaaggtatttagaaccttgaatagttaacccagttctgtcagaagctatcctgtctaag

SEQ ID NO: 161250 - DNA, 584 bp, Homo sapiens
ttctgttttgatcaatacaatgtataattagatgttgccaataagatttggaaagcacaatttgccctatatcaaccaccatacaggtaatacctccctccctgcatacrctcacggggactctgctacagttcttgagtctactccacgttgcttaagatagattgatgctaactctatgcctattcaagatttgtgattttgacatttgtttcctgtttgtctgacattgtgtaaggcttagttcatttgtttattataataaagttgctgaatagtgtaacatcagctaaccttcattttctcactgaaagcttattaagctgaagagatctgtctgtagtcaagaaacactaaatgatttcagtgcaagttcaatttccacatattccattaaacaatcagtggtcataatactttgcatatagaaaaataaagaaataaaacaacctaaaacagagaaaatagttgtcaatttaattctagtggttcaggcatttgaaataaatcccagttaggtagtaatacatgaatacaactgatcatatataatggggttaaagaattgctgaggtatgactggg

SEQ ID NO: 161251 - DNA, 584 bp, Homo sapiens
ttctgttttgatcaatacaatgtataattagatgttgccaataagatttggaaagcacaatttgccctatatcaaccaccatacaggtaatacctccctccctgcatacgctcacggggactctgctacagttcttgagtctactccacgttgsttaagatagattgatgctaactctatgcctattcaagatttgtgattttgacatttgtttcctgtttgtctgacattgtgtaaggcttagttcatttgtttattataataaagttgctgaatagtgtaacatcagctaaccttcattttctcactgaaagcttattaagctgaagagatctgtctgtagtcaagaaacactaaatgatttcagtgcaagttcaatttccacatattccattaaacaatcagtggtcataatactttgcatatagaaaaataaagaaataaaacaacctaaaacagagaaaatagttgtcaatttaattctagtggttcaggcatttgaaataaatcccagttaggtagtaatacatgaatacaactgatcatatataatggggttaaagaattgctgaggtatgactggg

SEQ ID NO: 161252 - DNA, 584 bp, Homo sapiens
ttctgttttgatcaatacaatgtataattagatgttgccaataagatttggaaagcacaatttgccctatatcaaccaccatacaggtaatacctccctccctgcatacgctcacggggactctgctacagttcttgagtctactccacgttgcttaagatagattgatgctaactctatgcctattcaagatttgtgattttgacatttgtttcctgtttgtctgacattgtgtaaggcttagttcatttgtttattataataaagttgctgaatagtgtaacatcagctaaccttcattttctcactgaaagcttattaarctgaagagatctgtctgtagtcaagaaacactaaatgatttcagtgcaagttcaatttccacatattccattaaacaatcagtggtcataatactttgcatatagaaaaataaagaaataaaacaacctaaaacagagaaaatagttgtcaatttaattctagtggttcaggcatttgaaataaatcccagttaggtagtaatacatgaatacaactgatcatatataatggggttaaagaattgctgaggtatgactggg

SEQ ID NO: 161253 - DNA, 371 bp, Homo sapiens
agaaacactaaatgatttcagtgcaagttcaatttccacatattccattaaacaatcagtggtcataatactttgcatatagaaaaataaagaaataaaacaacctaaaacagagaaaatagttgtcaatttaattctagtggttcaggcatttgaaataaatcccagttaggtagtaatacatgaatmcaactgatcatatataatggggttaaagaattgctgaggtatgactggggttttccacgaaaaattaaaagttctgtgactccacccctcccaagtagactggccttcttgttcttgcagcatgaataccagagtaacaatgacaataaaattgtgttttctactcctcataagagaaagtg

SEQ ID NO: 161254 - DNA, 492 bp, Homo sapiens
gtcacttgaaatctgaatgaaaataactaattgggaaggatttttatatgtgctagatctgtgctgcctgacacagtggccacatatgtggcttgcattatatttttattggacaggattgttagactgagtttttctttgaagagacaggctttatatctgtaatggcatcttcaactacaaggaacagaaatcccactctaaaagtgcytaaaatgctaacattaattatgtcatctagaggtgggatggggcagctgcagggtttctcaattcaggtctcaatgatgccttcaaggatctaagctcttttgatctttccacctgccacccttaacatgttggcatttgcccttcatcttgtcccctcccatccccaaggagacctcctcagccctgggcagctcatcctcacacagctattactaaaggttggtagaagagaggggtgggattttgtttcatgtgggaggagaatttttactttgacct

SEQ ID NO: 161255 - DNA, 496 bp, Homo sapiens
ataatccatttcacaatagtcaatccacgtagccaaagacaaggggatgcggcagagagctgtcaatacccagagtaaaaatcatcgattggcctgaaaccacaggaggacaagttgctccctgacttgaagtttcrctttgctgttaactagcagaaaccactggagcacgtttaaaggaaaatgacacttttgactagcactaaccagcatcctaaaagcagtattcgccactagatactataagcaccacaggcttcatttttcagctctttgctacttcatcgtctaacattcatcagaaacaaggatttgagtaagtagttggatttttaaagacagatgcaccaacatatgtatgagtgactattttgtgcctggctgggtgctgggcatattgaggtataaatgaagcataagtgtgggcagtatccataaggatctcacaaattatttggggtcatgaacatgagagaattaaataaacataacttaa

SEQ ID NO: 161256 - DNA, 511 bp, Homo sapiens
ttccacttgattaagtgttacaggtgatatgacctggaatcagatgagaccctgagtgagatgaggcggcttttwttctgtgtcgttgactttcttgatgtgatttcagtgatcagaacacatctgctgtgtgaaacattttaaaaaatatattacagtattgttcttacgtatattgctaagaaaataaagactaacatgattgtcttgtttatttctcatagaaccagtttttcataagctgtgctgatgacaaagttgtgttcaacaagataggcgatgccattgcccagaggatcctgaaagctcacaggtaacagcctttggctgagagttctcgctgcagatgttcttgtatttattactaaaatgactttgcaaagcccatttttaaagtactgtcatttcctagcagcttaaatttggttcagccagcaataggttattgatgcctttagtctgagtcagttgctaaagatttttgactgccctttctagggaatttgaattc

SEQ ID NO: 161257 - DNA, 511 bp, Homo sapiens
ttccacttgattaagtgttacaggtgatatgacctggaatcagatgagaccctgagtgagatgaggcggctttttttctgtgtcgttgactttcttgatgtgatttcagtgatcagaacacatctgctgtgtgaaacattttaaaaaatatattacagtattgttctkacgtatattgctaagaaaataaagactaacatgattgtcttgtttatttctcatagaaccagtttttcataagctgtgctgatgacaaagttgtgttcaacaagataggcgatgccattgcccagaggatcctgaaagctcacaggtaacagcctttggctgagagttctcgctgcagatgttcttgtatttattactaaaatgactttgcaaagcccatttttaaagtactgtcatttcctagcagcttaaatttggttcagccagcaataggttattgatgcctttagtctgagtcagttgctaaagatttttgactgccctttctagggaatttgaattc

SEQ ID NO: 161258 - DNA, 465 bp, Homo sapiens
cttaactccagccagtctgtaggagattttactttaggcactgagatggcaaaaagctaattatagaaatagcaggttttcaggaccagaggaataaaataaattataatcttataatcttggaatttaagagttcatcagtgatgtcctagtttcttaactcttatccttccttttaatttttgtcctatttatcactgccatgtggctaaatgtaccyatgatgttttaatttacttagatattttccttttctctcaaagatccatagaaacaagtttaatgatcaaggtaaaaattctgagcaatggcttctatttctatttagtgataagtgtcattctaactactttaaaaattaagaagtgtatctgtggtggccatttgagttttattttgtgagggatcataactatagcaggaggattaaatagaaagtcattaacacctgtactttgaatgata

SEQ ID NO: 161259 - DNA, 570 bp, Homo sapiens
gctaaggttgtaactgtgacagttaggctgtttatgtttgrgccctttaaaaatttttattgtcttcctgtcttaagttgcttgaagtatgcaataaactttcaatatttaacacagagccttgcttaccttggtagggagggggcaaatttctttcaaaacaggattgtagtttattgcatgtggtttgcaaaatcctgtacgtaattctgattcagggctccttatatttcctccctactcccagtatgaaaagtgtctctttagagtatctcttagtttgtgacaaactttaaagcaaataaactatcctttcaatgaggtaaaggatgataccaaatgtcataattccaataaattggaaaaataactgattctaagagcagtattcaacaactttctagaaaaaaactttctagaaaaaaaagtctgatcaggtacctcaaaagtgtgataaaagagggactatattagatactgtcagcactctgtctatatcttctcacctttatctgttcaatgctctctgaccaaattccaactgtatttctctgccagggggctttctcc

SEQ ID NO: 161260 - DNA, 574 bp, Homo sapiens
atgtaccacaggaatattgtcaagcttcatccccaaattcttgcctgtcacttctttcattcaacacagctctttttgtgcctcttttaaatttgttctaaaaattgttcatcatttttctcattattcttgttcctttctgtcttttagtacttgcagccttattttgtccaagacagtatttttaaaacagctcctagatcctactggctttacgttaaactttaattagtatttcttattgtccttttgatctcttctctgaaacacggatttggatgagggatcagggtagaawataagcataaatgagtggctttggggaaaacaagacaatcagctgttagctgaaggacttttttacaacattcccttaagaactgtgaagtcgcttcattttttattccagtagaggcaaatatgaaccataggtcgaattatatatacaacagaattctctttctctgtctctctcttttttctttcttttggagcagactagtaaaagctgctagtatggaatttatctttctggtactgatatctagagccctgaataccttttctcacaccc

SEQ ID NO: 161261 - DNA, 574 bp, Homo sapiens
atgtaccacaggaatattgtcaagcttcatccccaaattcttgcctgtcacttctttcattcaacacagctctttttgtgcctcttttaaatttgttctaaaaattgttcatcatttttctcattattcttgttcctttctgtcttttagtacttgcagccttattttgtccaagacagtatttttaaaacagctcctagatcctactggctttacgttaaactttaattagtatttcttattgtccttttgatctcttctctgaaacacggatttggatgagggatcagggtagaaaataagcataaatgagtggctttggggaaaacaagacaatcagctgttagctgarggacttttttacaacattcccttaagaactgtgaagtcgcttcattttttattccagtagaggcaaatatgaaccataggtcgaattatatatacaacagaattctctttctctgtctctctcttttttctttcttttggagcagactagtaaaagctgctagtatggaatttatctttctggtactgatatctagagccctgaataccttttctcacaccc

SEQ ID NO: 161262 - DNA, 617 bp, Homo sapiens
gtttacttctatcaggaactgaatcatatctacttgtctttcttttttaatgttagcagctattgatattyattttctgggtctattcatttagtatgggatataaaatgattacacatcttcttcatttggtaacaaaaactttccctcatcaaattgtttgtttaccttatgatacaatttgtatgtgaataaatacttacttccctttatcattttttaaaatagcaaattggtggtgaccaattttttccttctgaataaaatcattaattcataaatttaagtatatttgatatactttagtctgcaaaagttattatctttgttgacattaatattgccccatctttgcataatgagagcttactattgttggttccagggtctttttgacgtaaatctagcagtcattgatagctttatattttattacaataagatagtccaagcttgtcctgtatttcctaactcagagctagtattgcctatctttcaaaatattcttcattccttttttatggaaatggtatttacagaccaaaatctaggccctcatcactactgggtcaatcttttgtctaagattttttgtggattcagttagatagtacatg

SEQ ID NO: 161263 - DNA, 569 bp, Homo sapiens
attggtgataataaagaagttcaccggcctattcaattaatctaaaagacagtctgtattacctgaaagaaaattagataagtgtagcaawtagtagaaaatgtgttattaatactattctgggaatgcaatggatttaaagcattgtcaatgacagtgagaatacatatagctactgtggtaagtgcagggtgtttgttaaatgaaagttactaaataacatccagcattgagtcaattggttacggttctaagaatccctgttgtttttctcttataacaattgtgagactattgagagcaaaatggaaactgagttaagtaataataactgaatgagaatccagtgttgtaagcatcctttgattgaaaggaggcactatcgatttcattgcttttaaaacccaaattctgcttctgagaaaaatctgacttttgaattacctcacgttactaaggcatgtagtcagtaatggagctaaactatgttggattttggggactagagctgtgatctaactaatgatgcagggaaaatagcaagctaaaatttatttttcttgctaaac

SEQ ID NO: 161264 - DNA, 569 bp, Homo sapiens
attggtgataataaagaagttcaccggcctattcaattaatctaaaagacagtctgtattacctgaaagaaaattagataagtgtagcaaatagtagaaaatgtgttattaatactattctgggaatgcaatggatttaaagcattgtcaatgacagtgagaatacatatagctactgtggtaagtgcagggtgtttgttaaatgaaagttactaaataacatccagcattgagtcaattggttacggttctaagaatccctgttgtttttctcttataacaattgtgagactattgagagcaaaatggaaactgagttaagtaataataactgaatgagaatccagtgttgtaagcatcctttgattgaaaggaggcactatcgatttcattgcttttaaaacccaaattctgcttctgagaaaaatctgacttttgaattacctcacrttactaaggcatgtagtcagtaatggagctaaactatgttggattttggggactagagctgtgatctaactaatgatgcagggaaaatagcaagctaaaatttatttttcttgctaaac

SEQ ID NO: 161265 - DNA, 430 bp, Homo sapiens
acttggaaattgactgagttacccgtggagatgcaaatttggaagaggaagaaaactgcaaattaaagcaaagtggaggggagcatgtgatggtataacaggatagtatcygtttcaaatgtgcgggagttttgcaaagaaataaaggaacatgcggcttcaaagtagtgctggactgcaagaagcatatcaaaccactctagtggtttgaatagtggctcacaaaaaaatatgtccacgttctaacccccagaatacccactgtgttggcaaaacataaaacataaaagtttgataagattgaatgttattcaaatttggaccataagaaatcctatgtatttggtgtataagttggtaggggtttaacttgtttaaccagtaagaaaataatttggcattatcttaagttaaagattgtatgtatacc

SEQ ID NO: 161266 - DNA, 412 bp, Homo sapiens
gaagaggtgaaattttttattgcatccatgtgaaattccttgaagttttcttagagtatatggaatctttatgataaatccataccatatcagaaagtatacatgaaagttctagttatatcattgtgctactaagagtttaacctatatggagatcagttacacacagttactattctgccctcaaaataactagtaattatagtactaatacataggttaaaagaaaaaacccaaatcccatgtactcawaaacatttgtcagtttcctgtgtatatgtaattcagaatgtcagagttgttttgacaatgctatcagtttcacactgtaaaaactgtgaggcaggcaaaatttaagagaaaaattatgattatttagttgcttgctttaaaaagaagtaatagagaattc

SEQ ID NO: 161267 - DNA, 622 bp, Homo sapiens
gcccatcaaccaacgagtggatacaggaaatgtggtatatacacaccatggaatactactcagccattaaaaagaaagacataatggcctttgcggcaaattggatggaattagagaccactattctaagtgaaataactcaggaatggaaaaccaaatattggatgttctcacttataagtgagagctaagctatgaggatgcaaaggaayaagagttatataatggattttggggacttgggggaaaggtaggaaggggtgagggataaaagactacacattgggtacagtgtacactgctcaggtgacatgtgcaccaacatttcagaaataatcactaaataacttttgcatgtaactgaacaccacctgtacccaaaaatctattgaaaattcttaaaaggtgttaatatttgataaatccactggaacttgtcctatggtacatattttggtcaatgtgaacttgtgcttaaactttttgtaatagttattttcatgtatgttttcctctttttcctctaaccactttagactcttcttaaaagatagagagcatgcatcttttgcttttgctgatccccacagcttctgaatacgtgttgtgtttatcagcaatt

SEQ ID NO: 161268 - DNA, 622 bp, Homo sapiens
gcccatcaaccaacgagtggatacaggaaatgtggtatatacacaccatggaatactactcagccattaaaaagaaagacataatggcctttgcggcaaattggatggaattagagaccactattctaagtgaaataactcaggaatggaaaaccaaatattggatgttctcacttataagtgagagctaagctatgaggatgcaaaggaacaagagttatataatggattttggggacttgggggaaaggtaggaaggggtgagggataaaagactacacattgggtacagtgtacactgctcaggtgacaygtgcaccaacatttcagaaataatcactaaataacttttgcatgtaactgaacaccacctgtacccaaaaatctattgaaaattcttaaaaggtgttaatatttgataaatccactggaacttgtcctatggtacatattttggtcaatgtgaacttgtgcttaaactttttgtaatagttattttcatgtatgttttcctctttttcctctaaccactttagactcttcttaaaagatagagagcatgcatcttttgcttttgctgatccccacagcttctgaatacgtgttgtgtttatcagcaatt

SEQ ID NO: 161269 - DNA, 622 bp, Homo sapiens
gcccatcaaccaacgagtggatacaggaaatgtggtatatacacaccatggaatactactcagccattaaaaagaaagacataatggcctttgcggcaaattggatggaattagagaccactattctaagtgaaataactcaggaatggaaaaccaaatattggatgttctcacttataagtgagagctaagctatgaggatgcaaaggaacaagagttatataatggattttggggacttgggggaaaggtaggaaggggtgagggataaaagactacacattgggtacagtgtacactgctcaggtgacatgtgcaccaacatttcagaaataatcactaaataacttttgcatgtaactgaacaccacctgtacccaaaaatctattgaaaattyttaaaaggtgttaatatttgataaatccactggaacttgtcctatggtacatattttggtcaatgtgaacttgtgcttaaactttttgtaatagttattttcatgtatgttttcctctttttcctctaaccactttagactcttcttaaaagatagagagcatgcatcttttgcttttgctgatccccacagcttctgaatacgtgttgtgtttatcagcaatt

SEQ ID NO: 161270 - DNA, 622 bp, Homo sapiens
gcccatcaaccaacgagtggatacaggaaatgtggtatatacacaccatggaatactactcagccattaaaaagaaagacataatggcctttgcggcaaattggatggaattagagaccactattctaagtgaaataactcaggaatggaaaaccaaatattggatgttctcacttataagtgagagctaagctatgaggatgcaaaggaacaagagttatataatggattttggggacttgggggaaaggtaggaaggggtgagggataaaagactacacattgggtacagtgtacactgctcaggtgacatgtgcaccaacatttcagaaataatcactaaataacttttgcatgtaactgaacaccacctgtacccaaaaatctattgaaaattcttaaaaggtgttaatatttgataaatccactggaacttgtcctatggtacatattttggtcaatgtgaacttgtgcttaaactttttgtaatagttattttcatgtatgttttcctctttttcctctaaccactttagactcttcttaaaagatagagagcaygcatcttttgcttttgctgatccccacagcttctgaatacgtgttgtgtttatcagcaatt

SEQ ID NO: 161271 - DNA, 618 bp, Homo sapiens
ctagcttcatcacccagcccaggctggagtgcagtggtgcgatctcagctcactgcaaccactgcctcctgggttcaagcaattctcctgcctcagcttcccaaataactgggattacaggtgtrcgccaccatgcccagctaattttttttgtatttttagtagagacagggttttgccatgttggccagcctggtcttgaactcctgacctcaggtgatccatcacctcagcctcccaaagtgctgggattacaggcgtgagccacagcacctggactataatccttcttaataatcatcaccatccaccaaaagaagatggaaatctgagtaattgtgtgctgtctacctctgaaaaggctttcagttcttacacttccctctaatgcttctaatgttttcctacattgtgcatctttcatgccgattattgcaatagcctcctagttggtccctataaacagtatctccttccccttctccagctcaacatggctagtaagttacgtatctaagctatacagttgttctggacacactctttagaaagtaaactaaaaagactcagcctctacttcttagcattgtactcctgactgttcatgaaaaccttagc

SEQ ID NO: 161272 - DNA, 397 bp, Homo sapiens
aaaggttctaatcctgaagagtccgggggccagagtaccctcagcactgggaatatgcagaaaggggaagggttcggggtagagggatgtggctggggagagtgcttacactatccccacccccaataaaacaagcctttgtacaaagcccacagccaggcagaacattattagttagctgatacataagaaatccaatttactgtctttataaaaattagtttagggctatccatgttcaaacctttagmccacatgaaaactgaattaggaaagtcagggacaatctagaatggcaaagtactaatggtcatttatggaccgtagctggaaccattaattcctgttactctataataaaacggcaggtgatgaaagcaggcaattttaggaattc

SEQ ID NO: 161273 - DNA, 414 bp, Homo sapiens
ctacatataaagtcacttctcttttcatctccctatgcctgtcaccaccttccagagcggctgctgcctccaatttctgagcactttccgttttccagctcaaagaatatgcttccctcttactgacttcccatccccactgccctcctcaagaaggttgagaatacagctctctgcagcctttagcatagctgccaacagtccacctactttccagagaaataatgctattgatatggtttgcattacatctgtgtcttcctgttaccttcgcttccatttttttctcatgtattcattttctttctttcttccttcttcactataatgtgttttgagagggctttaagataggtgaatctgcttmttctgtgattttctaaccagaaggacctaaacactttacatttaaaa

SEQ ID NO: 161274 - DNA, 466 bp, Homo sapiens
taactccttgctggagcatctttccaaattctcactctttaaaatgcttttattttagaatcagaaaaatatttattttcaaaagaaataataccaccagttaacaaaatgcctcctttatgtctcataggactgctgtgaggattaaatatgtaaatattccaaacaataaggtattcattttgctgcattcccttatctctatgtatatataaaaagggcacgaataccatatgcctgactatrcatgctcaccttaatatttattgtaaaatctaagttccttaatgttagaaatcaatttttattattctgtatatagttcctactttcacttaaaatatacaagagagctcaacaaatataaattaataaaggatgaccatcaacccaagcaaaatacttaactgcaaagaatgatgcaagaaaataataataaagaatagaggcccactttctgcctatt

SEQ ID NO: 161275 - DNA, 428 bp, Homo sapiens
gaattctgtgatttaaaagcacagaggatttcattcacctagtctggattttgaaataataaataagtgtgcaattcattaattttggactttgaaaaacagaratatttccacggccatttacttttatatttaaaataaattcaaaattctctaatttcttgttgttttcagatactgacgtctgtttccaatccatttacatgttaactcaagacagtcttgtctgtgatgggttattccatcttcacggtcacctcctcatatacatctttccactttgaatcttagaatttcattctgtcgagaataacttgtatcttgatatatataatacttagctctgaacacatgatacttaaataattttgggggctggcaaacttgtttttctcccttgtgtttagtttgtagtaatctggttaatt

SEQ ID NO: 161276 - DNA, 494 bp, Homo sapiens
gttctcaccaaagtcatgagaggctgctttttcttttgttgttaaatcacatgggcaattttcggttctcatctcctcgtctgaatgattgttttctgcaacagtactctctcctaattttttgggcactccaattcagtttcctttgatgagttctctcattcttctagtagctcgggcagaagccctgaagtcatccctggcttctttctttctcttatggacaatgttcaattcatcagaacccctgtttttttctcccttaaaaatacatctagaataagaacaattttaccagcactgctgctagctacttccttggtccagacaccatcctctctggcctggagggttacacttgcctcctgcctggtctcctggatcccccttcttgtgcccataagctgttctcaacacacagccaaagtggtccacttgaascccaagtcggctctccgatcgtctcctcagagccctcccctggcttctcatct

SEQ ID NO: 161277 - DNA, 494 bp, Homo sapiens
gttctcaccaaagtcatgagaggctgctttttcttttgttgttaaatcacatgggcaattttcggttctcatctcctcgtctgaatgattgttttctgcaacagtactctctcctaattttttgggcactccaattcagtttcctttgatgagttctctcattcttctagtagctcgggcagaagccctgaagtcatccctggcttctttctttctcttatggacaatgttcaattcatcagaacccctgtttttttctcccttaaaaatacatctagaataagaacaattttaccagcactgctgctagctacttccttggtccagacaccatcctctctggcctggagggttacacttgcctcctgcctggtctcctggatcccccttcttgtgcccataagctgttctcaacacacagccaaagtggtccacttgaaccccaagtcggctctccgawcgtctcctcagagccctcccctggcttctcatct

SEQ ID NO: 161278 - DNA, 493 bp, Homo sapiens
ggtgacacttgttgccttggactgtaaatgcttccttactttgatcctaccctaggagatattccaggatggagatggatttttatttgcctttgcaaagcccacacacaatcaggtctaaatatcttttatgatgactgaatgaatgaacgcccagaacacgtgcagtgagcttacggtgaatctgtacagaagtcttttagtaagacagtcaatgttcatggagctgttataaaaaaggaagacattttgcaaggagccatgggagatgaaaatttgtatgcagaggagaaacatagtcttttaaatgctgtgaggcaatcagagagatgggccttttccaatgaggacaagcagtgtattttagaatcccccaaatgatacagacaatacacatcaggataagacatatcaggtaaggattcatgtgctyatgtgctcaaccattcttgatcgagagctttattgagttcctaacactgccttagatgcc

SEQ ID NO: 161279 - DNA, 644 bp, Homo sapiens
atgtttctatggtttttaattcaaatggtcatagttactaatattcgagtcttctgtggagttgacttgtacctatttcccatcatgaatagtaattctttggttatcaattgtataagtacaaataaaactatgactgataaatcttttgagtcagagagcttaagaaaaatattaaacagacttttaaaatgagtttgggattcaggattccttaaaatattatgttttgaagggtatatatagcatatatatttaatgaggtttaaactaatacctcaaagtaatctttctgtgttttcaaaagatgaggtttaagacaatacagtattactgttctcagaagcccatggtagatgaaatggtgtttagtgataaaattatattattttcrtatgagagaaccagaccacaaagtagtaaaagtagtatttcaacactagaaaggaattcagagattgctttttttttttcttaccaatgagtatgttgtctacataatatagtaatattaataaatgattggcttcctaggttttgactgcaggagtggggagctggagagaaggttaaaacatatcctagaaaactctgcacgtttactgcatacattaggtgacaaatgggtgttgtgccagtgtaag

SEQ ID NO: 161280 - DNA, 645 bp, Homo sapiens
ctaggcccttttgtcttctgtcccttctactatctgaggacacagtgtttgtcccttccagaggaaacartgtttaaggcaccatcttggaagcagagaacaggccctcactggacactgaacctgccagcactttgatcttggactatcgagcctccataactatgagcaataaacttacaatgtgtatacattacccagtctaaggtacttcgttatagcagcatgaatggactaagacacttggttaaaagtattaaaaatggtggcctcaagggaaacacctgggagaaggactgaagatggggtgcagcagaaactccaggtgaacctgactccattggtccatggaccaatatttgagaaccactgctagagacaaggccaattttttagacatttagttttttgaagttgttttctggttcttagtgtgaactagggttattgaaagtgggcagctccatgtgacagacaacagaatgtagcaaaaggaatcatgggttcaaaccatgtttctactccctttcaggctaggtgaaacccccttaggtgtcagtttttccatctgtataataggactcaaaattctagactgtctgttactcaggaaaattatcaaggtgaaatgagataatttttaca

SEQ ID NO: 161281 - DNA, 584 bp, Homo sapiens
atgatgtgttcaatgagtaaatagagtacattttatttcgactgattttacttattattttaggggaatagcctctgtcggcaatgcctcattttcatttagtttccctctttgtaaaaaggccaaagttttcaaataaatatacaaatatatgcacaagctgaaaaaaacaaactttgccttacattcaagtctctttaatttgggggaagttgagatggtaaaagagcatgcagctctctttttcttacagttcatacttgtgttagaaggctgaaaagtattcttacgtgtcttggatatgtttcctggggcttaatcaccgttagccagagaatgttatctgttgttgaagaaaagaataggcaagagaaatgtcagaccagcrgtattgctttctattttatgtgattttattcttactgcaccatcctccttctcacttctgcgttctgtaagtagtttggaagcttcttaagcatgaaaatgggaatatgtatttttatttcccagtagtgtgtagcatagtgctagagagtagataaccaataatcactttttcactaaaaatagtatttaagttt

SEQ ID NO: 161282 - DNA, 504 bp, Homo sapiens
ttacttttcttatagataaataattattcaaggttgggaaggcaaggcatgattttacatttcggcatctatatccttatatcccttattccaaagctgggttctttgacatgttatttacatgcttttggtaggtgcaaattkatagaagttttcatacatgtgtcagaggcatcagtgccaattttaattaagatgcacgacatttgcatcaccccagaaagttctcattccccctagttaattctccctgcagccccaggtcctggacaccacagatatgatcactgtccctagacttttgctttatgagaatgtcacaaaaggatccaggcggcatgtgtccgctcttttcaatgtctccttcctccacttagcttaatacttttgagattaatcgatttcagtggctatttctgcatattgccgagtaatttctcttgtataggtgtaccacaatttacaaaaccatttaacagtttgaacttcagatttccccctcaa

SEQ ID NO: 161283 - DNA, 506 bp, Homo sapiens
gacacagtctactggcagtttacaaaggatctgtagaatactttgattgatttttattatagccacaaagaaagaagtttcagaaaacctttaagatttttgtctttatgataacttggaaaagaaaatccaatgctcttacgatcttttccgtcaccgtaatatcagtctattggggtttgatatgtctcttgtcaaatttctccttctacagtaatcaaaatgcacacatgagcttgmgtgcgcacacacacacacacacacacacgcacaaagagttctggcttgtggcaaacaacatgtctgattagaactagaatagccacatagtttacaagaatggaacacctggttaaaggcaatgagagcttttagagcaaccagatcttgagggccaaaattgtaaagaaaagagaactacataaggtgagtctgtattataaacctgcttttcacatacggcctcttgtaaattcacagctctgagtcaatacgtttctaaaaag

SEQ ID NO: 161284 - DNA, 597 bp, Homo sapiens
aaagcttctgaataaaattaggtaaacctttttatttttttatttttattgttattatttttgatctacactggcttgactttcttgtatgagaggcaatggcagcaagaagtggcaagtgctaaccagtgtggatgatgaaggccctcctattgcagtagggcttccatgctcagttggagggtatcgccttgcttagtcaggagcatctgacttggtgtgtcttcttcagcaaccaccacaaatggctaatttgacatcagtttttctatagaattttcccacttgagaatgagatccagcacgtaggattactccctgtgaattcacagctatatttgtaagtgaaaagctgaatgtataatgttcaagccactgtcagacagctggtgttctcttagatcttcggacaggtggtggagttgccgttttggcacctctgtcgttccgtgaagtttgactttctgactgctcacgttgcatccacgtgggaaggaggacgtcaacaataggtagacagcragcagcatctgatccagctcctggtggagacagcttcctcctgtgcagttcctggagatcatgttataactgggt

SEQ ID NO: 161285 - DNA, 594 bp, Homo sapiens
tatacctcaataaaaagtttcttaaaagcttatattctctggaaaatcatccaggagacagacaagaatggctgtttctcagaaggtctggtagacctggggtctagggtgaaagggaaacttttagtagatctgtcctactagagatgctaatgggacaccagacagtaagtcaaagccatacgaggaaataaaaacaccagtaaaggtaattacagaagtaaatataaaagccagtagtattattgcacttttggtaattctctttttcctttatgatttaaaagaaaaacacgtaaaataaatataaatcaatgttattgggcacattatgtataaatgtaaaataagcaaaaaatataaaatgtaatttgacacamtaacatttaggaagaaggatgagatatacagaagtgtaatttttgtatactatgaaagctgagtgggtattaattcaaactaggttgttataagtttaagatattaattgtaatccccaagatagccactaagaatataactaaaaaatatgtgcagaaaaggtaatgagaagggaatcaaaatggtacactatacaaatcaattaaacaaaag

SEQ ID NO: 161286 - DNA, 272 bp, Homo sapiens
gatagttctcatatgcctttaactggctacagatctgttatttaaaatttgatcaggagattcaagcatgatctcatttgtgttggagtcacttgaagagtctaactactgcaccctttggcacccatgccatgttctacttcccacctgatgcacaattgcagcaagtaacatgagcacgaataaaaggaaagcttyttgataagagtctctgtgatttttgtcattttcaaaagggaaaatatcctaaacatgttatttgatattcaaaa

SEQ ID NO: 161287 - DNA, 612 bp, Homo sapiens
tcactttttaaaaatagcagtgtttcagtatatctccatatttgttgctgtgtctgaacttggattgaatttttatttaatctaagggagaaaaagagtaygtactatttactgatctaactgtagctgctatagtttttttttttttttttgccttatattctagttgtataacatttgtctatatgatggaacattttacaaagttttaataatatattttataatcaaatatattcaaaatatttgcatttcaacataatataggatcatgtaatcaattaataatttaagatattagatgttttcttttcatatttaagtcttatatattttacatttacatcacatctcaattcagactaaccacattgaaggtactcagtagccacctgtgactaatggcgactgtattggacagtgcaattctaaatcataagacccaaattctttactacttttagagattgaatgaattgcttatgagttgaaattatcacatgaagactggtagaaatgtttgcatatggccggcaatgtatctggtgggtgggagggttccagctcatgagtcctagggttgtaaacagctctgctttaataaaaatgaac

SEQ ID NO: 161288 - DNA, 612 bp, Homo sapiens
tcactttttaaaaatagcagtgtttcagtatatctccatatttgttgctgtgtctgaacttggattgaatttttatttaatctaagggagaaaaagagtacgtactatttactgatctaactgtagctgctatagtttttttttttttttttgccttatattctagttgtataacatttgtctatatgatggaacattttacaaagttttaataatatattttataatcaaatatattcaaaatatttgcatttcaacataatataggatcatgtaatcaattaataatttaagatattagatgttttcttttcatatttaagtcttatatattttacatttacatcacatctcaattcagactaaccacattgaaggtactcagtagccacctgtgactawtggcgactgtattggacagtgcaattctaaatcataagacccaaattctttactacttttagagattgaatgaattgcttatgagttgaaattatcacatgaagactggtagaaatgtttgcatatggccggcaatgtatctggtgggtgggagggttccagctcatgagtcctagggttgtaaacagctctgctttaataaaaatgaac

SEQ ID NO: 161289 - DNA, 548 bp, Homo sapiens
gcccctggccagctttcacggtccctcaaacatctgctaacacaacagttgctgcctgttctgaggcctgctcagggaggttcggggactcagtgtgtgggcagccgcaatcaatcaaacctctgtttcgacatcccgacccctccccacaaacatcttgcttctgtttgaagcactgttgagaagtacaatttgttgctctttcaagctgaccagcttggagttaaaaatacagcagggactatgacacctagggggactgcattcaatgggtgaactttttaattgttgcttttttctgaaatctttgctcacayacacgtgatccatgtctaaatggccgcgtatggctcaagtcttgctgggagccaaccaatgctgggtggtcaaaccaggtctcaaaaaagcagtaaggaaaatgtcagcaaaagtcctgctaataaacaactcacaccctcaggctgggccctgccttcaatggcagacattgtcattgtgcaaaaggaaggctgcagcctcacagagaacaccagccaggagggccaaaa

SEQ ID NO: 161290 - DNA, 594 bp, Homo sapiens
catcacatttccaaccccctttgtagtatagtgtggcaagatgactacattttgaacaacgggtctgaacagaggtgatgtgtgtaattrctacactttgttctcaaatgcatgtatggaatgcaaagggaatgtatgtgacttccccttgcctcttttccccttcttgctggctagattatgaatgtcatggctggaactagaggagtcatcttgaactgtgagatggaaatcaccttttaaggatgtttgagaacaagatagaaaaggcagtaataaacttatcttgtttaagatactgtagttattttattttattagttaagcctatgtcttaactaatacaatcttaatagtttggcgataaataagcctacgattgaaccttcccccattcttcccattcctaattgaatataacctgcaaggagggagtataccttcttatttcccaatagatcattgagtttggagggcatggagagagaatctagaccctaggacatgaaagacagcaggtatgtgcttctcaggagaaagatccatgctgattcaatacagtattaatttattattcattatttagtaatgaat

SEQ ID NO: 161291 - DNA, 594 bp, Homo sapiens
catcacatttccaaccccctttgtagtatagtgtggcaagatgactacattttgaacaacgggtctgaacagaggtgatgtgtgtaattgctacactttgttctcaaatgcatgtatggaatgcaaagggaatgtatgtgacttccccttgcctcttttccccttcttgctggctagattatgaatgtcatggctggaactagaggagtcatcttgaactgtgagatggaaatcaccttttaaggatgtttgagaacaagatagaaaaggcagtaataaacttatcttgtttaagatactgtagttattttattttattagttaagcctatgtcttaactaatacaatcttaatagtttggmgataaataagcctacgattgaaccttcccccattcttcccattcctaattgaatataacctgcaaggagggagtataccttcttatttcccaatagatcattgagtttggagggcatggagagagaatctagaccctaggacatgaaagacagcaggtatgtgcttctcaggagaaagatccatgctgattcaatacagtattaatttattattcattatttagtaatgaat

SEQ ID NO: 161292 - DNA, 594 bp, Homo sapiens
catcacatttccaaccccctttgtagtatagtgtggcaagatgactacattttgaacaacgggtctgaacagaggtgatgtgtgtaattgctacactttgttctcaaatgcatgtatggaatgcaaagggaatgtatgtgacttccccttgcctcttttccccttcttgctggctagattatgaatgtcatggctggaactagaggagtcatcttgaactgtgagatggaaatcaccttttaaggatgtttgagaacaagatagaaaaggcagtaataaacttatcttgtttaagatactgtagttattttattttattagttaagcctatgtcttaactaatacaatcttaatagtttggcgataaataagcctrcgattgaaccttcccccattcttcccattcctaattgaatataacctgcaaggagggagtataccttcttatttcccaatagatcattgagtttggagggcatggagagagaatctagaccctaggacatgaaagacagcaggtatgtgcttctcaggagaaagatccatgctgattcaatacagtattaatttattattcattatttagtaatgaat

SEQ ID NO: 161293 - DNA, 428 bp, Homo sapiens
aggagcagattatttaatttccatgtgttagcatggttttgaggactccttttggagttgatttccagttttatttcaccgtgatctgagagagtacttgatataatttcaattttcttaaatttactgagacttgttttgtggcttatcttagagaatgttccatgtgctaatgaatagtatgtatattctgcaattgttgggtagaatgttctgtawatatttgttagttctacttgttgtagggtataatttaagtccattgtttgctgactttctgtcttgatgacctatctagtgctgtcagtggaatattaaagtcctccactattattgtgttgctgtctatctcatttcttaggtctagtagtaactgttttacaaatttggtcctccactattattgtgttgctgtctatctcatttct

SEQ ID NO: 161294 - DNA, 428 bp, Homo sapiens
aggagcagattatttaatttccatgtgttagcatggttttgaggactccttttggagttgatttccagttttatttcaccgtgatctgagagagtacttgatataatttcaattttcttaaatttactgagacttgttttgtggcttatcttagagaatgttccatgtgctaatgaatagtatgtatattctgcaattgttgggtagaatgttctgtatatatttgttasttctacttgttgtagggtataatttaagtccattgtttgctgactttctgtcttgatgacctatctagtgctgtcagtggaatattaaagtcctccactattattgtgttgctgtctatctcatttcttaggtctagtagtaactgttttacaaatttggtcctccactattattgtgttgctgtctatctcatttct

SEQ ID NO: 161295 - DNA, 428 bp, Homo sapiens
aggagcagattatttaatttccatgtgttagcatggttttgaggactccttttggagttgatttccagttttatttcaccgtgatctgagagagtacttgatataatttcaattttcttaaatttactgagacttgttttgtggcttatcttagagaatgttccatgtgctaatgaatagtatgtatattctgcaattgttgggtagaatgttctgtatatatttgttagttctacttgttgtagggtataatttaagtccattgtttgctgactttctgtcttgatgacctatctagtgctgtcagtggaatattaaagtcctccactattaytgtgttgctgtctatctcatttcttaggtctagtagtaactgttttacaaatttggtcctccactattattgtgttgctgtctatctcatttct

SEQ ID NO: 161296 - DNA, 448 bp, Homo sapiens
ctaaccatgcagagtgcaaagggtgagacgtggcttttcaaaagaaaagtgaggtgatgttaaagacaaaaaggaaacagatgttatgtgraggaaaaaaacacattgacattcactgtagaaaagttctgagacataaaagtgagaagggggtctggtcagcgtcttgctgtgctgttatagcctctccgggctacttctgatcaatgagtaggaccctctgtacatttcaccccccttgccattttgtgcctttatcagtaaagcttcccatggccctgccattcagcagaggcggcagctgcatgaccttcttaaattactgcttgggactgagcattgggattgctttaaagctctcccaaagtgatcctaatgtgtagccagggttgagtcatcggagtaggaaagcccttggtcttcaccatcagcatatacaaatattgca

SEQ ID NO: 161297 - DNA, 452 bp, Homo sapiens
tcagcttcatcctaaccatgcagagtgcaaagggtgagacgtggcttttcaaaagaaaagtgaggtgatgttaaagacaaaaaggaaacagatgttatgtggagraaaaaaacacattgacattcactgtagaaaagttctgagacataaaagtgagaagggggtctggtcagcgtcttgctgtgctgttatagcctctccgggctacttctgatcaatgagtaggaccctctgtacatttcaccccccttgccattttgtgcctttatcagtaaagcttcccatggccctgccattcagcagaggcggcagctgcatgaccttcttaaattactgcttgggactgagcattgggattgctttaaagctctcccaaagtgatcctaatgtgtagccagggttgagtcatcggagtaggaaagcccttggtcttcaccatcagcatatacaaa

SEQ ID NO: 161298 - DNA, 421 bp, Homo sapiens
cctaaccatgcagagtgcaaagggtgagacgtggcttttcaaaagaaaagtgaggtgatgttaaagacaaaaaggaaacagatgttatgtggaggaaaaaaacacattgacattcactgtagaaaagttctgagacataaaagtgagaagggggtctggtcagcgtcttgctgtgctgttatagcctctccgggctacttctgatcaatgagtaggaccctctgtacatttcaccccccttgccwttttgtgcctttatcagtaaagcttcccatggccctgccattcagcagaggcggcagctgcatgaccttcttaaattactgcttgggactgagcattgggattgctttaaagctctcccaaagtgatcctaatgtgtagccagggttgagtcatcggagtaggaaagcccttggtc

SEQ ID NO: 161299 - DNA, 453 bp, Homo sapiens
cttcatcctaaccatgcagagtgcaaagggtgagacgtggcttttcaaaagaaaagtgaggtgatgttaaagacaaaaaggaaacagatgttatgtggaggaaaaaaacacattgacattcactgtagaaaagttctgagacataaaagtgagaagggggtctggtcagcgtcttgctgtgctgttatagcctctccgggctacttctgatcaatgagtaggaccctctgtacatttcaccccccttgccattttgtgccttyatcagtaaagcttcccatggccctgccattcagcagaggcggcagctgcatgaccttcttaaattactgcttgggactgagcattgggattgctttaaagctctcccaaagtgatcctaatgtgtagccagggttgagtcatcggagtaggaaagcccttggtcttcaccatcagcatatacaaatattg

SEQ ID NO: 161300 - DNA, 421 bp, Homo sapiens
cctaaccatgcagagtgcaaagggtgagacgtggcttttcaaaagaaaagtgaggtgatgttaaagacaaaaaggaaacagatgttatgtggaggaaaaaaacacattgacattcactgtagaaaagttctgagacataaaagtgagaagggggtctggtcagcgtcttgctgtgctgttatagcctctccgggctacttctgatcaatgagtaggaccctctgtacatttcaccccccttgccattttgtgcctttatcagtaaagcttcccatggccctgccattcagcagaggcggcarctgcatgaccttcttaaattactgcttgggactgagcattgggattgctttaaagctctcccaaagtgatcctaatgtgtagccagggttgagtcatcggagtaggaaagcccttggtc

SEQ ID NO: 161301 - DNA, 595 bp, Homo sapiens
taagctttctgctgttttccaggcactgtatcaggagctggttgggggagtgatgaacgagatagcatcctgttaacaagsagtagcagacttcccatgttacattctctcaaacagagaggaggtcaggccagatctgtttctcctcaaaaatataatctcaagaaaaatcaactggtcggatcatcactacctaaccacagatctccctccttattcttcacaacaagaatccgtcaaataagtaacgtcatggttaatgctcctccacattcaacctggaccctaaatccctctaaataacttgactctgttcatacacagaccacccactttaccagtctcaaaggatggaccagaacaactatttccttgagttaatgagtgaacctacatctaactgtaaataaaacactaaaaataggtaactattacttactaaatgaaacccaagtgtaactttccattaaactcaacctgaataaagtttttaaacagtgaaccttttaaaacagaaaccagtctgtaagcatcctaaagctagtcaaccaagacagaagttaaaacacaagtattttccaatcaaactcagcac

SEQ ID NO: 161302 - DNA, 595 bp, Homo sapiens
taagctttctgctgttttccaggcactgtatcaggagctggttgggggagtgatgaacgagatagcatcctgttaacaagcagtagcagacttcccatgttacattctctcaaacagagaggaggtcaggccagatctgtttctcctcaaaaatataatctcaagaaaaatcaactggtcggatcatcactacctaaccacagatctccctccttattcttcasaacaagaatccgtcaaataagtaacgtcatggttaatgctcctccacattcaacctggaccctaaatccctctaaataacttgactctgttcatacacagaccacccactttaccagtctcaaaggatggaccagaacaactatttccttgagttaatgagtgaacctacatctaactgtaaataaaacactaaaaataggtaactattacttactaaatgaaacccaagtgtaactttccattaaactcaacctgaataaagtttttaaacagtgaaccttttaaaacagaaaccagtctgtaagcatcctaaagctagtcaaccaagacagaagttaaaacacaagtattttccaatcaaactcagcac

SEQ ID NO: 161303 - DNA, 571 bp, Homo sapiens
ggaggcccttgttttggacttagctcatgcattaggccccaacagacaaaaccaaacaaaaatgaagtcacttgtggtaaatgtgacattatcaaactgagactttaaggaaacacatagctcctagaccagaacagaccaggtttgttctcctaaaaacaagatgttccaacataaggggataccctctactcaagtccttgttcctacctttgcaaaactcacagttctgtttccagggggtttcaagaccaaattagtaatttacgatggtgatagtgatagtaatgactaaagttttggtcaatctctcaaaattgagaaaatgaccaaaagaggggaattgttaaatcaagtttagtctaaagctaccttcttacatatttaagttcagcctacaggtttttctatacatcgtgaactataacaagtggagatgtaaactgacctcagccaacacctgtgccaatcactgagttttagccaataaaatgtagccaactgtccaaatcgtgttcaaataaggcaaacactaagctctaatyaatcccgttgcttctgtacttcactt

SEQ ID NO: 161304 - DNA, 581 bp, Homo sapiens
ctacaatcctgtaaattaaaaggttagatttttttcatctaaatattcttatatttattaagtcctcaactatgactatggcatcatttygtttttacatgggtttggatcaagtaaaggtgcccttccgcaaaaaaactttcaggatgtaaaaactggttcctgtaagaaaagaaaggcatgatcttaacaatgttgcatccatctatactatttcatactgagaagcaagagcaatctgtttatcaaacccaattaccctttccctcctcttctacatgaaatggtcgcaatagattaggtagagagaaagaaaactaaacactttgcaaacatcaaaaaggagttgaagaaatgagggatcccaccatgaggcagacataaagccaatcacagcttccggaaaatgcaggctgaaattctttccaacagtttttggtgaaagcttttatgtctcagttatttaaaactctatattgcctaattattcatagatcagttctagctacttgtatcttacatggaaatacaaagagctgagagtaaccaaggaacaaggacacattctagcagggtatcat

SEQ ID NO: 161305 - DNA, 581 bp, Homo sapiens
ctacaatcctgtaaattaaaaggttagatttttttcatctaaatattcttatatttattaagtcctcaactatgactatggcatcatttcgtttttacatgggtttggatcaagtaaaggtgcccttccgcaaaaaaactttcaggatgtaaaaactggttcctgtaagaaaagaaaggcatgatcttaacaatgttgcatccatctatactatttcayactgagaagcaagagcaatctgtttatcaaacccaattaccctttccctcctcttctacatgaaatggtcgcaatagattaggtagagagaaagaaaactaaacactttgcaaacatcaaaaaggagttgaagaaatgagggatcccaccatgaggcagacataaagccaatcacagcttccggaaaatgcaggctgaaattctttccaacagtttttggtgaaagcttttatgtctcagttatttaaaactctatattgcctaattattcatagatcagttctagctacttgtatcttacatggaaatacaaagagctgagagtaaccaaggaacaaggacacattctagcagggtatcat

SEQ ID NO: 161306 - DNA, 581 bp, Homo sapiens
ctacaatcctgtaaattaaaaggttagatttttttcatctaaatattcttatatttattaagtcctcaactatgactatggcatcatttcgtttttacatgggtttggatcaagtaaaggtgcccttccgcaaaaaaactttcaggatgtaaaaactggttcctgtaagaaaagaaaggcatgatcttaacaatgttgcatccatctatactatttcatactgagaagcaagagcaatctgtttatcaaacccaattaccctttccctcctcttctacatgaaatggtcgcaatagattaggyagagagaaagaaaactaaacactttgcaaacatcaaaaaggagttgaagaaatgagggatcccaccatgaggcagacataaagccaatcacagcttccggaaaatgcaggctgaaattctttccaacagtttttggtgaaagcttttatgtctcagttatttaaaactctatattgcctaattattcatagatcagttctagctacttgtatcttacatggaaatacaaagagctgagagtaaccaaggaacaaggacacattctagcagggtatcat

SEQ ID NO: 161307 - DNA, 550 bp, Homo sapiens
ctggcacctgctctaatctcagtgcacagttgagaccaagcccaggcattgtcataacctagttgggtatctacacattcagggcagtgctgacatgccagccccctggggccttggtgccctcaagactttgggcaccaatgagcatgggatggaggctgaggaggggctgagggcagcttagcattggcctgcaggtgccccttggcacaaacactctaggytccatgaacagtggcaagaggcagacaggttcctgggtgaaaaggggtaggtccctagtgaggccccaccttcaagctggggaaggtctgaagcctggaggttgggctgccagtcccacagagcacagtgggaacttatgatgctttttccaggcccacctatggccacccatggaccaatcagcatgtatttcctctcctccgaagcccataaaatcccagactcagccagactcaaaaagggacaacaggacaaccatctgtggagagaaactacccaccaaagggtctcctctctgtgagagctgagaagatgacaggatgac

SEQ ID NO: 161308 - DNA, 550 bp, Homo sapiens
ctggcacctgctctaatctcagtgcacagttgagaccaagcccaggcattgtcataacctagttgggtatctacacattcagggcagtgctgacatgccagccccctggggccttggtgccctcaagactttgggcaccaatgagcatgggatggaggctgaggaggggctgagggcagcttagcattggcctgcaggtgccccttggcacaaacactctaggttccatgaacagtggcaagaggcagacaggttcctgggtgaaaaggggtaggtccctagtgaggccccaccttcaagctggggaaggtctgaagcctggaggttgggctgccagtcccacagagcacagtgggaacttatgrtgctttttccaggcccacctatggccacccatggaccaatcagcatgtatttcctctcctccgaagcccataaaatcccagactcagccagactcaaaaagggacaacaggacaaccatctgtggagagaaactacccaccaaagggtctcctctctgtgagagctgagaagatgacaggatgac

SEQ ID NO: 161309 - DNA, 550 bp, Homo sapiens
ctggcacctgctctaatctcagtgcacagttgagaccaagcccaggcattgtcataacctagttgggtatctacacattcagggcagtgctgacatgccagccccctggggccttggtgccctcaagactttgggcaccaatgagcatgggatggaggctgaggaggggctgagggcagcttagcattggcctgcaggtgccccttggcacaaacactctaggttccatgaacagtggcaagaggcagacaggttcctgggtgaaaaggggtaggtccctagtgaggccccaccttcaagctggggaaggtctgaagcctggaggttgggctgccagtcccacagagcacagtgggaacttatgatgctttttccaggcccacctatggccacccatggaccaatcagcatgtatttcctctcctccgaagcccataaaatcccagactcagccagactcaaaaagggacaacaggacaaccawctgtggagagaaactacccaccaaagggtctcctctctgtgagagctgagaagatgacaggatgac

SEQ ID NO: 161310 - DNA, 291 bp, Homo sapiens
ttaatcaagggaacctgaaaacaaagccaatatttcaaataaaaacgggatcccttctgcctgccttggcatcccaaagtgctgggattacaggygtgagccatcaggcttaaggctcatttttcactgattttcttgatctggcatttaattatgaaataataaaagattcatggatattgttcttgccttgctgaaatgttattagctaagattttaatttattattactgttatataaaatgtatattatatcacatataaatatatattagttctatacttgtgaaa

SEQ ID NO: 161311 - DNA, 291 bp, Homo sapiens
ttaatcaagggaacctgaaaacaaagccaatatttcaaataaaaacgggatcccttctgcctgccttggcatcccaaagtgctgggattacaggtgtgagccatcaggcttaaggctcatttttcactgattttcttgatctggcatttaattatgaaataataaaagattcatggatattgttcttgccttgctgaaatgktattagctaagattttaatttattattactgttatataaaatgtatattatatcacatataaatatatattagttctatacttgtgaaa

SEQ ID NO: 161312 - DNA, 528 bp, Homo sapiens
ttgtattcctttctttggagagtcatcccttcccctataataattctttgggtgaggccaacaccaagctcggagatgagcacagggcccaggccttaccaatctgagtctttacttgaacattttttggcactctaaggaaagttaytttttctttatttgaagcctttaactcttaggaccatgtaagcctggagttgctggtggctatcttgtggccatatagaaagaacctgtcagagaatgaaatcaaaactgtagaaagtagaataataaatagtgtcctgatgatgtttgagacctggatccagccatacctgaagctatgagatttacccctggacttttcagtcacataaaccaacagacttcctctaacccttaagttagtttgagttgggtttcagtcccttgcaatttattggtgctgagtaataagccttcagatataatgagtatctggaagactcaaaatgaaaacctatatgcaaaggctttgcagtaaagtgctacactgtcaggacacca

SEQ ID NO: 161313 - DNA, 378 bp, Homo sapiens
atgtcctcatcagtttttcctggtttacagttggctgtcttcttgtatccttgcatggtggggcgggggagggagggagggagagagagagagagagagagagagagagagctcttgtctctttttataagagcactaatcctattcatgatggttccaccctcatgaycaaatcacctcccaaaggcgttacctccaaataacgtcacgctgggggttaggtttcaacatgtgtgttgcagggaggatgcatacattcagtccatagtctaggactaggttcagtgccaacctattcctagattcaaagagccagtgcaccctggctttccacctctcccctgagacacagcttctcatactttgagattaactagc

SEQ ID NO: 161314 - DNA, 525 bp, Homo sapiens
taggttggggaagttctcctggataatatcctgaaatgcgttttgcagctcttttctattctccccatctccttcaggtactccaatcaattgtaggttcagtctttttatgaaatcccaaatttcttggaaccttttttcagtcctttttrttcttttttctctagtcttgtctgcatgccttatttcagcaaggtatcttcaaattcaaatgccttcctccacttggtcaatttagctattgatacttgtgtatgcttcaagaagttcttgtgctgtgtttttctgctccatcaagtcatttatgttcctctctaaactgaatattctacttagcagctcctctaaccttttatcaaggttcttagcttctttgtgttgggttagaacatgctcctttagctcagagtagttttttattatccatcttctgaagcctacttctgtcaattcatccatctcatcctttgtccagttctgtgcccttgctggagagatgctgtgatcatttggaggagaagaggc

SEQ ID NO: 161315 - DNA, 530 bp, Homo sapiens
caggtagccacagccgcagctgtggtgctggtcacccactcctcccaggagctcggtaggcttaagcagattccagctgaaaggctgttgagaatctgcatggttccagggttgggacactaggccccggtggcatgagttcacaagtggaatcttctgatccatgggttacacagttccatggaaaaaagcatggtttccctggctggggagcatgctcactcactgccttcctctctgtggatcacgccagcctcctactcagtgctgatgagagaacctaaatactttggttgacagtgaaggagtcacatgcttattatggttcttttcaatgggagcctctgaacaccactgtttctagccagccatcttggccccactaccctgtcttgttcttagtgcaaagatgtaacaatcaatgtaggctccgttgtgctacagtaacaaaactatcctaaaattcagtctttaamtaacaaaagtttatttctcactaacattacacatccttcaaagatgggtgagac

SEQ ID NO: 161316 - DNA, 591 bp, Homo sapiens
atttatcattcattttgatcatttatccgaacatagttatgctttactcttagggtcaatttctagaaatagaaattggggattctgaacacaaaattatatagcttaaattttaacagcacttcagaaaaaaactgtcaatgtttttaaacttttccaatctgatagataaaaataagtcattatttttattatcacttcttttctgaatttaataatgttatgaaagttatttataaacataatttaaagagtcaaataggaggggctggtcaagatggttgactagaagcagttagcatgtgctagtctcatgaagagaaatagaagggacaagtaaatacagcaccttcatctttgagtacaggagatgctggcaagatggctgaataggaacagctctggtctgcagcctcagcgagatggatgcasgtgggtgatttctgtatttccaactgaggtacctggtccatctcattgaagctggttgaacagtgggtgcagcccacggaaggtgagtggaagcagggaggagcattgcctcacccaggaattgcaaggggtcagggaattcattcccctagccaacgg

SEQ ID NO: 161317 - DNA, 529 bp, Homo sapiens
catcttcaatggtgaaacacccaagtacacgcactggggctcatcaagaaaacaactccacccacagagaatggagaaaagcaaggcagggtgaccacacccctgggagcaacacagagccaggtaaacatcccctgcccagagaagcagtgagtgagtgagtgaccccagggacagacacttctctcatggatctttgcaacccttgagtcaggagatccccttgagaacccaccccatgagggccttcagtctgatacacagagctctgctgggtcttagcagagcagccactcaggcacacacagcracccaagagtttagatacctgggcttcccagcaaaagcagccgcaactccagctgagcaggaggttattcccctgtacaaacccataggaaaggggctgaatccaggaggataagcagggacagtctgcaggccctgcttccctagcacctcagaggatgagacccactggcctggaactccagccagccatgggtagcagtgttacacctccctgaga

SEQ ID NO: 161318 - DNA, 414 bp, Homo sapiens
gatgtctttttgtatgctaatgttgtgttgactgatgtctggcagtccctaggtagcttccggattggggtggtaaccaaaaagaccaagtcatgattagagggttgggacttccagccttactctcctttccccaacctggggytaagggagagaagggaaggagctaaaagttaagttaatcacttatggccaatggcttaatgaatcattcatatccagtgaagcctccataagatgtccaagaggacggggtaaggagggcttccagatagctgaatacatggaggttcctgaaggttggtgtacccagagagcacatggaagctccatgccctttcctttataactcactctttgcatctcttcatctgtatcatttgtaatatcctttataataagctggtaaacata

SEQ ID NO: 161319 - DNA, 566 bp, Homo sapiens
taattgtttgcctaatatccatttcttcttcttacttgccagtatagccctgattttgtttagggtgaccatgtgcccagcccaaggtgtccatcacagcyagactagatcatgtgacctaatcctgatataaaggaagagtgctgtgaaagcttttggaaaactttttcttttgctgttagaaagaacagatggagctggtatctttccctctttgttcctaccttgaatgtagacatgatacttaagagtttggactgtcatttgtgatcacatgaagaactatcattttgcatttatctgtcagcaaagggaaagacaggacagtatgattgatttgttgaaattgagttgtttttaaaaaatctttggtctgttggtaactatgattatttatttttttgggatgtgtgaagatctattcagaaatctcctttaaagaaattctcccctatttagaaacccagtttaatgttaagaccacagaatttggatttagaactcctgggtttgagccatggctctatcatttactaatgtgaaaactggacgagccactaacctcc

SEQ ID NO: 161320 - DNA, 511 bp, Homo sapiens
ttattctcagcaaactaatgcaggaacagaaaaccaagcaccacatgttctcacttataagtgggagatgattgacgagaacacatggacacattgtggggaacagcacacactggggcctgttgtaggagccaggggakggatagcatcagggagaatagctaatggatgctggtcttaatacctaggtgatgggttgatttgtgcagcaaaccagtatggcacacatttacctatgtaacaaatctgcacattctgcatgtgtacctctgaacttaaaagctgaagaagaaaaaaaaagtggttgattctggaatgtatttagaaggtaatgcaaatgagatttgtagttggttggatatgggggttaggagaaagacaggagtggaggattatcctcagttttggggtatgagcaatactaatgatattactaatgagggaggaacaggtttatggataaatcaagatttagttgtagatgtgatgcttgaaatgtttttttgcacag

SEQ ID NO: 161321 - DNA, 662 bp, Homo sapiens
tctatgatttgattcaaaatgtctttgtgcagaaaataatatacaataaattgatataaagtatcaaacacgtgaggatttatctttttcagaatactagtctggaaactacaatgagttcagtcacatatatcttttctgtctgctttttactaaattttgaagttcaacttgacagtctgcataattaatttttaaaataattttaattttagatttggggtacatgtgcaggtttgttacataggtattctgcgtgatgctgaggtttgggatatgaatgatctcgccacttgattaataagcatagtacccaacaggtaatttttcaacccttgttcccctccaatcctcatcagtagtccctggtgtctattgttgtcatctttatatccgtaagtacccagtgttttgcttctgcttataagtgagaacawgcagtacttggttttgttttctagcattaatttgcttagcataatgacctctagctgcatccatgttgctgcaaataacttgattacattcttttttatggctgtgctgtattccatggtgtatttgtactgcattttctttatccaattcaccattgatgggcacctaggttgattccatgtctttgctgtggtgaatagtgctgcagtgaacatgagtggatg

SEQ ID NO: 161322 - DNA, 520 bp, Homo sapiens
cataatgaaataaaactagaaattaatacaagagcrattttggaaaccatacaaacacatggaaattaaacaatatactcctgaatgaccagtgggtcaaagaagaaattaagaaggaaattgaaaattttttggaaacaaatgataatggaaacacaacataccaaaacctatgagatacagcaaaaacagtactaagagggaaatttatatctataagtgcctacaacaaaaaagaaaaaaaacttcaaataaatacctaatgatggatcttaaagaactaataaagttaagtacaaaccgaacccaaaattagtagaagaaattataaaaatcaaagcagaaataaatgaatttaaaatgaagaaaacaatacaaaagataaatgaaacaaaaaaatatttttttatgatgaacaaaattgacaaacctttagccagactaatggagaaaaaaagagagaagacccaaataaataaaattagacatgaaaaaggagactttacaactgataccacag

SEQ ID NO: 161323 - DNA, 626 bp, Homo sapiens
tacagattcttctcctccacacatggattattctcaaggatacaccacatgttaggtcacaaaacaaatctgaaaacatttaaaaacattaaaataatatcaaacatcttctctgatcataatgaaataaaactagaaattaatacaagagcaattttggaaaccawacaaacacatggaaattaaacaatatactcctgaatgaccagtgggtcaaagaagaaattaagaaggaaattgaaaattttttggaaacaaatgataatggaaacacaacataccaaaacctatgagatacagcaaaaacagtactaagagggaaatttatatctataagtgcctacaacaaaaaagaaaaaaaacttcaaataaatacctaatgatggatcttaaagaactaataaagttaagtacaaaccgaacccaaaattagtagaagaaattataaaaatcaaagcagaaataaatgaatttaaaatgaagaaaacaatacaaaagataaatgaaacaaaaaaatatttttttatgatgaacaaaattgacaaacctttagccagactaatggagaaaaaaagagagaagacccaaataaataaaattagacatgaaaaaggagactttacaac

SEQ ID NO: 161324 - DNA, 622 bp, Homo sapiens
taagagaaactctaaaaggcagaaatgaggggtaagaaaggagaaggtcaaccaagacactcagcacrggcggaggcaggagcaggtgtgcagtgaggccaagggtgaagtgagaggacacacagctgggggtgtggcatggggactggcaaagaaggctatgggactcaggacataggaaaagtctctgacaacccagacacaacaaatctcaggatggaaaaatgaagagtgacggaagatgaaggtaggcatgaggaaatgataccattacaagggttaaaatatcagatgaagagggagaaaaaagataaaaaatacaagagtgactacagtgaggttgagatcattcctgtcccagcttgatgtctccaccatttggtggcctcctgagcaatcttgctccaactatcaaacaaaatcacgttttattatccaccgtggagtcccttctctagagtaacagcatggccccaaattgctcacctaattttgaagtggcacctacttataactcagtaaacctgtgaacagaccccatcctccatatttaggagtgaggaataaaagcaggtaagcgaggctgcttggattccactcagcttctaagtcacactgtggt

SEQ ID NO: 161325 - DNA, 622 bp, Homo sapiens
taagagaaactctaaaaggcagaaatgaggggtaagaaaggagaaggtcaaccaagacactcagcacgggcggaggcaggagcaggtgtgcagtgaggccaagggtgaagtgagaggacacacagctgggggtgtggcatggggactggcaaagaaggctatgggactcaggacataggaaaagtctctgacaacccagacacaacaaatctcaggatggaaaaatgaagagtgacggaagatgaaggtaggcatgaggaaatgataccattacaagggttaaaatatcagatgaagagggagaaaaaagataaaaaatacaagagtgactacagtgaggttgagatcattcctgtcccagcttgatgtctccaccatttggtggcctcctgagcaatcttgctccaactatcaaacaaaatcacgttttattatccaccgtggagtcccttctctagagtaacagcatggccccaaattgctcacctaattttgaagtggcacctacttataactcagtaaacctgtgaacagaccccatcctccayatttaggagtgaggaataaaagcaggtaagcgaggctgcttggattccactcagcttctaagtcacactgtggt

SEQ ID NO: 161326 - DNA, 564 bp, Homo sapiens
aaaataaattagctgggcatggtggtgtgtgcctgtagtcccagctattcaggaggctgaggcaggaggattgcttaagcccaggaggttatggctatagtgagccatgatcgtgccactgcactgcagtctgggtgatggagagagaccctgtctcacacacacacacacacagacacacacacacacagacacacttaatgtctgaaaggaagcaatggttaacaagccacttcaaagaaatgattaaaggtagttaaagcctcctttttttttctattctgctaaaggmtccaaattgctaactgtgcacagtactgtaaatctctagaagcatcagtttttgattctgaagttataagggcaaaacctactgacagacactcatacacaaaatgttgtcagatcgaaactttggccccttgtcatttgtaggtttaaaggactgtggctcacattaaaattgcctgagtcctagcctaccaattctaggttacttcctatcagatcaaaagagccaaacaagagaagcttctccaatcaccctctaatttacgatagatc

SEQ ID NO: 161327 - DNA, 565 bp, Homo sapiens
cttaggcaacacagagaccccacctccacaaaaaataaattagctgggcatggtggtgtgtgcctgtagtcccagctattcaggaggctgaggcaggaggattgcttaagcccaggaggttatggctatagtgagccatgatcgtgccactgcactgcagtctgggtgatggagagagaccctgtctcacacacacacacacacagacacacacacacacagacacacttaatgtctgaaaggaagcaatggttaacaagccacttcaaagaaatgattaaaggtagttaaagcctcctttttttttctattctgctaaaggctccaaattgctaactgtgcacagtactgtaaatctctagaagcatcagtttttgattctgaagttataagggcaaaacctactgacagacactcatacacaaaatgttgtcagatcgaaactttggccccttgtcatytgtaggtttaaaggactgtggctcacattaaaattgcctgagtcctagcctaccaattctaggttacttcctatcagatcaaaagagccaaacaagagaagctt

SEQ ID NO: 161328 - DNA, 565 bp, Homo sapiens
cttaggcaacacagagaccccacctccacaaaaaataaattagctgggcatggtggtgtgtgcctgtagtcccagctattcaggaggctgaggcaggaggattgcttaagcccaggaggttatggctatagtgagccatgatcgtgccactgcactgcagtctgggtgatggagagagaccctgtctcacacacacacacacacagacacacacacacacagacacacttaatgtctgaaaggaagcaatggttaacaagccacttcaaagaaatgattaaaggtagttaaagcctcctttttttttctattctgctaaaggctccaaattgctaactgtgcacagtactgtaaatctctagaagcatcagtttttgattctgaagttataagggcaaaacctactgacagacactcatacacaaaatgttgtcagatcgaaactttggccccttgtcatttgtaggtttaaaggmctgtggctcacattaaaattgcctgagtcctagcctaccaattctaggttacttcctatcagatcaaaagagccaaacaagagaagctt

SEQ ID NO: 161329 - DNA, 500 bp, Homo sapiens
tgaattgttcatcatataartgtaggtgctttaggcattccctggttgatggacatttgggtagtttccagttttttattattacagtgttgttagaatgaacattgtcatactctcatggtagtatgtaccgtgtgaggatggtgtttctctagggtaaacatggattttggatcgtagactatgcccatgtttcattttatagatcttcccaagtgcccttcggtgtggctgccctagttcatgttctcagaacgttaccacactttatattttcaaacttatcacaattttccagactaatgggtggaaaatggtatctcattttaatttgctctcccctggttattggtgaagttgattatatttttatgcatctgctgactttttatgtttcctcttttataaattgctgctttatatgttttgcccatttatctattgttatctttttcccacaggtttttaggagttatttatctgtgttccaggtaccagtc

SEQ ID NO: 161330 - DNA, 502 bp, Homo sapiens
tgtgaattgttcatcatataagtgtaggtgctttaggcmttccctggttgatggacatttgggtagtttccagttttttattattacagtgttgttagaatgaacattgtcatactctcatggtagtatgtaccgtgtgaggatggtgtttctctagggtaaacatggattttggatcgtagactatgcccatgtttcattttatagatcttcccaagtgcccttcggtgtggctgccctagttcatgttctcagaacgttaccacactttatattttcaaacttatcacaattttccagactaatgggtggaaaatggtatctcattttaatttgctctcccctggttattggtgaagttgattatatttttatgcatctgctgactttttatgtttcctcttttataaattgctgctttatatgttttgcccatttatctattgttatctttttcccacaggtttttaggagttatttatctgtgttccaggtaccagtc

SEQ ID NO: 161331 - DNA, 502 bp, Homo sapiens
tgtgaattgttcatcatataagtgtaggtgctttaggcattccctggttgatggacatttgggtagtttccagttttttattattacagtgttgttagaatgaacattgtcatactctcatggtagtatgtaccgtgtgaggatggtgtttctctagggtaaacatggattttggatcgtagactatgcccatgtttcattttatagatcttcccaagtgcccttcggtgtggctgccctagttcatgttctcagaaygttaccacactttatattttcaaacttatcacaattttccagactaatgggtggaaaatggtatctcattttaatttgctctcccctggttattggtgaagttgattatatttttatgcatctgctgactttttatgtttcctcttttataaattgctgctttatatgttttgcccatttatctattgttatctttttcccacaggtttttaggagttatttatctgtgttccaggtaccagtc

SEQ ID NO: 161332 - DNA, 521 bp, Homo sapiens
ttcttccccatgtgagaacacagtgagaagacagccattgatgaacctggaggcaggccctcacaagacaccaaatctgctggtaactggatcttgaacctcccaacctccagaaccatgaaagatccatttctgttgtttgtaagctgcccagtctatggcattcggtgatagcagcctgaatgaactaagacagtcctgcagcccaaacttcagggaagcrtagaagatgccagttcacccttctcccaacatgccccctgcattccagactgtgtgggacaaaagccaatgaccagtgcatctgagtggaatgtcttttccaagagctagtaatgcttagatttgaattttccaacttcattgccccaaagtgtgaaaaacaacacctttaccctattgaacaaaatgtttatacagggattccaagaacctgacggacccctggggtataaaaagcattacatcccaaatgttttggtgtataccaatactaatcctgtcatctcagagaacaagtt

SEQ ID NO: 161333 - DNA, 421 bp, Homo sapiens
gaaactccagattgcaaagctgggctcataggcatagcccagcatttacaagggggagctatggtgcccttgcttgagatatttatttgctttctacactgagaatctctcagcaaattttttttcctttaatcaaagttgccataaatgagcctctggctctccaggtgaccttacctcaggaaggtctctgtacttctgaatggctgtacccaattcagagcgtcagatatactgctgcctccttcccctggctctgtagcattggagttgttttcagaggggaaatctgtgcatctcccccatgcttcatggtccttccaactgttctaatgcagsgttagacattccgaagttaacccttcacccttttcccccataggtctttctcagcaaatgacagatggacacaggtgaattg

SEQ ID NO: 161334 - DNA, 436 bp, Homo sapiens
attgccttcctgcttcacacccactccctgccctccctgtagaatgctccaggattatacraaatttgtcttttggcttgctactacatgtatccccagaatctggtacataatagatgtttaaatgactacttattaaatgagttaaagtctaaaaaacagtctatcttgacaggttgcagaatactgatgactcatgtgtttcttataataaaatttcctcctgatatgttgtgataacattcttgtgagtgtgtttgaatatgtggaggtagatggaaggaaagattggtttaattcactactctgccccaggatttaggatgtggacttgagccaaataaatgcaatatctctggattttaaactagaccacttatactgtgggcctatatgcttttaaaaacattatttctgttaaaaccagacttctata

SEQ ID NO: 161335 - DNA, 622 bp, Homo sapiens
tccaccaaactggaagtagcattggagacactttccaggttacagtgtgaggtgttagaatgaatactccagttcagtgtgggtggactcacgtatctgcattttaaacaagtgcccatttgattcttgtggaaactaacttttcttccaagctgtaaccgctagctaactttatattacatagtcatctgattattgccttcctgcttcacacccactccctgccctccctgtagaatgctccaggattatacgaaatttgtcttttggcttgctactacatgtatcyccagaatctggtacataatagatgtttaaatgactacttattaaatgagttaaagtctaaaaaacagtctatcttgacaggttgcagaatactgatgactcatgtgtttcttataataaaatttcctcctgatatgttgtgataacattcttgtgagtgtgtttgaatatgtggaggtagatggaaggaaagattggtttaattcactactctgccccaggatttaggatgtggacttgagccaaataaatgcaatatctctggattttaaactagaccacttatactgtgggcctatatgcttttaaaaacattatttctgttaaaaccaga

SEQ ID NO: 161336 - DNA, 522 bp, Homo sapiens
agacagagggaagacacagaagctgggctgaaggggaagaaagctgggaaccctgaatggaactaccatgcactgggactcattcctgacccacaatggctctgggggaatagatgggttgaactgggaaggagaaacccgctctcaccatgggcctctggaaccctagtaggagacaccttgaccaccatggacacttgagttggcagggagagctgcttagagaagtggtaggggcagcaagtcagctgatgtggagcccagagggtttggtgccggaatgtctatagcagagcacagccagggatagccatctgcctaggctcaacttgctcccataggagactttagcccttagggaactgtcagacctgatctctgcaggatgstcttgcccatcagaagatgctggtctgacctgagtacctattggtctgttggcctctcccagggccccagcctgaccacacctgctttaatggcagccttgggtgtcctggggacctgcaccatagcttctat

SEQ ID NO: 161337 - DNA, 522 bp, Homo sapiens
agacagagggaagacacagaagctgggctgaaggggaagaaagctgggaaccctgaatggaactaccatgcactgggactcattcctgacccacaatggctctgggggaatagatgggttgaactgggaaggagaaacccgctctcaccatgggcctctggaaccctagtaggagacaccttgaccaccatggacacttgagttggcagggagagctgcttagagaagtggtaggggcagcaagtcagctgatgtggagcccagagggtttggtgccggaatgtctatagcagagcacagccagggatagccatctgcctaggctcaacttgctcccataggagactttagcccttagggaactgtcagacctgatctctgcaggatgctcttgcccatcagaagatgctggtctracctgagtacctattggtctgttggcctctcccagggccccagcctgaccacacctgctttaatggcagccttgggtgtcctggggacctgcaccatagcttctat

SEQ ID NO: 161338 - DNA, 602 bp, Homo sapiens
cactcaggtaaatattcagtttcatcactcacaagttcaaccttccacaaaacactagatgacaattccgccaaactctttgccaatttataacaaggattgtctttcctccagtttccaatgacgcatttctaatttctgtctgagatctaatcagaatcacctttcatgttcacatttctaccaacactctgttcatgatgatgtatgtattctctaagatgatagaaactttccctacagctctcctttttttgtcttctgagccctcaccagaattgcctttaatttccatatttctttctaccaacagtcccttcaaggaaatctaggctttttctaccatgcacctcaaaactcttccaactctacctattacccagttccaaagccattcccacatttgtaagtaattgttacagcagcaacatctcatttaacagtaccaaaatctgtattaatttgctagggttgccayaacaaaataccacagactgtgtgacttaaacaacaaaaatttgtgttctcctgatatctagaggctgtaagtccaaggtgccaccagagttggattctggagagacctctattcctggcttgca

SEQ ID NO: 161339 - DNA, 555 bp, Homo sapiens
cttaaaagtaaacctaaatctaacattgagattgttcacagaactagaaaaacctattttaaaattcacgtggaaccaaaatgtctgatccaccaaaaccatgtggatcagacattttgtctcatctcctgtatctatcctctgaacatctgttgagtttccaaactcctaacatctagtgagaacattacttacttatgctgtagtctgccactggtgtttcgatcctctccaatattctctactcctcttgcattttcttttctaacttaggacttttttatttcyctttcttttaccatgaaagtctacctactgctgttttccatacattttcttatatgtagctttctctctttctcccatcttacctattattaaaattatactttcttatatttctgaaatgctaaggtatgtgtgaaaaatcattgattcaacttatgctaaaagtgaaatttagtactatttattacatggattttatggtctcgcattgaaaagaatctttaccccaagttgtttaaaaaaactcataaatttcatagggattaa

SEQ ID NO: 161340 - DNA, 411 bp, Homo sapiens
gagaatttttaactttttccttccaaacaatttgttacattttcaatgtaattggaacactgataggatatggctatagtcgtaaatgtcctttttaagattcctttacattctaaaatagttacagagacatttgttttatgttcctctttcattaggtttttgaagctgcattaataaagtgtgaaggtaacaaattacctcatactgtcatgagtgggagctaaatgatgagaacacatggacacatagtggggaamaacaaacactggggcctattgaagggtggagcatgggaggagaaagaggatcaggaaaaataaataatgtgctaggtttaatacctgggtgatgaaataacgtgtacgacgaacccccatgacataagtttatctgtgtaacaaaccttca

SEQ ID NO: 161341 - DNA, 624 bp, Homo sapiens
ttctccccgtaactcctaccaagattatccaaatacgtatatttcttttaattagtaaaaatgctattactttttggacccagtttcttaagcaaggaagtaacaatataaccctgtaaacactatttcttttcactgctgctcccttgaactaaatattgaagaaaaacattacagtataatttgcaaaaacctacattgcatataaacattatcctatgctgacaaacgtggatttatgatcaaatgaaagcaaaaatgtactaaaaagctatttagccaaattctccaccaagttatttaggtgtgattcaccctgcagtttattggatttgtgattttatctcaacatacctctaaagaacaaatttccaatctggtatttttctcttagaataatgtatggcataattcactatggcaagccaaatagttaacttggaatttcggggacagcttattcgtgcaacattttaatgatcatatatctccatcccaaaattaatctgttaccaggttaaatcactccaaatcctttcttccacaatctgcgagagtaattgctgcttcrgtttcaatcatagagcagtaaatctagatttacttttaggcagctggtttata

SEQ ID NO: 161342 - DNA, 621 bp, Homo sapiens
ttcataaatgtttactgcactcacaggtcaatggttttatgagcccagttttctgatttactgcttgtatggtcaagccaagaagtgacatgctttttcagagactaaaatggtgttgatgcttgaaactacaagttccatggagcaaggctgaaataatttatcaaattagctagatatcccattaagatamcctgtcagattaaaaaaaatatgttgttgatgcttggtttgtgcatctatgttgaccagagtggcctacggtaggagggacagcagatgttaaaatgcctattccttgaaatgtaacatacggctgagcttcagagccttaaaagaataacagatctgaaataattcatggcaatggaattactgatatttaaacagatgtcaccttttttagcaaatggaaattgaggtacagatggtgagggctggtatgttttagagtagccattgtaaatgaaaaatgtacatttggaaaattaaatatcacaaaatatataatgatgtccatatttttctccaactgaaatgaagaaaagcttacgctagacttctggctcctggctacccagagagatattgagtatttctttcattttcttttttaatgaa

SEQ ID NO: 161343 - DNA, 458 bp, Homo sapiens
tagtatcctccagaccacaccaggaatccaattattttcaggcaaataacagaagatcctgaaaaacaggtaaaaagtccttgccaccttgtggagacatggatcaagcaaatcaagaatactattaataatgtgaagtttaaatattaatattctaataaagtaggaaagtgagtaagcagattaatagagtaagagctacaacaaagagggagagagaggaaacaaataacttcatggaaatagatagagcaaaggcagcaaattcctagtaacaccccctaattttgctgatgatagcyggactgcagtggggttgatgaagcacagcagtgctgagtacaacatgccacatgtaagagactgtgaaacagtaaaaaagagacaacaggagatgtcacagggcctgaaagaaacaagactaaaaatataatctcatcttaacatccaactaaacc

SEQ ID NO: 161344 - DNA, 268 bp, Homo sapiens
ctggctggtctcaaactcttgggctcaagtaatctgcctgcctcggcctcctaaagtactgagattgccaccacaccgggccaaaaagwtacattttattacaatcaccttacagataataaactggagctcagagtggttgagtgacttgcccaaggtcacacaactactatgacaggtctgagtgactccaaagccactgcttattgttaaagaaagggagaacaaataaataaaatagggaaggagggaggaaagggaaaggaaa

SEQ ID NO: 161345 - DNA, 550 bp, Homo sapiens
tcagaagcagccaactattaggcagaccgtgctataggactgcctgccattccccagtgtcttaatatttttcttcctcctttggttttcgattcctggtttaagaccataaggaagaagaaaaacttttcagatcagacacctctctcacagtggatttggcagaacttattaatatacagagcagtattaggttctttatttctactctcactcctctctcaaattgtgattcttaggtcttccaggaataaaaaataaaamcagccctttaataaaacatagaatttctgtggctgtgcttgcttagctacatgagacctgacagaaactttgaaatgcatacacataagggctggatcaagcaccttctataaagcctcaacctccttccaggaggaaggtaatgggagttccttcttccaggactggtcaaggttagtaggttttgataccatcatataaacacagagttagtttcctagaagatgccttataattcattaagttcaataatactccatggaaggatatcctatagagtatttga

SEQ ID NO: 161346 - DNA, 593 bp, Homo sapiens
taatttttttagagatgtgatctcaccatgttgcctaggctggtctcaaactcctaagctcaagcaattatcccaccttagcctcccaaatagctgggattacaggcrtgagccaccatgcctggttgggaaacatttttaaatagtaaaaagcactctttaaaaacatggtataatttcagtcatcactgcagtagtctattgtgacttcaaataagtgagaggagacagcagcattacctatttaggtgacatgttcttagaagcaggcaagcatgctataaaaccatgtgaaagctggcctgtaaggagaagttaatgcctctaattaacttttgtttttaagttctacttactgtgtcttacttagtttttggaaccttgagtagaacactaactgtacataccaaattaggatttttccttttttttaacaaaatgatatttgccttcaattttaagtcataaattaatttcagatttatttctgatcatctcctaagcctttataaaaatgagtttgaacatttttttttctgttgaagtcaatagttgggaatctctctgcaactgcaacaaatgaatatttcacc

SEQ ID NO: 161347 - DNA, 593 bp, Homo sapiens
taatttttttagagatgtgatctcaccatgttgcctaggctggtctcaaactcctaagctcaagcaattatcccaccttagcctcccaaatagctgggattacaggcatgagccaccatgcctggttgggaaacatttttaaatagtaaaaagcactctttaaaaacatggtwtaatttcagtcatcactgcagtagtctattgtgacttcaaataagtgagaggagacagcagcattacctatttaggtgacatgttcttagaagcaggcaagcatgctataaaaccatgtgaaagctggcctgtaaggagaagttaatgcctctaattaacttttgtttttaagttctacttactgtgtcttacttagtttttggaaccttgagtagaacactaactgtacataccaaattaggatttttccttttttttaacaaaatgatatttgccttcaattttaagtcataaattaatttcagatttatttctgatcatctcctaagcctttataaaaatgagtttgaacatttttttttctgttgaagtcaatagttgggaatctctctgcaactgcaacaaatgaatatttcacc

SEQ ID NO: 161348 - DNA, 475 bp, Homo sapiens
aacacagaaagcataaaagagaagatacatttgaatatgtaaacaatctttaaaaattgtctggatgaagatgtaattttaaaatgccaaaagctaaccaataaatatactgaggaaaaatgaaatgtatatgacagacacattgtaaatatcttcattatacaaataattagtgcaaagtaataattggaggggaaaaaaaccaaaataatggacaaaatatatgacaaaacaatttagaaaaaaggaatccaaaagagatgtatgtataaaaatgktttttcagtgttctttgaaggtgatttttgcagtattatttgaagtggctaaaacactggaagcatcttgaacattcatcattggggaatggttgctgttaaatataaaagtgtttctaaaaaaaagaaagaaaagaatgagttaaagctagctgttttgaactggaagaatgttcatattatactcttaaaagaca

SEQ ID NO: 161349 - DNA, 467 bp, Homo sapiens
tgagctgtgatgtgatgtcaatgacagcctcagccaaattcaagtgaagttctgaaggtgaaattaattttgataacccagaaacacaaagtcaaatgccacatgttctygcttataagtggtaggaaagcaatgagtacacacggacatgcagaatagaataatagacattggaggctacagtgggcaggagggtgagagaggggtgaggggtgaaatgctattgattgagtacaatgcccactgctcgggtgatggttgcattgaaagtccagacttcaccactgcacaatatatccatggaacacaactgtggtactcatcctcctaaatctatgaagataaaaactaactaaaaaagagattaattttgaagctgacccaagtcagggtgtgatgccaggcttttataagttcccacttcctgctcccacctacatctacccctgaaaagaacagaaccgtgg

SEQ ID NO: 161350 - DNA, 467 bp, Homo sapiens
tgagctgtgatgtgatgtcaatgacagcctcagccaaattcaagtgaagttctgaaggtgaaattaattttgataacccagaaacacaaagtcaaatgccacatgttctcgcttataagtggtaggaaagcaatgagtacacacggacatgcagaatagaataatagacattggaggctacagtgggcaggagggtgagagaggggtgaggggtgaaatgctattgattgagtacaatgcccactgctcgggtgatggttgcattgaaagtccagacttcaccactgcacaatatatccatggaacacaactgtggtactcatcctcctaaatctatgaagataaaaactaactaaaaaagagattaattttgaagctgacccaagtcagggtgtgaygccaggcttttataagttcccacttcctgctcccacctacatctacccctgaaaagaacagaaccgtgg

SEQ ID NO: 161351 - DNA, 516 bp, Homo sapiens
caaggggactgcagataagtagggaggccaggtttccatgattccaaccattccaacctttctatgcatcgcctgaaacctacacaggtggcaaccagaccccatctgactgtgtagccgctctgctgtccttcctgcgtgagagctgtttcatcagcagtatgacaataatgytggacatctatttaggttctgctttgagaaaatgaaaagggtttcacagtttgcaaaggatccaacaggaagggcaatagcattggtgttcagggcatgtgctttgggtttaaatctttactacttagcatgttgtgattttgtgcaagttatttaaactctcttagcctcagtttccatattgttaaaaatagctatcaaatgcctactctagattgaataatttagggtttttaaaataatttaaaatgatatatttaaagcatctatttaccagaacatataaagtgggaagctattactattatgttttaaaactatataatttaaagctaagacaga

SEQ ID NO: 161352 - DNA, 472 bp, Homo sapiens
atgattatctgatctgatttccatgttgaatttataagataatttgacaacaatgagatcaacatgaataaagcatacatcaaaataaggaagtccgcaatatgtattccatttttcatgcacatcaaattatccttgacataagaaacttgagtttgttatttttcccttctactatggtgattattctattttagcattgttcatcttaaaaatcataactagatactttaggaagctaagggaggtgggggtaagcattccctcaattgttacagattttatttatctttccattaattaatgataaggatgtttaagctcccagttaacaacgactagaaactgcagtatcttatttaraagatgtatcattcaaattacaaattgatataatgaattctaatgaatactttcctcctacattgaagcttaatccctattcaaagtggattagttagtatttaaattt

SEQ ID NO: 161353 - DNA, 553 bp, Homo sapiens
ttcatacaaaaaagaactgaaatccattctccactggatgcagatttcaggcaaaggagactttttttttaacttcgccttactgagattcttgtgtttccataytgattgaaccataagaagcccagaatgcaaagacacaaatacttttaaaatatctttttgtgtgtgtgtttctaccagacagaaaaactgctattgtcagcaaagtaagtctctagtttcactctactctataaccttatggagacagacatctaatgatgaagaaaacatggtggtaatattgaaatggatataaagacacatgaaggcacgaaaataattgtcagtttgtgacttttttctgtgttgttttacccatttctctatgactttctctctgatatgctgctcctggtaactcactaacactagagattaatgaataatccttttgcaaatgtatcttcctttactcttaatgctccaacataaagtatttggaaaactcaaaagtcagtttccatgagaaatatttagaatgtttctgtggcagaataactccatacta

SEQ ID NO: 161354 - DNA, 498 bp, Homo sapiens
ttctcccagtgctcatgcagacccccagtctgttgcaggcatgcccaggcaaaaccctgtgcaggttcccttttctgcctcctgcatctatcaattactgctcaatgtttgccttttttgaagccattcgaacagttgtctacatttgattgtccaaaactcagtaattgtcacgtgtaggctatggtgtgtttacacctctacttgttgtatttcacgatgtacagagawacctttaggtcaaacttaaaatatgtaaggaggcagctttagactaaacttgatttaatgttatgcagcacccaggtgtatttttgtggaagggtcgtgtagataatcgaccattctactggggaaggaagttttttactttatttctaacaatacagtattacttaactcaccaaaactcattagtgaccaggcatagtggctcacacctgtaattccagttctttgggaggctcaggtgggcaaatggcttgagcttaggaattc

SEQ ID NO: 161355 - DNA, 341 bp, Homo sapiens
acagtcaaggaaagcttcctcagccttgctagagacccagacatccaaatacaagaagcacaaagaacacctgggaaattcatcacaaagagatcttcacctatgcacattgtmatcaggtcatccaaagttaagacaaaggaaagaatcttaagagctgtgagacagaagcaccaggtaacatataaacctataaacctatcagattaacagcagatttctcagcagaaactctacaagcgagaagtgattggggccatatcttcggtctcctcaaacaaaacagttatcagccaagaattttgtatccagtgaaactaagcatcatatatgaaggaaag

SEQ ID NO: 161356 - DNA, 529 bp, Homo sapiens
agtgacagatcatcaattaggcattaggttctcataaggagcagggaacctagatcccttgcatgtgcagttcacaatagggtttgagctcctatgagaatttaatgctgtcggtgacctaacaggaggcagagctcaggcattaatgcaagcagtggggacagtgtgtaaatacagatgaagctttgcttgctcactggcygctcacctcctgatgtgcagccgggttcctaacaggtcacggcttggtgctggtccacggcctgggagttggggacccttgcagcatgtgtagatttgtgtaaccaccaaagcaatcaagattcagaactaagccaggataacaaagatctctctggtgctaccccctatagtcacacctcttctcttccttccatcattcctaacccctgaatatccttaatctgttgtttatttctagaactgtgtcatttttgagaatgttgtatcaatggaatcctacaggatgtgaccttttggaattgactatttttttcactcaacgtaa

SEQ ID NO: 161357 - DNA, 465 bp, Homo sapiens
ctcccaccccgactctgcaattcagcctccacatcttgctcctctccctcctccactttcctctccttcctgtccatcaggactaagctactccggacggtacctcggccctcagatgttacagctgaggaaggacttacttttcatcaatgtatttatccctgagtttcactctgaggatgatgatgataatgatgacagtaatgagctcaatccttttatcttaggtagagaattaaggttcacctgtttcttaaaaatttttattataaaaaayaaatccttatttatataaaaaaacctgacatgtatgaaggaaaaggtaaaagtcttcagttttctatctcacccccatgccattttccagaggtgacccctgtagagcggtttcctgtgtattctttcaggtatacctatgcatttacacatgcatatgtttataaactatttatataaaatgaatca

SEQ ID NO: 161358 - DNA, 497 bp, Homo sapiens
gactctgcaattcagcctccacatcttgctcctctccctcctccactttcctctccttcctgtccatcaggactaagctactccggacggtacctcggccctcagatgttacagctgaggaaggacttacttttcatcaatgtatttatccctgagtttcactctgaggatgatgatgataatgatgacagtaatgagctcaatccttttatcttaggtagagaattaaggttcacctgtttcttaaaaatttttattataaaaaataaatccttatttatataaaaaaacctgacatgtatgaaggaaaaggtaaaagtcttcagttttctatctcacccccatgccattttccagaggtgacccctgtagagcggtttcctgtgtattctttcaggtatacctatgcatttacacatgcatatgtttataaactatttatrtaaaatgaatcacactgtatatatttatttcttctaacattcctttagaattct

SEQ ID NO: 161359 - DNA, 593 bp, Homo sapiens
agatctagatatggacgttatccccttaggaaacaacactgcattacatagcaaaggctgcagagacattcgtcccctttagccctgttctctcccttctgggagtttatcctaaggaaataaagcaaccaaagcagaagctgttgaccagcagatcaatagctgtggtgaaaaaatgagaaaccgccaggcacagtgggttatgcctgtaattccagcactttgggaggccaaggcaggaggattgcttgagtccaggagtttgagaccagcctgggcaacataatgagaccttgtctctactaaaaatcaaaaaattagctgggcgtggtggcacacacctatgagtgggaggatcacttgagcccaaaaggtaggggctgcagtgagccctggttatgccattacactccagcctaagtgttagagtgaggaagagggaagatgaggggaggtgaggggagggagggagggaaggtggaagaaggaaggaagggaggaaggcagggagggagggagggagggagggagggagggagggagggagggaggaakgggagagggagaggaaaagaaaaggagagaatcaacaa

SEQ ID NO: 161360 - DNA, 538 bp, Homo sapiens
ggacactttaagcgcttttggatggtggggggatgcagcccaccctcggccctgccctgcagtggggctggtgcagtgtctcctgcacctagagcacccacctctctgagggcaaatccttgagcccacgcccaccccctcccactgaggaattatctccgagcaaagcctccactcaattgcccctctggggctgaatcacacatttccccctttgtgctgacccagcctacggggtgtgtaggtatctccttggccccattcattctgcccctgcaagtcctgccaggctcccgatggcattctgggtgcctgtgcccctcttctcccaggaggacaggatgagccagctatcccactgccaatgccttctggaatccgggcygtccttcttggtcccctgctggtcctatttccaaggctagctgggtttcctgtatccgagaggctcctgtgcctcagacctggtgtgatgaagtcagcaggccccagctcagtcttccctccccctcccttcactcagtctcctcacttataa

SEQ ID NO: 161361 - DNA, 538 bp, Homo sapiens
ggacactttaagcgcttttggatggtggggggatgcagcccaccctcggccctgccctgcagtggggctggtgcagtgtctcctgcacctagagcacccacctctctgagggcaaatccttgagcccacgcccaccccctcccactgaggaattatctccgagcaaagcctccactcaattgcccctctggggctgaatcacacatttccccctttgtgctgacccagcctacggggtgtgtaggtatctccttggccccattcattctgcccctgcaagtcctgccaggctcccgatggcattctgggtgcctgtgcccctcttctcccaggaggacaggatgagccagctatcccactgccaatgccttctggaatccgggccgtccttcttggtcccctgctggtcctrtttccaaggctagctgggtttcctgtatccgagaggctcctgtgcctcagacctggtgtgatgaagtcagcaggccccagctcagtcttccctccccctcccttcactcagtctcctcacttataa

SEQ ID NO: 161362 - DNA, 538 bp, Homo sapiens
ggacactttaagcgcttttggatggtggggggatgcagcccaccctcggccctgccctgcagtggggctggtgcagtgtctcctgcacctagagcacccacctctctgagggcaaatccttgagcccacgcccaccccctcccactgaggaattatctccgagcaaagcctccactcaattgcccctctggggctgaatcacacatttccccctttgtgctgacccagcctacggggtgtgtaggtatctccttggccccattcattctgcccctgcaagtcctgccaggctcccgatggcattctgggtgcctgtgcccctcttctcccaggaggacaggatgagccagctatcccactgccaatgccttctggaatccgggccgtccttcttggtcccctgctggtcctatttccaaggctagctgggtttcctgtatccgagaggctcctgtgcctcagacctggtgtgatgragtcagcaggccccagctcagtcttccctccccctcccttcactcagtctcctcacttataa

SEQ ID NO: 161363 - DNA, 616 bp, Homo sapiens
gtttatacaacattttaccctttgactctctgaggagttcatctttgctcttcaccctgctggagtccttgcctcaggccagaagagttatcatcagagccacgcaggagacagttagcccttctgtgttgaaaaaattgctctctagccaggcatggtggctcatgcttgcaattccacactttgggagaatgaggcaggaggatcgtttgaggccaggagtttgagaccagcctgaacaacaaagacagactaggtcactacaaaaaaaaaaaatgttaaaaaattasctgggcatggtgacacatacctgtagtcccagctactcaggaggctgaagtgggagaactgcttaagcccaggactttgaggatgcagtgagctatgatcatgccactacacttcagactgggagacagagcaagaccctgactctaaaaaaattctttaaatgcccccatgtgttacccatgttagattgtgtttctaggactctttgtctacacactttatttcaggtaatttacggaccaacaaaatttattgttttgttacaagtcagtgggaaattcctttgcattctaaccaaatgtttaaaagataaagtcagcaatgc

SEQ ID NO: 161364 - DNA, 591 bp, Homo sapiens
tgggttgactggtcacttagcagttctgaccgccagcctcatcatctataaatcagtcttaatacttacctcatatgctcacactgtgaagattaaacttgatattgtacacaaagctcttagcacagtacctggaatgtaataaagccttgacatgtttttcatgtctctatttatttattttatcctgacagttaacaaaggtttctggatcagaagcagactgattacttattgctgatcttagcatcagtttcccatccgcagtcctccatggagcaaaatgatgagggcagatatttcctgtgcatgcaaagcaagatttgtacacaggagagaaagaaggcttgcaattaygaacctcagagcttatgtaggagctaaacagctaccgttcctgcttcctaagaaaaacagaaaaatttttggtctgtgatgtaaacaagtcttctctgagacaaacgcgagaaggtcctttggtattgacaattctttgaaacatgaacacgtggcaccaaaatagaggaaacctgtacatctccccaggatatttcactgttttagctttcacggtttttaccattcacttat

SEQ ID NO: 161365 - DNA, 635 bp, Homo sapiens
tgtcagaaatgtggaagggaattcaaagggagagtttgaatatccagctggacaatgagcagaccatatattataacagaactctgacctgcaacctctgcagcaatcaaattcagtcagaatttagtcagaatttartcaaggattgagagcttccctatttttatccctgttcccaacccagctccaatcaggtaaggctggatatactcctcacaacaaacacataagatgccccctcctagttgccatctccggcttctccatatcaacaaatttcagtcagaggatatctgaagagttctcttttttttccctcaccataaagcctccccattcctcttcctgcctttgaatctctgttctatgcaggtgatggtggctgactcctatgtgacagcatgcttgaaataaatagcattcgcttcttctcatttgggttatcttcatttatttccagaaaaggtagcagcactttaccttaaaagcaggagaaaatagctcagataaaaatccaagcctggaaccatttactcttgagtgcagcaaaacacagctcccctatataggtgagtagtgttttctctaaatagttgcaatatattaatataatgtgcgatatcactaaaccagaa

SEQ ID NO: 161366 - DNA, 635 bp, Homo sapiens
tgtcagaaatgtggaagggaattcaaagggagagtttgaatatccagctggacaatgagcagaccatatattataacagaactctgacctgcaacctctgcagcaatcaaattcagtcagaatttagtcagaatttaatcaaggattgagagcttccctatttttatccctgttcccaacccagctccaatcaggtaaggctggatatactcctcacaacaaacacataagatgccccctcctagttgccatctccggcttctccatatcaacaaatttcagtcagaggatatctgaagagttctcttttttttccctcaccataaagcctccccattcctcttcctgcctttgaatctctgttctatgcaggtgatggtggctgactcctatgtgacagcatgcttgaaataaatagcattcgcttcttctcatttgggttatcttcatttatttccagaaaaggtagcagcactttaccttaaaagcaggagaaaatagctcagataaaaatccaagcctggaaccatttactcttgagtgcagcaaaacacagctcccctayataggtgagtagtgttttctctaaatagttgcaatatattaatataatgtgcgatatcactaaaccagaa

SEQ ID NO: 161367 - DNA, 568 bp, Homo sapiens
agttctgaatttgaagagcatcacagtagcttctstaaccattttgcatcatctttctacaagagatattgtaacattactaagtcaagtcgcactcagtgaatgaaagtttcattaacttttaattctatatactttgcaaggcatcaaaagacttacaagtataagaaacttcaccaccatattacaagagattatttgctagtatgaaaacaaaggagttgatggagtcaccagattgtgagaagtcagggggacagtctagtagacatgactgtgacagttaaaaatgaggtctgaaactcaggaaattttcagatgtaaatataaattaggaatgatctgcatagaggtaatggtggagaaggatgaggtgatggagagaaagtagtatagaaaattcaataaaaccaagatgattggaagagtaggcagagttggaagagtgaaatatttcattagtattttaattctgtaaaattaaagtataagaacaagaagtaacaaatatgttaaatggtgcacaatggagacagggtttgagattaattaaaggtgatagttgatg

SEQ ID NO: 161368 - DNA, 441 bp, Homo sapiens
gaggtcatactggaataagaatgctcctaatccagtattactggtgcccttgtaagaaggaagccatgtatggacagatacagggagaaaaccatataaagatggatgattcgcctgactacaagccagcaagtgccacagattgccagcaaaccaatagctaggaagaggcaaggaaggattcccayaaaggtctcacaagtagcatgactttgccaagaccttgattttttacttttagtctccagaacattaagatcgtaaatttctgttcttttaacccatccattttgtggtactttgttacagcagctctaggaaactaatacaatgagccaaggtcttgagtaaacatcagagtaaaatatacaaatgtcaacaatcacataaggtgctcaatgtcatcagttactccgaaaatgcaaatcaaaatcaaaatga

SEQ ID NO: 161369 - DNA, 535 bp, Homo sapiens
ctgtgttagtttatcctacaaactaagaatggcttctacagttctaaatcattggggggtgggacgtcaacaaagaatattttgtgacatgaaaattatgaaattcagatatcagtgcctatgaataaagtttcattgaaacgcagccaggtttgttttatgtgttggctgcttttgcactacgacagttcagctgagtggtttcagcaaagacccatggcccacaaagtttaaaatacttaaccttctggctctttacagaaaatgtgctaactcccggtttagccatgctgaacacagcactgaatatgttcccatactttcatacctttcctcatccagtttcttyggtcgaggctgctgtccctgcatcttacttgttctcagagttttgctttttcagttcttgtaacaccgtcatcatctcaaatatgtcactgtatcatacttaatcacacccaggtctttcctttagctaaaagaaatgtaagggccatgactttcagtcatttcattttctgcaacatgcttctat

SEQ ID NO: 161370 - DNA, 578 bp, Homo sapiens
gattttcttagattttgcatgtccattgcccttgttctggcaggtagtgaataaaggactgaaacaggctgaaaggatttacactagtactttttcatgatgttttcaaggagggtgaaagaaaatagatgggaaaartttgcatgtcatttcatactgatttgcataaaactgcatgacaaaattggactgaaagaattcatatagttagtgagagataatcacccatgtttcctctagctgcggacaagctcttggtttattttgcaatcatgtattttaaaatgcaagaagaagggaccaaaaagagtttttgtggatttgacccaaactgagacaaatcatcatttgggtatcatccaacactgtcaaatcttagtttcatttgtcatttacttaatgttataaatggttctttttaaaataagttataattttaaaaatgatcaaaattccaaaatttcatgggattgatggaagcatttttaattttttttagtaaggattatatgccaaagcagagacgccagcactgctttatcagtgaataaaagagaaataattaattttaaccctgt

SEQ ID NO: 161371 - DNA, 585 bp, Homo sapiens
cactaattctttgcctttcacttgcttctttgtgcctgttctgcaaacccccagttctggttggatccagctctctgcaaatacagcttgactacttttcccagtctccttgacagctggctgaagccctgggactgatttctggtcagtgaaatgtcggcagaaaaggtggcaactacccccgggcttgacccctaaacatctgtgaaactgtctgggtctttctcttatgatcgtgaaggaattttggtggacttcgaggttaggagtagggtgtggaggggatgtagttatagacactygatgtggacaattgacgatgtgaagagcgactgctacccctaaacctctttggaatgtgacaacagagaggaaaacaaaagccttcactttgttatgtctctgagatttgggagctgcttgttagcttcatttgcttaccctaatcaatagaattaacaccaagaatgggtccttcaatgctacaagacaaccacgcgacatttcccaagcatgttcacactccttgtctcctaaatgattttctcatacgcttcccccttttctttcctttcctcactctct

SEQ ID NO: 161372 - DNA, 571 bp, Homo sapiens
gccaaatgttgagaactgttaagtaatataattacagtcgttcttttatccgtggttgcacttgctacagttttggttacccttggtcactgaaaataggtgaatacagtacaatcagatattttgagacagagagagaaactacattcataaaacttttattacagcatattgttataattattctgttttattattgttgctgctgatctcttactgtgcctaattgataaactagactttcttttaagtatatatgtataggaaaaacaacatatataggactagatacaatctacartttcaggcatctacagggggggtcttggaatgtatccacctcaaataggtgtaacaccaaagcagcaaaaaactaacataactaacttcatttttgtttaagggacctttacctattcccacagataggcaaggataattatagagcagtgagatcatacacaaaaacagcaatcatgtagtttttcagaaagaactctgagtttaaaggacaagtaactatgttttgttaaagatttatggaaatactgtgacctgaccagggaaaaga

SEQ ID NO: 161373 - DNA, 615 bp, Homo sapiens
gtaggatgctttaaaattatactagcataaagtttttaaaaataatttcaactttcattttagattcaatagaggtacatatacaggtatgtgacatggttatatcacacgatgctaaggttggggatgcaaatgctctgtcccccagatatagaatgtagtacccaaaagttaggtttgcaactcttgctttccttccttcatccgcattctgtgagtccccagtgtctattgttgccatatttatgttcatgagttctcartgtttagctcccacttataaatgagaacatgcagtatttgtttttctgttcctgtgttaatttgtttgggataatggcctccagctgcatccacattgctgcaaaggacatgcttttgttcttttgtatggtgtttagtagtccaacatgcatatgtaccacattttctttatccaatccaccacggatgggcacccaggttaattactgtgctatagtaaacagcactgttatgaacataaaagtatatgtctttttgggagaacgatttattttcctttggatatatactcagtagtgggatttctgggtcgaacggtagttctgttttacattctttgagacattaaaa

SEQ ID NO: 161374 - DNA, 606 bp, Homo sapiens
ttaccttcacctccaaagctgagtacagctcagctttgttgaascttttaacatccgtcctcaactttaaggaaggggatatgacatgggtaagaatgatcacaccagagaacttcagcagtacaacttctggctcataactgattttttgtttttgtaaatttgacacttaagtaaacatgatttcaaaccataattcaaacataccttgatcctctaggtagtaccaggtggtactaattctactgaaactattccaaaaaaatctaggaggagggactcctccctaactcattctatcaagccagcttcaccctgaaacaaaaacctcacaggacacaacaaaaaaggaaaaccacaggccaatatctatgatgaaaatagatgtaaaaatcctagcaaactgaatccagtagcacatcagaaagttaatttaccatgatcaagtaggcttcactcctgggatgcaaaattggttcaacatatgcaaatcagtaaattcgtcacataaacagaactgaaaacaaaaatcacgtgatcatctcaataggcatagaaaaggctcttaataaaatccaacatcctttcataataaaccatcaacaa

SEQ ID NO: 161375 - DNA, 641 bp, Homo sapiens
caaatagttgtttttttaattgatcatgatctttattttgcttacataaatttaggcaaataagtgaccagaccatattaccagaaatttacaaatgctctgagtcttatataacaattttttatgttactttctattcataccatacactactttgtgtatagtagggaaatgttataattaattgactgaaatttcttacatttgccaagattgtggtcacttcttgtagtggcccattctgttattgtttttaatataagaagttggctacttaatagtccaattatccttaatattatttgaaaactgccaggtgaatkcaatgaaataactaataataatcatgtgctacttaaatttgcttgaaaacaagcaagttatttttaaggttcctatgttaacttcattaactctcctgccctctaaaaaataaaaacaaaacaactaattatcaaacttttatgtggctatccttagcttagcaattactttatttaataataaaatataaataaataatcatatttcaaaaaattcagtcctaagaaatctcatttgcttataacattgcaaagttaaaaacaatcacattatctaaattgaataatcaattaaatcaattttgacctcattgtgtt

SEQ ID NO: 161376 - DNA, 528 bp, Homo sapiens
cacacacttacatagaaattaaacaacatgccttttaatgacttttgggtaaataatgaaattaagacataattcaagaatttatttgaaactaatgagaacaaagatacaacataccactatctctgggacacagccaaggaaggcaatgttaagagggaaattcatagcagtaaatgcccacatcaaaatgtkaaaaatatctcaaattaacaacctaacaccactactgaaataattagagaagcaagaacagatcaatcccaaagttagcagaagacaaaaagtaacacaaaccagaggtgaactgaaggagatcaagacacaaaaaaaccattcaaaagatcaatgaagtcaggaattggttttttcaaaacattaatgtgatagataggtcactagctagactaatggaaaagaaaaagagaagactcaaataagcacaattagagatgatgaagggaaggttaccactgaccccacagagacaaaaataaccatcagaaactattatgaagacctctatgc

SEQ ID NO: 161377 - DNA, 528 bp, Homo sapiens
cacacacttacatagaaattaaacaacatgccttttaatgacttttgggtaaataatgaaattaagacataattcaagaatttatttgaaactaatgagaacaaagatacaacataccactatctctgggacacagccaaggaaggcaatgttaagagggaaattcatagcagtaaatgcccacatcaaaatgtgaaaaatatctcaaattaacaacctaacaccactactgaaataattagagaagcaagaacagatcaatcccaaagttagcagaagacaaaaagtaacamaaaccagaggtgaactgaaggagatcaagacacaaaaaaaccattcaaaagatcaatgaagtcaggaattggttttttcaaaacattaatgtgatagataggtcactagctagactaatggaaaagaaaaagagaagactcaaataagcacaattagagatgatgaagggaaggttaccactgaccccacagagacaaaaataaccatcagaaactattatgaagacctctatgc

SEQ ID NO: 161378 - DNA, 493 bp, Homo sapiens
agtcatgaacaaaattaaactagtgactaattttaaattatggttacatttaagggaaaagtttagtttgataaagaccaatgatatatggtaaatgttatwtttaaaatatttgtcatttaaaaatgtttgaattaattcacttttagaacttaaatccatataaaccttatttaaatgttatttacataaatatccactattttgttatttcaggttgctagtaaaaatatctcatcactctgtttaaatgcattaaataaattaatagtataattatttataatgtaaaatgttaggatattacaaataaaatattcataagtaaggaatatatgaatttcatatattttgaaactgtatttctcagcacctttgtcttaacaacaaacctcattgagtccataaggtaaacaaactttatttcaagtatagttaagttttaccagggttcaattatgccactagatggagcatttagcactgcagagag

SEQ ID NO: 161379 - DNA, 374 bp, Homo sapiens
tatgtaggtattcccacatagtaggaaatgataacagataagaaagcattttgtgttaattaatttaaatatttgtagaaaacagtttataagtatcaaactgttgttttataaaatatgtgctatattctctaaacacagactttttattgagttatttatggcatgagtccaaggatggttttacataactgtgcagtaataatattctggttttagatgactatctctcaatgtaaatgctctttcttaggattatgtcaatttataggacagtaratcacacacacacacacacgcatgtacgcacgcacagatatgcccttcagaaggaagaagaaccattgcattgttctcatttgcgggaaagtgct

SEQ ID NO: 161380 - DNA, 588 bp, Homo sapiens
ttgggtggaagatactgcacccagagtacaatcccataataaagagaattataaaaataagataggactaaacctttaacagggtttaaataattayaagcagtgcagcacagccataggagccccagagccgcgggccttcttggagtaagagggccatgctgctaaccgtcttaaactggaggccatccccgggatagtacatttaaattttttgaaatatatgctataggtgcttagaaggaccaagattttgggctaagactcccaaagctattcccctccatctgtgtatatacaaaaagaacagtttagtcagtcctaatgagggtaagatcaaggctgagatgaaaacctattttaaagtgtttagagcatgcttcatatcattattccagcatagagatgttccccagttcccttgagggcctcatataaaggttttgctactactctgaaggaaagaatctatatattcgaaaacctggccatattcaaaaaggactgaagctattgtttatttactgggtgatatggtttggctctgtatcttcccatccccccaaatataatgttgaattgtaatcc

SEQ ID NO: 161381 - DNA, 588 bp, Homo sapiens
ttgggtggaagatactgcacccagagtacaatcccataataaagagaattataaaaataagataggactaaacctttaacagggtttaaataattacaagcagtgcagcacagccataggagccccagagccgcgggccttcttggagtaagagggccatgctgctaaccgtcttaaactggrggccatccccgggatagtacatttaaattttttgaaatatatgctataggtgcttagaaggaccaagattttgggctaagactcccaaagctattcccctccatctgtgtatatacaaaaagaacagtttagtcagtcctaatgagggtaagatcaaggctgagatgaaaacctattttaaagtgtttagagcatgcttcatatcattattccagcatagagatgttccccagttcccttgagggcctcatataaaggttttgctactactctgaaggaaagaatctatatattcgaaaacctggccatattcaaaaaggactgaagctattgtttatttactgggtgatatggtttggctctgtatcttcccatccccccaaatataatgttgaattgtaatcc

SEQ ID NO: 161382 - DNA, 463 bp, Homo sapiens
ttaagaaagattaataaaagcaagtaaaattgcttactcaatttttggtgaatcattgaatgacagaagttgtagtgatggtgggttaaatcaaagaataaatgtctgtaaattgaaaattgtaaaaaacactttctactaccatccagttcagaaacaaacaatataatcaatatgatgggctttctgggagttttaccatatcacatattgttgtgcatgcatatgattatcatayactttacagatttttattatacactaattcgtagtcattcactcattcattcatttgccaacccatctattccagttcggggtcatgagtgactcgagcctgtcccaacagctcagggcataagtcaggaatcaactctggacatgacaccattctatcacagggtactttctctgcacacaaacacacgcacacacacatacacatgtgcacacacacacactg

SEQ ID NO: 161383 - DNA, 463 bp, Homo sapiens
ttaagaaagattaataaaagcaagtaaaattgcttactcaatttttggtgaatcattgaatgacagaagttgtagtgatggtgggttaaatcaaagaataaatgtctgtaaattgaaaattgtaaaaaacactttctactaccatccagttcagaaacaaacaatataatcaatatgatgggctttctgggagttttaccatatcacatattgttgtgcatgcatatgattatcatatactttacagatttttattatacactaattygtagtcattcactcattcattcatttgccaacccatctattccagttcggggtcatgagtgactcgagcctgtcccaacagctcagggcataagtcaggaatcaactctggacatgacaccattctatcacagggtactttctctgcacacaaacacacgcacacacacatacacatgtgcacacacacacactg

SEQ ID NO: 161384 - DNA, 634 bp, Homo sapiens
ttaattttgttcttttaccagttccacacttttctgaattattgtacctttatagtaagcttcaaaatcaggtgctaatattaacagtatacttattccaactttcttctcctctttctcctcccctttatctctacatagatagattaaatattttatagagttttatgtctatctatctacacattttctttaatttgggtattctattattttgtatttgattaattttaaaataaatgtaatcaattraccccaagtttttattccccaaacgattatttcttaaatgagattctatttatagattaagaaaggattgatatcttaccaaacattctggtattgagtcttacaatccgtccacataaaggaaacatttatttaggacttcacaatttctttcaacattttttgtaattttctttctagtgatcttacccatctatttttcatatgtgtctaatgtgtttaaacctatttatgctatttggtttattagaacaatcaaaagtaaatattttgattactaaaaagagaattttgtctctaggagagaaaaaacaatgaaaactacagagaatctattaaagatgaggattcctagtagcaaaatcagacacaagtttcatta

SEQ ID NO: 161385 - DNA, 634 bp, Homo sapiens
ttaattttgttcttttaccagttccacacttttctgaattattgtacctttatagtaagcttcaaaatcaggtgctaatattaacagtatacttattccaactttcttctcctctttctcctcccctttatctctacatagatagattaaatattttatagagttttatgtctatctatctacacattttctttaatttgggtattctattattttgtatttgattaattttaaaataaatgtaatcaattaaccccaagtttttattccccaaacgattatttcttaaatgagattctatttatagattaagaaaggattgatatcttaccaaacattctggtattgagtcttacaatccgtccacataaaggaaacatttatttaggacttcacaatttctttcaacattttttgtaattttctttctagtgatcttacccatctatttttcatatgtgtctaatgtgtttaaacctatttatgctatttggtttattagaacaatcaaaagtaaatattttgatkactaaaaagagaattttgtctctaggagagaaaaaacaatgaaaactacagagaatctattaaagatgaggattcctagtagcaaaatcagacacaagtttcatta

SEQ ID NO: 161386 - DNA, 576 bp, Homo sapiens
tggcctggtctcaaactctggccttaccattagttttttttacatttgatcttagccaaaagtctgagaagaagaagaagttctaccattagttttttgggtaagtcacttaaatagctcgagtttttgtttccttcatatgaaaagtagagagaacaatacatatcytatagagttcttgtaaaaatgaaatgagggactctataaattgaataacttatgcctgccacatgtagtagctcattcctgtccaaatttcccatctttaggagtttaaaaaatttttttcaaaagtacagaattaaaatgaaatatttttcattgaataaattattttgcatgaattctggtaccatatctcactggcccaaacactggtattcaatcaagtcattaatcaaacttcttgcaaaatacatttattccatatagtttagacttaacagcatttctccagtgtgcttcccagaatgttactctcatgaaattcccttgtaaagaaggttttcctaatctcataaatttggaaaatgctgtactttatctcgttacctctctgaaaagtcttccagtcaa

SEQ ID NO: 161387 - DNA, 494 bp, Homo sapiens
ccaaacactggtattcaatcaagtcattaatcaaacttcttgcaaaatacatttattccatatagtttagacttaacagcatttctcmagtgtgcttcccagaatgttactctcatgaaattcccttgtaaagaaggttttcctaatctcataaatttggaaaatgctgtactttatctcgttacctctctgaaaagtcttccagtcaatatagctgcttaaatttgtttaagcctatgttttcctatttcatttggccatggaaatttttttaggtaatttctatttatagtgcatggaatacattttgtgaaatgttcatataagtgatctgatttgttccagcaacccagcatgcaaatatagtcatacttcttttgatgaaaaacaaaatgtgaaggcttgatttgccattattagcaggaacttactgtgtttggccaccatgttcatcattttctaccctacaccattctcttgagttgtctaagaat

SEQ ID NO: 161388 - DNA, 394 bp, Homo sapiens
ctaatacctctgatgtaatagcttgggagaataattggaggagaatggaagaaaagaaattttagctggaatttrgagttgtggatcattctatatctttaaaaatgaagttctgcccttagggaaaaaaattagtggttctggcctatagcaggctgtttcaatatcattctgtgcattgggacaactgaaatagcatttgttcagaaatgtttcaagtcatgatttctagaagtcaccccacttatcattatgtcagaatatttttcttcagtccattagaagcaggctctgcctttatgctgctttcaaggattccaaaagttcactcacaatgccagactacaataaaattcagcgtaatgtgaaccactcaatgatattgcctttcctt

SEQ ID NO: 161389 - DNA, 394 bp, Homo sapiens
ctaatacctctgatgtaatagcttgggagaataattggaggagaatggaagaaaagaaattttagctggaatttggagttgtggatcattctatatctttaaaaatgaagttctgcccttagggaaaaaaattagtggttctggcctatagcaggctgtttcaatatcaytctgtgcattgggacaactgaaatagcatttgttcagaaatgtttcaagtcatgatttctagaagtcaccccacttatcattatgtcagaatatttttcttcagtccattagaagcaggctctgcctttatgctgctttcaaggattccaaaagttcactcacaatgccagactacaataaaattcagcgtaatgtgaaccactcaatgatattgcctttcctt

SEQ ID NO: 161390 - DNA, 420 bp, Homo sapiens
ggcctagattaaggacaaagtcagtagcaatgagctcactaattttaagattacggttttcaagtactagttccaagtcaaaaaaaaaaaaaaaaagaactaaaatttcttggataattgcctgattccaggttkggaaaggaaatattaaagatgagcctgttatattttgtcacaccaattatcctggaagctctcaaaaacttgaggttctttcaaaaacacagaggaaccaactgagataaactttgagtaatcagagatgtggcaaactgggcattcataagtacgataactgcaatagcttgaagtgcattaatgttcataatgaaattttttaaaccattggtaaactttagaggatgttaaggaaccacacattatattaagaactgataaagggagagaataaagcatcca

SEQ ID NO: 161391 - DNA, 420 bp, Homo sapiens
ggcctagattaaggacaaagtcagtagcaatgagctcactaattttaagattacggttttcaagtactagttccaagtcaaaaaaaaaaaaaaaaagaactaaaatttcttggataattgcctgattccaggttgggaaaggaaatattaaagatgagcctgttatattttgtcacaccaattatcctggaagctctcaaaaacttgaggttctttcaaaaacacagaggaaccaactgagataaactttgagtaatcagagatgtggcaaactgggcattcataagtaygataactgcaatagcttgaagtgcattaatgttcataatgaaattttttaaaccattggtaaactttagaggatgttaaggaaccacacattatattaagaactgataaagggagagaataaagcatcca

SEQ ID NO: 161392 - DNA, 420 bp, Homo sapiens
ggcctagattaaggacaaagtcagtagcaatgagctcactaattttaagattacggttttcaagtactagttccaagtcaaaaaaaaaaaaaaaaagaactaaaatttcttggataattgcctgattccaggttgggaaaggaaatattaaagatgagcctgttatattttgtcacaccaattatcctggaagctctcaaaaacttgaggttctttcaaaaacacagaggaaccaactgagataaactttgagtaatcagagatgtggcaaactgggcattcataagtacgataactgcaatagcttgaagygcattaatgttcataatgaaattttttaaaccattggtaaactttagaggatgttaaggaaccacacattatattaagaactgataaagggagagaataaagcatcca

SEQ ID NO: 161393 - DNA, 420 bp, Homo sapiens
ggcctagattaaggacaaagtcagtagcaatgagctcactaattttaagattacggttttcaagtactagttccaagtcaaaaaaaaaaaaaaaaagaactaaaatttcttggataattgcctgattccaggttgggaaaggaaatattaaagatgagcctgttatattttgtcacaccaattatcctggaagctctcaaaaacttgaggttctttcaaaaacacagaggaaccaactgagataaactttgagtaatcagagatgtggcaaactgggcattcataagtacgataactgcaatagcttgaagtgcattaatgttcayaatgaaattttttaaaccattggtaaactttagaggatgttaaggaaccacacattatattaagaactgataaagggagagaataaagcatcca

SEQ ID NO: 161394 - DNA, 625 bp, Homo sapiens
aatgattcatccaagatcacatgccaaatagatagcagagccagactttgaaattattattttcaccattttccatctcctttctttgcaggagaaagacaatgcaaatagtcccaataagctcaccttatacctaaatcatatctaccaatgatactacagaaataaacacttttaagagaatactatcatcaaactgtttattagtttttctgctgttagccaaaattatctaatattaattccttatccaaaatgacttaatgctcccagctgtgtttaaatcctcttttcctatcccctcctctaacttagacacaaattaacactagcatgagaacgctaaagatcagttcatttgaggattcaagactttaggataaatattactgtttcttatatttcttatcttttctacctaccttatttctcaacattttcatacagctctccaaaacagttacgtgaaaataaattggtgtttrgttttaaaaaatactttgtttcctccctttaatatttttatttggccttatagtatcagtaggtaatttgacagagaaatattagatgatgtgaacttgtgaactgatagaaaaaataaggtaaaaagacctttatgcag

SEQ ID NO: 161395 - DNA, 583 bp, Homo sapiens
aaacataaacctacatcatgtaaagaggatgaaagcaaatctcacttctggcaaaattgatacaaaattttattttctgataattgcctctcttcctcttttttttcccacttcccatcacaactttatatgctgtgacatacattaaaatcttctattattcttttttaatgtgaaaatagtaacttctccactcatattcctcaaaatatacagagctttacaaagatagcttttaacaaaatataaattgaattattttcccaarggttaaggtactagttttaaaaagcatacaagtgagcagactaaatagaatgtaacagtatgtaaaaaggataagacatcatgaccaagtgaggtttattgtgggaacgcaaggttggtttcaactttgaaaatcaatcaatataattcatcataataagagaataaaggagcaaaaacataaggtcatttcaataggtgcagagtaacacttgaaaaaatttaacacttattcatgatttaaaaaaataactttcagcaaatttaaatagaaggaagcttcctcaatctgattaaaagtatatttgaaacacct

SEQ ID NO: 161396 - DNA, 583 bp, Homo sapiens
aaacataaacctacatcatgtaaagaggatgaaagcaaatctcacttctggcaaaattgatacaaaattttattttctgataattgcctctcttcctcttttttttcccacttcccatcacaactttatatgctgtgacatacattaaaatcttctattattcttttttaatgtgaaaatagtaacttctccactcatattcctcaaaatatacagagctttacaaagatagcttttaacaaaatataaattgaattattttcccaagggttaargtactagttttaaaaagcatacaagtgagcagactaaatagaatgtaacagtatgtaaaaaggataagacatcatgaccaagtgaggtttattgtgggaacgcaaggttggtttcaactttgaaaatcaatcaatataattcatcataataagagaataaaggagcaaaaacataaggtcatttcaataggtgcagagtaacacttgaaaaaatttaacacttattcatgatttaaaaaaataactttcagcaaatttaaatagaaggaagcttcctcaatctgattaaaagtatatttgaaacacct

SEQ ID NO: 161397 - DNA, 465 bp, Homo sapiens
ggtttctcctcacttctgaccactagagctggcacatagctattactgttctgccagttcctcttttctgttttatttgtagaagagttcatatgctacaggtaaactcagggaaaatttatratgatttaaactcaatgtactgatttgaaaacatcttgctttattttagctgttctagattataaagattaggataataactggattctcttctgtatcttcccaagcttaaatggcattaataaaggattcttttctcaattatatgtaaataaacaagcactaaatatgtatcaggtgctatgtgggtagtatgtggattttaaaaaatcattatatatgttcctacctttcattcttctcttataattggtgacagcagtagagtcatcttgagtcaaattgagaggaactaatttaacgctttccccccggttttctaaacatgaattatttgatact

SEQ ID NO: 161398 - DNA, 619 bp, Homo sapiens
cccccggttttctaaacatgaattatttgatactgatatccattcaatgcatatttaaccaagtatttgcatttccatttaatggactaagaaatggaaccaagttagagccaaataaatttcctaaggcctctctcttcatattcatttggagaagcaaagatttaaactagaattcttaatttccaataaactgcattgagttcatttctcactgtgtgtttctcttatagcaccagctaccatacctgtaaccaacaggctacaggttgatgttacaatgtctatattaacctagaccataatccttgatgccttgtcagcaattcccctagagctattgaccttgaatggtatgaactaaaacaaaagtaaataagtracagatatgtatgaaaaatttattgcttcaaatatatccgtgtatttgactatctcaaactatacaaagtgcaagcctacagtgctcatttgaagccagtttgaaatagagctgctgtcaccctacaaattccctatcaagttttccctctaatttatctactcatttaaattaaagaaagaatgaagtattacatccttttaaaattcttcttacttgaaatcacatgtggtagct

SEQ ID NO: 161399 - DNA, 617 bp, Homo sapiens
aagctgtgagaaagtggaaatggtgacaggcgtaattaagcagcctaattttgtgcttgtttggcacagagaagaaagtgtgtccataacgagtcattacagactgaaaggaagggtagggagagagcttcaaataattatttgaaaaagatcacaaatacttttacttttcataaatctccaatgtcaacaaaatgatctaggaaatatagctgtgattttatggaaagaaagaactgaagtcctttttttcagcatagaaggtacttgttcaactacactcctaatatttgagatgagagaacgggagtaggggaagaactactacactcccagtcctacatattaggtttattcccaagtaaatctccttgcccctcctgcatatttttctattgcaccattttttcctttcttattaaaactacctgtctgtcacaatcctactcatcttttcagtctaaactcaagaaccactttttccttgaagcgttatctgactactgcctcctttgtgctcctatcatagctcaacytttgaccctgtgcaaattatggaatttcttttttcttcccatatttttttctcccaccaaattctgagttcgttaggggaa

SEQ ID NO: 161400 - DNA, 483 bp, Homo sapiens
actgtattagtaatttgataccaccgtattccatggagaaaaaggcaaagagaatctaaatatttagatctgtgaaagatactagaaaaaaatagatttttaaatgcttctgatcctctcaaaatactcttgattttgactctatagtctatagaacacacaaaaaactgtaaaatgcatttgggaagagatcaygccatactcaaagaaaattctacaaattttgacagcattaaaaaaactgacttaagatatattttgttattgagaaaaaagtgtgcacattcaagaacataggatgtgtaatatttgtgataaattaagtcatactttgtgcttatactatgccctttattcaggagtgcaaaacacttaatcaaaaagagcatccttcacatatttaaagagtacattgaggcacagaaagtttgcccaaggcaagatagaaagtcgggtttatagacacaaaatgatctagaattc

SEQ ID NO: 161401 - DNA, 435 bp, Homo sapiens
ataaaccattttgctcactgttgtgtctgtagattctctagtggcaccttgcatgtagtagtatgtaataggcatccaaataaattggatgaatggaattctgggggtgggggaagacaagatcttactctgacacccaggctagagtgcagtggcgtgatcatagctcactgcaacctggtacttctgggcttaagcaatcctgtctcagcttcctgagtagctgggactataggcacacactcccatgcctggctagattttttattttttgtgaagacagggccttgttatgttgcctaggatggtctcaaattcctggrctgaagccgtcctcccctgctagcctcctaaagtgctgggattatagacatgagccactacacctggccttgagtgaaatactaatgtacagattctgtctatgaatatttg

SEQ ID NO: 161402 - DNA, 417 bp, Homo sapiens
actttctgcttatattagaattctaaaagatcattagccacctctgggatatgtttgattaatgggtttggttaaacaaaaaaggtgaggtcaaccgtgagcagaaagtttaaaaaaaatgtattccagaagaaacgtgtgcttcccaaattgcaaatgagaagttcattccttaggcatgttctaatcaatgaaaccatgtgttctactaagttgacctcaaaggagacttttagccaccctgcttatttgcctttcagttacaggaacgtgacttctgaggctagggtattagcacacctgctgaaacggtgttaatctaggtaatacaaagtccccaaacacatgctgttaataaggcaggtagtttwaaaaaaaaaaaaaagactagtctaatatctcacagtgagaaaaaat

SEQ ID NO: 161403 - DNA, 553 bp, Homo sapiens
agacagcaagtcaaactatttgtttgcagatgatttaatttcatacctaggaaactccagagtctctgcacaaaagctccttgatctgataaacttcctgatctgaaacttcagcagagtttcaggatacaaaattaayatacaaaaattagtagcatttctatacaccaacaacatccaagctgagagccaaattaagaatgcaatctcatctatactagctacaaaaaataaaatatgtaggaatacatctaagcagggagttgaaagatttctacagcaagaattacaaaacactgctgaaagaaatcagagacaacacaaacaaatggaaaaatattccatgctaaatcagtattattaaaatggcctcaaggcccaaagcaatctaccaattcagtgctattcctatcaaacaaacaatgacatttttcacagaattagaaaaaaactattccaaaattcatataaaaccaaaaaaaagagaaaaatcccaaatagccaaagcaatcttaatcaaaaagaaataaactagaggcatcacattacctaa

SEQ ID NO: 161404 - DNA, 544 bp, Homo sapiens
tgtgagaaagcagaaaagccagttggcacatacaaagtgatccatcgtgagagaggaagcaagagagggtctaggaagccgaactgccttttataacaacctattttcagtgatttatccagtcatgtgagagcaagcacttactgcagcaggagggcattaatgtatggatgagtgatctgccccattacccaaataccttccactaggccctacctcccaacactaccacattagtgatcaaatttcaacatgagtttcaaaggaaacaaactaccatagtaactgagcttatgttcattttctctgaacttcagattagtttctattgctatgttgttaagttgacctttccatctgcattgtctaatctggtattargttcatctagtgagtttttatttcaaatatttaatatttcaacactatacttctcacttagtttttaaaaaatacattttatttctctcctcattatattcatattttctgtaagtccttcagcatatttttaatagctgcctgaaagttctttgccaatttc

SEQ ID NO: 161405 - DNA, 550 bp, Homo sapiens
tagcaaccatcatcaattcttttttacttcctcttccaggggaaagtaaaccatggctacctttaagtaaaccactataccttgaagttaaccatggctgtgtgccttaatttggcaaataaaatgtgtcattttcaggcagaagatttgaggcagtgcacaatttgctaagttcattttttccttgttatgatgctcatggaagcttgcaatggcatgaaatatccatcagtgtggttctrgagagattgataagcagaggcccgcagcatgccctagcctaatccgatggatacagctgttggtaccaagaaatggaggtgttgccttaaaacaacctaaaatgtgtggctttggcttaatgattagtaggtggcaagggaagtttggaagtaagaaggaggttagctcgtgttattctgggatgagagcttagttggtggtaggttaacctgggaggtatatatttgtacttctaggtaagtacgtggcaaacattttctgtaaagagaaagacagtaaggattttaggcttttcaaactgtatgag

SEQ ID NO: 161406 - DNA, 599 bp, Homo sapiens
tctatgatttatatagaagattatttactggactagaaaaatatgcttatgaagaacaagcgggaactaacatttgttgagtgtattatatgaattaccacatttactcttcatgaaaaccctaaaaaataggaatcgtttttttcttttttattgatcataggtagaggagactctacctatgattaaagtgatgatccaaattgagatctgtttgactttgaaatatgggcactgaaattattagcatttaaaaaatatatcaataaccatttcccctttaaataatactaagacagaaattgcattaaaccaattagagatttttaaatatttgaaaaggaatcaataaatatgatacatcatataaacagaatttggacaaaaaccatatgatcatctccatagacacagaaaacgcattagataaatgaattttaaaagataaaattcagcatamcttcatgataaaaatccttgacaaactaggcataaaagtaccatacctgaacataagaaaggctgtttatgacaaacccacagccaaaatcacacttaataagaaaaagtcgaaagcacttcctctaagaactggaaca

SEQ ID NO: 161407 - DNA, 600 bp, Homo sapiens
gtatgtgcagaacaggttgtacaggcactgttktaagcacagctaagtaataccatgagtgaaagtctacttttacctatagtagaatcgtgttgctgatttttgtggcttctgttttcttttttaggatgtagaacaaaagaagagtggaaactactttttcttggatgattagactgactctgagaatattgataagccatttattaaaaggagtatttactagaattttttgtcatataaaacttgaatcaggattttatgccccacatactctggaacttgaagtataatatacttaatataacataaaaagccagttgggttctaaattgtagttgaaacacagaaaatgccacttttctgttcctgaagaggctcttttgtgcataatattctaaaatgaagacatttcaagctatacaaattacttccaagttttcatgatgtatgggaagattttcagtaggtgtattatattcacggtaccaaatgctgaccagtgttgctccattttttaaatcttgaaaagggtttctgtacttacctggtttgccaagtatgccagtgtaatgaaactgcccttattttaaaagccag

SEQ ID NO: 161408 - DNA, 487 bp, Homo sapiens
tccaaatgagaacagagtgcaacatgcaaagggaacctctagtgaatactgcaaagactggaagaaaacagaatgtaagatgttacctacctaagggtaacaagctataaaatacaaagcaaaaccattttctagcagcatcctctagaaaagaactagaagtcacaatcatattatcttctatacaatagttccagccctgacaagtagaacatgcaagtgtaaagtgaaagtgatacacaascaatggtgcgggggggggggggaggaagaaaacaactctagaaacctgtcaagctaaaaatttttaacatttcttctcacaaaatatttagaatctgtcagtgcattagtgttaaagtggcattaaaaaaacttctgcagttctaactgatgcagattattttcaaaatgcatagcatctacatttctttcgagtaggcaccatgatatttacaccagtgctaagaattcttggtggaaacag

SEQ ID NO: 161409 - DNA, 599 bp, Homo sapiens
ctctcagctgtaagaatgacactgagggtcattgttctagtgtcaattttgaacacttttgtcttcgaatctgaaatatccgcaaatccttctttgtttgcaggagcctgttaactataatcttcctctccaagctttactgtgcctaggttttctattgaaaaacaagtagggaatccccttgccccaattattgaaacygatacagaaattgaattaaaagtgttcacacagttaattaacagttctacaaagaatccatgttcatttttcttaaatgcattacaatttatcactatttttatataaatcagtttattaaccacttctggtatgtttttattctactgtaaaaatcaagccagggtagtgacatgcacctatagtcccagctattcgggaggctaaagcaagaggatcccttgagcccaggagtcccagtctgtagtgtcctgtgatcactgccctcagccaggacaccatagcaagatccctgtgtctttttaaaaaattgtcttttacagtcttttggtttttaaaatagtttgaaaaattaaatattttagtagtttaacagaaataaagtttaagcaatttcg

SEQ ID NO: 161410 - DNA, 463 bp, Homo sapiens
aaattaaaagaatagtatacagaattcccgtacaccctttgcttagaggctctttttaagtttctctaattgtctcattaatttcctttgaagaaaaagaatgaaacccagaatcggacatgatacccagttgtcagctctctgatctccygcaatctgggactggttcctgaacttcctggactttcattctctaagtttgcatgccagtcatttcgtggaatgaccctccgctgggggttctctggttttcttcgtgattagattcaagtatgcattttttaatgcattaaaacacattaaacataaacaaaacataaaacaaaaacacattaaaacagatatggtgttttcttctgcagcttgtaccctatcccatggctgatgaggcatgtttgtgccacttctggtgatgtaaattctgttcccttcattaatatggggcctgcctagtttggtgccc

SEQ ID NO: 161411 - DNA, 580 bp, Homo sapiens
tgatattgacaatgattgcctcggtccactgtggaattcattttgcacatgacagaaacagaagtaggactctaaatttacagcaattttctcattttttcttcctcagacaccatataaggaggtgagaattaaaatgctgagtggccgcaagtcactcaaatttagctactgatcaatttttaaaatktattgcttgttttatttaaccaatgtaccctgatgctttgtgcctggttctttgctagacctaatagaagcctcttactgcataactctctcagcttcagtttccacaaagtgcaccagtgcttctcaaactttagtgtataaatgattaacccagggttcttgttaaagtggagtttctgactccatagatctggcataagcgcagagactcactaattcccaggagatgctaatgctaccgttgaaggaagctgacttggagcaccaagggtgtagaataaagattagagtgctcacttcacaggattgttgaggcggttgtgagatctgcgtggaacaatgaagatgacaaacttagcaagctctaattagagtgtgaagttcattg

SEQ ID NO: 161412 - DNA, 648 bp, Homo sapiens
taaatactagaacattagaaacatcaagtgaataccatgacaggaatcaaagattgagtccagagtagraaaaagattcacgtctctcttctgctcacttcaaggcagcaagtggcaaaagggccagaaagatttcaattagccctttatctcattttaattattattttgaaatgagctgctaagcacacacagatgaagtgcattggtataaacatgtatatttgtacctatgtgatatagctatacaaagaacacacacatatgaacacaccacactttggaaaactagtgattcatgttattttccacattcttctgaagttattttttccccatgtgctaggctagaagtggggctgatggaaacgtctccggaattttcctctattaaacattcaactctgatgttctctgttaaaataaattcagtacctgtgagctaaggaaatgtgaccaagagtcccttagttaggctcagtaacccatcccttgagttatcttgattattgaaatgatttatttttcacaagacttgtaatttcacgcaaaaggaaggaagggggaaaatcacaaaacaaacgtggattgttcaggaatactttcagattgcaaatgaaaagctgtaatagacaagtcatcaactat

SEQ ID NO: 161413 - DNA, 648 bp, Homo sapiens
taaatactagaacattagaaacatcaagtgaataccatgacaggaatcaaagattgagtccagagtaggaaaaagattcacgtctctcttctgctcacttcaaggcagcaagtggcaaaagggccagaaagatttcaattagccctttatctcattttaattattattttgaaatgagctgctaagcacacacagatgaagtgcattggtataaacatgtatatttgtacctatgtgatatagctatacaaagaacacacacatatgaacacaccacactttggaaaactagtgattcatgttattttccacattcttctgaagttattttttccccatgtgctaggctagaagtggggctgatggaaacgtctccggaattttcctctattaaacattcaactctgatgttctctgttaaaataaattcagtacctgtgagctaaggaaatgtgaccaagagtcccttagttaggctcagtaacccatcccttgagttatcttgattattgaaatgatttatttttcacaagacttgtaatttcacgcaaaaggaaggaagggggaaaatcacaaaacaaacrtggattgttcaggaatactttcagattgcaaatgaaaagctgtaatagacaagtcatcaactat

SEQ ID NO: 161414 - DNA, 333 bp, Homo sapiens
aattcttctctgaaaagacttttgggttgaggtataaattatgacataggacaygggataatttggcagtacaactttctatgtgaaggactgtgatgagtgaggctgatggaataagaacaagataagtgtgcaggcttcaatgggagatggttgaatgagatttggagaggggtcagtaaaaatttggattttattcggagagcaacgggaagcctttggaaggtttaaacacgagagtggtatgattcattataagagtatttgttttacaataaacaatgctcatctcctctgttatctcatttaaccatcaccacaaacatgaactct

SEQ ID NO: 161415 - DNA, 489 bp, Homo sapiens
ggttttaacatcatatcatgaaatgaggtactgaatatggtaagaaacacagttttagatcaccttcccccatctctcagcagtggctatgtggcacagagatagaacctgtgtgcttggggaagggagagcaaagatttgtaagactttccattggaactcagagctgttctgactcggtggaaatcagcaaacagcaaaattcagcctacatccacagagggatcattttgaccaaccttagacagaggagaattgtccagcccagtggtcagaatgttgagttcctcctagccccatcaccatgggctaaagcactctggggttctaaataaacttgaaaggaaatataggcctcaaagactgcaaatcctgggcaattcccagkgctggctgtgctgggcttgcagccagtggacttggggtgctcatgccctagtgagacaatagctgggttggccatgggagtgctcgtgttaccctccccaa

SEQ ID NO: 161416 - DNA, 591 bp, Homo sapiens
attaatttttaatattctaaaggtgcttactcttacaaattaataaaaattagatagaaagcacaatagaagaacgtacaaagataaatgtttcttcacaaaacggccaaatcagtaacacaggctttgtgttcaaagtattgattagtgcatacttcactaataaagaatctatagtatgtattttattagtattctagaaaatttcagacaatcagcaaatggaatgaattttattatcaatatgccatagaaattcagtcatctaatttttctagcttatgttatgttgagcctgcwtgtggtctctctacctggaggagggacaggataagaccagcagtatcccatatgattccaaatggaagtccaataatgtattggaatttgctacatctcatatccaaacagtgctttatctacattaatggatgagtttgtgattttaatatggaaataaatgagtgattcgagttgttcaaaatataatttttgaatatacttttgtgattgatagttatgcctcaatcactatgaaactcagagtattattaaaaagaaccttcccctctttcttagcactaaattcag

SEQ ID NO: 161417 - DNA, 591 bp, Homo sapiens
attaatttttaatattctaaaggtgcttactcttacaaattaataaaaattagatagaaagcacaatagaagaacgtacaaagataaatgtttcttcacaaaacggccaaatcagtaacacaggctttgtgttcaaagtattgattagtgcatacttcactaataaagaatctatagtatgtattttattagtattctagaaaatttcagacaatcagcaaatggaatgaattttattatcaatatgccatagaaattcagtcatctaatttttctagcttatgttatgttgagcctgcttgtggtctctctacctggaggagggacaggataagaccagcagtatcccatatgattccaaatggaagtccaataatgtattggaatttgctacatctcatatccaaacagtgctttatctacattaatggatgagtttgtgattttaatatggaaayaaatgagtgattcgagttgttcaaaatataatttttgaatatacttttgtgattgatagttatgcctcaatcactatgaaactcagagtattattaaaaagaaccttcccctctttcttagcactaaattcag

SEQ ID NO: 161418 - DNA, 584 bp, Homo sapiens
gcaggtttcagtcaaaaaatcccaaagcaggtctccattttcattaccatcaataaagcagtcagatatatccatggtggacaaaaggtcatagcactcatacttaagccctaggttgtccagcatctgagtgaggtcatctgatgtgatatactggcagaggtcatcctggggaaagcgtgatccgtactttttccacagcttgtcccagccactgcttcctgtgcaataaaacacaagtcatgctttcatttattctttctttcatttgcagtctgccagaaagtacactagatgcttagaatagaacaaaataataatcttgtcctttgtgcagctcatatttcaaggagtacaggaggagagagaaaaataagtaaatatatggtgataaatgctaaatgaaaaagtaatctgagtaaatgctaagagggttaaagactttgatgggctgctgttttaactagggtggtcgcagagtctgtctaataacctgacatttgagcagagaccygacagcaagacatggagatatcagggggaagatgactccaggagagagatgagcagctgcaaaggacctg

SEQ ID NO: 161419 - DNA, 628 bp, Homo sapiens
ttctgtatggaacagcacattagaatgactcaatatacatttaataaggtcaccctggcctcaccgatgggaagagagtactggcgcataagggcagaggtggggagaacagcgagaaggctactgtaatcacctgggggataggtgggggtgggtcccacagaccagtgagctgggaggtgaagagaagtggtgggagtttttatgtgttatactccgagatccaacagggctcgccaacaatttggatgtaggayatgggtaaaaagaaagaatcagtgatgaccccagtaatttctgtgagggcgcctgagaagacagaattgccattgttggagagaagaatgaagacgagcagttttgtatcatcaggcctctggtttcaggaatataaatttgagatacctactggacattcaggtggtgatatgaggaaggtagttgttagtctggaattcagacaagaatctttaacagtgaaaattaaaatggaaagaaagagcacagtaaatggtgatttactcaaatcaatgattttttactctcatctctatataaaaaaagatgctgccttggactgacaataactaggtggatttctataaatcttgtccccaagtttagaaga

SEQ ID NO: 161420 - DNA, 588 bp, Homo sapiens
aatcatctgtcaaatgttattcgttgcattctattaacaatgttttcctctttggaacagctgtctcctgtgctataagcagtaatgaagaattgttaactgcatattgagaaagtgagtaaaacatttccatcatcaaatactttggttaaataatttttgactaaaaatacttttcaaaaaaagctaactgattgttgagtctttactccctttcttttgatttttttatgatgaatgcttatttacagatggtacttatgagccacatatatgaaaagatgtaatataatgcagataaggttgtccagaaatagcccttgaataaactgagatgcagagaccaaattcacatagytaaaagtgcctcagtattcttgcaccatgtattaacatacaacacatttcattgggtttattttggtcttcaaatttcttgatgccaataatcatcaattaattcattcatgatacagccagcagaatactgtagccataagggcacttaatcagttctcagttacttgtggactattcatgctcccttctaaacttcaggctggctttgtcttattggtaatatatact

SEQ ID NO: 161421 - DNA, 577 bp, Homo sapiens
ttgttgatacaaactcctgggtattgagcctgaactttggagagaatttgaagatcaatttcacctagaagataaacatatgggacaggtcacatcattccagcaagaaatgattaaaaacaattttagctgatttattatctgccctacctttactaggaaagcctaacataaataaagaataatgttcaactgctgccctgccatgatgcagggcagctaggttctaagtaggcatagtaatgtgactcaaggagggctgtgagtgccatccattcgtttacatgatctttaacatctatcactatatttcatcaaatcaaagatgctgttgattgtagaaggaaattaacccttatttttgtttcaccaagttagaaaaaagccactgtcaattataattttaagattttatcaactggagagcataacaatatcagaggtattaaaatacgaaaaaaaaatgcacctcagaactggcagagtaggctaggccagaagagtacaaaaaaaatgtcagattaaataaagggtacaagcrtatgtcaggtaaaataaagaagaaaaacatgtcaga

SEQ ID NO: 161422 - DNA, 526 bp, Homo sapiens
tcagatcccttaaggtttttaaacattctctagtacaggaatgatctaaagggtgaggcaggaggcacatagcagaatctcttgggaggggtgtctttcartgtaacatagttttatatttggaataagaagcccaactatttatttaaaaaactgcataatgtatattttaccaacatcttcttagctgtcaggaatagttaaagaagatagagggaaatttttcagtgacaggagggagggtctttacttgtggttcccaatcttggggatgtatcagaatcacctgcagcgccccaccccagagctgctcattcagtaggtctgcgatgcgtttctaagttcccaggtgatgatgcttctactggtcttgggatttcactcttggaaccactagtctctaagaatttttatgaggagaaactaatagttttctgtttatggaaagaggaaatgaactgtggaaacagcgaattataaaaacctagcatttttaaatataggaacagaaaccttactatctcat

SEQ ID NO: 161423 - DNA, 526 bp, Homo sapiens
tcagatcccttaaggtttttaaacattctctagtacaggaatgatctaaagggtgaggcaggaggcacatagcagaatctcttgggaggggtgtctttcaatgtaacatagttttatatttggaataagaagcccaactatttatttaaaaaactgcataatgtatattttaccaacatcttcttagctgtcaggaatagttaaagaagatagagggaaatttttcagtgacaggagggagggtctttacttgtggttcccaatcttggggatgtatcagaatcacctgcagcgccccaccccagagctgctcattcagtaggtctgcgatgcgtttctaagttcccaggtgatgatgcttctactggtcttgggatttcactyttggaaccactagtctctaagaatttttatgaggagaaactaatagttttctgtttatggaaagaggaaatgaactgtggaaacagcgaattataaaaacctagcatttttaaatataggaacagaaaccttactatctcat

SEQ ID NO: 161424 - DNA, 536 bp, Homo sapiens
cttatacctgaaactcatgaagttggcctctaatgaagggaactcttaaaatgaattaattgtttttctgataacactattctaggcrttcctctgttggactcttcagggctaaacatgttaatgacaatctatgtcttatatttcttatattttaaactggaattacccttataaatatggtaaacaattgatggtttagaagaagaaaaaaatgtaacagctatagatggagcttccttaaaatacatcagtgaacatctgggttgctggtagcgaggccactctcttcataaaacagaacaacaaaaacaatagaatgctagaactggcttgatctgtccccattcacagcctctgagctcagcaacatgttacaaaacaatcccaattcccttaaaatttctcgttggtttacgtagaattgtgagtgctctttctgattacaggaatttcccctctctaaccagattgttcagactaaactctttatgtcattctttcgtgaggtctttgagaactaggccttacaagat

SEQ ID NO: 161425 - DNA, 484 bp, Homo sapiens
tgtgtaataacagactcggattcgaagaagcaaaaaatcacctagttagtaaagcggatgtaatgtgggagtttggttacagctggacaacagaagtctaagccacaagatcagtatgggaccaacagtgagaacaagacttctgagtcactcaaattaggtcccatgatttcaccttgaccaagaactgacatgtgagagacaggcattgggagagagagccaggcaagtcatctggatccatatctactgagagtgtaattcaaggcccttttggaacaatcatcaccaccttatccccaagarccccatctaccagcagaaagggctgggagcctgcccaaggggaagagatgcccatgggaagaactccctctctccatttcaaatgaaattagagccgttctgttgttgttttaaattggtatttcacttggaaaactttcagatgtttgtaaatcatctaaagatgttctcttagagc

SEQ ID NO: 161426 - DNA, 336 bp, Homo sapiens
gccaaggggagtgaggacatttatcttctttctcctctgtcccttttcctttcccatcaaaatttgtattttcaaagactgtttwgtgtagttggttgggggaattcataactaccattagtgattgagagctttaacctagacagggagtgtttgaatccctgggaagcacctaactgacccaagtaaacctcccactcctaggctgtgtggaagcgtatttttagcagggattcttcttatacttgctgttgtctttgtcatctgctttcccatgcccattccattcaccaggaagcagaatccctggattcagcaaaccttcctttattctac

SEQ ID NO: 161427 - DNA, 336 bp, Homo sapiens
gccaaggggagtgaggacatttatcttctttctcctctgtcccttttcctttcccatcaaaatttgtattttcaaagactgtttagtgtagttggttgggggaattcataactaccattagtgattgagagctttaacctagacagggagtgtttgaatccctgggaagcacctaactgacccaagtaaacctcccactcctaggctgtgtggaagcgtattttyagcagggattcttcttatacttgctgttgtctttgtcatctgctttcccatgcccattccattcaccaggaagcagaatccctggattcagcaaaccttcctttattctac

SEQ ID NO: 161428 - DNA, 542 bp, Homo sapiens
gtttggatttcattcattcatttaacaattgtttactgagctccatatccaatactatgtgtcagtgatcattctaggtgctggagactattcagaaagaaacccatacctattgtattctagtggattggcattagtgttttattttggttatctgtgaagtatgagactctgcagaaggttgggttagccaggaagcagacactgagacagagttgggagtgtaaacagctcactggagagttacacctgtgaaaggaacagagcagaagctggattagacagagggtgccatcagactgtgatgccatccaaacagaggccagcccactgggatgctgtagagcaaagatttctgtcaygtaatagaagagttccatgttgggtagaaacagctaggctgtcataccactccctgcagaagcccaccctgaaaagagtgtgtctttgctaccactgtcttgttcattcattgagtagggtccttcccaagagctggaaagctgaggtggaccctgaaagaattaacaccatcaatgaac

SEQ ID NO: 161429 - DNA, 496 bp, Homo sapiens
aattttgctgtgaatctatctggtcctgggcttttcctttgggaagactttttaatactgattccatctcattatgcattattggtctgttcaggttttttatttcttccttattcagtcttggtagattgtctatcaatttcatttatatgttccaataaccagctttttgtttggttgcttctttgtatattttttagtttstatttcattttattctgctcatatctttatttttcctgcaaatctggggtttggtttgttcctccttttctagttctttgaggtatgtttttagattgtttatttgtaatctttctacttttttgatataagcatttattgctacaaacttcccttttagcactgcttttgctgtattccacaggtgtggggactgatatagtttggctgtgtgtccgcacccaaatctcatcttgaattgtattcccataattcctacgtgttgtgggagggatctgttgggagataattg

SEQ ID NO: 161430 - DNA, 431 bp, Homo sapiens
aactaatagccatgaagtaatggacaggtaatcaacwtgttttgtgatgtcaggacttccattcttaagggcaaggacatgccataaactaaaagaggtcagttttccatgttaagacttgcatggcccaacgaatgaatgaaagcatgcattcattcatcccctgggaatacaggggtgagcaaaacaggtaaggttcctttctttatgaatcaaatataaatactaacaagtattgaataataagctgtgacaaatgccacaaaagaaaagtgccaggtgctatgagagtatttaacagggagacctagttgaatctgttgttgttgttgtttttgtttttaaaatttttgtgtttctggtgggccctttaagttcaattttttagtatcttcctcccctgggccatcaaaaaaggcatcagattagag

SEQ ID NO: 161431 - DNA, 543 bp, Homo sapiens
gaacatgctctgacattcttacaaataatctgcaggccctggattttagaataaatgattcacttgcatagtctgtgtctttatgacatctcttttcctattttaagaaatactraagagattaataaattcaagcctaccttatagaataccctgaggtagagggcccaagagtacactatgactaaaactatgtacagaagaacaaatattctataatccaacattcaatttcttggagaagtttgtaaatgattataaggtgtggatagtagcattcttttgcaaagcactcctgcatgtattaccttattcactcctctctattacctgaactagatgggcattgttatcccatttcaggtccagggtaacaatgtgacttgtcaattgccacgccattgataaatggcaaactctgaacccagaatttttttaaaaacataattatttttctctttgagtagctaatactcaccaagtattgtatactcattttattttatccttacaattacctacacagtaggttattatcatctt

SEQ ID NO: 161432 - DNA, 549 bp, Homo sapiens
aactttagtctgtcattgcaccatgcttacaaactaactcaaccaacccccatctctctaacctttgttgaaatcttaggcaagtcatatagctcttctgatcactctcagttattatygatgagtatcaattattacaaaataaaacatccagtccagtctaatatcaaaattccaaactccaatccaatttataatgtcacccttcctccagctcatgtttgatacaagcagggaacctgaattgggagaggggacataggtgatttcactctgccctcatttgcctaccttgcttttccactgactcctcctttaattacattatctctgacacccatgaaactgaagcagtgggtgggagagaggtaaggggaagaaacaatcttacctttgaaatctggtactggtggggtgattttggattttttggaacccaaagaattggaattccaaactttccaccatcactgggatctcccacttcagttctctttacaagggcaataattcttttagagggatgcttatgattccccctctgcctct

SEQ ID NO: 161433 - DNA, 534 bp, Homo sapiens
agttaactctacacccagacactattttaggcacagagaatgcaatgacaagcaagaaagacacagttgtccttacagagtttatggtttggctgggaagacaaataagtaaataaaaataataaaatgtgataagcattatgaaggcgaagtctaacatatagtagaaacctaaactcatttacagatcagggaaaagccctcaaggaaatatttttaagttgaagccgaaagtatgaggtagacaaatgtgagaaagtagggacaaagaggtgtcctggacagtagcagaggcctgtgggcgagggagaggggatgttaagttggagacagaaacagaagggtgaagagtgaggaaagagaaggccaggcagaggatggtgagagatgactctgaagaggtgagtaggaaggcccggaagtccaggtgagagtttagcatggggagtgggaagccactgaaaaggcttagtaggggaattgaaattattatatttgtgttttggygtgatcagtctggctgcattgtgaaga

SEQ ID NO: 161434 - DNA, 615 bp, Homo sapiens
tttccactgtctgttggtggtgcaccctgtttccaccccagctagttaattcttactcatgtttttgagttcawttcaccaaaaacgcctttcctcagccctttgcttgggtccagttacctacttactctcatagcatggtcctctgttttattgtaatgaaaagtaaataatgaatggttttatatatatctttcctgctagaatgggagctctaaaaaggcagggaccgaatcttgtgtgttacctatacatagtaagtgatcaatacatattcactgaatgagtgtattcttgcactgaactggtgaggagcagaaggcagaagggtaaagggctgggggagaggcccaggaagcctgggacagaacccacaggcaggctcaaggcaggcaaagggaggtctccagctctcaggacccttcacaaaccatgtgctctttctcaaattcccctctgtctggatttgatatctcttccttataatcccaccccacctgctttggtttttccttgacatccagccatctttgggttccattttttgcttttctccttgagtgataacagctgggactgcaagctcactatgtcctccaaatgggaccagagtcc

SEQ ID NO: 161435 - DNA, 594 bp, Homo sapiens
tctgttccttagctttcttttggatctttccatctcgaaggggctgggtaattgcagcttagctcggcttcctckaggccttcaggggtgagtactccaaactgaagagcacacagttttcacatttcagagttatgatctaattatgttatttttcatgttcagagcaaaacgacattgatcttttaaagtctactcaatcaaagcaaagtagaagtttaggtgtgtgctgggccaacaatttagataattcaggctgcagcattttctatggcctgaattatggagcagagctgtctacatagccctaaattcatcagatgccacctaatccttcacttggctttgtccattgggtatttattccttgctgattgactatattctcttattttatggtttatcttataagattattgcttaatatttgcatttgccagtcagcttcagcacttcagaccatcccttgtcaacccaacatatttattcaatttgcccctttctgggatgaatatttagttatgctttcctgcccacacagctaactcttttacttattccttgatcctctctggtgatggttattgtacttcc

SEQ ID NO: 161436 - DNA, 546 bp, Homo sapiens
ctcttattttatggtttatcttataagattattgcttaatatttgcatttgccagtcagcttcagcacttcagaccatcccttgtcaacccaacatatttattcaatttgcccctttctgggatgaatatttagttatgctttcctgcccacacagctaactcttttacttattccttgatcctctctggtgatggttattgtacttcccaattcacttcacatacttcccagggtttgtatgaaggttcagtttaaaaatatttctttctatgtgcaccacagtttgtaaatacttacattcttaacttgagtttgtatgaaggaggctaagggataaagcccagccccgccaaagtaaatgcaccaacaaatttgatggccacagtatgctttttgtgcacastgcattttggtgcatccataggaagtcagcaaattgttgcccctttactgtagaatcctttgcaaccagatgaaaatggaggtctttaggctgagtaaaaacaaagaacataacctgaggcaagtcacaaagaagcaattt

SEQ ID NO: 161437 - DNA, 490 bp, Homo sapiens
aatgttgtgtgtccacagcatttgaggatgcttcctcttgagttcacataatacaaacatttgagtaataacactcttttaaaatgtgtgcacttacatagatttgcctgtgccattgtgttgcaaggccctaggaagcttttaaatgacctttgtcctgagtttaacacagcgcctaatgcaaattagtgcttaacacatcttttcaagatgatggagattcttggagattaagcgagatgatgttagtgaacaaggtgaggaagtatgtaggcaaacaacagtcaacttgtgagcatggagcacttaaatctctagcaaacaattttctacaactttcttcaaaattaggatgcaatcattctaagttctggatgtactcacactccactgagcattaatttttatgggaaaattatatttayttgtaacttgctacttaacgttttaaactcattgagtcatttaacataaagacggctacatgtgg

SEQ ID NO: 161438 - DNA, 537 bp, Homo sapiens
tgcctgcccaagacttcagcttagtttgcacaactgagaacacctcctttcttctccaccatcaggctaacaatctttgaggacaagtaactagagtactgctggctaagttgtaaaagcatgggaagagatcttctctgaagcacagcacaaagraaagacccaaagctgaggatggagtagacaattgccaaacttctgagaaacctgtcctcaacctaagtgcagggtaccaatagagaaatttgaaacttatgatacactgatggtagtcaaagcaacagtgaacacccaaaccagctaaattcctaactagattgtctcagacttttgcactaagaacctcacagaagaaatggatgtccatttccatgcaaaaaaaaaaaaaaacaacaatttacctcacttcaatatttactgccctacaagagataccagcctttcaacaaaaatttgtgaaaacccttgcatttgaaaaagcaaggaaaaaaatctcaacatattaccaagccaaggcaattaacagaaccaggctca

SEQ ID NO: 161439 - DNA, 537 bp, Homo sapiens
tgcctgcccaagacttcagcttagtttgcacaactgagaacacctcctttcttctccaccatcaggctaacaatctttgaggacaagtaactagagtactgctggctaagttgtaaaagcatgggaagagatcttctctgaagcacagcacaaaggaaagacccaaagctgaggatggagtagacaattgccaaacttctgagaaacctgtcctcaacctaagtgcagggtaccaatagagaaatttgaaacttatgatacactgatggtagtcaaagcaacagtgaacacccaaaccagctaaattcctaactagattgtctcagacttttgcactaagaacctcacagaaraaatggatgtccatttccatgcaaaaaaaaaaaaaaacaacaatttacctcacttcaatatttactgccctacaagagataccagcctttcaacaaaaatttgtgaaaacccttgcatttgaaaaagcaaggaaaaaaatctcaacatattaccaagccaaggcaattaacagaaccaggctca

SEQ ID NO: 161440 - DNA, 576 bp, Homo sapiens
catttgaaaaagcaaggaaaaaaatctcaacatattaccaagccaaggcaattaacagaaccaggctcaaatatgatatraaagttagaatctaagaccaagaattttaaataattatgattaacatgttaaagattataatagaaaatatgtagaaaaatgcaagatcagaagggaatttcagcagagaagtagaaactataagaaaaatcaaacagaaacgttacaaataaaaaatacagtggcaaggatgaaaaatgcctctgatgggctcactagtagactcatatagccaaggaaagaatcagtgaacttgaggataggttgatagaaaagacccaaactaaaaaacaagggaaaaaagaataatagctaagaattttccaaaattaatggcagagaaaaaaccacagatgtaaaaatctcaacgaagattaagcaaaattccaaaaattgtacatctagatattttaggtccaagcttcttaaaacaagaaacgaaaaaaaattttgaaggcaccagaggaaaaaatatacactacatgtagaggcattaaaagtaagaattatagcaga

SEQ ID NO: 161441 - DNA, 576 bp, Homo sapiens
catttgaaaaagcaaggaaaaaaatctcaacatattaccaagccaaggcaattaacagaaccaggctcaaatatgatataaaagttagaatctaagaccaagrattttaaataattatgattaacatgttaaagattataatagaaaatatgtagaaaaatgcaagatcagaagggaatttcagcagagaagtagaaactataagaaaaatcaaacagaaacgttacaaataaaaaatacagtggcaaggatgaaaaatgcctctgatgggctcactagtagactcatatagccaaggaaagaatcagtgaacttgaggataggttgatagaaaagacccaaactaaaaaacaagggaaaaaagaataatagctaagaattttccaaaattaatggcagagaaaaaaccacagatgtaaaaatctcaacgaagattaagcaaaattccaaaaattgtacatctagatattttaggtccaagcttcttaaaacaagaaacgaaaaaaaattttgaaggcaccagaggaaaaaatatacactacatgtagaggcattaaaagtaagaattatagcaga

SEQ ID NO: 161442 - DNA, 576 bp, Homo sapiens
catttgaaaaagcaaggaaaaaaatctcaacatattaccaagccaaggcaattaacagaaccaggctcaaatatgatataaaagttagaatctaagaccaagaattttaaataattatgattaacatgttaaagattataatagaaaatatrtagaaaaatgcaagatcagaagggaatttcagcagagaagtagaaactataagaaaaatcaaacagaaacgttacaaataaaaaatacagtggcaaggatgaaaaatgcctctgatgggctcactagtagactcatatagccaaggaaagaatcagtgaacttgaggataggttgatagaaaagacccaaactaaaaaacaagggaaaaaagaataatagctaagaattttccaaaattaatggcagagaaaaaaccacagatgtaaaaatctcaacgaagattaagcaaaattccaaaaattgtacatctagatattttaggtccaagcttcttaaaacaagaaacgaaaaaaaattttgaaggcaccagaggaaaaaatatacactacatgtagaggcattaaaagtaagaattatagcaga

SEQ ID NO: 161443 - DNA, 576 bp, Homo sapiens
catttgaaaaagcaaggaaaaaaatctcaacatattaccaagccaaggcaattaacagaaccaggctcaaatatgatataaaagttagaatctaagaccaagaattttaaataattatgattaacatgttaaagattataatagaaaatatgtagaaaaatgcaagatcagaagggaatttcagcagagaagtagaaactataagaaaaatcaaacagaaacgttacaaataaaaaatacagtggcaaggatgaaaaatgcctctgatgggctcactagtagactcatatagccaaggaaagaatcagtgaacttgaggataggttgatagaaaagacccaaactaaaaaacaagggaaaaaagaataatagctaagaattttccaaaattaatggcagagaaaaaaccacagatgtaaaaatctcaacgaagattaagcaaaattccaaaaattgtacatctagatattttaggtccaagcttcttaaaacaagaaacgaaaaaaaattttgaaggcaccagaggaaaaaawatacactacatgtagaggcattaaaagtaagaattatagcaga

SEQ ID NO: 161444 - DNA, 590 bp, Homo sapiens
tgatatgatattttattttatttatttttgagacaacctcactctgtcacccaagctggagtgcagtggtgcgatctcagctcattacaacctccgyctcccaggttcaaaagattctcagccacctgagtagctgggattacaggcacctgccaccacacccggctaagttttgtatttttagtagagacagggtttcctcatgttggccaggctggtctctaactcctggcttcaagtgatccacctgcctcagactcccaaaatgctgggattacaggcgcgagctgctgcacccagcctgacatggtatttcaaataaatgaacttaaaattatgtggaattaacaaagataaaatctcaaaaatataatgttaaatgtaaaagcaacctgtaaaaatgacactagttatacaaatttgaaaacatgtaaaacactgttacatattgttagacatctacaaatgctttaataatataaatacatgcctggaaaagagaaacccgaattcagtcgttgtctcagggtgcagtacacaaggggatttccatcgtatctgtaacttcttttctttttaagaaaaatgaa

SEQ ID NO: 161445 - DNA, 607 bp, Homo sapiens
tgggtccacacctggcttttctaccagctagctctgtgactctgggaccattgtgwcagctttctctgccacagttcctccctctgcaaaacgaagggcttgaaatgcaggattctaagattgtggccatctctgactctgataacaaccccgtgagcctgaagaattcagcactgctgctccatagggggtttcagcaggaagcgggcacagatggctttctctggaacgtgttcagaaatgtggtgtgtgatgtacggtgtgaatgaagcgtggtgccctttaaacacagcttccccctgggagtgctctgagctcctcgggttctctggctctcattcacattccactgtcactctgggcactggcagccctcacgtgcttgtgcactgagcacacacacaccccgccctgactgacacacaattggtgactcacaactgacacaatcattacacacacggaatgactcagcggggacactcacatgcatgggctcacgctcaccgtgacgtgtagaagtggctgtgctcgtggcatcaggcacccccacagcagccttggtggaggctctcgccagcggcgtctgcaaatgatttgcattctt

SEQ ID NO: 161446 - DNA, 607 bp, Homo sapiens
tgggtccacacctggcttttctaccagctagctctgtgactctgggaccattgtgacagctttctctgccacagttcctccctctgcaaaacgaagggcttgaaatgcaggattctaagattgtggccatctctgactctgataacaaccccgtgagcctgaagaattcagcactgctgctccatagggggtttcagcaggaagcgggcacagatggctttctctggaacgtgttcagaaatgtggtgtgtgatgtacggtgtgaatgaagcgtggtgccctttaaacacagcttccccctgggagtgctctgagctcctcgggttctctggctctcattcacattccactgtcactctgggcactggcagccctcacgtgcttgtgcactgagcacacacacaccccgccctgactgacacacaattggtgactcacaactgacacaatcattacacacacggaatgactcagcggggacactcacatgcatgggctcacgctcaccgtgacgtgtagaagtggctgtgctcgtggcatcaggcacccccacagcagccttggtggaggctctcgccagyggcgtctgcaaatgatttgcattctt

SEQ ID NO: 161447 - DNA, 381 bp, Homo sapiens
gaattcctgatcaactggcaagaaggagaaatgaagcaaagccagagctgtgcccgatacctttgttcaggctcaggtccactccagcacacgtgcctgtgttctcatcccccaggttggtctcttccttggctcctccaacagccacatctacaagagaatagagccactctttctctaactgtcctctccyttcttccctctctgggggagtcctgtggagccattgttctcccaacctcagctattgggcctttcttggcaaggacctagtggcgtctcttatttacccattaacaattaagctccaggcatttgacatataaacacagaaaacatcagcatcattacagcaaagatttcaaaagccctttggcaggg

SEQ ID NO: 161448 - DNA, 560 bp, Homo sapiens
atgagcattgtacaaaaggctaactgagatgtgtgcagagtagcatctgcttatatatgcactgtcacccagcatatttgatgataatgagtgttaaacttgtcgttccaccactgatatgtattaacttaggtcwggcctcattcacagtgctttcctggttttaattataattaatataatcaaattgtggttgccacttttatagcactcaaattttatacatacttacaaagatagtttaaacattttaacccctgttaaaaaacacaatttgtgacattattattactacatttctacaaatgagagaactgagcaatgaagagaaactgacctattcaagctcacacacatagtaagtcatgaaccgggagtttgaatccagtgttttggagtctttggtaagagtcttgcaagcatctctatttgaccctacgtactttatttactttacttacagcatataaaaggtatctctctttgctttatatactcctcagtggtctagagaaaaacattccagaggaaaaaatcctgtaccacctcagagtattgga

SEQ ID NO: 161449 - DNA, 563 bp, Homo sapiens
tgatggaatcccttacaaacatgtcgatttggaccagcacgctgcatactaaattatgaaaacagtattcacattttagcatcaaaaaaagtggactcatcatgtggtattgttctgaagtgaaaccttggtgatgaaatgagaaaacaagcctatccaccaattatctcaatattttgaaggccatggcatagggtggatgtttgactcttgctgtgggatggcaggtttgctatgatttatgtagatctaactatatgattttggttttgatgacagatgttacaggaataatattcggctttgtgatgttttgtaatatccctcgggtaaaaatgaatctgtgtagaattgaataatatggtagttgtatttrttaattgaagttgctatgctttgtactttatttcagagcatcatgcctgagcagacatagaaaatagcaattacttttagcaaatgtgagactggcctgcaagattcctggcatgtggcaagcctctagacatacagggaagagaaagaatggggttgcagactggggtttcacttgtaggatgtac

SEQ ID NO: 161450 - DNA, 572 bp, Homo sapiens
cttgccagcagagttagtagtttttattattaacamataggcaaagaacataaattctgtatgctcctcaggccttacaaatgtttctgattgctgccatcagcatgtatgtaagcaggaaggcatgactgaggtctggtgatcatcacctctgaagagggaagctttccatagggagtgattatctacggagaaccacaccacctggagttgccatattgctactctaaaaattccctaatgtgggagaaaaatgtgttcatttgtgttggaagatgttgttagcagttagaatattaaatagtggtatggtttatacagactaagctctatagaacgctcagtcataaattgaaatacttgtcgtttaaacagcttcataaacttaagaaaaaaacacacccaacaaacattcacagcatttctgtagaagcatttgctgacagtgaaagtggcaaaattgctagtttttagattgtctagagaagtgggttgctttgaaggatgagtgatctgatttagagcaagttggctacaaattctgttttttcaaaaactggatttgcaaattg

SEQ ID NO: 161451 - DNA, 594 bp, Homo sapiens
tagtgctggacttctccacaagatggcaatcacgggttgactccaatttttgttttgataaaaatatctataaagtttactttggcaggaaaaagtaaagaaccgtgacttatgcttckctgtcatattttgtattatattatctatggatgagttatatttttccaacccaccgtctccacttatggagttttaaaacatattattttgtaaggctgggggaggcatgttgcaatattggagtggcaaatctctctctctgttctcacatcccaacatcaggatattgatcttctttttggaaacattgcgaaacaaagtttcacatgccttacaagtctgaaatgaggtatgtcctaaaacctggtaaatagaagaaagttggttagaaacctagatgtctcctcaaacaagaaattatgattttggttaagggatatggaaatagtgcattttgcaaaatgatcttaaaggattattgctgctttaagaagcaagaatttttattctttatatttgaaatggaatatctttaatttaaaattcagaggacaaatgccctcttcttttttttctaaaaagaaattaactact

SEQ ID NO: 161452 - DNA, 509 bp, Homo sapiens
gtacagatataggcattagaatcttaataacaacaattaactgacatttatttacttttggtattttgttttgttyttgtttttgagacagagtctaactctgttgcccaggctggagtgcaatggtgtgatctcagctcactgcaacctccgactcccaggctcaagtaattctcatgcctcagcctcccaagttgctgggattacaggtgtgcatcaccacacctggtttttgtatttttagtagagacggggtttcgtcatgttggccaggctggtcttgaaatcctggcttccagtgatccacccacctcagcctcccaaagtgccgggattacaggcgtgagccaccacgcccagcttgatatttatggaactcaaatgtactaagtgtctatattcattatctgatttgagacactgtaatttaggagaggcagtagcacaggaattgaaagttcagtcttcggattccaatcacagcagagtaagcttgggcaattatttaa

SEQ ID NO: 161453 - DNA, 462 bp, Homo sapiens
gttcaccatctaaatcagttgtcctttatggtaacacaggattcacagagcagcaatctctttttgggtcaggcagcaacctttatttgtgctctgcacttcacccacatgtttttgtctgggatatttccccgatcccattcttctgttgtttcacactacttsttgtccttctctcccacacctaggcagttccaagcctgagccttttctctcccactgccacaaccaccatctcctcacccctgcactgccactgtagtttccacttggccccaccatgctcaccccctccctctagttcatgtcacacagcagctagaaacatcttttgaacacactcacgtgaccacatcatttccctactcaacactcttcaatgacttcccattgctggtactagtgactcagcaacactccatgacactgagctcctctgcccattgcacctcctcctgcagg

SEQ ID NO: 161454 - DNA, 590 bp, Homo sapiens
caagtaaaacgataacttcttagcctgaggacatcragtttagatagtgtagtcataaagaaggtccctttgaggaagagacatttaaatcaaaagctgaagggcaaaaatgaggcagacctcccccaaagctggggaaagagtatcctaggtagagattacaccaagtgtagaagccccgggcaggaaaagacctcagcaatttgaacaacaaagagaagacaaatgtgaaaaaggtgaaaagtaagcaagacagaaagtggttttaggtgaggtttgggaggcaggcagggacacttggagatctctaggctgcctgattttttggctacccatatttctgcttagagcattataataattccgaatgatttataactcatatgtgtccttgtctagctttctccctaggcaaggagcttaaagaaggcaagcactgtatctcatcactggtatttccccagcatcacacacacagccagctcttagtaactgctcagtaaatgaagagttgttaattcctgtgcatttttttgggtctcttgccacaaactctacaattctgccagatttgagattgaataggaaag

SEQ ID NO: 161455 - DNA, 590 bp, Homo sapiens
caagtaaaacgataacttcttagcctgaggacatcaagtttagatagtgtagtcataaagaaggtccctttgaggaagagacatttaaatcaaaagctgaagggcaaaaatgaggcagacctcccccaaagctggggaaagagtatcctaggtagagattacaccragtgtagaagccccgggcaggaaaagacctcagcaatttgaacaacaaagagaagacaaatgtgaaaaaggtgaaaagtaagcaagacagaaagtggttttaggtgaggtttgggaggcaggcagggacacttggagatctctaggctgcctgattttttggctacccatatttctgcttagagcattataataattccgaatgatttataactcatatgtgtccttgtctagctttctccctaggcaaggagcttaaagaaggcaagcactgtatctcatcactggtatttccccagcatcacacacacagccagctcttagtaactgctcagtaaatgaagagttgttaattcctgtgcatttttttgggtctcttgccacaaactctacaattctgccagatttgagattgaataggaaag

SEQ ID NO: 161456 - DNA, 590 bp, Homo sapiens
caagtaaaacgataacttcttagcctgaggacatcaagtttagatagtgtagtcataaagaaggtccctttgaggaagagacatttaaatcaaaagctgaagggcaaaaatgaggcagacctcccccaaagctggggaaagagtatcctaggtagagattacaccaagtgtagaagccccgggcaggaaaagacctcagcaatttgaacaacaaagagaagacaaatgtgaaaaaggtgaaaagtaagcaagacagaaagtggttttaggtgaggtttgggaggcaggcagggacacttggagatctctaggctgcctgattttttggctacccatatttctgcttagagcattataataattccgaatgatttataactcatatgtgtccttgtctagctttctccctaggcaaggagcttaaagaaggcaagcactgtrtctcatcactggtatttccccagcatcacacacacagccagctcttagtaactgctcagtaaatgaagagttgttaattcctgtgcatttttttgggtctcttgccacaaactctacaattctgccagatttgagattgaataggaaag

SEQ ID NO: 161457 - DNA, 481 bp, Homo sapiens
ccccaaaaaagcacacacaacaactacccagaaagaaccccaaagagtaggttttcaaaataatttttaataaagatagggtcttgctatgttgcttaggctgaactcagagtcctgggctcaagtgattctgctgctcatcctcctaagtagctgggactgcaggtgggtgccacccagcttccctgatctgatcactatactttatgtgtatcaaaatatcactgtgcatcccatgaatatgtgcaataactgtgttgatttttaaaaaattaaaagaatgyaaacaattttttaaaacccagaaaataataaaatgagtgaaaatgaattgggaagggacttgggaaagaaatagggcaaaagataaaagttcatcagtaatgaagactgaagaggaggatagaatcaaataaaatggaaagaatgttgacaaaaatagatcaccaatcaaaataatgatgacatgaagaacaaagta

SEQ ID NO: 161458 - DNA, 481 bp, Homo sapiens
ttggaaaggtgcaccgaaacatgccagcactagagataaatcaaaacagaattctaaaaaaagttcaagtaacctacaggaaggcagaaaaagcaaagctggaaaacagaagaaataagcagagaacaaaaaacaatatggcagacttcagctttattacatcaataattgaaggcaacaccttcaaaatggcaaactatagatggaggacaaattactgatggccagtgttttgggatttagggagggatgggagtagaggtggcaatacagaagtagcccaagggagatctctgtggtaayggaatgtctgtgttttgatcacagtggtggttacacaaatctgccattgtgataagacaacatagaattatataaacatgttataccaatgtcaatttctggtttgatactatactatacaattttgtcatctgtaactattgtgggaaactgaagtgtacataggaccactctgtcc

SEQ ID NO: 161459 - DNA, 495 bp, Homo sapiens
ttggaaaggtgcaccgaaacatgccagcactagagataaatcaaaacagaattctaaaaaaagttcaagtaacctacaggaaggcagaaaaagcaaagctggaaaacagaagaaataagcagagaacaaaaaacaatatggcagacttcagctttattacatcaataattgaaggcaacaccttcaaaatggcaaactatagatggaggacaaattactgatggccagtgttttgggatttagggagggatgggagtagaggtggcaatacagaagtagcccaagggagatctctgtggtaatggaatgtctgtgttttgatcacagtggtggttacacaaatctgccattgtgataagacaacatrgaattatataaacatgttataccaatgtcaatttctggtttgatactatactatacaattttgtcatctgtaactattgtgggaaactgaagtgtacataggaccactctgtcccatctttgcaacct

SEQ ID NO: 161460 - DNA, 526 bp, Homo sapiens
ctatgtgcccttgccctggaccactttgctgatctggtgactgcagtgtgtccctctgagtgacactccagctgctgtggacctgtcagtgaccgtagtgctcttgttctctgtagtatcattcccaaccttgctgatttcctgttcaccctcacagacaatagggccaaggtaactggcctcatccacaaagcctctgtcctatctctagtatttttactgacttcaattttttttgaggtttatagttttattgagcttgtttcctgtaagcacrtcaaatctttggtggaatgaggcaggatataaacaagtcccactttttagagatggggcagaagttacagtggatttgaagaaccgcgtttcctttctcttctctccatttccaggtagccttgcaatgccttgcacataagaggtacacggtgcgtatctatttgataacctactgaggattgcagacttttagtccacacaaccagcaaccaaagccagatccagcttgtgaagccagaggcttgta

SEQ ID NO: 161461 - DNA, 511 bp, Homo sapiens
ccatgtgtgcatacacggttatgtacatgtgctgatgcatatatatgtccatgtgcaggtacatgactagacacctgtgcatacctgtgcatagacactgtgcacattcctgtgtgtatatgtgcacctgcacatatgtatgcatactttcatgtatgtgtgtatgtatgcctgtgtgtgcacatgtttgtatatgcagttgtggtaggaatagaggggactcaaatactcaagaaaaaaaaccctgcctttaagaaaatcttaaaagaccagrcccaattctgttctgtttacaacctgaatgcatccaaagatgactttttaagtcattgttgaacaacaatgacacaatctaacaccaaagtcttagtctattttgggctattataacaaaataccataaactgagtagcttataaacaacagaaatttatttctcaccttcctggaggctgggaagtccaagatcaaggtagacttggtgtttgataagcgtccactttctggctca

SEQ ID NO: 161462 - DNA, 511 bp, Homo sapiens
ccatgtgtgcatacacggttatgtacatgtgctgatgcatatatatgtccatgtgcaggtacatgactagacacctgtgcatacctgtgcatagacactgtgcacattcctgtgtgtatatgtgcacctgcacatatgtatgcatactttcatgtatgtgtgtatgtatgcctgtgtgtgcacatgtttgtatatgcagttgtggtaggaatagaggggactcaaatactcaagaaaaaaaaccctgcctttaagaaaatcttaaaagaccagacccaattctgttctgtttacaacctgaatgcatccaaagatgactttttaagtcattgttgaacaacaaygacacaatctaacaccaaagtcttagtctattttgggctattataacaaaataccataaactgagtagcttataaacaacagaaatttatttctcaccttcctggaggctgggaagtccaagatcaaggtagacttggtgtttgataagcgtccactttctggctca

SEQ ID NO: 161463 - DNA, 451 bp, Homo sapiens
agttaaaaagtacaaactaattccggtaatttgcatcaacccttttactgagaataactgaacagactgggaataacaaacaaaatatttttatttaaaaatttgcttttaatccttggagagctaataagcaataagtcataaggaattatgagaggctgggcgcagtggctcatgcctgtaatcccagcactttgggaggccaaagagggtggatctcttcagtccaggagttcaagatcagcctggccaacatggcgaaacccgtsaatactaaaaatacaaaaattagccaggtatggtggtgcacgcctgtaatcccagctactcagcaggcttaggcacgagaatcgcttgagtccaggaggcagaggttgcagtgagccaagatcgtgccactgcactccagcctggacaacagaagaagactctatcaaaaaaaaaaaaaaaa

SEQ ID NO: 161464 - DNA, 451 bp, Homo sapiens
agttaaaaagtacaaactaattccggtaatttgcatcaacccttttactgagaataactgaacagactgggaataacaaacaaaatatttttatttaaaaatttgcttttaatccttggagagctaataagcaataagtcataaggaattatgagaggctgggcgcagtggctcatgcctgtaatcccagcactttgggaggccaaagagggtggatctcttcagtccaggagttcaagatcagcctggccaacatggcgaaacccgtcaatactaaaaatacaaaaattagccaggtatggtggtgcacrcctgtaatcccagctactcagcaggcttaggcacgagaatcgcttgagtccaggaggcagaggttgcagtgagccaagatcgtgccactgcactccagcctggacaacagaagaagactctatcaaaaaaaaaaaaaaaa

SEQ ID NO: 161465 - DNA, 451 bp, Homo sapiens
agttaaaaagtacaaactaattccggtaatttgcatcaacccttttactgagaataactgaacagactgggaataacaaacaaaatatttttatttaaaaatttgcttttaatccttggagagctaataagcaataagtcataaggaattatgagaggctgggcgcagtggctcatgcctgtaatcccagcactttgggaggccaaagagggtggatctcttcagtccaggagttcaagatcagcctggccaacatggcgaaacccgtcaatactaaaaatacaaaaattagccaggtatggtggtgcacgcctgtaatcccagctactcagcaggcttaggcacgagaatcgcttgagtccaggaggcagaggttgcagtgagccaagatcgtgccactgcactccagcctggacracagaagaagactctatcaaaaaaaaaaaaaaaa

SEQ ID NO: 161466 - DNA, 610 bp, Homo sapiens
acacacgctgtacaatttgtgcagttaatgcaattattacagggtcctgaggcgatatacatcctcctcagctgacaggattaagagattaaagacaggcataggaaatcacaagggtgttaattggggaagtgataagtgtccatgaaatctttacaatttatgtttagagactgcagtaaagacaggcataagaaattataaaagtattaatttggggaagtaataaatgtccatgaaatcttcacaatccacattcttctgccayggcctcagctggtccctccatttggggtccctgacttcccccaacaacaaagaagacgtttaagatctaggcatttgcacttgtagttcatggtgcctgttcccatctgactttttcttagtttaggaggcttgtggattctgggcaatggtataatgtgcttaggtaaaaatggggggcatctctgatcttatccccagctctctccaattctcagagaagggggaagaatgtcttgatgattcctgagctctatggaagtaacattaaaaatcagaggagaagacaagtgaggagaagccccaaatggcaaccaagtgaggagggaccatgtctggtcaa

SEQ ID NO: 161467 - DNA, 378 bp, Homo sapiens
cttctcacaatgattctatgaggaagccattcgtgtacccattgtatagaagtggaaagtatgagtcacagtggttgtctgagaacttccagtcaataaagacatagtcacagcccaaggtttcagaagttgtgtgatcccagtgggtaccaagtgcatctgagcagtgagagggraccatcctggatcaggcaataaaagggtcccttatccagagataatctaacaatactaaaactgactaaaagttgtctgttttttaatctgacattgctattcaatgtcagtcgtgaaatattcctttctgaaaaaaattttgctggtcaaaattataaacaattctgcagttactattaagtttaaatatatatgaaaatt

SEQ ID NO: 161468 - DNA, 378 bp, Homo sapiens
cttctcacaatgattctatgaggaagccattcgtgtacccattgtatagaagtggaaagtatgagtcacagtggttgtctgagaacttccagtcaataaagacatagtcacagcccaaggtttcagaagttgtgtgatcccagtgggtaccaagtgcatctgagcagtgagaggggaccatcctggatcaggcaataaaagggtcccttatccagagataatctaacaatactaaaactgactaaaagttgtctgttttttaatctgacattgctattcaatgtcagtcgtgaaatattcctttctgaaaaaaattttgctggtcaaaattataaacaattctgcagttactattragtttaaatatatatgaaaatt

SEQ ID NO: 161469 - DNA, 214 bp, Homo sapiens
ggcgggagaagagggtcctaaccacagaaagaacatgtgaatgaaaattctagcatgcctgaggccttggrggaaaaccctcacagagcctcgtgagaggttggaaaatggcaggaggagaattgaagaagaaagcaggaatcaaccatatccagagaggctaggagtgtggggtaggcatagattttattctacttgccaccaacagttttca

SEQ ID NO: 161470 - DNA, 351 bp, Homo sapiens
atttccttgtcaaattaaattcattagcccggaagccaattgagttggaacatttgtgtattaataaaaatagtgcctaacaaggaccccctttgcggacattggaaatgatttggctacagaaatggcatcacagaaggggctggaggtaaaaaaagaaagtgcttctaatctagttatattggcatcataaagtcttatttcacagaacctgagctatactattatgactgcaaagtgaaataaagtgtgtgamatatgttgtagcccttaaaatgctctaaaatgtataacagtattacctaggtcaagcccacaaagatgatagatggaagcccagagaggttacat

SEQ ID NO: 161471 - DNA, 588 bp, Homo sapiens
acagagaaagccacactggggaaatagtgtgctttgaaatcaggtcacttagaaaaaaataaatccagaaaagtcaaagcttaaatgaagctatcaatttagggacttttcacagccttacttactgggttctctttctaacttaaaaactaggaaaggcacttctgagtctctatcttggtaaagtttgtttgaatctsttttatttttacagtgcacacattgatctcaagttttaagatcctttttatcactgtagctagaagtaaaaaagccacccagctgttcagtctgttagtgccaaatctggtctcttctgaacactataattctcatactacaagatatcccaaatgtacagaaaggtcaagcagaaagagatgatgacaactctgaattctcatgtcattttaaagatgaatcagtttggtatgagatccttcttggtaagggaaaatacttctcattctaccccaattcatgtcaaatttccctacagggatttcaatccaatgtgcctattgttttaaggaatagtcactgacactacaacattacatcatgtttctgtagagggaaagagaaagg

SEQ ID NO: 161472 - DNA, 588 bp, Homo sapiens
acagagaaagccacactggggaaatagtgtgctttgaaatcaggtcacttagaaaaaaataaatccagaaaagtcaaagcttaaatgaagctatcaatttagggacttttcacagccttacttactgggttctctttctaacttaaaaactaggaaaggcacttctgagtctctatcttggtaaagtttgtttgaatctcttttatttttacagtgcmcacattgatctcaagttttaagatcctttttatcactgtagctagaagtaaaaaagccacccagctgttcagtctgttagtgccaaatctggtctcttctgaacactataattctcatactacaagatatcccaaatgtacagaaaggtcaagcagaaagagatgatgacaactctgaattctcatgtcattttaaagatgaatcagtttggtatgagatccttcttggtaagggaaaatacttctcattctaccccaattcatgtcaaatttccctacagggatttcaatccaatgtgcctattgttttaaggaatagtcactgacactacaacattacatcatgtttctgtagagggaaagagaaagg

SEQ ID NO: 161473 - DNA, 588 bp, Homo sapiens
acagagaaagccacactggggaaatagtgtgctttgaaatcaggtcacttagaaaaaaataaatccagaaaagtcaaagcttaaatgaagctatcaatttagggacttttcacagccttacttactgggttctctttctaacttaaaaactaggaaaggcacttctgagtctctatcttggtaaagtttgtttgaatctcttttatttttacagtgcacacattgatctcaagttttaagatcctttttatcactgtagctagaagtaaaaaagccacccagctgttcagtctgttartgccaaatctggtctcttctgaacactataattctcatactacaagatatcccaaatgtacagaaaggtcaagcagaaagagatgatgacaactctgaattctcatgtcattttaaagatgaatcagtttggtatgagatccttcttggtaagggaaaatacttctcattctaccccaattcatgtcaaatttccctacagggatttcaatccaatgtgcctattgttttaaggaatagtcactgacactacaacattacatcatgtttctgtagagggaaagagaaagg

SEQ ID NO: 161474 - DNA, 464 bp, Homo sapiens
ttttaaaatcaagtttacaggattgcatgtgcagtatggagcaagggaagaatacagaaagaatgaagccaaagatcttgacaacttcatcttttctgttgctttctaactgggtcagcagaaactcattggagcaggtttaatgggataagggaagattatgagttccatttttaatataccgagtgtggccagtgcctgttaaatatcgagttgtccagtagacagttgsatgtacaagtctggcatccatgggagaggtccacactagagataaaaatgtaggagcttaaaaacatatagatggtgtttaaagctatgatacaggatgaaggtaccaaagccaggagtgtagatagtgttgcaaggattgaaagttagggtactctgacattgaaaagttaaggcgtttaggatgaactatcaaggaagactcagaagaaatgtatcagtgaggtaggagc

SEQ ID NO: 161475 - DNA, 563 bp, Homo sapiens
acatgccaacacacagtggtgcttctgagacctccagggggcactgagagggttcttggagggtaaaaagttggttgtcatggaaacaagataggtcctcaggaacagagagagcttttgaagaaggcttctgtttttcctatgtctgtgttaaagggagagaaacccatattccagatagctctggaggattttcatagaaacaaagtcccaggcagaaaccaaagtttttttaaaaaagaaaaagcacagataaacttcctctatagaacttaaattccaccaaatgaatttacaaacaaaacaatattaaaaattataaattttcwccaaactgtacctggtaccacctgctccatcagacaggcattgtaggagagagaggcagcattaagtgttctttgagcagccacctggagtgtgggcacactttgccttcttgctccagcctgtctgtcccatcttctcaccagctgtttgccatcagaaatcagttgctgaagccaaactcagctattcagcacacattcctagttctttgttgttcctagaaggctgccccc

SEQ ID NO: 161476 - DNA, 563 bp, Homo sapiens
acatgccaacacacagtggtgcttctgagacctccagggggcactgagagggttcttggagggtaaaaagttggttgtcatggaaacaagataggtcctcaggaacagagagagcttttgaagaaggcttctgtttttcctatgtctgtgttaaagggagagaaacccatattccagatagctctggaggattttcatagaaacaaagtcccaggcagaaaccaaagtttttttaaaaaagaaaaagcacagataaacttcctctatagaacttaaattccaccaaatgaatttacaaacaaaacaatattaaaaattataaattttctccaaactgtacctggtaccacctgctccatcagacaggcattgtaggagagagaggcagcattaagtgttctttgagcagccacctggagtgtgggcacactttgccttcttgctccagccygtctgtcccatcttctcaccagctgtttgccatcagaaatcagttgctgaagccaaactcagctattcagcacacattcctagttctttgttgttcctagaaggctgccccc

SEQ ID NO: 161477 - DNA, 563 bp, Homo sapiens
acatgccaacacacagtggtgcttctgagacctccagggggcactgagagggttcttggagggtaaaaagttggttgtcatggaaacaagataggtcctcaggaacagagagagcttttgaagaaggcttctgtttttcctatgtctgtgttaaagggagagaaacccatattccagatagctctggaggattttcatagaaacaaagtcccaggcagaaaccaaagtttttttaaaaaagaaaaagcacagataaacttcctctatagaacttaaattccaccaaatgaatttacaaacaaaacaatattaaaaattataaattttctccaaactgtacctggtaccacctgctccatcagacaggcattgtaggagagagaggcagcattaagtgttctttgagcagccacctggagtgtgggcacactttgccttcttgctccagcctgyctgtcccatcttctcaccagctgtttgccatcagaaatcagttgctgaagccaaactcagctattcagcacacattcctagttctttgttgttcctagaaggctgccccc

SEQ ID NO: 161478 - DNA, 579 bp, Homo sapiens
atgagactaacaaattaagcataatccacataamaattatccacctcacattgggcacggtggctcatgcctgtaatcccagcactttgggagcccaagatgggtggaactacttgaggtcaggagttcaagatcagcctgaccaacatggtgaaaccccgtctctatgaaaaatacaaaattagctgggcatggtggcacatgcgtgtactcccagctacttgggaggctgaggcaggagaattgctttaacctgggaggcagaggttgcagtgagccgagatcctgccattgcactccagcctgggcaacaagaggaagactccgcctcaaaaaaaaaaaattatccaccttgctcatagaacaaatatttttttttctattttggtacagaataaagagagtagttattatatacttattttgtttatattataatgacaagtatgtcttttcaataactttgtctcagattcattacctaagcaacataggggagagaggaggcactatatgctaaaaagcccaaagattatgaagccagggatagtgcatttgaccttgtgcaagtttcacaat

SEQ ID NO: 161479 - DNA, 579 bp, Homo sapiens
atgagactaacaaattaagcataatccacataacaattatccacctcacattgggcacggtggctcatgcctgtaatcccagcactttgggagcccaagatgggtggaactacttgaggtcaggagttcragatcagcctgaccaacatggtgaaaccccgtctctatgaaaaatacaaaattagctgggcatggtggcacatgcgtgtactcccagctacttgggaggctgaggcaggagaattgctttaacctgggaggcagaggttgcagtgagccgagatcctgccattgcactccagcctgggcaacaagaggaagactccgcctcaaaaaaaaaaaattatccaccttgctcatagaacaaatatttttttttctattttggtacagaataaagagagtagttattatatacttattttgtttatattataatgacaagtatgtcttttcaataactttgtctcagattcattacctaagcaacataggggagagaggaggcactatatgctaaaaagcccaaagattatgaagccagggatagtgcatttgaccttgtgcaagtttcacaat

SEQ ID NO: 161480 - DNA, 603 bp, Homo sapiens
atgctaaaaagcccaaagattatgaagccagggatagtgcatttgaccttgtgcaagtttcacaattgcctcattatataaagtatgaatgatgatgattattgccttctagcattagttattataaggattaactgaaaaaaacgtttatatagtgatcaaaggatgytattccttccgaatttgagattaaggaacaaacatattaagagttatttgagagtaaatcataatctttgatatcgctgtggttttagtttaatgccagttttaatatagatggaaaagagagatgcctacgtgatgtgattttaaccaaaaattcttatccatgatttgcaaaaatagcaatgataatacgtgaaattattatattatttactttcttggtttcaagaccatatagactctaataaattgataattctttacatttgttttctgccttaaaatttacaagattttttgcatacattatttactttaagctttagtcaaacctatgacttaggcatattaaagataattatttcatacttgtaagcctgggccatgtcagaactgagatatgaacacaatgcttttaaccccaatgggcataag

SEQ ID NO: 161481 - DNA, 538 bp, Homo sapiens
atgttcagctcaattttttggtccgtgagtcttcattgatcaaatgcctggacagctgccaaatgtctacatcaacatgaaaccctatagacttattttttcctatttgtaaagactcttaaaatagacaaatacatatataaaacaattatgttaagataaacataagaaaccatgatattcacaattaacataagtrgtactaaataactgttctatctatacctttaaattccctgtgccatgatagtaagacaactgtttgtgaattatatatacttacatatatgcacatacacattatacacacacatacaaattatatatgcatatagacacacacacagagaactaatgaatgacatttttactaccattttcaaaaactttgagcagcacattagctgaaagataataaagaacaaattccaaacccattagggagaaaaattacccatggagctggagtagatctgatatatccaacaaaattggggaaggcaacttgaattatgatccggaagactgacagagtgat

SEQ ID NO: 161482 - DNA, 538 bp, Homo sapiens
atgttcagctcaattttttggtccgtgagtcttcattgatcaaatgcctggacagctgccaaatgtctacatcaacatgaaaccctatagacttattttttcctatttgtaaagactcttaaaatagacaaatacatatataaaacaattatgttaagataaacataagaaaccatgatattcacaattaacataagtagtactaaataactgttctatctatacctttaaattccctgtgccatgatagtaagacaactgtttgtgaattatatatacttacatatrtgcacatacacattatacacacacatacaaattatatatgcatatagacacacacacagagaactaatgaatgacatttttactaccattttcaaaaactttgagcagcacattagctgaaagataataaagaacaaattccaaacccattagggagaaaaattacccatggagctggagtagatctgatatatccaacaaaattggggaaggcaacttgaattatgatccggaagactgacagagtgat

SEQ ID NO: 161483 - DNA, 560 bp, Homo sapiens
aatgtaaaaccaatggtaaaattaataataaacattatgcttaaagagaaagcagaagaagctattgtcaaaaatcttttttattgaatgatattctaagatgatgtgtaatattaatcgcatattcaaggaagaagaatatttactatgttgtaggtgcctgcagttattttgcttgacagttgaatgaaattgaagtacaaactgaataaactctcagattatacacagtgcacatatgagggcatcatagttgatgactttttgttctgcttatcaatgaggaatcagtaccgcagttaagagatttttttatttggttaccatttattttgtgctgtggtcttgaaagaaggattagaaggaaaggaagggattgtgtgaatggagttgagagcacttgagtacaaatttacattctactttattcatagcgaatattttgtggacattcatatgctttctgactttatstatcaagaaatagtaaaaatgttaattcagtcccattgcgactacttaatctgtcacttactaaaaagtgggccgtgagttcaaaa

SEQ ID NO: 161484 - DNA, 549 bp, Homo sapiens
aaaggctaaaatgttaaagttgagactattactatgtggtaaaatggaaagctgatcataaataacaattaatgctggtttaggaatcaaatattctgttccaaatgttcaattactgaataaacatttagtatttctacaaaataaaaaaaatcatttagtcccaacttttacaaactgtaagttggacaactagtcttcatattaaatatattcagcatttataattttttaaatttttccttgcaaagaagaatacaacacagctttcaatggcagataaactgaagagtggatacaagagttaaatgtctggaaggatcatctctaycgattccttaacatgtttcataatttaataattataagttaagtagagaatgctgatattacatatatgtgaaaagtcattgatatggtttggatttgtaatccactgttggaggaggagcctagtgggaggtgattagatcatggggctggatcttccctttgctgttcccgtgatagtgagtgagttctcacgagaactagggtagttgttcaaaa

SEQ ID NO: 161485 - DNA, 467 bp, Homo sapiens
agcagtaaaccatcctgcagacaccggtattagcccattggaactaattttggacttctaacctccagaactgtgagataataaatatgtactgttttaagctactgtgtgataaataggaaatgaatacagtgacctaatattttttggtgagagatttttccatagtaaataatatttaatctgaagcacaaagaaaaagcaaaaactagtcaggtaaagagaaacagaaatttctgggtaggaagaatattgcatatataaagaatttggggcaagaaatagcatggkgactgtattagtttcctattgcttctgtaacaaattccgcacactcagtgacttgaaacaatgcaaatttattatgtgacagtgctggaactcaaaagtttcaagtcagtatcactagactaaaatcaaggtgttaacagggctgtgttttttttcaagactccagagaaaaattc

SEQ ID NO: 161486 - DNA, 531 bp, Homo sapiens
caccccaacctctctttttctgactcttctgccttcctttttcactcataaggacccttgtgattatattgaacctccagggataatccaggattatctccctatctgaagattcttaatttaatcacatctttaaagtcccttttgccatgtaagataacatattcaaagtttctgggattaggatgtggacatgtgggtggtggtggtggtgatattataattatcacagtgattttcagaaatggaaatggctacaatgtcaagagaagagagaatgagactagcagcaagagacagccttaaaagataagtgactatgaaaggcctcatacaccatgtttaaaagtttcaartgctatcccaaatgaaattattttattctaccctggaatacctggaatctttcctagggatttattgattttcttttaaagcagaaaggtaattttgacttccatgtgaggaactgatgagatataattaaatagataaattcataggttatgagagatggttggacaatgttgt

SEQ ID NO: 161487 - DNA, 604 bp, Homo sapiens
ttaggcttgtgaccaagagaatgcagcagaattaacgctgtgtgacttctaaagctaggtcacaaaaggcaagtccgcttctgccttctaagctggggcattcgcctttggtgttctgtgccgctgtataaagagtctgaccatcctragaccaccatgttgtgaggaggcccaagccacatggagaggtcacatagatgttccagtgacagccccaaatgagggtctgctgacaaccagcatcagccaccacacacacagatgataacatctccaggactctagttcccagatgcctgcatatccccaggctctgaatcctccagcggaggcccagacattgtggagtacatgcaacccatgccagccctgtcatgtcctgtctgaattcctcacccacagtagtcagagcatataaaatggttgttctatgccactacattttggagttgttggtttcccagcagcacaaaatggaacagaggcttaagtttactcttaccctagaattccaggagatcctactgtattctcttttagtcttctgtagattttgaggatttctactaggttgtgaggatttctatcacttgctgtcaaacca

SEQ ID NO: 161488 - DNA, 617 bp, Homo sapiens
aaactgtcagtgtctgattggtagggagtaatatattcaaattccagttggttgattatgcatggagacaagcaagcttagaaactgcaggctgagaggggagtgctgagccacagtgtctctgctggagtcctggctcttttgattcagaagagcatttctccattcctccttaattcacagaagaatctgtcatttgcaggaaaggaagagacagcagcagctattagcttgacccacacaaaattgcagtttttaaatgtcaaagacagttgagtatcagaaattttgcatggktctaccaaataatttaccaaaaatgtcagccccaacctcatcaacagtgaagcagttgaagagaggatatacgctaaataaacaaaaagttgccagaccattgcagacaaagttttaaaagaaaaatgttttgacagatacaagtagtcctctttctttataatggaaggaaacagagtgattacaatttaaaagaatatggaagcataatttttaatatctgatgacaaatgaaaaagtaaattttattcattctaagagcagcattcctgaacatgtttctgtctctgagttttaatgacgttagggtttgcaaagca

SEQ ID NO: 161489 - DNA, 398 bp, Homo sapiens
ttcatccactgatgggcaattaggtagattccctatctttgctattgtgaataatgacgcaatgaacataggggtacaggtatctcttagagatacttatttcatttcatttggatacatacccaaaagagggattgctggatctcatggtagttctatttgcaatttttaaaggaacctccattttttttttccataacagctataccaatttatattcctattaacagtgtacaagggttctctcttttctccacatcctggccaatwcttgttatcttttgtctttttgataacaatcatcctaacaggtgttaggtgatatctcactgtagttttgatttgcatttctctgacaattagtgatgctgagcaccttttcatacagctatggccct

SEQ ID NO: 161490 - DNA, 649 bp, Homo sapiens
atatattcttggtgcctttgtcaaagattacttgaccatatacatgggtttatttctgggctttcttctgtttcattggtctatgtgtctctttttatgctactaacatactattttgattactatagctttgtgctgtactttgaaatcagggaatgtaatgtctccagctttgttcttctttcttaaaactgctcaagctacttggggtcttttgtagctccatgagacagttatttctatttctgtgaaaaatgccattggaattttgatacagattgcactgaatctgtaaactgttttgagtagtatgaattttaacattaagtcttccagtccacgaatatgggatatcttcccatttatttttgtcttctacaatttttttcaatktcttaaaagttttcagcaggcagatatttcacctccttggttaaatttattcataagcattatgttctttttgatgctattgtaaatggaatttggatagctcattgttagtgtataaagacccaactgatttttgtatattgattttgtatcctgcaactttactgaatttatttattaagtctaagagtttctttgtagactctttagggattttgatatggtttggctcggtgtccccacccaaatctcatct

SEQ ID NO: 161491 - DNA, 480 bp, Homo sapiens
agcttaaacacacagaagtaatgttgtagcacaaaatttgcttacgggtgatagcagagaattataaaaaatgatcacagcasagtataaatctctgggctctcactgcaatacccacggcccaagggcagtgaaagagctctggaagtgtcctacacaaagctgtcacgcacgacacgcacgaatgccaccccagtgatggacaacacccctggaaggaggaagctgccagcacaagccactgatggaagctcagtgacaacaaggagtggtaaagaagaggggttaagggatatattcacagaggccactactgcaaatttcctgaaggcagcagcaaagcacaggggtgcaaacctgtgtcttcattttggaatcttatgtgcaaatgagaaataatcactgtgggacacactgaataagaagatgcacttatattttgtatatcaatttggggctctgggatttttcatgtattaa

SEQ ID NO: 161492 - DNA, 480 bp, Homo sapiens
agcttaaacacacagaagtaatgttgtagcacaaaatttgcttacgggtgatagcagagaattataaaaaatgatcacagcacagtataaatctctgggctctcactgcaatacccasggcccaagggcagtgaaagagctctggaagtgtcctacacaaagctgtcacgcacgacacgcacgaatgccaccccagtgatggacaacacccctggaaggaggaagctgccagcacaagccactgatggaagctcagtgacaacaaggagtggtaaagaagaggggttaagggatatattcacagaggccactactgcaaatttcctgaaggcagcagcaaagcacaggggtgcaaacctgtgtcttcattttggaatcttatgtgcaaatgagaaataatcactgtgggacacactgaataagaagatgcacttatattttgtatatcaatttggggctctgggatttttcatgtattaa

SEQ ID NO: 161493 - DNA, 480 bp, Homo sapiens
agcttaaacacacagaagtaatgttgtagcacaaaatttgcttacgggtgatagcagagaattataaaaaatgatcacagcacagtataaatctctgggctctcactgcaatacccacggcccaagggcagtgaaagagctctggaagtgtcctacasaaagctgtcacgcacgacacgcacgaatgccaccccagtgatggacaacacccctggaaggaggaagctgccagcacaagccactgatggaagctcagtgacaacaaggagtggtaaagaagaggggttaagggatatattcacagaggccactactgcaaatttcctgaaggcagcagcaaagcacaggggtgcaaacctgtgtcttcattttggaatcttatgtgcaaatgagaaataatcactgtgggacacactgaataagaagatgcacttatattttgtatatcaatttggggctctgggatttttcatgtattaa

SEQ ID NO: 161494 - DNA, 480 bp, Homo sapiens
agcttaaacacacagaagtaatgttgtagcacaaaatttgcttacgggtgatagcagagaattataaaaaatgatcacagcacagtataaatctctgggctctcactgcaatacccacggcccaagggcagtgaaagagctctggaagtgtcctacacaaagctgtcacgcacgacacgcasgaatgccaccccagtgatggacaacacccctggaaggaggaagctgccagcacaagccactgatggaagctcagtgacaacaaggagtggtaaagaagaggggttaagggatatattcacagaggccactactgcaaatttcctgaaggcagcagcaaagcacaggggtgcaaacctgtgtcttcattttggaatcttatgtgcaaatgagaaataatcactgtgggacacactgaataagaagatgcacttatattttgtatatcaatttggggctctgggatttttcatgtattaa

SEQ ID NO: 161495 - DNA, 398 bp, Homo sapiens
gatgaagaataattaaaaatcatctggatggtggcaaaattaggggtgagatggagtgaagcagaacagcctgaacgctcakgaagaaggggattttccaaacagctgagaactgttttagaagacgaggagaactacttgggatgtggcaaaataagccgtctcctttacaggctgcagggaagtggtggcctcgagagggacaaaggaggaggccctgtgtgaaaaagctgggatcagctggacatggcggcacacacctgtagtcccagctactcaggaagctggagtgggaggatcacttgagccgctgagttcaagaccagcctaggaacataacgagacctcacctctattttaaaacacaatttaaaaaataaaaataaaaagaagaaact

SEQ ID NO: 161496 - DNA, 661 bp, Homo sapiens
aaaagctattagaaaggagagtttgaggagacaaaaccagggaaatggaacactcatcatatttggggaacaatgaggagactgagccaagtggagcagcacgaagagccaacattttcttctcagctcagatgaagaatttgggtaaaagtgtgagtaactttccttagtttagagtgagagaattcccaggcacagacacctgccttccttaatcacagaaagagctgccctagctggtccaaaatgcctctggttgcattttggtgttaggaggggtgaacgccacctctcctgtgggtctcctaaattcagcagacacagtattctgcttgagcattcccaagtgattcctcaatctacgaaatgtggttatttcttggttactgaggggcaactctaaatctctgtaaacctgaaatacgtggaatcatctctttactaatgagggtgcgcaaccggccatcctgcatcttatctcctgtgggctggctttgatcttggcattgagggtgcagcaactctcaggaagggtctcrggagccacttgagatatttgattgtctttactgcctcttatgtgagatgtaataggcactaaagcaactcatgtggatgggaacttccgcaggccaaggcacacccccagtcaagggtctgc

SEQ ID NO: 161497 - DNA, 588 bp, Homo sapiens
aagctttgttctgtctgagtcatacggagaacgaagtaccttacctgtagggacatctcgatcagcattagtaacttcttgattcctatccagacyttcttccctttgacttgctgtgcaattgtggtgcgttccttatccttgaagttgcccaaaagctacaaaaacaataaacaataatcaaagcacttttacagtgaacacatcaacattggttaattctatttacctttaaaagaagagtgataagaactacctaactgttcaagttgatagaattctctcctactttaaaatccagtctgaccttcaccatcctaaacccattaggtgcaatcatgaaagtgaaaactggtatcttaaaccctgttttcttatggaccgctatgtaacttatattttctggggaaaaaaatagctccaatccataataaatataagttaaaatttttaacattcttttctaggaacaatctgtatgtgtcaaagcaaactcctttaattctcttacccagcttctgcacaaaagctgtctacatgggtaacctgaaaacatttatcatatagataaatttcaattttgttggg

SEQ ID NO: 161498 - DNA, 548 bp, Homo sapiens
acccttcttcattgtcaacttttaatctcaaaggttatacctcccatcaaaacagctgccaaaagtagtcaataactttagtatttacaattgaactggattttcatgaggttaacagaataaataggaaaacataacctactacatgtaaagatcatgtacatgtaaagatcatgtatcttgagaatttcaattttttaaagatcatcacatccctcaaaattcaacttttgattacctgatgtatggaatagttttaatagttctttagaacatgcacctcacataaagctgtttttgtaatactgtctttgaaacagtatccagtgatctcatatctctattactttgccacaaaataatttttcagaccactttttasatagtctctttgcatatactggtcctttgattcctgaatacagaggaaggttctcattctttggcctagatatggcaaattcagtagcagtgtaaaaagtaatgatgaaactaatccaaactggctaaatggctgttctaagaaattttcatggccgggcgcagtg

SEQ ID NO: 161499 - DNA, 548 bp, Homo sapiens
acccttcttcattgtcaacttttaatctcaaaggttatacctcccatcaaaacagctgccaaaagtagtcaataactttagtatttacaattgaactggattttcatgaggttaacagaataaataggaaaacataacctactacatgtaaagatcatgtacatgtaaagatcatgtatcttgagaatttcaattttttaaagatcatcacatccctcaaaattcaacttttgattacctgatgtatggaatagttttaatagttctttagaacatgcacctcacataaagctgtttttgtaatactgtctttgaaacagtatccagtgatctcatatctctattactttgccacaaaataatttttcagaccactttttagrtagtctctttgcatatactggtcctttgattcctgaatacagaggaaggttctcattctttggcctagatatggcaaattcagtagcagtgtaaaaagtaatgatgaaactaatccaaactggctaaatggctgttctaagaaattttcatggccgggcgcagtg

SEQ ID NO: 161500 - DNA, 405 bp, Homo sapiens
gaattcttgatgacaaagatcatgcttcttctatagcaggtctgccttgctgccaaatggcagcatgtatctttactggtttcagaattttatagttttttctttctttgttttttttccttcygtcccttagcttttaactccttttatgtgctgttctattgggcccctaattcagcctagcaaatatcttccctagcagacaatttatttcttctttactacacctggaatttctacctactctaacagttcatgttcttctgtccccagaaatcacctcctttattaatgccacctaattctgatcatatctttgggctcaatccttcagtacttagagtagcagctgtcaacctttaatatgcaccaatgtccaatggagcttgttaaaatgcagatttc

SEQ ID NO: 161501 - DNA, 558 bp, Homo sapiens
gttcgatcttttgactgtggcaataaactatcatctgcctatccttggtctgacacagtatcccacctggagccattacgacttataagacaaatccaaattttggagagttgagttctatttcatttagtatcacccatggtcatactgcaatagccagataaagatcagactacagagaatttgtaactcatttaagcgagtcttccccatctccctttctctaagctcatcacagccacaattggctccctcagtagtcacagaggaagccaaagtaatcaggtaacacatacaaaagtaaaaagtaacaacaaagagaagttttacagaaagagacgtctagtaacacaggaaagtgtaaggtaaaggggtagttgtgaatcaacatggaaatgtccctggaatgcactaataaccttcaatgtgrataattctcctgtgtatatttgaaatttgatgggatatatctaacgtgtggattagcaatatactaattataggtttatcctacagtaaccagtcattatgaaaaggtgcttaagtcttgctaagatt

SEQ ID NO: 161502 - DNA, 630 bp, Homo sapiens
tcatatctagttagaggactcaaaaataagataactgaataaatggtatagtatattagaaagtaatgaattctgcagggtaaaatagagcagggtatgsaaatttgggagtgaggaggggcaggtagtccatgttcttggatagggtggttaaagttgactttactgagaagatgctactagtgcagactggagaaagataagataacaagacctatggctctttgcagcaagtgtgtagcaggcagataatcagtgcaaaggccctgaggtgagacctcgttttcaaggaagattgagaagacaaaataagaattaattttgtatgttcataaattatgtcaacactctctggcataatttatttaaaccatgtttattttacattttggcacatatatacatctatctttctgctattaaaatctccccaagcttaataaggcatctgaatttctgatctaaaatgttatccacaagtgtgtgacctgctaattatgcgaagctgcttaattcccaagagtgcatcactatgataaagcatagatgagattttaaactgtcattaattctttttttgccctgtacccactgatggcagatgtcattaattttttaatttaagatagt

SEQ ID NO: 161503 - DNA, 584 bp, Homo sapiens
aggggcaagctagttcaagagccagaatgtatgtcgtttttgactaagaagggcacattgactccagtgtgtgtggaaacagcacttggtgtacaatctctctccctatggctgaggggacatgacctcccactcttgctgagcaatgaattaactttgtagtctaaaacatttaagctcaatcackgcagatctattacctaggaaattaaggctataattcaaagctagtttggagataggaaaatgtaaatctttgttcccaaaatgtttcttgaagaaaatatttgatatagctatttcttccaaaaaacatatcatcatcatcatcatccacaaatactatattgatcactgactctattcatgctgctcatatggtagtacatcttataaacaatctttcagagaaaagatttattgttttcctcttcacataagcacaagtacattatctgagcaatagcgatttaatattttatatctttcatctttatataacctagtaatatatcttgagttctcctcttctatttcttcaatgccaccttttctctgcaactgccctacagtaatttatattc

SEQ ID NO: 161504 - DNA, 567 bp, Homo sapiens
gcaccatccaaaaggctgccactgaaactagaacaaagcaggcggaaaaaggtggggtaagctggctttcagaatcttctggttttcatctttctctcatgctggatgcttctgtccattcctcctgcccttggaaattggactctaggttcttcagtcttcagactcttggacttgcaccagtggtttgccgggggatctcagrcctttggccacagacagaaggttgcactattggtgtccctacttttgaggcttttggactgaaactactacaggtttctttcttcctcatcttgcagacggcctatcatggaactttgccctatgagcttataagccaattctccttaataaactctctttcatgtacacatataccctattagttctgtccctctggagaaccctgactaatacaattgatgagagcctaggcattctgtggatctcattttaccactttaccttaatgaccagagtccctgcttgacccttcctcttgaattttttgctcagtatgacctggctgtggtgaaaacatgcctgtctcctaggcagacgaca

SEQ ID NO: 161505 - DNA, 601 bp, Homo sapiens
caatattttgttgagtttgaatcctgtaggaagagctcattccactgtatattcatctacttgaatattttccactgacagtcaaacaaagattgtattatttggctaacagccaaaggtaaacttttgaagtattataagtgtcatgttcagaacactccacgattgcagtatttatgaagccaagttttgcaagacacacgggctcaggaaatccattgttgaacctcagtgatctgcagtaacttctactctattctcaagatttgagctacgtgactccagacagagagctgttcactatatgagatgattgtcattagaggtacattccaataattaaaggacattctgaatttttcccccagaagtatattcctgaaccacaaaaatgtattcatcatccatacacacatcaatacctaaaacccatactcatgattgatggagttttacatgtggtgttgtccaaagatgtcaaatatgtatacgtaagatatacatcttataaataatgtgtatgaggtatagccatgtatctagcattattccccatagcttaaatttagacattacrtatatactcaagtacatatataag

SEQ ID NO: 161506 - DNA, 501 bp, Homo sapiens
ctttaattacccaaatatgcatttaagggtcctctatgtctttagtgcatttcattttattactgaataatattccattgtatggctaaccacattttgctttgcttatccattcggttttgaaggacatcttggttgtttccagatccaagcacttttgagtaaagttaccactcttccagcccttctctgagcttacctgctgtttcatgtgggtgattggcagttgtattattcttctctcttgccctttgttgggacactgaattataaatgatgtatctttagtttctcagatgcaatatttcctgtcttttccttaacctttttgcttttctggcaactcctgaatgaaakgacatctgttagattcactggacttctgcttgctacaaagaccaattccctgcatcttgatagtttagaacctgtgcttgaaacaggaatacatctgctcttaaaactattcatgggaagaaatattagaggccctgatatatt

SEQ ID NO: 161507 - DNA, 529 bp, Homo sapiens
ataggaaaattctttatttctatcccaaatgctgtaaatgtttgtttcatccaaatgtacaygattttttacattttaggtttttctaattattcatactcaaatgtaaaaagtactatttctgtctaggatttcttgatcacagaatcatgccagcaccctaatctttctattctgctttaacatttttttcttgcattctactgcaaagtttgcttctttactgcatgttgatcaacacaaatatttttgttcatttttactagacaaagtcaatagagattggaaaaaaattttgaggggtgcaaattataatttattgcaatactttttcaaattctttaagtcctttgccatagactatatcattctctatcctggaagagtttcactggctaacgtaccactgactcttccaaatctcaaatgaactcattttggttggtttatgcattcattgtcgagttttgtttttctgtaaaatgaagggtgaaatacttgtgtcatattaattgtattttaaaactga

SEQ ID NO: 161508 - DNA, 432 bp, Homo sapiens
ataaaggttttacagataaataaagcagtaataagctcatgagagccattgtacttcttgagraaccaaaggcaactggttaatggaagacgaggataggggaagtgttactccctttgctccattagaaaaagagaagaaaacatccagaaaacaaactcatttttttccaaaggtaattaggtactgaaaaaaaaaagaattataagtagctcacaaatatggtagaaaaatcattcttaagtcaacgaaagtagaaatctaaagggactgttagtgataaaagaagaaataaacatttgcatccatttattagtacagaaaaataaaatgtacaggaaaagtatattttatatgggtgagtagttgttttcttgctatcagatataatattttcaagtacagcatgagatagttgtaaccaaataaatg

SEQ ID NO: 161509 - DNA, 577 bp, Homo sapiens
ttaatgatatgtatatgacaactacaaaacattaaaagaaattaaagatatacacatatcttatattttttgttaaatttatttcyaatttttaattatatttgttgccattgtaaacagaatcttaatttcattttcatatcatttattactagtagatagaaataaaattgacgtttttatattgatctaatatccagccatgttgcaaaactcaattgttagttctaagagtttttgtgtgaattctttaggattttctctatacaagatcaggtcaactgtgaatagaaatgctagtttttcctttccaatatggatactctttatttctttcacttgcctaattgcccagactagaaccttcaatacaatgttgaacagaagtggtgagaacaaatatccttgccttgttcctaagtgtagggagaaagttttcagtctttctccataaagtatgatgttattgtgagtttttactaaatgctcttcaatcagtcaggttcagaaatttcccctttatttttagtttgtttagcgtttttactgtgaaagtgtgttgatttttaaaaaatgc

SEQ ID NO: 161510 - DNA, 577 bp, Homo sapiens
ttaatgatatgtatatgacaactacaaaacattaaaagaaattaaagatatacacatatcttatattttttgttaaatttatttctaatttttaattatattwgttgccattgtaaacagaatcttaatttcattttcatatcatttattactagtagatagaaataaaattgacgtttttatattgatctaatatccagccatgttgcaaaactcaattgttagttctaagagtttttgtgtgaattctttaggattttctctatacaagatcaggtcaactgtgaatagaaatgctagtttttcctttccaatatggatactctttatttctttcacttgcctaattgcccagactagaaccttcaatacaatgttgaacagaagtggtgagaacaaatatccttgccttgttcctaagtgtagggagaaagttttcagtctttctccataaagtatgatgttattgtgagtttttactaaatgctcttcaatcagtcaggttcagaaatttcccctttatttttagtttgtttagcgtttttactgtgaaagtgtgttgatttttaaaaaatgc

SEQ ID NO: 161511 - DNA, 495 bp, Homo sapiens
gaattccttatttttccttctagtatttatttatgcaaatacaaaaatctaaacattctcatttcttgtaagtattttgactgatgagaagataagagaattaagacattgagacacaaaaccatttttaacgacctggagcactctactgctctagaacaatcttaattaagaacatatgctaattattcacctctcagcataaaagcttattaaaaccaattggctgcaaatgaaagatgaagcttatgcatttctctygctttatatagcacactgcatttttctttcattccatgtgtatgtgaaacacaaacagcctccgagggacttttattatgatctgttgctatgaagaagatactgccgggtgcagtggcattatgtgacatttgcacagccagaaacaaaactgtagcctaacagaagaggtcaagagcacagtttgaggagtgccaagaggataattttatcttttaaatgctttggctttga

SEQ ID NO: 161512 - DNA, 497 bp, Homo sapiens
ttatttatgcaaatacaaaaatctaaacattctcatttcttgtaagtattttgactgatgagaagataagagaattaagacattgagacacaaaaccatttttaacgacctggagcactctactgctctagaacaatcttaattaagaacatatgctaattattcacctctcagcataaaagcttattaaaaccaattggctgcaaatgaaagatgaagcttatgcatttctcttgctttatatagcacactgcatttttctttcattccatgtgtatgtgaaacacaaacagcctccgagggacttttattatgatctgttgctatgaagaagatactgccrggtgcagtggcattatgtgacatttgcacagccagaaacaaaactgtagcctaacagaagaggtcaagagcacagtttgaggagtgccaagaggataattttatcttttaaatgctttggctttgaaagttaatgattcaggccatggaattca

SEQ ID NO: 161513 - DNA, 610 bp, Homo sapiens
ccaatactcctatattgttccttctaaggacatgaccattaagccaaaccatttgccacagctcataaatcagtatagaatctcattgctggccatttctcattgtaaataaagtgaacaaccaggtgtgctgcttgaagttttgcccatggagaggattttttctttatcagtgttcttcaggaatgatccagagagggtcgcagtgctgcagctgtccacttttcggtagtgtctgcatatgctgcagaactatctgtaaaccaggcttgagattcttttcctctacaattgatcatagggaactctccatgaggccataggttcaggcttctayggaaggcatggacatttgtgtcatttcttcatgtaacttaactgtgccattagggcctgctcaagctcaatcttacatatactacttccatttgacgatagattgttactgtgcacatctacctcttgagttggtgggtaagaaaatacccagctcataatggccaactcagcttgcatggtaatttgatggaccaggattaggtgttcaggctctaaaagggcccaggaataggccaaaagctgttcctcagaaagacagtagttattcaca

SEQ ID NO: 161514 - DNA, 610 bp, Homo sapiens
ccaatactcctatattgttccttctaaggacatgaccattaagccaaaccatttgccacagctcataaatcagtatagaatctcattgctggccatttctcattgtaaataaagtgaacaaccaggtgtgctgcttgaagttttgcccatggagaggattttttctttatcagtgttcttcaggaatgatccagagagggtcgcagtgctgcagctgtccacttttcggtagtgtctgcatatgctgcagaactatctgtaaaccaggcttgagattcttttcctctacaattgatcatagggaactctccatgaggccataggttcaggcttctatggaaggcatggacatttgtgtcatttcttcatgtaayttaactgtgccattagggcctgctcaagctcaatcttacatatactacttccatttgacgatagattgttactgtgcacatctacctcttgagttggtgggtaagaaaatacccagctcataatggccaactcagcttgcatggtaatttgatggaccaggattaggtgttcaggctctaaaagggcccaggaataggccaaaagctgttcctcagaaagacagtagttattcaca

SEQ ID NO: 161515 - DNA, 610 bp, Homo sapiens
ccaatactcctatattgttccttctaaggacatgaccattaagccaaaccatttgccacagctcataaatcagtatagaatctcattgctggccatttctcattgtaaataaagtgaacaaccaggtgtgctgcttgaagttttgcccatggagaggattttttctttatcagtgttcttcaggaatgatccagagagggtcgcagtgctgcagctgtccacttttcggtagtgtctgcatatgctgcagaactatctgtaaaccaggcttgagattcttttcctctacaattgatcatagggaactctccatgaggccataggttcaggcttctatggaaggcatggacatttgtgtcatttcttcatgtaacttaactgtgccattagggcctgctcaagctcaatcttacatatactacttccatttgaygatagattgttactgtgcacatctacctcttgagttggtgggtaagaaaatacccagctcataatggccaactcagcttgcatggtaatttgatggaccaggattaggtgttcaggctctaaaagggcccaggaataggccaaaagctgttcctcagaaagacagtagttattcaca

SEQ ID NO: 161516 - DNA, 549 bp, Homo sapiens
taccacaaaaatcctaaaatgcttataaattaacctcaaataacacatgggtcaagaaggagcctcaagaaaaatttttacaaaatattttgacctaactgaaaatgagaattcaaattatcaaaatatgtagaatgcaatgaaaataatacttagagaaaaatttatagcattaaatgcatatattacaaaggaagaagatttaaaatcaataatctaagcttccacatttgggaattatgaatagaaaaawaaatttaagcctaaagcaaacaaataagcaaaattagagcagaagtcgatgaacataaaaaatggaaaataagagaaaataaaatcagaagctagttctttaaagagatcaatataattgataaacttctagtcagactgagaaaaatacagagaagaccaaaattattaatatcagaaatttaagatatgtcatcagcaggaatcccttcaatgtgaaaagatagtaaaataatatgatgaataactccgtgaccccgaatttgataacttatatgaaatgggccaattacttgc

SEQ ID NO: 161517 - DNA, 549 bp, Homo sapiens
agcattaaatgcatatattacaaaggaagaagatttaaaatcaataatctaagcttccacatttgggaattatgaatagaaaaataaatttaagcctaaagcaaacaaataagcaaaattagagcagaagtygatgaacataaaaaatggaaaataagagaaaataaaatcagaagctagttctttaaagagatcaatataattgataaacttctagtcagactgagaaaaatacagagaagaccaaaattattaatatcagaaatttaagatatgtcatcagcaggaatcccttcaatgtgaaaagatagtaaaataatatgatgaataactccgtgaccccgaatttgataacttatatgaaatgggccaattacttgcaaaatgcaaactaccaaactcatcaaagatgaaatagataatcattacaggtcaatatgtataaaaaataaatcaggagttaataaccttccaagaatgtcagcagaaggatcagatagtttcactggtgcattgtatcacacatttaagacagaaaatacaataatt

SEQ ID NO: 161518 - DNA, 549 bp, Homo sapiens
agcattaaatgcatatattacaaaggaagaagatttaaaatcaataatctaagcttccacatttgggaattatgaatagaaaaataaatttaagcctaaagcaaacaaataagcaaaattagagcagaagtcgatgaacataaaaaatggaaaataagagaaaataaaatcagaagctagttctttaaagagatcaatataattgataaacttctagtcagactgagaaaaatacagagaagaccaaaattattaatatcagaaatttaagatatgtcatcagcaggaatcccttcratgtgaaaagatagtaaaataatatgatgaataactccgtgaccccgaatttgataacttatatgaaatgggccaattacttgcaaaatgcaaactaccaaactcatcaaagatgaaatagataatcattacaggtcaatatgtataaaaaataaatcaggagttaataaccttccaagaatgtcagcagaaggatcagatagtttcactggtgcattgtatcacacatttaagacagaaaatacaataatt

SEQ ID NO: 161519 - DNA, 682 bp, Homo sapiens
gcctgcatgtgtgccaaagacaagaattgaggtctgagaacatctgcctcgatttcagaggacgtatggaaacacctggtgtgcaggcagaattctgctgcaggggtggagccctcatggagaatctccactggggcagtgcagaggggaaatgtggggttggagcccttacacaaagtccccactgaggcactgcctagtggagttgtgagaatagggccaccatcctccagatcccagaatgatagctctaccaacagcttgcactgtgcacctataaaaaccaaaggccctcaacaccagcccatgaaagcagccacagaggctgtaccctgcacagctcctccccaggggtggaactgcccaaggcttggagaacccaccccttacgtcagtgtaccctggatgtgagacatggagtccaaggagattattttggagtttcaagatttaatgactgccctgctgggttttggacttgcataaggcctgtagcccctttgttttggcyaatatctcccatttggaatgggagcatttacccaatgcctgtaccctcattgtatcttggaagtaactaattattttattttatttttacaggctcataggtggaaaggacttaccttgtctcagatgagactttggacttcggacttttgagttaatgttgaaatgagtt

SEQ ID NO: 161520 - DNA, 581 bp, Homo sapiens
aaagcttttgggctgggtgcagtggctcatgcctgtaattccaggactttgasagcccaaggtgggtggatcatgaggtcaggagatcgagaccatcctggctaacacggtgaaaccccatctctactaaaaatacaaaaaaggccggatgtggtggcaggcagctgtagtctcagctacttgggaggctgaggcaggagaatgacatgaacccccgaggtggagcttgcagtgagccaagatcatgccactgcactccagcctgggctacagagcaagactccatctcaattaattaattaattaattaattaattaaaataaaaaattaatagtaagagcaatgtgaacaaaagatgcaataaaataatttagaaaatacaaactattaaaaaatagattttaaaacttgtgcaacgaagtcaaacagcagccaacgaaaatgtatacccttacacgtttgtttaaaaagcaatttaaattacattgatccactaaactaggaaaagcaaaacaaacaaaaagggggaaataattaagacctaaggaaaaagaaaaaccactagatttaaaaaataaaa

SEQ ID NO: 161521 - DNA, 595 bp, Homo sapiens
caaagcttttgggctgggtgcagtggctcatgcctgtaattccaggactttgagagcccaaggtgggtggatcatgaggtcaggagatcgagaccatcctggctaacacggtgaaaccccatctctactaaaaayacaaaaaaggccggatgtggtggcaggcagctgtagtctcagctacttgggaggctgaggcaggagaatgacatgaacccccgaggtggagcttgcagtgagccaagatcatgccactgcactccagcctgggctacagagcaagactccatctcaattaattaattaattaattaattaattaaaataaaaaattaatagtaagagcaatgtgaacaaaagatgcaataaaataatttagaaaatacaaactattaaaaaatagattttaaaacttgtgcaacgaagtcaaacagcagccaacgaaaatgtatacccttacacgtttgtttaaaaagcaatttaaattacattgatccactaaactaggaaaagcaaaacaaacaaaaagggggaaataattaagacctaaggaaaaagaaaaaccactagatttaaaaaataaaactaaaggaggatt

SEQ ID NO: 161522 - DNA, 595 bp, Homo sapiens
caaagcttttgggctgggtgcagtggctcatgcctgtaattccaggactttgagagcccaaggtgggtggatcatgaggtcaggagatcgagaccatcctggctaacacggtgaaaccccatctctactaaaaatacaaaaaaggccggatgtggtggcaggcagctgtagtctcagctacttgggaggctgaggcaggagaatgacatgaacccccgaggtggagcttgcagtgagccaagatcatgccactgcactccagcctgggctacagagcaagacyccatctcaattaattaattaattaattaattaattaaaataaaaaattaatagtaagagcaatgtgaacaaaagatgcaataaaataatttagaaaatacaaactattaaaaaatagattttaaaacttgtgcaacgaagtcaaacagcagccaacgaaaatgtatacccttacacgtttgtttaaaaagcaatttaaattacattgatccactaaactaggaaaagcaaaacaaacaaaaagggggaaataattaagacctaaggaaaaagaaaaaccactagatttaaaaaataaaactaaaggaggatt

SEQ ID NO: 161523 - DNA, 389 bp, Homo sapiens
tacaactcacttgtcagagtgctttctgcacctttggattgtcaataatgggggtgacaacaagrtctgagtcgtgtagataagctctctcatctgggattccaggtcctgctgactcaggtgtccacttgtaatctgaaatgagaacaaaaatttgactttgtttctgtgactaatatagagctttaaaacactgaactaatatgatgctgaggaagacaccactgtaaaatatcacctatatcaatgtacttccactgctattcaagacacttgcagtctcacttgattttcacaaaaatcctaaactgtaggtaccataatttccattttacagataaaaatataaaactctgagaaagtaactgaattgctcatgttaccattaa

SEQ ID NO: 161524 - DNA, 385 bp, Homo sapiens
tgtcagagtgctttctgcacctttggattgtcaataatgggggtgacaacaagatctgagtcrtgtagataagctctctcatctgggattccaggtcctgctgactcaggtgtccacttgtaatctgaaatgagaacaaaaatttgactttgtttctgtgactaatatagagctttaaaacactgaactaatatgatgctgaggaagacaccactgtaaaatatcacctatatcaatgtacttccactgctattcaagacacttgcagtctcacttgattttcacaaaaatcctaaactgtaggtaccataatttccattttacagataaaaatataaaactctgagaaagtaactgaattgctcatgttaccattaaaactggc

SEQ ID NO: 161525 - DNA, 592 bp, Homo sapiens
ctataaattatcatttttaacttaataagaaacaaaattcaaacagtcaaaagcatctaaaccaaatttaaaagataataaaaagaaaaaaatctatccataataatgaaaccaagttcagggattttcttgagttaataaattttatgaaactttagctcatagattagattatccctgtgtgatacagactttgctgtagcatcaaacaatatgggaaggctgctaccttattctgtgaggctagtataaaactaacaccacaactagacaaagctgacacaaaactaaatgagatcagccaatctcactaacacagagagctgcagaaattaaaccccaaaaaatcttagcraatttcacagaataatgatttttaaaaatgtgtgtgtcttgtaaaatcaagacttagatatgcaaacatgattcaatagtttcaaaatctattaattcaattctgtatgtcttcagattaaaagaggaaaacaagatcatctcaatcaatatcaagaaagcatttgctaaaaccaacatcctgattacatttctgataaaaatgtaaacaaagcaaaacagtgaagttagaaataaa

SEQ ID NO: 161526 - DNA, 609 bp, Homo sapiens
gttatgatgctcacattaaccccaggaggtcaggcctatcactttacaggaagtttaagcaacttctgaaatattaacaattcttctgaattgcttctctggtgacaggaataagagtcgcagtagcatcaacttgctaaaaagtttaaaatggtgctcagaataaaggtattttactgctttttgagactcattgtaaaatggcttgaaatgtctttgccctgaatctctgccagtgggaaattggatgagttgctaaagaatgtggaattaattatccaaaaacactttagatatttctctttgtatagggtattgtaartggtctttagctaattataatttaatatctcacttgtctctctcatacataggtatatatgttatatacacatgtgtatgtgtacaattcaatacatctatgtgtctatgtagctacctatgtatgcatgtatgtatgtatgtatctgcctatctattaatctatctctgtgtatctacctacctatctatatctgtgtctatcaacttcaggaatgcttggcattcttctaacatctgcggggtatttagggattaggctatgatgatagatttccagcttcattt

SEQ ID NO: 161527 - DNA, 609 bp, Homo sapiens
gttatgatgctcacattaaccccaggaggtcaggcctatcactttacaggaagtttaagcaacttctgaaatattaacaattcttctgaattgcttctctggtgacaggaataagagtcgcagtagcatcaacttgctaaaaagtttaaaatggtgctcagaataaaggtattttactgctttttgagactcattgtaaaatggcttgaaatgtctttgccctgaatctctgccagtgggaaattggatgagttgctaaagaatgtggaattaattatccaaaaacactttagatatttctctttgtatagggtattgtaaatggtctttagctaattataatttaatatctcacttgtctctctcatacataggtatatatgwtatatacacatgtgtatgtgtacaattcaatacatctatgtgtctatgtagctacctatgtatgcatgtatgtatgtatgtatctgcctatctattaatctatctctgtgtatctacctacctatctatatctgtgtctatcaacttcaggaatgcttggcattcttctaacatctgcggggtatttagggattaggctatgatgatagatttccagcttcattt

SEQ ID NO: 161528 - DNA, 609 bp, Homo sapiens
gttatgatgctcacattaaccccaggaggtcaggcctatcactttacaggaagtttaagcaacttctgaaatattaacaattcttctgaattgcttctctggtgacaggaataagagtcgcagtagcatcaacttgctaaaaagtttaaaatggtgctcagaataaaggtattttactgctttttgagactcattgtaaaatggcttgaaatgtctttgccctgaatctctgccagtgggaaattggatgagttgctaaagaatgtggaattaattatccaaaaacactttagatatttctctttgtatagggtattgtaaatggtctttagctaattataatttaatatctcacttgtctctctcatacataggtatatatgttatatacacatgtgtatgtgtacaattcaatacatctatgtgtctatgtagctacctatgtatgcatgtatgtatgtatgtatctgcctatctattaatctatctctrtgtatctacctacctatctatatctgtgtctatcaacttcaggaatgcttggcattcttctaacatctgcggggtatttagggattaggctatgatgatagatttccagcttcattt

SEQ ID NO: 161529 - DNA, 568 bp, Homo sapiens
tgatggtagctttgttatttttggcattgtctattctgtttcctgctatttacagttcgggtaggtttttttttttttcttcccgttctgaaatgagtttttgctcttcaatttgtttccaaaactctgcaatttacctttcattttgcttttctatcttttagctcttttttattgaaatcgatttcttactaacttcttacacaacattttggagaactttcttgcatggattcagttatatattttgctgcagaatgaaatctttgtctttctttacagaccatggyccaccctgtgttcactgttcccctgcagtacatttgcaggaatgccttgccatttatttcactcttacttttgcttaatttgggcagctccatgtggatctttaaattcctctgaaaaagcaggtctcagcccctttcagactctgtgctcccccttcttcctgctttcctggcctggggttctgagaggaaggccagcccctaggatggacagcctgggcgtttttgtctttactttgttgctgttgatgttggtctgttggtgctccaatacatct

SEQ ID NO: 161530 - DNA, 571 bp, Homo sapiens
gctttgttatttttggcattgtctattctgtttcctgctatttacagttcgggtaggtttttttttttttcttcccgttctgaaatgagtttttgctcttcaatttgtttccaaaactctgcaatttacctttcattttgcttttctatcttttagctcttttttattgaaatcgatttcttactaacttcttacacaacattttggagaactttcttgcatggattcagttatatattttgctgcagaatgaaatctttgtctttctttacagaccatggtccaccctgtgttcactgttcccctgcagtrcatttgcaggaatgccttgccatttatttcactcttacttttgcttaatttgggcagctccatgtggatctttaaattcctctgaaaaagcaggtctcagcccctttcagactctgtgctcccccttcttcctgctttcctggcctggggttctgagaggaaggccagcccctaggatggacagcctgggcgtttttgtctttactttgttgctgttgatgttggtctgttggtgctccaatacatcttaggcattacc

SEQ ID NO: 161531 - DNA, 371 bp, Homo sapiens
catgttctactctgcatataattattattttaagaatcaactcttatcttgctatgctactgagctttgtcaagacaaaatgagaacttcatgaccactgttcatcatgaattggctatgcaccgacacactagsccataaggtgggaggagaataagattcggcaagtccagacacaggtttcatgagcaggtgactgctaaggactccgattccatcttttccttcttctccatcttttcttcccataatttacacttaggacctcattgggagttgcctacggcagctggtttgcagatggttctgttatgctggcaccagccataagtggatcgctgccaatgctactgtctcactcaaggatagtg

SEQ ID NO: 161532 - DNA, 544 bp, Homo sapiens
tacagggctagcattaccctgataacaaaatcaaacacacagaccaaaaaagaaaactacaggccaatatcactgatgaatattgatgcaaaaatcctcaataaaatattagctaactgaattccacaacacattaaagttggggtgcagtgtcccaggttcactcaacccttcccgttttcctctctgtgtgtgtctactttgccgtgttccctggtggcggcggcggtggcagtgttggtgcatgggcctcccaggacaaggggaaagtgagtatgcccctttcttgccccctgccaggygtctgcagcctggcacaagctctggccaggtctccaacaggggacctggagatgtttttttccaatttctggattggtaacttgaggcagattctgggcactagagtcagaactaagaggagactgaatcaggggagtctggggtcctgagaggcagatacctgaaaccgtctagagcgtgtggggagctcggtgcatgttcacgccagttgtttttctctgtgcctcaatgttccaggtac

SEQ ID NO: 161533 - DNA, 544 bp, Homo sapiens
tacagggctagcattaccctgataacaaaatcaaacacacagaccaaaaaagaaaactacaggccaatatcactgatgaatattgatgcaaaaatcctcaataaaatattagctaactgaattccacaacacattaaagttggggtgcagtgtcccaggttcactcaacccttcccgttttcctctctgtgtgtgtctactttgccgtgttccctggtggcggcggcggtggcagtgttggtgcatgggcctcccaggacaaggggaaagtgagtatgcccctttcttgccccctgccaggtgtctgcagcctggcacaagctctggccaggtctccaacaggggacctggagatgtttttttccaatttctggattggtaacttgaggcagattctgggcactagagtcagaactaagaggagactgaatcaggggagtctggggtcctgagaggcagatacctgaaaccktctagagcgtgtggggagctcggtgcatgttcacgccagttgtttttctctgtgcctcaatgttccaggtac

SEQ ID NO: 161534 - DNA, 587 bp, Homo sapiens
cttcttagtgtcaatggggtgtgcgcttaagtgtgcttttttcagggcagatatcattctttcatttccatgtttagcacttcttttaggacttcttgtagggcaggtgtagtggtaacaaatttccttagcatttgcttgtttgaaaaggatcttatttctttttcgcttatgaagcttagtttggctgaatataaaatttatggttggattttttttttctttaagaatgcagaatgtaggatccaaatcttgtctgacataaagggtttctgctgaaagttctacrattagcctgttggaagtattactattccctttgtaagtgaacagcccctgttctctatctgccttaatttgtttttaatatttcaataggtttttggggaacaggtactgtttggttacatgaataagttctttagtggtgacttctgaggttttggtgcgctcatcactgagcagtgaaatctagaagaaaatctaggcaataccattcaggacataggcatgggcaaagattttatgggtattcattttataaatttgggagctccattgttaggtgcatatatatttaggattgt

SEQ ID NO: 161535 - DNA, 556 bp, Homo sapiens
atacaaatgtccaataaataaatgaaaaatgctcaacatcactaaacatcacagaaatgcacataaggactacaattaaatattatctcctcctagttaaaatggtttttataaaaaagacaggcaatcatgggtgctggtgaagatgtggaagaaagggraactcttgtacacggttggtgaaaatgtaaatggtaaagccactgtggaatacagtatggaggttcctcaaaaaactaaaaatataaccaccatatgatccaacaattccacttctgggtaaatattccaacataatatcaaagagatatctacactctcatgtttacttcagcattattcataatagacaaaatatggaatcaacctaagttcccatcagtgtccctaacgggaaataatatgtagtacatatacacaatagaatattattcagccataaaaactaatgaaacgctgtcagttacagcaatgctgaaggtcattatattaagtgaaaaaagcaaagctcagaaagacaaatattacatcttctcactcatatgtgggagctaaa

SEQ ID NO: 161536 - DNA, 391 bp, Homo sapiens
gaattcttgtattacttttatacattttttcggtgaatctcttggtattttcttaaaatgcatcttccaaaaaagatcttttttgcctttccagcagtcatacctcttatttgtttatttttgtttcattgtattgattcaaatttccatgacagtgttcataacagttctgatatactcattcaacttgaatggaaatctttctattgttttgccattatgtgaagtgtcatctttaatttgagawttacttcttcaacatattaagaaataagttgtttattcatagtttcaaatgtgtaagtcagaactgtatctctttatctaatgcctttctggccattgattaaaatgtatatatagttttcctgtttttgcttatttctgtgat

SEQ ID NO: 161537 - DNA, 628 bp, Homo sapiens
tgctgctggattttgtttgctagtattttgttggggatttttgtgtctatgttcatcagtgatattggctgaagttttcttttttggttttatctctgccagattttggtatcagaatgtttctggcctcaaagaatgagtcaggaagtcttcctccattttttttttttttkgaattattacaataggagtggtttccagctcatctttatatgtctggtagtctttgggtgtgaatctgtctggtcaaggggtttttctggctggtaggctttttattactcttcatttttgaaactcgttattggtctgttcagagttttaatttcttcctagttcaatgttggcaggttatgtttccaggaatccatccatttcttttaggttttctagcttgtgtgcattgagttgttcataacagtctctgaggttttttgtttttttctttctcttggttcgtgataatttttaggttttgaagggaaggcgagggttaaagatatatacagagagagggtggctcaaacagcaacacaggtatattgcagaaacctgcagaaatggaggactggcttaaggccagagccaccactgcttacaggctgtacttgtaggtatgggtgggagg

SEQ ID NO: 161538 - DNA, 514 bp, Homo sapiens
aaagatgtgcaaaatagggtatagggatatacaaatccttattttattaacactgtaaattctacttcctcagaatttccaatttttccctgcctagcagcataaagacagttaaagggacttttggtgacattccccttgtttaatgaagcttggatttatgggcaagtgccttgaactgctgttattatctgcatgagtgaataagggctgagggtccagatctgkgcaaagagttctactgcaaataggcacattgatcattcataatcagacctaccaggtcagcagtgctgcagtgccagcaggctctgaaaaagctgaccaagggagcagtagtgctcacaggttaatgtaatattcaggcagaataagatctttcttatatactaatctctttgctttttttctggcatagtgggagtgagagctaaaacacacttgaactatatctcatataaccaatcgcagagccatcctctgttcatctgagggttctacctgtttccagagc

SEQ ID NO: 161539 - DNA, 497 bp, Homo sapiens
caacagtttccctagggctagattctcctaggagagcaaggtgagcctagggggatggacatcccttgctgggcttcactacagacattcccacaccaaaccctctgggctytgcactggctggaattctgcctctaccatctctctaagcagctctccctgccagctcaggtgttcatggaggtcatggggtctcctgctgccagggttccagaggtgcctggtgggttgctccttgcctgctcaactcaccacttccccaggagttgttgggggccaggagcgagtcccagtacatggtagccccatgcagggttcccagcttcctccaccttcagaccagcttatgtgtcttccctctgtccactgacagtgcttggagtgtgccagtcttcctaatgtcctggacccttggtggcagatgttcctcctggatgcatctagttggccttcttgagagcagccttatctctgttattttttgagaaaaattaagc

SEQ ID NO: 161540 - DNA, 614 bp, Homo sapiens
atggtcaggagaataatcatatgagacagtaaagaactcatgtactctttcctcaattgaagccatagtttatttgtatgtgtgtgctttttaaacatccagaattctaatccaactgtctcaactatcccagaggagaccaggcctaaaaaagccatctgtctcaaatataatgtccaatggtatgtaggtataatttccatgtgctgcttatggaatcactttatttatttataatcatataatttatgttgactgtcattgtataaaaatgcagaacttcactggggagaaaggacataataggttggagaagaaaggtgaagaaaacctgaaaagtttcaacactgttaatctaagaaatttaaaayaagaaccatgggagcatgttttaatattttcctcctaggctagctacttcacacaattcatttgtgtatccactttatattttatgccacagtcttaattacattttggatgtttggtgtattcaaaaaatggtattttttaaataatataaagaattatcaatacagatttttttaaaacttctttttaagtggttaatggtttacagatcttaggttaaaatggaagaccaagaaattgca

SEQ ID NO: 161541 - DNA, 482 bp, Homo sapiens
gaccggctggagccatggcagaggaaaacaaattgtgaagatttcattttaatatggacatttatcagttcccaaataatgcttttataatttcttatgcctgtctttactttaatctcttaatcctgttatcttcataagctgaggatgtacgtcatctcaggaccactgtgatartgtgttaactgtacaaattgattgtgtaacatatgggtttgaacaatatgaaatcagtgcaccttaaaaaagaacagaataacagtgatttttagggaacaagggaagacaaccataaggtctggctgcctgtgatgttgggcaaaaaaagccatatttttcttcttgcagagagcctataaacagatgtgcaagtaggagagatatcactaaattcttttcctagcaagaaatattaatatcctgggaaaggaatgcattcctggggggaggtctataaacggccgctctgggagtgtctgtcc

SEQ ID NO: 161542 - DNA, 426 bp, Homo sapiens
aaaatgtctgcctttgttaatggattgaagatcttataaaacttgccaaaaagttagttgtcaatttcaaggaaacagttcagatcagttaagaaataaaccatctgaaatttcaaacatgttttctttcagwtcaacaaacatttactgagttcctattgcattccaggtactgtgggagattccagaaatacagatatgaagaactcatttcttctctcaagtagcttaaaagcaaggaggcaaaaaacagatactgaaaattcacggggtaaaattaaagcacagagaagaatcaccttccccagccaggaaggtcatggagactttgagggaaacatgaggtacaaactaaatcttgaagagctggcacagttatccaggtaaagaagcaaaagcagaggaaagggtatctcaggcagaggg

SEQ ID NO: 161543 - DNA, 426 bp, Homo sapiens
aaaatgtctgcctttgttaatggattgaagatcttataaaacttgccaaaaagttagttgtcaatttcaaggaaacagttcagatcagttaagaaataaaccatctgaaatttcaaacatgttttctttcagttcaacaaacatttactgagttcctattgcattccaggtactgtgggagattccagaaatayagatatgaagaactcatttcttctctcaagtagcttaaaagcaaggaggcaaaaaacagatactgaaaattcacggggtaaaattaaagcacagagaagaatcaccttccccagccaggaaggtcatggagactttgagggaaacatgaggtacaaactaaatcttgaagagctggcacagttatccaggtaaagaagcaaaagcagaggaaagggtatctcaggcagaggg

SEQ ID NO: 161544 - DNA, 596 bp, Homo sapiens
ccttggaaaaaaagttaataagtagtttcacaatacaattgggggtcttattaattttttwaaaaaatatataattttgagagtggttcaaggaaatggttccaatatcagtaaacagatcttgagagggaaatttttattattaggagggagcatatcctcactgatttatttcattttatattctgtagagtagtcatgaagcctttgaaagcattgtttttccaacgtataagtgataaaaatcacagattatgactcagaatgaaagaaaagaatataaacttatagcaaaatagacaagttcctgatttcataccttttcctgtcaattttattattttctgcctttcctattgttcatattcttcttaatgtcctaagtttctgaacctaatcaactttctacactcataaaataaaaaaagtagaaacaaataaaccaataattaatgcatacttactagaatttgtgctaggcacttttcctcacagaatctccaaatagcagatcaaccaaatgttatttgtattactttttgtgattcattttgggtaacagtattttatagtagatttgtccctttaagaatttg

SEQ ID NO: 161545 - DNA, 502 bp, Homo sapiens
attataatatttataagcttgtttgaggactattttttaattgaaaattctcccaatggatttagtayaggatttaacttgaaaagcattttaaatataacttatatatttactgctaaaaccaacattactaaaattcatgatttagtcatattacctgcaggtttacttagatcattgctctgacctaggtcctgtccaccatattatcaccacagcatagcaaatgtccacttaattaaagatgaaaaatactagctctgaaaatttaatgagctctgttctgtaaagtaagtttgaaggacaaagggctgtttttattgtgtgtgtgtgtgtgtgtgtgtgtgtgtgtgtatgcatgtgtgtacttacaaatgttgactaatatgtagtgcttatcccaatactatttacccaaaggaaaataaatcattctaccagaaagactcatgcattcatatgttcgtcacaccactattcataatagcaaagacatggaatc

SEQ ID NO: 161546 - DNA, 502 bp, Homo sapiens
attataatatttataagcttgtttgaggactattttttaattgaaaattctcccaatggatttagtataggatttaacttgaaaagcattttaaatataacttatatatttactgctaaaaccaacattactaaaattcatgatttagtcatattacctgcaggtttacttagatcattgctctgacctaggtyctgtccaccatattatcaccacagcatagcaaatgtccacttaattaaagatgaaaaatactagctctgaaaatttaatgagctctgttctgtaaagtaagtttgaaggacaaagggctgtttttattgtgtgtgtgtgtgtgtgtgtgtgtgtgtgtgtatgcatgtgtgtacttacaaatgttgactaatatgtagtgcttatcccaatactatttacccaaaggaaaataaatcattctaccagaaagactcatgcattcatatgttcgtcacaccactattcataatagcaaagacatggaatc

SEQ ID NO: 161547 - DNA, 502 bp, Homo sapiens
attataatatttataagcttgtttgaggactattttttaattgaaaattctcccaatggatttagtataggatttaacttgaaaagcattttaaatataacttatatatttactgctaaaaccaacattactaaaattcatgatttagtcatattacctgcaggtttacttagatcattgctctgacctaggtcctgtccaccatattatcaccacagcatagcaaatgtccacttaattaaagatgaaaaatactagctctgaaaatttaatgagctctgttctgtaaagtaagtttgaaggacaaagggctgtttttattgtgtgtgtgtgtgtgtgtgtgtgtgtgtgtgtatgcatgtgtgtacttacaaatgttgactaatatgtagtgcttatcccaatactatttacccaaaggaaaataaatcattctaccagaaagactcatgcattcatatgttcrtcacaccactattcataatagcaaagacatggaatc

SEQ ID NO: 161548 - DNA, 478 bp, Homo sapiens
ggcatgatctcggctcactgcaacctctgcatccccaattcaagcgattctcctgcctcagcttcccaagtagctgggactacaggtgcccaccaccaccatgcctggctgattttttgtatttttagtagagacagggtttcaccgtgttagccaggatggtctcgatctcctgacctcgtgatctgcccgccttggccttccaaagtgctgagataacaggcatgagccacctatatatgcggtcacataaaccaaaagcctaaaacaaaatctgcatttctagacattcattccaactgaacaaacattcattaaatgcagtggttaaaagcagaggactctgtgatcagagacctgggttccaagtatgactcagccttttattaactacrtgcgcttggacaatttacttaacttctttgagcctcagtttgctcatgtgtaatattggaataagattattattgtgaagatt

SEQ ID NO: 161549 - DNA, 584 bp, Homo sapiens
catatcatttcattgtggtcaggcaatattctttgttttattttctattaataatatatggtctaacatgaataatggtctatgtgaaaatgagaakaataatagtccacatggaactcttgttgggtggactgttctatgaatgtctggtagttctggttggtttatagggcaggtcatgtcttctattttcttgtttggttttctctctagtatttcatctatcattgaaagtggactatttaagtgtgcaactcttattgctgaattgtctttttttcatttctgtcagtttttgcttcatgtattttggcactatattgataagtttatatatctttatgattgctatgcattcctagttaattgactattttatagttataatttttcctccttatctctagtaacattttttcttactttgaaattgatttttttctgatattgtatagctattccaactttcttacggttgctgtttgtgtaaattctccattctgttagttggatctaattgtgtatttgaaactaaagtgtgcatcatgtaaacagcatatatttgtcttttaaaaattactatg

SEQ ID NO: 161550 - DNA, 577 bp, Homo sapiens
ttttttctgacagatctcactctgttgcgaaggctggaatgcagtggcatgattacggctcactgcagcccttgaccttcagggctcaagcactcttcctgcctcagcctcctgagtagctggggactataggcgtgtgctaccatgcctggctaatttatayacacacacacacacacacacacacacacacacacacggctaatttttatatatatggcgcatatatatatatatatatatatatattttttgtttgtttgtttttttgtagagatggggtttcttcatgttgccaggctggtctcaaactcctgggctcaagtgatccacctgcctcagcctcacaaagcactgggattagaggcatgagccactgcagccggccagagtatatatttcaataaatttagcaaagaaaagtcttggacctgtttgctttctttcaagattgttgtttgtattatgcttgatttttcaatttatgctcttcagcttctgaccaggcagtgtttaccagtctttattttggcaatcgtttaatccttagataatattcactttattcttctttaaa

SEQ ID NO: 161551 - DNA, 577 bp, Homo sapiens
ttttttctgacagatctcactctgttgcgaaggctggaatgcagtggcatgattacggctcactgcagcccttgaccttcagggctcaagcactcttcctgcctcagcctcctgagtagctggggactataggcgtgtgctaccatgcctggctaatttatatacacacacacacacacacacacacacacacacacacggctaatttttatatatatggcgcatatatatatatatatatatatatattttttktttgtttgtttttttgtagagatggggtttcttcatgttgccaggctggtctcaaactcctgggctcaagtgatccacctgcctcagcctcacaaagcactgggattagaggcatgagccactgcagccggccagagtatatatttcaataaatttagcaaagaaaagtcttggacctgtttgctttctttcaagattgttgtttgtattatgcttgatttttcaatttatgctcttcagcttctgaccaggcagtgtttaccagtctttattttggcaatcgtttaatccttagataatattcactttattcttctttaaa

SEQ ID NO: 161552 - DNA, 577 bp, Homo sapiens
ttttttctgacagatctcactctgttgcgaaggctggaatgcagtggcatgattacggctcactgcagcccttgaccttcagggctcaagcactcttcctgcctcagcctcctgagtagctggggactataggcgtgtgctaccatgcctggctaatttatatacacacacacacacacacacacacacacacacacacggctaatttttatatatatggcgcatatatatatatatatatatatatattttttgtttgtttktttttttgtagagatggggtttcttcatgttgccaggctggtctcaaactcctgggctcaagtgatccacctgcctcagcctcacaaagcactgggattagaggcatgagccactgcagccggccagagtatatatttcaataaatttagcaaagaaaagtcttggacctgtttgctttctttcaagattgttgtttgtattatgcttgatttttcaatttatgctcttcagcttctgaccaggcagtgtttaccagtctttattttggcaatcgtttaatccttagataatattcactttattcttctttaaa

SEQ ID NO: 161553 - DNA, 599 bp, Homo sapiens
gacaggatgtgaggaatgaactttcccaggaaacttaaggtcacccttcaggaatcctgtcttatctagtgctgtcatttcagattacccagatttaccttagaacttttcctgtaactgtttcagccatgaaggttttcagtttgacagagttgccaagccaaacagttaattggaccaggagaggcaatgattgcctgtttgcactaactcatccatgggacaggaatcagcagcataagaattgtaatgaactttctgtatagctttgggaagcaacaagctgttgagcaaataaatagcactgaaaaagcaatcctatggtgctatttttttgttcaataacttttgcctatttctttcaggagtaracaaactcctggtccttttcagttttaaaaaggagagaggttgaggcactaggttaagaccaggagttcttcacttcctggtcttctggttattttctgtttactatttctgatttttatatattagaataaaatattggtttgtgtgtcatttcttaaagacaaaaaacatatttttcctattaggaaaaccatatttgtttactatatataattatagaacaagtt

SEQ ID NO: 161554 - DNA, 526 bp, Homo sapiens
aacaatactaaaatacgtatataaaaaactatatatagtaagatatgtatcctactatataatatatatatggtaatacatattatartaaggtctgcatcatgtatataaaaatacactatatatcttattattatatatatagtgagatgaggtgtattaatccattctcaggctgctaaaaaagacatacccaagactgggtaatttgtaaaggaaagaggtttaaatgactcacagttcagcatggctggagaggcctcaggaaacttacaatcatggtggaaggggaagcaaatacttccttcttcacatgatggcaggaaggagaggaatgagaaccgagtgaagggggaaaccccttataaaatcaacagatcttgtgagaacttactcactatcataagaatagcatggggcaaactgcccccatgattcaattacttcccaccacatccctccacgacacgtggggattatgggagctacaatccaagatgaggtttggtggggacaaagccaaacc

SEQ ID NO: 161555 - DNA, 592 bp, Homo sapiens
tcatgttgttataaaatatttaaatatcactggtaaaacaaataagtaaaatctataaattatgggaagatattacctaatcttttgaaactaactttaatacctgtctcctaaacatattagtaaagccccacacttaatagctcagtttcttttaggcccatgtcccgcttactcccatccccagctcmtaataagttgaccacacctcctttggagaaaaggggcctcagctgaggacaggaaccaatctccaatagcattataaccaaatctgcactttttaaaactacatttcaaataatagccattctgacttaggtgagatggtatcttattgtgattttaatttgcacttctctgatgacccacgacgtggagtatttgttcacgtttcttggctgcatgtatgtcttcttttgagaactgtctattcatgtccttggtccgctttttaatgggttgtttgttcttttcttgtcaaattgcttatgttctttatagattccagatattagaccttcactggatgcatagtttgcaaatattttatctcgttctgtaggttgtctatttactctgctgatagttt

SEQ ID NO: 161556 - DNA, 592 bp, Homo sapiens
tcatgttgttataaaatatttaaatatcactggtaaaacaaataagtaaaatctataaattatgggaagatattacctaatcttttgaaactaactttaatacctgtctcctaaacatattagtaaagccccacacttaatagctcagtttcttttaggcccatgtcccgcttactcccatccccagctcctaataagttgaccacacctcctttggagaaaaggggcctcagctgaggacaggaaccaatctccaatagcattataaccaaatctgcaytttttaaaactacatttcaaataatagccattctgacttaggtgagatggtatcttattgtgattttaatttgcacttctctgatgacccacgacgtggagtatttgttcacgtttcttggctgcatgtatgtcttcttttgagaactgtctattcatgtccttggtccgctttttaatgggttgtttgttcttttcttgtcaaattgcttatgttctttatagattccagatattagaccttcactggatgcatagtttgcaaatattttatctcgttctgtaggttgtctatttactctgctgatagttt

SEQ ID NO: 161557 - DNA, 413 bp, Homo sapiens
taatttcagaattctatgagaccaaggcaggaaaatcatttgagtctaggagttcgagaccagctgggcaacrtagtgagaccctcatctgtacaaaaaataaaaaattagctgggcatggtccgcatgcctgttgttctagctacaggctgaggcaggagaatgccttgagcctgggaggtcaaggctgcagtgggccctgactacatttctgccggggcaacagaaaaagaccctgtcaaaaaaaaaaaaaaaaaaaaaaaaaagaaaagaaaagaaaagaaaagaaaaagaaagagagaaaaatccctaaacatggatgaatatcgtcttttaaccccttttccattgactagaccatttttactttgtaggcccggtaactcatgaaatctcacctttacaaggaaaag

SEQ ID NO: 161558 - DNA, 451 bp, Homo sapiens
ttagcaagttaccaaagaaaaaaatctggtgtagaaatggtataagttgcagtacaatttatgtaatgaattataacttaaatattaattttatggtacataatttaactctttgcagctgttcctaaatttttaagtgtccttcaggtgcctgcaagtagcactacttcagaaatggaatgaggtagggttcttttgttytggtatcctgtcacaatagctttcacctgccatcaacaacatgggcctacaaataaaaagatggcagtacctggaagccagttgatgatgtgtttttgaaccttgaataagctgcttattttgaagagctgctgccaatatctcttcccaccaccaagctgtcaggagcattctgtagctgtgcttaggatagtacagttgtggacatgtctgcctgggtgtttggatgatgagatcacaggcctctgtg

SEQ ID NO: 161559 - DNA, 454 bp, Homo sapiens
aatttagcaagttaccaaagaaaaaaatctggtgtagaaatggtataagttgcagtacaatttatgtaatgaattataacttaaatattaattttatggtacataatttaactctttgcagctgttcctaaatttttaagtgtccttcaggtgcctgcaagtagcactacttcagaaatggaatgaggtagggttcttttgttttggtatcctgtcacaatagctttcacctgccatcaacaacatgggcctacaaataaaaagatggcagtacctggaagccagttgatgatgtgtttttgaaccttgaataagctgcttattttgaagagctgctgccaatatctcttcccaccaccaagctgtcaggagcattctgtrgctgtgcttaggatagtacagttgtggacatgtctgcctgggtgtttggatgatgagatcacaggcctctgtg

SEQ ID NO: 161560 - DNA, 620 bp, Homo sapiens
gtgatttattcagtgttcactgcacaggcaatgtaagggcataggtaaacacatgggcttcccaaggccacaggttttttttctttaacttgcatttaaaaatcctcctgcaggcttagccttgtgggaggagggtaacacctccaggagccctaacaggttttcacatgaaagatctcagaaaacgtccttcatgyttccagtagggagaaaggaaagtaaccatttttaaatacacccagattttcctttttttttgataaggtctgccttcacgagaaagtattttaccagagcttaacctattgtagttttaccagataactaacctggtgaagcagcctcattgtctggggtgccacccgaagttctttgtctcacagttgaggaaatcaggaatgtggacactccaagggtgagtttagagcagaagtttaataagagaaagaaagagagaaagctatctgtcatagaaaggggttccaaaaaagggttgccattttaacagttcaatgcaaagagtttcataagaaactgatgagggctgggcatctcatttgcgtaaggtgctaatttctggtagctccaccccatcgtccaaatgcgcatgtgggccctta

SEQ ID NO: 161561 - DNA, 535 bp, Homo sapiens
tcacctcctgctgggttcgtcccatgacacgtgggaattgtgggaattataattcaggatgagttttgagtggggacacagccaaaccatatcatctccttaaagaatttgaattaataattaataaccttttaaaacagagcrcaccaagcccagatagactgattggtaaattctaccaaagatgtaaggaagaaattataccaattatctacaatcttttccaggaaacagaataaatactcactttttgatgccagtatcatcttaataccaaaattggacaaagacattatagaaaagtaaactgcagaccaaactgctcataaaatagatgcaaaaaacttaacaatataacataacaatgcatgaaaagaattatatgactaactgggatttatttcaggtatgcaatgcataatattgcatgaaaagagttatatgactaactgggatttatttcaggtatgcaaggctgatttgaaaaatcagtgattgtagtctatcacatcaacaggttaaagaagaaacccta

SEQ ID NO: 161562 - DNA, 538 bp, Homo sapiens
caattgaaaacatgaagttgccaataactgagattggggagacagcaagggaaagtgcattggaaggggaagaagatgaaggaattggttttagagaaactaagtgtgaaaacccaattagatattcaagtggattttctgaataaacaagaygcaagatacataaggctggaatttgagggagagaggtctctattagaaatatacatgtcaagcaatatttaaagccatgaatacatagatattaccaaggaggtgtatatatttatttaacaacataaatccaggtatgaagttatgtggcattcagaaccaaacaacattcggaaggagaagccaataagttaggaggaagacagtaggtggaaagatgcagggcagcaatgtctttcaaagaggagagagtgctcaactctatccagtcctactgataggtagggtactcatttagtgtccaaatttgaaaacttttaagcatgagtactggtactattagtacctgtaataggacaatggttataatcagtgattgtcacag

SEQ ID NO: 161563 - DNA, 538 bp, Homo sapiens
caattgaaaacatgaagttgccaataactgagattggggagacagcaagggaaagtgcattggaaggggaagaagatgaaggaattggttttagagaaactaagtgtgaaaacccaattagatattcaagtggattttctgaataaacaagatgcaagatacataaggctggaatttgagggagagaggtctctattagaaatatacatgtcaagcaatatttaaagccatgaatasatagatattaccaaggaggtgtatatatttatttaacaacataaatccaggtatgaagttatgtggcattcagaaccaaacaacattcggaaggagaagccaataagttaggaggaagacagtaggtggaaagatgcagggcagcaatgtctttcaaagaggagagagtgctcaactctatccagtcctactgataggtagggtactcatttagtgtccaaatttgaaaacttttaagcatgagtactggtactattagtacctgtaataggacaatggttataatcagtgattgtcacag

SEQ ID NO: 161564 - DNA, 538 bp, Homo sapiens
caattgaaaacatgaagttgccaataactgagattggggagacagcaagggaaagtgcattggaaggggaagaagatgaaggaattggttttagagaaactaagtgtgaaaacccaattagatattcaagtggattttctgaataaacaagatgcaagatacataaggctggaatttgagggagagaggtctctattagaaatatacatgtcaagcaatatttaaagccatgaatacayagatattaccaaggaggtgtatatatttatttaacaacataaatccaggtatgaagttatgtggcattcagaaccaaacaacattcggaaggagaagccaataagttaggaggaagacagtaggtggaaagatgcagggcagcaatgtctttcaaagaggagagagtgctcaactctatccagtcctactgataggtagggtactcatttagtgtccaaatttgaaaacttttaagcatgagtactggtactattagtacctgtaataggacaatggttataatcagtgattgtcacag

SEQ ID NO: 161565 - DNA, 511 bp, Homo sapiens
atgaggcattttgtcataaaagatttcagggaaataggcagtagctggagtcataaatagggaaggaaatactttttttttaaaaagagatagaaaaaaacagcatgtctgtatgctgattggaataaggcagtagaaaggaaagttggatgacgtgaaactttgcattagaaagtggaggagtgccagtgtgatgctcctttccaatttcacatttgggaggaaatgtgttcttgtgcaaagatagaggtagccttaacraaaggcaccatgaacttatccacagtaacagcagggaaagccaatttatgggcatggatgttagtaggcaggtatgggtggggtcttaaaaaagtttcttctgattgtttgcattttgtcagtgaagtagcaaggtcgtcatcagagaagaagaaaacagattagagtctgggtacagtggctcatgcctataattctagcactttgagaggccacggcaggagaaccacttgagaataggagttcaaga

SEQ ID NO: 161566 - DNA, 490 bp, Homo sapiens
tttattaatcatgtcaactagsgaaagttattccactcttctagcttctattttttttttaatctgttaagtgaagtgagcgaaacagaagtgaacacactgggactctggtccacattccctcagacttttttcatggacactcctttcctcagctcctttggcatttgcttcaaacagcctgcatctgaatctccctttgaaagacttcccttgagtcactagaaccatttttcctgcctgggcagaaagctggaagtgactgggaattacattaccccctagggatatggaaacctctaccttatgaggacaagatccaagctgtaatttgccctccacagttctcccaaagaatgagaccagggctagagcatcaccagaaactgtaccctgcttgcctttttcctttccctgttctacatcccccattcccttctggcttctcccagggcggtaccttaataaaatgctttaacacaaatcctca

SEQ ID NO: 161567 - DNA, 488 bp, Homo sapiens
ttcctatttattaatcatgtcaactagcgaaagttattccactcttctagcttctattttttttttaatctgttaagtgaagtgagcgaaacagaagtgaacacactgggactctggtccacattccctcagacttttttcatggacactcctttcctcagctcctttggcatttgyttcaaacagcctgcatctgaatctccctttgaaagacttcccttgagtcactagaaccatttttcctgcctgggcagaaagctggaagtgactgggaattacattaccccctagggatatggaaacctctaccttatgaggacaagatccaagctgtaatttgccctccacagttctcccaaagaatgagaccagggctagagcatcaccagaaactgtaccctgcttgcctttttcctttccctgttctacatcccccattcccttctggcttctcccagggcggtaccttaataaaatgctttaacaca

SEQ ID NO: 161568 - DNA, 579 bp, Homo sapiens
tacatttcagtattcttgtgtctcagggaatagggaggcccaagaacagtgagagagatggggaaatggctggttggtggagtagtcaaaatacacatttatcagttaagctcaccatcttatatgagtgcagtttttggcactctgaaacaattacaatagtaacatcaatgatcacagatcaccacaacagatataataatgaaaaagtttgaaatcttsacagaaataccgaagtgtcacagaaacacaaagtgaggacatgcttttgaaaaattggcatcaatagacttgctcaatacagagttaccacaaatattccatcttttaaaaaatgcaatatctgcaaaatgcagtaaagcaaagctcaatgaaatgaggtatgcttttatgtggatttatttctgggttctctattctattccattggtatatatgtctgtttttatacagataccatgctgtttttgttactatagctttacagtatattttgaagtcaggtagtgtgatgcctctagtttattatttttgctcagtattgctttggctattcaggtacttctgtgtttccataga

SEQ ID NO: 161569 - DNA, 561 bp, Homo sapiens
ctgaaatgcctgcatcagacatttgtgtttactatattcccttcacccatccttaaccttgttgcctcaaattggcaatttcagaggaagagctcatggcaagaataaataagcagctgtttatggacaacaaagtcactgttgtaataatgagatctggttggaagttagaattattgactctggattgttctgtgaattctgaaacccaaagattatttaaaaacttcctgaagcaaacctcagatcctcatcaggcaccactctgtgcttaccaatgcgtaagtgctatagagaatgtgaaagaagaggaggaaggacagcaggrctccaaagacaagcaaacccaattttgacaaaacatgggcaaagtaagggggaaaagtatccagttttgactcaacaattaaaatgtattttaattgtatttcactactttggccattgcttggactcattacagtgaatattcagaaacaaccgataaattttaaaatcagtggggctgaaacctgaggatctctaatgttttatttcctcagtctcggaaagctgggaaca

SEQ ID NO: 161570 - DNA, 561 bp, Homo sapiens
ctgaaatgcctgcatcagacatttgtgtttactatattcccttcacccatccttaaccttgttgcctcaaattggcaatttcagaggaagagctcatggcaagaataaataagcagctgtttatggacaacaaagtcactgttgtaataatgagatctggttggaagttagaattattgactctggattgttctgtgaattctgaaacccaaagattatttaaaaacttcctgaagcaaacctcagatcctcatcaggcaccactctgtgcttaccaatgcgtaagtgctatagagaatgtgaaagaagaggaggaaggacagcagggctccaaagacaagcaaacccaattttgacaaaacatgggcaaagtaagggggaaaagtatscagttttgactcaacaattaaaatgtattttaattgtatttcactactttggccattgcttggactcattacagtgaatattcagaaacaaccgataaattttaaaatcagtggggctgaaacctgaggatctctaatgttttatttcctcagtctcggaaagctgggaaca

SEQ ID NO: 161571 - DNA, 632 bp, Homo sapiens
tttaatttttaatcaataactacattgttttattgtggcatccagggatctcataattaaatttcctgtccaagtataatatgatttacgcttaaagttaacaaaattggtaaaactgttttccacctttttctactatgatttgcctgtcattataaaaatacagctgaagaagatagtcaggaattgatacttaataggtggtcaacagatattgattccccccaacatacttcaatctactaataaattttcattcgtttagatattattaaccattatacatgagattttagttgtagctatataaattttttaaagtagggtacacgtgacttatcagtaatggccctcaatatatatggttctgattgaagtattacataaatatttattggatgcctattatgtggcataacaaaaccatatggtatgggtaatgacaatttaaataaatttagctcaataaataaatcaaaatgttgggaacagattatgtgytcctttggccttgttaaggaaatgttatactacataagtaatatataatcattggaagaacaaatttaaaaatggaaattatgaaaataaagaaattagtattaaaatcacttgcaagcctgttgagacag

SEQ ID NO: 161572 - DNA, 447 bp, Homo sapiens
acatagcgtgggcaagatcacagggttaagatccaaacacaagtctttgtgactccaaatcccacactctttcgcactctccttcatgttcaggagagtatgtttcttgagttytctctgcagaagacatcattgtgcaaagaaagctctgagcagagcagggaaacctcctcagatttttcagcctgttagaatccagacagtgagaaagctgctgctttgatgagctacaactgcattctgttgctgagaacctcagttccccagtgtgtaaagagggtgagggtaggaggaaaagcaacacagttccaaaagaatagtggagttgaatactgaattcaaggacagatacagaaactcacattgactcattcattaatgaatgaaaggtgaatataagaagggtatattagattaccctaaataatgttctaatcaaaccaaggg

SEQ ID NO: 161573 - DNA, 404 bp, Homo sapiens
ccaacatccaaactgagagccaaatcaaaacacaatctcattcacaatagccacaaaaataatgaaatacctaggaatttaatgtcagacttcaaacacagctttgagatagatcaaaggcaaaaacagaaataggctttctctatgccatctacattaagatgwttttggctatcaaccagaatttttaatgaataaaagggagttgtttatcgtgacttggtaaagccattctgaaacacgtttcataaaacgaattcttaacatgttccacttccctctaccctccacaataaaaaaggaaagaaatattttgaaaacttagttaccacagtaagataaccatattttatgtatgacttgataaagtacagtattttaaccactttgaggtatagcttttt

SEQ ID NO: 161574 - DNA, 404 bp, Homo sapiens
ccaacatccaaactgagagccaaatcaaaacacaatctcattcacaatagccacaaaaataatgaaatacctaggaatttaatgtcagacttcaaacacagctttgagatagatcaaaggcaaaaacagaaataggctttctctatgccatctacattaagatgattttggctatcaaccagaatttttaatgaataaaagggagttgtttatcgtgacttggtaaagccattctgaaacacgtttcataaaacgaattcttaacatgttccacttcccyctaccctccacaataaaaaaggaaagaaatattttgaaaacttagttaccacagtaagataaccatattttatgtatgacttgataaagtacagtattttaaccactttgaggtatagcttttt

SEQ ID NO: 161575 - DNA, 568 bp, Homo sapiens
catcagaaacttttctaatgcataagatttggaagatgggtcattcgagcttatgggtcaagtttttaaattttatgataaaatagaaacagttaagaaattcaagtacactgagcctcawgcacttactagtcttaaaaaaatcacacacattcaacgtagtccaggacaattctaaacatacttgcttcctatgaaacaagtacaagtgaatcgtttactgatataggaaaaatacactagccattatgcctagcaaaatggaagacagctgtatttctgaattttattttgaaatacgtttggtgcattgaaggtaatagatataaaaaatcattcagtataaaaggtagacaaatattatctaaagccttttaaaagaagtatgccacttatgcattgatagactgtaagagaataaattattactttggctggatctatagttcaagctttgaatttgccaatcaggagacaaaagagggactttatcataatgttatctaccataatagctctgtgactctcttaatttgaaaagttcatcaagcatacataaatttagatg

SEQ ID NO: 161576 - DNA, 293 bp, Homo sapiens
agtagctgtctcatccttaaaagccgagtgaattactactactatttttgctcttaatctgataccaaagggaaaaacagtgtgctgctgagaagtgtagctttggaacagtgctcagctcagttaggcaacaaatgcccagtaatgacctgattttggaggctggagtatgaaagcagagcaacactgccttgagtattgatcattcactrgacttgcagtgacttggcatagcaaaattattcatgctccccatattaacaaatttaggttattaactacagttgttacct

SEQ ID NO: 161577 - DNA, 605 bp, Homo sapiens
aaaccagcacttaccagtactgactgtaatttattctaataattttaattccaatgtgttccataatgttaaaacttttaaatattaaaactttaaaaatctggttatggccaatttaactgacttaaaaacccataatgtgtgggtcaccatggtttgaaaatagcaaccttctttgtttaaagtaaccactttttccagtaatcaaaaatggtttctattagctgtaaaacttgttggctttgactcatataagtcaaatgcctctgcatgatagactcaaactttacttttaatctttgaaatattacattgattcagtgagccactgaattgtttgctatctgataagaaaaacataatgccataaataaaaatttatatatttgtctaggatatagacatatttttcatatttatctattcaagcaarcagaaaaaaatgactttaaaaatgtagtctccttgtctccattgttaatggcaacatcttgattatttttatccaaatcaaacacatatttgtttgagtttttcacatgtatgaaaaagttgttagagaaatcagatcctgacttgaagcccctgacttccagttgcagcag

SEQ ID NO: 161578 - DNA, 461 bp, Homo sapiens
ctctcctttattttctggactaataactgttaaatcctctgacattcttatatcctgatctaaggagaaacactcaggaaagcatcccctttggtatgataggtcaacagagttaaaaaaaaattaaaggtacagggttttgaaaataacctcatataccatctcttatgaaaagtttatgtaagtactagaccatctagaacaatgactctcaaagcatggttctaggagcaacagcatctcctgggaacttgctagaaatacaaatttctcagttctcaccctagtcttacttaaggagaaataattctgggccgagtaacatgtattttaactagccagctacagaattctgatgctccctaacactggagaycattgatttagaacatttggaatgccaattgggagtaaggtcaattgagaggccaaaatcagaccctgaaaagagttttggaagg

SEQ ID NO: 161579 - DNA, 437 bp, Homo sapiens
tgctcttgcatgttctgaggtaagctccacttctacctttcttcaatgacttggctaagatcccttactatcctgtctcatgacacccatgacttaggkacgattcccttgtctgtccacttctacaaaacccccaagtccccttccttttctttgatgtttctcattcataaatgttctctctattgcaatagcctaaataaaataatctcctgtattgtttagtgcattttgcctttgatagtacagataatctagcatggtgcttatgtacctatcaataaaagtttgttcttttatgctttccctattatcctgccttatcctccaaaattcttttaattcacaccctgaagacatctacaactttttggagacctattatttgctgactgtcagcatttatctcttctattgtgcctctgaaatatttgtgc

SEQ ID NO: 161580 - DNA, 437 bp, Homo sapiens
tgctcttgcatgttctgaggtaagctccacttctacctttcttcaatgacttggctaagatcccttactatcctgtctcatgacacccatgacttagggaygattcccttgtctgtccacttctacaaaacccccaagtccccttccttttctttgatgtttctcattcataaatgttctctctattgcaatagcctaaataaaataatctcctgtattgtttagtgcattttgcctttgatagtacagataatctagcatggtgcttatgtacctatcaataaaagtttgttcttttatgctttccctattatcctgccttatcctccaaaattcttttaattcacaccctgaagacatctacaactttttggagacctattatttgctgactgtcagcatttatctcttctattgtgcctctgaaatatttgtgc

SEQ ID NO: 161581 - DNA, 455 bp, Homo sapiens
gtccctgctttattgaatgaagatcaaaatagctctatcattgagttgttgaaagagattaatgagataatgttaataaattatttgggccaggtgtggtggctcatgcmtgtaatcccagcactttaagaggccaaggagggcagatgacttgaggccaggagttcaagaccagcctggccaacatggtgaaaccccgtctctactaaaaaatacaaaaattagccaggggtggcaggtgcctgtaatcccagctacttgggaggctgaggcaggagaatcgcttgaacccaggaggcagaggttgcagtgagctgagatcacaccactgcactccagcccagcgacagagtgagacactatcttaaataaataaataaataaataaataaattagcatggtgtctggtatagagttccacacatgatagctagtatcactctaagtcaatgtt

SEQ ID NO: 161582 - DNA, 455 bp, Homo sapiens
gtccctgctttattgaatgaagatcaaaatagctctatcattgagttgttgaaagagattaatgagataatgttaataaattatttgggccaggtgtggtggctcatgcatgtaatcccagcactttaagaggccaaggagggcagatgacttgaggccaggagttcaagaccagcctggccaacatggtgaaaccccgtctctactaaaaaatacaaaaatyagccaggggtggcaggtgcctgtaatcccagctacttgggaggctgaggcaggagaatcgcttgaacccaggaggcagaggttgcagtgagctgagatcacaccactgcactccagcccagcgacagagtgagacactatcttaaataaataaataaataaataaataaattagcatggtgtctggtatagagttccacacatgatagctagtatcactctaagtcaatgtt

SEQ ID NO: 161583 - DNA, 376 bp, Homo sapiens
tatctgtccagaagaggaaactataaaaagtaatctagcataccaaaaaagtgccaaatagaaattctgaaaataaagactagattacaatctttgaaattcaataacttaayagatagatttaaaagcaaataagacacagtgaagagaaaataaatgaactggaaaataagtcataggaaattgaatagaaagcagcatacagaaatgaaaagatggaaacatagaagagaacttaagagataagtaagagaaaaagagcaaatataatacgtatctaactggagttcctgaaggaaagtagagagaagggcagagtcaatgtatgaagatgatggctaagaaatttccagacacaatgaaaagcattcaagaa

SEQ ID NO: 161584 - DNA, 580 bp, Homo sapiens
aagcttatattgttcatctctcttctcagaaagaagttagccagatgtgttgctttggccaaggtgcattcccctttcacttgctctttgatttgtcttctccctgacatcatttgcattgggcaggatctgacttaggaaatctcatctaattttctacctttacatyggcaaataataaaagcacctactttccagacaaaattgccataaggattaaatgggataataaaaggaaagaatttagagcaatgcccaatgcatagtatgttcttcaaaatgttcacaacaaatcagcaatccaagccctacttgttctgccccatctgatcaatttggagaatgatgttagtaaaagcaatcattaaagcagatgtcttcaattcttataggaaaaggttactgtgaaatccagagaagagaatacactgctatccttcccttttttaaaacttaactttccagatttctcctggcgtgcttctctggctgtgtatacatgagaatcctctggaagatagagttgggggtggtggacactgttaaaaaggagattctcaaggttttcccattctcagga

SEQ ID NO: 161585 - DNA, 589 bp, Homo sapiens
gatctggcttttgacccagatacatggagtatgccactgcctccaacagtttaaattgaaatatatctctcctaggtaggtaatttgtcagctgaaggttaatgacagtgaaatgctaatgatcaaatggcaattaaatgtatcatatttttaaaccaaactcccttaagaagcattactgtataattacactctaggaaacctgcgtcatctactaaattaatgccagggaaaccttccttcttagcagcagcatgtttgtcttctatctttcttgatttkattttacaagtttcataaatcatttagcagctgcaattgttgtcaaaatgttttggtttcaaatgtaaacatttataactattgttttatttcccaaaacaaagaggaagaactgtgttgaaaacagcaactagaacttcccaggcttttagcttaactggagctgagctgccattgcaggactgggtcctcttgaaagccctatcccaaggcttccttgagaattcatggtggtctttgccagatggcacatgccaggtcaaaagctggagcgcccattagagatcaaggatttctgaccctaact

SEQ ID NO: 161586 - DNA, 478 bp, Homo sapiens
tatttacttggatcttctctctcttattagtctggttaaaagcttattgattttgttcatctttttttttwaaacaacaactttgtgttgcattgatttttttttagtcttaatctcatttatttcttctctgatctttattatttcttttcttctactaatattgggtttggtttgcttttccttttctaattctttaagattcatcattaggttgtttatttccagtttttctactttcttgatgtaggtatttattactgtaaacctcctcttagtactgcttttgttgtatcccatagattttggtatgttgtgttcccaattttgtttttggatattgtaaaattttctttttaatttgttcactgactcagtggtcattcaggagcattttacttaatttccatgtttgtatagtttccaagattccttttattattgatttctagtttattttctattatggctagaaaag

SEQ ID NO: 161587 - DNA, 478 bp, Homo sapiens
tatttacttggatcttctctctcttattagtctggttaaaagcttattgattttgttcatcttttttttttaaacaacaactttgtgttgcattgatttttttttagtcttaatctcatttatttcttctctgatctttattatttcttttcttctactaatattgggtttggtttgcttttccttttctaattctttaagattcatcattaggttgtttatttccagtttttctactttcttgatgtaggtatttattactgtaaacctcctcttagtactgcttttgttgtatcccatagattttkgtatgttgtgttcccaattttgtttttggatattgtaaaattttctttttaatttgttcactgactcagtggtcattcaggagcattttacttaatttccatgtttgtatagtttccaagattccttttattattgatttctagtttattttctattatggctagaaaag

SEQ ID NO: 161588 - DNA, 478 bp, Homo sapiens
tatttacttggatcttctctctcttattagtctggttaaaagcttattgattttgttcatcttttttttttaaacaacaactttgtgttgcattgatttttttttagtcttaatctcatttatttcttctctgatctttattatttcttttcttctactaatattgggtttggtttgcttttccttttctaattctttaagattcatcattaggttgtttatttccagtttttctactttcttgatgtaggtatttattactgtaaacctcctcttagtactgcttttgttgtatcccatagattttggtatgttgtgttcccaattttgttttyggatattgtaaaattttctttttaatttgttcactgactcagtggtcattcaggagcattttacttaatttccatgtttgtatagtttccaagattccttttattattgatttctagtttattttctattatggctagaaaag

SEQ ID NO: 161589 - DNA, 590 bp, Homo sapiens
aaacactggggcctacttgagggtggtgggtgagaagaggaagatcagaaaaaataactgttgggtaccaggcttagtatatgggtgatgaaataatcagtacaacaagcccccatgacatgagttcacttaaataataaacctgcacatgtacctctgaacctaaaataaaagttaaaaaaaaaaatcaacattccttgaaaaaaaaaactggcttttttttttaaaggaaaaaaacaacatcaaaaccccmaaaacaagtaacctacagcaataacacaacaatgacaaagcctgtctaccaagaaaaatgtcaggaaaattatagttaaagcagtgacaagcacagattttctttcccaaacatgatcactgtagagggaggactgacaggctgggctgtttgaacaagctggtgcttgggtcatttctctttagtcctgtctggttggacactagtccacgattcgtagtctcctctcaaaatacaatcacctccatctcctcctctcttcaattcattcttggatgtcaccctcacttcctgcttcaccaagaaaaaaaaaactaagagaaaggaactgactcaa

SEQ ID NO: 161590 - DNA, 614 bp, Homo sapiens
aatctgaaaaagaaatttaaaaagtaatcctatttatagcagctacaaataaaataaaatacctagaaataaccttaaccaaagaagtgaaagttatctaccatgaaaattataaaacattactaaaagatattgaagaggacgtcaaaacatggggaagatattctatattcacagacagaatcaacattgttaaaatgtccatattacgcaaagcaatctacagattcaatgcaatccctattaaaatgtcaatgacattcttcactgaaatagaaaaaataatcctaaaatttatgtagaaactcaagatacaaagactaaggatagctaatgactatcctgaacaaaaagaacaaagctagaggcctcacactgccttatttcaaattatactacaaagctttagtaaccaaaacagtgtgatactggcataaaaacagacaaagataccagttaaaatacaaagcatagaaataaatgcatgcatttacagtcaacttatttttgacaaaggcaccaagaatrtacaccgagaaaagaaaagtcttttcaataaatggtgctggtaaaactagatatccatatgaagaagaatgatattagactatcat

SEQ ID NO: 161591 - DNA, 568 bp, Homo sapiens
ctcataattttctgtcttgtttacttatgacaaggccggacacagaccctccaaatttctaactcttggtctcatcaatgattagctgaaccggttgccatcataaatcaacaggtacaaaatgctggttacctaaacktctcccaagctcctcagctgtggctcaccctcagcctgagctggtgcacaccagaaaataggctggcctcaggtaaatcactgtctgatctaccagctgatcatgctacatagtcatttagctgtttccagccttgtttactccgctttctaaagaaaaacccatttccccagcctttgagtcctggtagatttcatgtcatggcattattcctattgcgatagttctctccctgtttcaagtctcttccccactccccttgcaatactttttttggttaaatctctccttactaagcctgtattttttttttatttgaccccatgggttgtgatggggttcagaacacacttccccaaaatatggcactggtaggatgaatattttaagctgaaggaatttgagaatggtcaggtgcacgaaggactc

SEQ ID NO: 161592 - DNA, 421 bp, Homo sapiens
cgggagttcctttcaggaaaattatttggatgatacttttagttatgcaagtgtaatgtaaaaagactgcagggatgaagatgtgggagaaactggctcaaagtagttaaattactgtgaataacaatatagagtttgcttttgttgcagcaaaagttgcatatttagatgagtaattttattaaagcagtatttctcaaacttttcaacagatcctctctgagcgatgaattttacagtttacattgtgaccaagtacacaaacacacacctgtttcacaatttcccttatcacacacaggtcttggataatttttatttattttttttaatgtctaaaaaatgcttayggttattcattatactgacttcaagaataccactggattgcaagctaccatttaaaaaatgtattggagaa

SEQ ID NO: 161593 - DNA, 443 bp, Homo sapiens
ttcttctatctaactacatttttgyacccattagacatccctctgtattctcccctccacaccagcttttctagcttctgattaccatctttctactctctgtctccatgggctcaatttttttttttttagctcccacatatcagtgagaacacacaatatttgtctttctgtgcatggcttattcacttcacataatggccttcagttccatccatgttgttgcatagtacaggatttctatgtttcaatggctgaataatattccattgtgtatatgtactatattttttcatctatttagatgctgataaacacttgattctgtatcatattgtgaatagtgctgcagtaaacatgaaagagcaggtatcactttgatatactggtttcttttcctttggatatattctcagcagtgggattgctggatcgtatggtag

SEQ ID NO: 161594 - DNA, 502 bp, Homo sapiens
tgattctttctcctcccagctcaaatctgttgttcagtgcctctaattaatacttcattgcagttattatacttctggattccagaggttttttaaagaataattttgtctctatattgatgttgtctatttggacaggcatcattgtcctactttccttcagttctttaaacatattttacttataattgctgatttaaaatctttgttttctaggaagacaatctgagcatcctcatggatattttctgttggctctcttttttcctatgaatgcgccatgtttttctmtttctcatgtctttctttgttgaaaactggacattttagatgtattgttgcaatgctggtatcagattctcctgttcccataggtttgttgtagctgatttgttgtttttgctattgtttttcttgtttctgtttattcatttagtgacttccctggactaattctgtagattttgtattctcagcagtgtatggcttttgagttgagttc

SEQ ID NO: 161595 - DNA, 502 bp, Homo sapiens
tgattctttctcctcccagctcaaatctgttgttcagtgcctctaattaatacttcattgcagttattatacttctggattccagaggttttttaaagaataattttgtctctatattgatgttgtctatttggacaggcatcattgtcctactttccttcagttctttaaacatattttacttataattgctgatttaaaatctttgttttctaggaagacaatctgagcatcctcatggatattttctgttggctctcttttttcctatgaatgcgccatgtttttctatttctcatgtctttytttgttgaaaactggacattttagatgtattgttgcaatgctggtatcagattctcctgttcccataggtttgttgtagctgatttgttgtttttgctattgtttttcttgtttctgtttattcatttagtgacttccctggactaattctgtagattttgtattctcagcagtgtatggcttttgagttgagttc

SEQ ID NO: 161596 - DNA, 447 bp, Homo sapiens
ttatttcttctatctaactacatttttgtacccattagacatccctctgtattctcccctccacaccagcttttctagcttctgattaccatctttctactctctgtctccatgggctcaatttttttttttttagctcccacatatcagtgagaacacacaatatttgtctttctgtgcatggcttattcacttcacataatggccttcagttccatccatgttgttgcatagtacaggatttctmtgtttcaatggctgaataatattccattgtgtatatgtactatattttttcatctatttagatgctgataaacacttgattctgtatcatattgtgaatagtgctgcagtaaacatgaaagagcaggtatcactttgatatactggtttcttttcctttggatatattctcagcagtgggattgctggatcgtatggtag

SEQ ID NO: 161597 - DNA, 563 bp, Homo sapiens
aagaatctctcagtgataaaaatataggcagagggatagtaaaagacgrgtttcatgaacactttggtgattgattggatcaccagtcttcaacttccacccagatggttccatttaactagtggtgtgtaacaaactatccccaaagatagtgacataaaataacaaccattttattaatgtcacaattttgtgggtcagaaattcagccagggctcaaatgagctatacttctacaccacatgggataactaactcagtgctgttttgctggtggccagtctgctacccatctgatccgggccacagtggcattattcacatgcttgctgcctgtgtcaggtgagtggaatgataggctgccctggatcactctgtcttcctctccctgaagtctcaggatctctccttatgatctcttctgcagcatagtcagacctcttatttcatggctcagggcttccctagagggcaaggcagaaagtgatcatcattttaaatcagcctcagaattggaatagcataatttccattgactctattggttaaagcagtcacaggaa

SEQ ID NO: 161598 - DNA, 563 bp, Homo sapiens
aagaatctctcagtgataaaaatataggcagagggatagtaaaagacgggtttcatgaacactttggtgattgattggatcaccagtcttcaacttccacccagatggttccatttaactagtggtgtgtaacaaactatccccaaagatagtgacataaaataacaaccattttattaatgtcacaattttgtgggtcagaaattcagccagggctcaaatgagctatacttctrcaccacatgggataactaactcagtgctgttttgctggtggccagtctgctacccatctgatccgggccacagtggcattattcacatgcttgctgcctgtgtcaggtgagtggaatgataggctgccctggatcactctgtcttcctctccctgaagtctcaggatctctccttatgatctcttctgcagcatagtcagacctcttatttcatggctcagggcttccctagagggcaaggcagaaagtgatcatcattttaaatcagcctcagaattggaatagcataatttccattgactctattggttaaagcagtcacaggaa

SEQ ID NO: 161599 - DNA, 476 bp, Homo sapiens
ggtttcatgaacactttggtgattgattggatcaccagtcttcaacttccacccagatggttccatttaactagtggtgtgtaacaaactatccccaaagatagtgacataaaataacaaccattttattaatgtcacaattttgtgggtcagaaattcagccagggctcaaatgagctatacttctacaccacatgggataactaactcagtgctgttttgctggtggccagtctgctacccatctgatccgggccacagtggcattattcacatgcttgctgcctgtgtcaggtgagtggaatgataggctgccctggatcactctgtcttcctctccctgaagtctcaggatctctccttatgatctcttctgcagcatagtcagacctcttatttcatggctcagggcttccctagagggcaaggcagaaagtgatcatcawtttaaatcagcctcagaattggaatagcat

SEQ ID NO: 161600 - DNA, 580 bp, Homo sapiens
tcattttaaatcagcctcagaattggaatagcataatttccattgactctattggttaaagcagtcacaggaaagcccagggtaaagggaagatgaaatagacactacttctagaaaggaagaatgtcaaagaatgtggtgacatctttgatctgccacacagcctatctttggtttgaaaaatgagatgtaaagaacttagcaattctctgggcttgggactgagaacgtccctgtgaatcattaagggactttgtggcatccttaataagcctgagaatttggtttctcyagtcaaatatttttctgattcattgggcgtgacaatggcaccaaccttctgagaattactaaagcctcagtaacagtgagacaagacctgcacttttcaaaggtataaagagaagtagccacctagcattggaagacatttccgaatatgatgtttttcaaactcccttttgagaatcaggtacagtcattgctgacacatagtgttctcgtgaatgctagttctcctttcctgctggaccacctagcagcaaactctcccttgctcagcttctaggataacaaagcc

SEQ ID NO: 161601 - DNA, 580 bp, Homo sapiens
tcattttaaatcagcctcagaattggaatagcataatttccattgactctattggttaaagcagtcacaggaaagcccagggtaaagggaagatgaaatagacactacttctagaaaggaagaatgtcaaagaatgtggtgacatctttgatctgccacacagcctatctttggtttgaaaaatgagatgtaaagaacttagcaattctctgggcttgggactgagaacgtccctgtgaatcattaagggactttgtggcatccttaataagcctgagaatttggtttctctagtcaaatatttttctgatkcattgggcgtgacaatggcaccaaccttctgagaattactaaagcctcagtaacagtgagacaagacctgcacttttcaaaggtataaagagaagtagccacctagcattggaagacatttccgaatatgatgtttttcaaactcccttttgagaatcaggtacagtcattgctgacacatagtgttctcgtgaatgctagttctcctttcctgctggaccacctagcagcaaactctcccttgctcagcttctaggataacaaagcc

SEQ ID NO: 161602 - DNA, 533 bp, Homo sapiens
gttgaagctttacatacattatctcatttaatccttgaaattgccctttgattttttcttatatttttataatatccttactctgcaaacacagctagtagctggtagatgcaaactcaggcaatctgataccgaagtatgtattcttaactaatgaaatacaccatttctctggaaaaactgccagataattgtaatgggtcttgctaaacatagaaatgtaccaaacagtgtgtcatagggatggttctgatttctatgtcataatgttgttgcttgggtcacctgaataaagattgcttttcagggagaagcaatgcttagctgcagaaagaattaggcttataataaatttatatgcttcaccagttaaaatgttrtcaaaataggattcttgtgtccttgggatatggagaggagaaaggtactaactatgatgctgtgaccatatgtcaatattcaacagcattcagtaaattaatgatccttaaaaagaaaaatgatactaaacagaggagggtggtgaacaggag

SEQ ID NO: 161603 - DNA, 565 bp, Homo sapiens
cttatttggtaattatgagagttaaatggatgagaacatgtaaagcatctagaacagccctcagtacacagtgtcaataaacacaagctgtttttatttttaattaataatttttgttttttagagacagggtcttactctgtcaccaagactggtatacagtgctgccatcgtagctcactgcagcctccaattcctaggctcaagcgatcytcccactgcctcctgagtcgctgggaatacaggtgtgaagaagcttttttttttttcttttgagatggagtctcactctgttgcccaggctggagtgcagtggtgcgatctcggctcactgcaacctccacctcccgagttcaagcgattctcctgcctcagcctccctagcagctgggactacagtcacgcaccaccacacccggctaatttttgtatttttagtagagacggagtttcatcatgttggtcaggctggtctcaaactcttgaccttgtgatccgcccgcctcggcctcccaaagtgctgggattacaggcaagagccacggcaagccataggtttagcagt

SEQ ID NO: 161604 - DNA, 578 bp, Homo sapiens
gtagacgagggagagagttcactattctgtgaattaattatctgcgagtgaattctgtgaattcatatctttggaaaggaaaaagctattatatattaagatattcattaataaattaatcatttataaaattagaactcactcaatcatccctctctgataacactgcagagcaagcctaaaaackttcaaagaggcagaattacatgtagttgacaagggtggtgttggaaaactgtcagaatcaccagccaatgtagatctgggaaaattactccccttgaagtttgaagaaaatgcataaggatgttgacgtgatggattgttcaaaagggaatgatttgggcttagaaagatgagagaggcccttgggaaaattgatgtatccactgaaggcttttgcaaacatcttctatgattgttgtgttaaacttgaagtgattggcattgtatcttgctattatataattctgtttgaaaatcatgcttttaaaaaatctacattcaatttattttttgtttattctaggaattagtacagaatgcaattatatcccaaatctttccaaatatacaat

SEQ ID NO: 161605 - DNA, 555 bp, Homo sapiens
agatctaagacttgaaaccgtaaaaattctagaagataacatcgaaaaagcctttttagacattggcttaggcaaagacttgatgaccgagaacccaaaagcaaatgcaacaaaaacaaagataaatasatgggacttaattagactaaaaagcttctgcacagcaaaagaagtaaggagcaaacagacaatgcacagcatgggagaaaatcttcacaaactatgcattggatgaaggactaatattcaaaatcaacaaggaattcaaacaaatcagcaagaaaaaagaaacaatcccatcaaaaagtaggctaaggacatgaatagacaatgcacaaaagacaatatacaaatgtccaataaacaaatgaaacgatgctcaacatccgtcatgatcaggaaactacaaatcaaaaccacaatgagataccaccttacgcctgaaaaaacggtcatagtcaaaaaatcaacagataatagatattggtatgtatgtggtgaaaagggaagacttttacactgctggtgggaatgtaaaccagtaaaaccactatg

SEQ ID NO: 161606 - DNA, 541 bp, Homo sapiens
aaaaattctagaagataacatcgaaaaagcctttttagacattggcttaggcaaagacttgatgaccgagaacccaaaagcaaatgcaacaaaaacaaagataaatagatgggacttaattagactaaaaagcttctgcacagcaaaagaagtaaggagcaaacagacaatgcacagcatgggagaaaatcttcacaaactatgcattggatgaargactaatattcaaaatcaacaaggaattcaaacaaatcagcaagaaaaaagaaacaatcccatcaaaaagtaggctaaggacatgaatagacaatgcacaaaagacaatatacaaatgtccaataaacaaatgaaacgatgctcaacatccgtcatgatcaggaaactacaaatcaaaaccacaatgagataccaccttacgcctgaaaaaacggtcatagtcaaaaaatcaacagataatagatattggtatgtatgtggtgaaaagggaagacttttacactgctggtgggaatgtaaaccagtaaaaccactatgtaacaca

SEQ ID NO: 161607 - DNA, 405 bp, Homo sapiens
aaaatactcaaatacagttacttctctagtttttgctctcttgttttcaactcttaaattattattggagattttgagtgtatcctccatgtctcgtaagagttctttaacattttatagtgcaatctttctacatgtgtcctgtctgttctgcacgagttctctcactatcttgcattgaccacttaactctatccaagctagatttgcagacttttttgaaaaatattttaagtgaaatatagtttatgttatgatttctaaccctttttatattaatggaatattattctattcaaaactttatgctaattttaaatktaatatgatacattatttctatacttgaattattaatagagttttaaaaagtatttgctgagatggtaatgcaacttcaacaga

SEQ ID NO: 161608 - DNA, 561 bp, Homo sapiens
tgcatgtgttcaaatttttaatgactaaacatgatatagtttggytctgtgtccctacccaaatctcatctcaaattgtaattcccacatgtcaagggagagaactggtgggaggtgattggatcacactgttctcctgatagtgagggagttctcacaagatctggttgtttgatacgtgtctggcactttcccctgtgctctctctttctctcctgccaccatgtaagacgcccttgcttccccttcaccttccaccatgattgcaaatttcctgaggtcttccgagccatgcagaactgtgagtcaattaaacctctttcctttataaattacctagtcttgggtagtatctttatatcagtgtaagaacagactaatacatttctgaaacatcttatagggttatatattttttcttatataactgagtggcatttgccaatattttatttataatatagttgttctataatagtcatgtgggaaataattctaatcatcagattcctcttaggaagagagtacagcctttgcttaaaagaattgaaagaatggtgt

SEQ ID NO: 161609 - DNA, 403 bp, Homo sapiens
atatttcaaatgtgattaaaagtcgccatttggaatggctaaatatgtattgcatatgtatagataggtatacctagcatgcagttatattatacatatataatacatatttatacatatagaaatatatattgcttatacatatacaatgcatttaaatacatgtatgataggatggatggatagataacatatcaatcaatttggcctatgaaatttatattatgaacataatttaaattgatcacttgcatttacaaataacagaatattcagataattacactaaaytgtatttctaaaaatactgacacagcaccaaaagaaatggaacttttagctctgactgtttatctctcacttagcaccaccataccatatatcaaagtcaacataaggttac

SEQ ID NO: 161610 - DNA, 568 bp, Homo sapiens
gaaatggaacttttagctctgactgtttatctctcacttagcaccaccataccatatatcaaagtcaacataaggttacatttaatcttccattgaagatatcagatattgtagctatttcagcttatttttcctctataaaaatacatttatatattctttattaaaatatacttatatatgtatacgtaaataatatatacacatrcattatgtgtatatgtgtatttatttggttcaatctctaatttattcaatgttgagattaatctgttacatatatcaatagttcattctattattattattttaatttataattcacacaataattgtacattttatggggtacagtttgatgttttgatgcaggtatgcattgcataataagtcaggtaattatattcaccattttacacttttttttgtagtgagactatttgacatattctcttcttgctatcttgaaatatacactacattattattagctataataaacctacagtgtaatagaagggcagaacttattctacctgtccaactgcaactttctactcattaacca

SEQ ID NO: 161611 - DNA, 582 bp, Homo sapiens
tgtagtaaaatagcatgcacaggctggcttgaagtgtatggatctgaaaatgtttgactttgtgaccaagtatttaagccttacttgattccaaagtgtaaagagccttcaaatgattttctgtaatggatttttaatgccaccctccttttccatgcccctgtctcagctgtgatctgggttgttgaaagttgtttgagaaaccatgaaataaacttggtttgggaataagaaaacattcgctttaatcctacctgccctttttgaaaaacactttgagaaagccagttacctcttcagaatgaattacaaatttagaagtaccaaagtgaaaaaaaaaaaaacaaagcagaaaacaagcactaattctggattatagacttcaggtccagtaggtattcccacttcatacrtttgcaatgtttgcaaattaccttgggtactttgattaaccacccaactactgttttttcccttgttacatggtaagaaaaaaccctcctgtaaaggtgatggggagggtaacatatgctaaccttgaggttatgcagcataacctagacctttgcacaagcagatgtc

SEQ ID NO: 161612 - DNA, 582 bp, Homo sapiens
tgtagtaaaatagcatgcacaggctggcttgaagtgtatggatctgaaaatgtttgactttgtgaccaagtatttaagccttacttgattccaaagtgtaaagagccttcaaatgattttctgtaatggatttttaatgccaccctccttttccatgcccctgtctcagctgtgatctgggttgttgaaagttgtttgagaaaccatgaaataaacttggtttgggaataagaaaacattcgctttaatcctacctgccctttttgaaaaacactttgagaaagccagttacctcttcagaatgaattacaaatttagaagtaccaaagtgaaaaaaaaaaaaacaaagcagaaaacaagcactaattctggattatagacttcaggtccagtaggtattcccacttcatacatttgcaatgtttgcaaattaccttgggtactttgattaaccacccaactactgttttttcccttgttacatggtaagaaaaaaccytcctgtaaaggtgatggggagggtaacatatgctaaccttgaggttatgcagcataacctagacctttgcacaagcagatgtc

SEQ ID NO: 161613 - DNA, 572 bp, Homo sapiens
taaacataaggtatcatgattttctttttcaaataactttctactgactttctaatttcacytttattatgttagatcaagtctctgctttctatcatgtttacttctgtttcctcttaaatatgtttctcagtaaaggtgcatggatcataacttacaataagcaacattcttatttatatctttacttttaattgaaagtttaaggctgtggttcagttttcaattccttccacataacagcccaccatacccacaatccgtatctgtaaaacccagaatcatctcactggtttctcctatgtagattaattctcaccaccactgaagacttcttttgcgtatcttctgcttagcatttggctttatttattctcatccttttatgctagtgttctaaactggtgactactgaaaaaatataattgtccactcaaattactttctcattactcctgcaagcaggtattggggttgtggtggtgttaagagctggtttgagtggttttaaattatttttctatcttaagtataccattttttaaaaaatactatgacataaacctgaaata

SEQ ID NO: 161614 - DNA, 533 bp, Homo sapiens
atgtcggtaatggtatttcattttatatatgtatagaatattattaatgtatttcatatataacatacataattcttaaaacttagaaaaatttcggatttacagaattattacaaagatagtgttcccatatactctatgccctgtttctccagtattgataccttaagttagttttgtacatttaccacaattaatgaacctatatkgatacattattgttaactaaagctcacacattagttactcctatatcctcagtattccctcaggttctttttatcttccaaaatcccatacaggttaccaaattacatttaatattcacgtatccttcaactactctatctatatttgtttcccagggctgctgaaacaaataactatctgttgggtggctgaaaacaacagaaatgtattctatcacagttccagagcttacaagtccaaaaacaaggtgtgagcagtaccatactctctctgaaggttctaggggaaaatctgttccatttctttctcttatttttaggttt

SEQ ID NO: 161615 - DNA, 364 bp, Homo sapiens
tctctgggcagggcatttctgaaaagaaggcagcagccccagtcagggaattacagataaaacccccatctccctgggacagatcacctgggggaaagggcrgctgtcagcgcagcttcagcagacttaaacatcccgcttgatggctctggagagagcagtggatttcccagcacagtgtttgagctctgataagggtcagactgcctcctcaagtgagtccctgacccctgtgtatcctgactgggagacgcctcccaataggggacaacaaacacctcatacaggagagctccagctagcatctggtgggtgcccttctgggacaaagcttccagaggaaggaaaaaggagcaatctttgc

SEQ ID NO: 161616 - DNA, 530 bp, Homo sapiens
gaattccccaataatcacgtaggttcttttctattttcctaagcgtcggctggcttgagaaataaagggacagagtacaaaagagagaaattttaaagctgggcgtccgggggagacatcacacattggtaggatccgtgatgccccacaagccacaaaaaccagcaagtttttattagggagtttcaaaagggaagggagtatacgaataggtgtgggtgacagacatcaagtacttaacagggtaatagaatatcacaaggcaagtggaggcagagcgagatcgcaggaccacaggacctaagcgaaattaaaattgctaatgaagtttcgggcaccactgtcattgataacatcttatcaggagacagggttttgagatcaaccggtctgaccaaagtttattaggtgggaatttcctcttcctaataagcctgggagcrctatgggagactggagtttatttcacctctgcaatctcaaccataagagacaggtacgccctgggggggccagttcagagacctacc

SEQ ID NO: 161617 - DNA, 562 bp, Homo sapiens
atgcatacatacaataaacacagtacttatagggttgggtactatctgtggcttcagttgtccactgcagtcttggaatttatcctttaggagaagactaatgtgtaagtatttactgagcacctactatttgtcagacactagtatacatactagtgataggtgaacatgtcagtgaacaagtcaagcaatatcactaattttgaggagcttacattttagttggatgcgatgatatggagataaattataaacaagcaaataggtacacaaacaggataatttcacacagtaatgaaggtcatggcaacatttaaacagcataatgtaatatgaccatctcagygaatggtgagggtttgcttagatcaggtggcttcaaaaggtgacacttgatctgagaactgaattatgagaagaagccttgtgaagatctgaagcaaaagtgtcccaaactgaagttagaagccaagagttctgttttgtaccttcaaagtttgacatgctaagacttatcagtgtgacttgccaagtagataattgggtacatgactggcagtca

SEQ ID NO: 161618 - DNA, 562 bp, Homo sapiens
atgcatacatacaataaacacagtacttatagggttgggtactatctgtggcttcagttgtccactgcagtcttggaatttatcctttaggagaagactaatgtgtaagtatttactgagcacctactatttgtcagacactagtatacatactagtgataggtgaacatgtcagtgaacaagtcaagcaatatcactaattttgaggagcttacattttagttggatgcgatgatatggagataaattataaacaagcaaataggtacacaaacaggataatttcacacagtaatgaaggtcatggcaacatttaaacagcataatgtaatatgaccatctcagcgaatggtgagggtttgcttagatcaggtggcttcaaaaggtgacacttgatctgagaactgaattatgagaagaagccttgtgamgatctgaagcaaaagtgtcccaaactgaagttagaagccaagagttctgttttgtaccttcaaagtttgacatgctaagacttatcagtgtgacttgccaagtagataattgggtacatgactggcagtca

SEQ ID NO: 161619 - DNA, 425 bp, Homo sapiens
ggaagtgaagtagactctgtgagaatccttggtggtgatatgtttattgttctggctttctccaagactgggtttgctagcagtgaagttgtcacatggacagactcaggatctctgttacccaggatgtagaaggcagtggaattagctgttcttttctctktccttgtagcagggttattctgtcatgagttgctgtaatgtcctgagttggttggcctccagccagaaggtggcactttcaagaaagcactagctatgatagtagaagtggggatacaagcttgccctaagttggccaggataagtatttgggtttcttaggctatgaccagagccataaagctcccaagagtttatgtattttgtgatcagctaccaaaggtgggtagagaaataccatcaggtagaggcagggttaggtg

SEQ ID NO: 161620 - DNA, 365 bp, Homo sapiens
tttccatacatcctctgaaatgtaggcagaggctctcaaacctcagttcttgacttctgtgcacctgcaggcttaacacyatgtggaaactgccaaggctaagaacttgcacctcctgaagccatggctgaagctgtaccttggccccttttagccatggctggagctgaagttgggatgcagggtacaaagtcccaaggctgctcacagcaaggtggccctggaccaggcccaggaaaccatttttccctcctaggcctccaggcctgtaatgggggggggctgatgtgaagacctctgacatgccctggagacattttccccattgtcttggcaattagcatttggctccttgttacttatgc

SEQ ID NO: 161621 - DNA, 370 bp, Homo sapiens
tattgacttttcctgtggtttttctattctccatttgatttatttctgttttgatatttattattgttttccctctgctaacttttggtttagtttgttcttctttttcctcttccaaaaagcacagatattaagtaaatagttctaagaacatttcaaaaattctactttaaaaatctttatcaggtcaggaatggtgacttatgcctataatttcagaactttgggaggccaagacaagaggatcccttgagcccaggaactcaaggctgcagtgagtgagaatcatgacactgcactcccgcctgggtcacagagcaagaccctgcctctaaaawaacccacaaagctttatcaaggaataattaac

SEQ ID NO: 161622 - DNA, 552 bp, Homo sapiens
aattcaaatacagcaaatatttattttgttcttaacatgtgcatgactttactaaatgtagtgaagaatatgaagatgctacctacctcgggcagtgtattcagtcacatagtcctcatatggtatgacaactatcccagagttcagagtatacaccagggatgccaaaaatgccagatatccacaacatatgtggagggctcctagggcttaagactttagctctgggtcatatagcatagggtatatgctctgagggttagtttttaagtatgaagtcttagagttggaaaaaactttagagattacctagactagcctccaactcaacataggaatctccactacactcttacaagtggtcatacagttttyttcaatatccctagtgatggtaagccaattacttcaaaaaggcatcttgctatgtgtttataaaacttttatgtaaaattgcatgctatttgtgtgcttatagatgtaatttaaatatttatttctgaagacattgggtttttttttttggcaaagtactaaacagaagctcatatt

SEQ ID NO: 161623 - DNA, 525 bp, Homo sapiens
gtgtggactacaaattgagatgaactttgggtaggracacagagacaaactgtatcaaaaatattcaataataggtatgtaacataatttttttatgttttactttttggaacttttattttaagttcaggggtacatatgtagaatttgcaggtttgttacataggtaaaagtatgtaatgggggtttgttatacagattatttcatcacccaggtattaagcctagtatccattagctatttttcctgatcctctccctcctctcaccttccaccctccaataaaacctagtgtgtgttgtttccttctatgtgtccatgtgttctcataatttagttcccacttataagtgagaacatgcagtatttggttttctgttcctgcattagtttgctaaggataatggcctccagctccacccctgtccctgcaaaggacataatcttgttgtttttttatggttgtatagtattccatgatgtacatgtatcacattttctttatccagtctatcattgatagg

SEQ ID NO: 161624 - DNA, 430 bp, Homo sapiens
aaaacaggacttctctaggccaaatggccaccaagtgtaagtatcaattcttcaggatcccttagcttgaagctatccagtgataaaggactcactacataatgaagcagcccattctataatggataactttggtggttagaaaagtcttatactaagatgtgtaagacttattcaacatgtgtacttgtaaaggcatgtataagacttttataagacatatacaagatgtctgcctctaattgccattggtcctttattttgccttgtaaagtcacccagcacagattggyaactactagctctaaaaagcagcaagtgtttctttaaaaagctgagacctttcccaataacgttacatttctaaattgacctgaggttgaagatttgtgcttctcctaggagccatctttggaaaatgtaaactgac

SEQ ID NO: 161625 - DNA, 587 bp, Homo sapiens
actttggtggttagaaaagtcttatactaagatgtgtaagacttattcaacatgtgtacttgtaaaggcatgtataagacttttataagacatatacaagatgtctgcctctaattgccattggtcctttattttgccttgtaaagtcacccagcacagattggtaactactagctctaaaaagcagcaagtgtttctttaaaaagctgagacctttcccaataacgttacatttctaaattgacctgaggttgaagatttgtgcttctcctaggagccatctttggaaaatgtaaactgactgagaatcccagagaatttacattaactcacttacctsgtgtctgccaatgtgggtccctaaaacagctgctgctccacctggggtatgtcctatctgattataacttataaattgtggctccctatctgctgaagttcctccggctctgtaagaactctcagatgttgatacaacatgctgtagcgagatgcattttattattacaacaaagtcctttccttgcacataaaaactgggtgcctaattgtattcaaaggatggtctaatagaaatactgtgagtt

SEQ ID NO: 161626 - DNA, 472 bp, Homo sapiens
gcaggcccaacaccacatggaagctgccaaggctaggggctttcaccctctgaagcaacagcctgagctgtacactggccccttttacaggcaggtaatgagtaatactgacatcatgaaaaatggggtatycataccatcaagcatttaccctttgccttacaaacaatccaattatataattcttgttattttagaatgtacaaataaatttgtattgactatattcaccttgttgcactaccaaatagtaggtcttatttgtgtaaccattagccatccctgcctccccttccaacctgtcactacccttacccttcccagcctctggtaatcttcctttaatctctatgtccatgagttcaattgttttgatttttagatgccaaaaataagtgagaacatgtgatgtttgctaaacattaatcaccaagatgacagggaaaatgtctccagggcatgtcagagacct

SEQ ID NO: 161627 - DNA, 485 bp, Homo sapiens
tcatcccctctcttgaagtcttcagtgtctgttatttccttctgtagtccatgtgtcctcattgtttagctcccacttaccagtgagaacatacagtatttgatattctattttttagttactttacttaggataatagcctacagcctcaygcattttgctgcagtagacatcattttttttatggctgtgtaatattccatggtggatatgtaccatattttatttccaataattcattgatggaaacttagtttgattccatgactttgctattataaatagttctgctataatcatacaagtccaggtgtcttttgatgtaatgattttttttcttttgggtagatagcaagtagtgggattactggattgaatggtagttctattttaagttgtttgagaaatcatactgtttttcatggagactgtactcatttatatttccataaacagcatgtaagtattcccttctcactgcatgc

SEQ ID NO: 161628 - DNA, 613 bp, Homo sapiens
tgaaataatattttaagtttatgaaagaagaataactgtcaatgtagaattctacatttaacagtattatttctcaagaagtaaggcaaaataaagacaattacatatttaagaaaactaagaattcactgccataacttccatatgrcagtaagtgctaactacagttccttcagattgaagagaaataataacaataaaattttgatatatatcaataaataagtggcatcagaaatgttaaatacctgtataaacatgaaaattgtttttttctttatttttgtcctttgactctatttgtaatacatattatacttcagcttaagtcatcaactaaaaccttatcatgtggagtttacaatattaccacatttaaaaactatctaatataaggaatgagaggagtataagcagaatcccatattggaagttttccatgctttataaggatagatacaacatgaagtccaagtagactgtgaaaaggtaacaacatagtttagtactggcactttggaaaatatatgacagtctctcagaaagttacatatacaccatacatctattatataacccggccattcaactcctggatatttacccaagaaaa

SEQ ID NO: 161629 - DNA, 633 bp, Homo sapiens
gcctttttctaccttcgtatctgaagcaaatcttcaggtattcagtctgcttctttctttccataactaactctatacatttttccccttgatattttgttccttcctagcatggctatgtacatactgtctttaaaaatactcaatttttgaaatttcttaaaaaaattacwaatgtaacttaccatttgatggcatattcaatggattgaatgtttgtgttttcccaagtttttgtgttgaaatgctaataaccaatgtaaggagacttggaggccgggccactgggaagtaatcagatcatgaggatgaagcccttatgaatgggagtagtgcctttataaaatagatcccagagagctctctcatgctcttcatgccccgtgagaatttggaagtcagtagtctgcaatctggaagacagcccttcgccaaagtcaaatatgctgtgccctaatctgggacttctagcctccagaattgaaaaaaaaaaattgttgtctttaaacagccaagtattataacagccttaagtaacacagcttataactgaacactaaagggaaatgtaaaagaaaaatgtaattttagtaattgctgaaggcacaaaatcctcactttagaatcttgttt

SEQ ID NO: 161630 - DNA, 577 bp, Homo sapiens
caaaatcagtaccactcttaaatatgttgatgcagacttttccattaaatacttaggggaaaggtgtccccaattccaagtacacatattatttagctcaaactgtgctttacctacatatgatgtcaccaagaaaatgaaatatgatgtaaatgtaaaagcaagaaaaaaccttctaaagaatacacaaaataaaatctgaaccagactctgatatgacacaggtattggacttgtctgagagggaattttaaatcactataataaataccttaaaggctctaattaaaaagatggacaaaatgtaagatgaaatgagtgatttcagttgagggataaaaactctataaaagaataaaaaaatggggaaaataaaaacacagcaaccaagacatttaatagagccaaataaagmatcagtgaatttaagaagcagtcaataaaaattacacaaattaaaacacaaagggggaaaagagaataaaaaaaaaaaacccaaaacactaggaaattcaagagctgtggaacaatattaaacattctaacttaggtgtgataggaatccaagaaggaaaag

SEQ ID NO: 161631 - DNA, 522 bp, Homo sapiens
cctgtcagattttcatattaattaaagaatctgttatgcagctcacatgctgaagatggggtagagtttaccaattcatatactgaggtgaggatacaaaagaccaggcagctctgctctaaagattactttggaatggatcttgagaaaaggtgaaaggcagtttaaaatgatgaacgattatcattgaamacatacatggcagatatgataaaacaaaggtccaaatactgttctttcattatagaatcaaagaatatgatacaaattaataattaactattttagggtttaaaatgttgtcaaattataaatattaatctgaaaataatgaaaaaatggttttaagtaatacatatgctagtagaaaagacactgtacaacaagcaaattaacttccacatgcacacaagaactaagatttcactgaaatagtaaattttgaaagtatcagagtgttacattagctcctaaacatggctactttatatcctgagagtataacttacagtgctgaaattc

SEQ ID NO: 161632 - DNA, 435 bp, Homo sapiens
tttatttcaagatatgaagaataatttccaaatatttaaactgtccctggattactctttgtatttgatttactatttatttatgcrttacatattatactgcatataatatcaaacataacacattttctgagcctttgttttttttggcccagcatatctttatcctggtgagtgatccatgtgtaccctagaagatattctgtctttattgtttacagtgccctgtacatataatttaagccaagacggttgataacgttgtttgaatactctataaattatttgactagttgtgcttttaattgctaagtgttaaaattttcactctgatcgagcacttatttatttctttcattgtttctgccaacttttgccttttgtaataatgagactctttaattagatgcataaaaacttacgatacttaagtta

SEQ ID NO: 161633 - DNA, 597 bp, Homo sapiens
aaaggcattacctgcttataactcttcagagaatccctctcatggagagaaatgagacaatgcatacaagttttttcttagatatttctgtagcatcacatstcacaactccccaccatgcttttataatatgcatttatttgtcatttccttttatacaacgtatttttcaggccatctttcttttccttatgctaatccctgttaggaaagcccttatctctgttcttcgccagccatactcatgctcatttcttccagggtgaccctaggcactgtctcttctatgaaatcctccctgaatgaagaggttgaaagaattactgctgtggtgtggggtgatctttgtgtcttcttgttcttgaacactttccatattacatacaaataatcagtttttatgcctgatttcctcagaagattgtaaagtccttgagggcatagtctagggctggtattttataaatgttcaataaatgtctgtaaaaacaaacagaactgtcaattctgtttttttctaggtaacatatgggtaagtaaatattttgtatttgcttacaatcatataaattattgttatcaatatatccaaatcaa

SEQ ID NO: 161634 - DNA, 467 bp, Homo sapiens
agttatcattctgaagaatccatgtagagaatccagtgtgaggcatgagtgtatccaaggctgcaacaaatgttggtgttgctttgtctgatcactgtcatattccttcatcaattttgtgcacattgctctccaatgtgcttttattaccaacaaccagaactgagggcctttatggaagagctacccttagtctcctggagagcacgttttctgcaagtgcagaggtagctggaagtgcctgygaatttacatctcctcaggggcagcccttagctaatgtctgattggtttggtacaattgatttggacttcactgaagtataacctacattgctttatgagctcagtgggacttaatattacaaacgtgcttgcccttcttcctttctcaggcccactctcccactctgtactggtgttttccggaaatgcttcctttctaatgaaccaccctcatagaattc

SEQ ID NO: 161635 - DNA, 497 bp, Homo sapiens
gaattcttcccatgttttagtgtctccctctagcaccctctattgacagagcctaacagaaagccagctgggcaaaggaaaagtgtagttagcctgtgtggttaacccaaatcccmgtcctggcatcacaaatagagtataaaggggtgtgtttggagctgagagacaacaccttaataaccaggacactccctgcgagggatgcaaaagacatgaaagacactcttgacctgcaggaatgtgtgctctactgcacaagctaggaaatgaaaattaaaacaaacaaacaaaaaatcacctcacttcagctcctgccctgccagcccttttctatacctcaatgttttgtgtgtgatcttccctttgccagccacgcatctttctactttcaggctagtcccaacctcctcctgcccgttgctttcacggcaccataatgtgtaaacacgggtgggtttctaggtttattggcttaatgtctgctttccacactagac

SEQ ID NO: 161636 - DNA, 497 bp, Homo sapiens
gaattcttcccatgttttagtgtctccctctagcaccctctattgacagagcctaacagaaagccagctgggcaaaggaaaagtgtagttagcctgtgtggttaacccaaatcccagtcctggcatcacaaatagagtataaaggggtgtgtttggagctgagagacaacaccttaataaccaggacactccctgcgagggatgcaaaagacatgaaagacactcttgacctgcaggaatgtgtgctctactgcacaagctaggaaatgaaaattaaaacaaacaaacaaaaaatcacctcacttcagctcctgccctgccagcccttttctatacctcartgttttgtgtgtgatcttccctttgccagccacgcatctttctactttcaggctagtcccaacctcctcctgcccgttgctttcacggcaccataatgtgtaaacacgggtgggtttctaggtttattggcttaatgtctgctttccacactagac

SEQ ID NO: 161637 - DNA, 501 bp, Homo sapiens
tctagcaccctctattgacagagcctaacagaaagccagctgggcaaaggaaaagtgtagttagcctgtgtggttaacccaaatcccagtcctggcatcacaaatagagtataaaggggtgtgtttggagctgagagacaacaccttaataaccaggacactccctgcgagggatgcaaaagacatgaaagacactcttgacctgcaggaatgtgtgctctactgcacaagctaggaaatgaaaattaaaacaaacaaacaaaaaatcacctcacttcagctcctgccctgccagcccttttctatacctcaatgttttgtgtgtgatcttccctttgccagccacgcatctttctactttcaggctagtcccaacctcctcctgcccgttgctttcacrgcaccataatgtgtaaacacgggtgggtttctaggtttattggcttaatgtctgctttccacactagactgcaagggatgtgcttgtttccttctgaattc

SEQ ID NO: 161638 - DNA, 607 bp, Homo sapiens
aattgatacatgtctaatgtaataaaggtctattttagagttttagatccacacattggattctgactcagttttctcatctttaaaacgggaataattatagcatctatgctacagggttattgcgagggttaagtaaatattgactctatcatattaaacacagtttcaagcacataataagtatttaataaataataaccattactaagagaaagtgtgaatgcaataatactgcagtgraaaagaagccataaaactgtgagtaaataacactttctctagacaagacgtattttcctttttaggagaattgagataataatacagatgagtaattaagcagaagcaaaggcagtcatctctacaaaagtagatccttccaactggtcataaaagaataattaaaaacaacagcagcaacagcaggaataaaactgttagcataaaatctcttctgacagttcagcctcttgagaattagtagtctttgccctgccttttctacaaaaactgttatatggtcatgtaggaattatttgagaaaagcaaaacatattatagatgctgtctatactatgtaagaggccttcagtttacaaccaag

SEQ ID NO: 161639 - DNA, 653 bp, Homo sapiens
gcttttctatccaggcatccacttttaattttatttatgacttcattgaaattctgatttagtcaatcttatctttaaatgcaaagtcaaagtagaagcactagttccccattttccacaattaatatttttagattcaagctttgtgtcttatgggttgaattttgagatcccatccagcaaaattaagcattacttagyagactggtggctctctggtatagaagttgctcttggagcttatgaggatgattgttgaaatgattcaggccctcaacctggataagacaaaccgaactctgatttgatgtaatacagtatctcaagcctcatgctcatccttcagcgtcagaggacaacttgtgagcctggtcttaaaggactcatttatcttttacaagacatattttcattagcttttcttccatacatactcttaacccggaatcacagaagccttcctttttctcgggtatgcttttgtgttatttttgcattctttttttttttaagttgatcatctttattttattttattttactttattttttaaatttaatttaattttattttttgcttaaattctttttattatactttaagttctagggtacacgtgcacaacgtgcaggtttgctacatatgtatacat

SEQ ID NO: 161640 - DNA, 551 bp, Homo sapiens
taagttcactactttctcaccatttccaatcccttcccgtctatccatgttaaagacaaaacagaaattcatgctggactttctggagcaaagggtgcaagctctggttaaggcagaaaatgagtcattaaactggggcatatgtggaaattagcagggaaaggtcttgggttcccacttcatccccagggaagaaacagttaaggtagctcacccatttgcaatagctttaggaccacagaccacagtccaccagcattcaactcaccttctccttgtctttcatttcctcctagatagacttgctgttttctctcaaagacaatctaaaacggtcaatatttgggacccaccaaatcctccccacctccacctcttccttcaaataggagaccagccagagctgaggtaaaaatcagttgagaaagggatggcaaaatggtgcaaaaaatatatstccttcaatgtccccaatcacagactagatgaagaaattgaggcttcaaggaaagcgtatggtgggggaaaggggcactgttagataaaggatg

SEQ ID NO: 161641 - DNA, 609 bp, Homo sapiens
tcatacctagcaaagggactttcaagaataaagagcattcctgccggtctagtggttaggaaaaaaaggaagaaaaggcaaatttgcaagttatcaacattcaagaactctagaaatattgttcccatgaggccttcttgagaaacctaccagagagcaaacttcacaaaaccaaaatgactagagaaacattgacataaaactagtggtgaacactaatacataaytacttgtaaaattaatactaaaagagagctaaaaatgagagattataatatttaatattatatgtagatacaggacaatgtaagacaatttatttaaaaaacagatgagagtggggagagcaaattaaaaaattgttttttctaaataatattggtggtaatagaattgctatcctgagacaattatgcaggtgatgtaggataaaggaaatgagaaattttcagaaattctaattatattatcccctgtgtccttgggaactgagtttcttaatgtgaaagagaagagatacagatgtaatataaaacaaattaagtaaaacctttgtactccaaaatttgtataggaagtaccagtgtgagtttacgaggtattttatct

SEQ ID NO: 161642 - DNA, 465 bp, Homo sapiens
agaaataacaaaaaaataaagtcaaaaggaataaagactacctataagatatagaaaattacctcaaaagacaaaatctaagaattactagtattcaaaaggcagctgagcaaaagaacaaggtagaacacttactcaaaaaataataacagaaaagtttccaaaacttgagaaagaaataaaagttcacgtataggaaggacagagaacatcaaataggactacgccaagacatataataattaaactctcgaaggccaaagacaatgagaggatcctaaaaagcagcaggagaaaaaaagcaaacaacatgtaaagaaatgccaatcatctgatgacagacttctcagtggaaaccacacaggccaggagggagcagaatattttcaaagtgttgaaaagaaaacaaaaaacaaaaaacamaaaacaaaacctgccattcaaaaacactttatccagcaaagc

SEQ ID NO: 161643 - DNA, 615 bp, Homo sapiens
tacaattaagaaaaataatgtgcaataaaaaccacattagaataacaaaaaagcattgcctgagaaagatcttgttcttttgtgtggcatttgtaactggctagatacagtttatttgttctttttgtaatggggccagatgtcactcattccacatgtagtatccagattgaaatgaaatgaggtagaactgacccaggctggacaaggaaggactatggaagaggtaaggcaggatctacataaagtaataatggcagaattattgatcatgtctctttgggtttgtgttgttttcaaaaaggaagatataaaattaagtaaggggggamacgtaagatatagatatggttgatctcatctgcactgagtcatgtttggaaggttaagtccaggaagtagtaggaaactgactgagcaggcaacagaagagaagaaagtactctgactgagaggttacttacttggccctggaaatagaaaagtatttaaaagtttacatctcccagaaaattggaaagcaaaagaaagaataataggtggtaacaaaataaaaataatcatatctaacatgtgggtggctttatttacttttaatttaattcttattatgaa

SEQ ID NO: 161644 - DNA, 583 bp, Homo sapiens
ttcacctccctcaaatctcttgttcaggccactcactcactcaagctgtactgagacatrtatattcaggactatgaaaatcgaatttctgccttgcagtgttagcgtagagatttacatgcttgtggacaagttactaacagttctgaatgctaaaaacaccaaacaaccaaggatgtccagtggttcttggatttgcattaagtgaccaccttaagtgctcaatttatcatgtagctcacaggttcttctgaaagggaagagatttattatatatttactcaaagacaaaatatttgagtaattggaaaccctgtctgcctcaccctgattttattctactctgatccaatccaggacacacaagatgaaactgtttgccccaacatcagagtggaggccatcctatctcctcactggtggaggtaaacattgggcctgcatcttcaagatattggcctcagacctggacaactgccttatgagaaagaaagagattctggtcattagagctgcattgagacatgaaagtcagatggtctttcatggtggcacaatcttatcactgcagccttgagtactg

SEQ ID NO: 161645 - DNA, 583 bp, Homo sapiens
ttcacctccctcaaatctcttgttcaggccactcactcactcaagctgtactgagacatgtatattcaggactatgaaaatcgaatttctgccttgcagtgttagcgtagagatttacatgcttgtggacaagttactaacagttctgaatgctaaaaacaccaaacaaccaaggatgtccagtggttcttggatttgcattaagtgaccaccttaagtgctcaatttatcatgtagctcacaggttcttctgaaagggaagagatttattatatatttactcaaagacaaaatatttgagtaattggaaaccctgtctgcctcaccctgattttattctactctgatccaatccaggacacacaagatgaaactgtttgccccaacatcagagtggargccatcctatctcctcactggtggaggtaaacattgggcctgcatcttcaagatattggcctcagacctggacaactgccttatgagaaagaaagagattctggtcattagagctgcattgagacatgaaagtcagatggtctttcatggtggcacaatcttatcactgcagccttgagtactg

SEQ ID NO: 161646 - DNA, 580 bp, Homo sapiens
tgttcaccaaggaagtctccttcttctgtgtgccatccagacacctgggctattgctatgactcccagtttaaaactactataaagagcattgtttgaattattagcttttgtattcttctggtctgctaatgtttagatacaaatctacagccagatgcagaaagttaacccaaacacgtggcagaaagagcatccactcaaactaaccccatggtcagaaaaaaaaaagtaaactatgtggctagaaaagcaattattgcaggactggctacatcatttatgggtccagtgtaaactaacaatgcaggggccctggttcaaaaactataagaatgtcaaggtggtgacagcagagcattaaaccgaacatggggtccttctaagcacggggccctgtgcaactacacaggctgcacacacaggaagcagccctgattatgcgaaatcatttcccacttcccaaattaggagttttcaccaagaatccaccagaacatgagaggcctttcttctcaaaaatccacaagaagccttggmacactccaactggagaagagagcccatacataatggaacca

SEQ ID NO: 161647 - DNA, 556 bp, Homo sapiens
tctgctctaccaatcagagtgttatgcctgtcccattcctaatgtgttactttcccattgttaacccacttaaaataactttatggtcttgttgagatagaacctttttaaaaacaaaaaacgaatattctacttaaatcctattgttagctcaattttgtaggaaataaatatttcaagaatggaattaaaaaataaacatgtatacaacggcagatattttataaatcatatttctctaatttcagagatgtagcaaacatactaaacctaattctcttttggaaacaaaatttatatttccagattatctggaaaagctaattaatcaataaggtccttggggttttactctgtgttttgacagcaccaatatattcatcatggtgtagggcatgaggaaatagcacaattaatactcayaaacatgaaatgtaaaaatgtatggttttgtgctgagaagtgtcacttctaattgcaaatatggcagctttattgacatcatcattaacaggatttttaagcaatctaccagtagttccagatatgagattca

SEQ ID NO: 161648 - DNA, 590 bp, Homo sapiens
gaattctctgcaacggctccagggtgagggatgtcatgtaaaatggagaaccctgtcctgatccagcacttctgtgactaatgaaagctatccagtcctggggatcagtattaggaagctcattttcttttcacactaagttacatattataactyacctctatcgattatgtaggtgatacttagatttcttgtctgccttagttcttgtcttatttcccaattcattacctgttagaaaagaataccttttcattagaaactccaaatctcaggagctacacctttgattaaaaaaaattatataaaaatgttcgataagaaatttgagcatttggtgcatgatactttattatgtgtggtcacatgcgtcagttctctagatttgctttgtttttctgcacttcaggccatcacttcaagagaacactatgaataggtgctggatctaatgacctttcaatggaatggccacttaattcaatccaggaaatgtttgagagtcaagtagatcaagggagacatttaatgacatggggacaagcatggtaccccagggatattccaggaattgagaccctattgtacct

SEQ ID NO: 161649 - DNA, 583 bp, Homo sapiens
tccagggtgagggatgtcatgtaaaatggagaaccctgtcctgatccagcacttctgtgactaatgaaagctatccagtcctggggatcagtattaggaagctcattttcttttcacactaagttacatattataacttacctctatcgattatgtaggtgatacttagatttcttgtctgccttagttcttgtcttatttcccaattcattacctgttagaaaagaataccttttcattagaaactccaaatctcaggagctacacctttgattaaaaaaaattatataaaaatgttcgataagaaatttgagcatttggtgcatgataytttattatgtgtggtcacatgcgtcagttctctagatttgctttgtttttctgcacttcaggccatcacttcaagagaacactatgaataggtgctggatctaatgacctttcaatggaatggccacttaattcaatccaggaaatgtttgagagtcaagtagatcaagggagacatttaatgacatggggacaagcatggtaccccagggatattccaggaattgagaccctattgtaccttcaaacctga

SEQ ID NO: 161650 - DNA, 590 bp, Homo sapiens
gaattctctgcaacggctccagggtgagggatgtcatgtaaaatggagaaccctgtcctgatccagcacttctgtgactaatgaaagctatccagtcctggggatcagtattaggaagctcattttcttttcacactaagttacatattataacttacctctatcgattatgtaggtgatacttagatttcttgtctgccttagttcttgtcttatttcccaattcattacctgttagaaaagaataccttttcattagaaactccaaatctcaggagctacacctttgattaaaaaaaattatataaaaatgttcgataagaaatttgagcatttggtgcatgatactttattatgtgtggtcacatgcgtcagttctctagatttgctttgtttttctgcacttcaggccatcacttcaagagaacactatgaataggtgctggatctaatgacctttcaatggaatggccacttawttcaatccaggaaatgtttgagagtcaagtagatcaagggagacatttaatgacatggggacaagcatggtaccccagggatattccaggaattgagaccctattgtacct

SEQ ID NO: 161651 - DNA, 581 bp, Homo sapiens
attctttgagtacctttagagttttgtacaacttttatggaactgagttattttgaattgtaatcagttgtgtgcatactactgtatcttacctgctcaactgtaaactctgagttgagagtctgtctcttactcatctctgcatcttctgctcaacatagaaattgaccacattgtaggtacacattgttattatattactctttaattttagggtgaacattctcattagtgttgcatagctgaaagaaatgaagaatgctcccttctttaggtttagtccaccaaatatccgtctctgcagctgtttggctttatggaccaacatatctagccattggtaatttagcactgggcttgcttgaaggcttgtgtatgaagtttcaatactgtgagaagcaaagtggtatctaccattatttaaaaatcaacaacaaataggtaaaaaaaaatttacatatgatttttaagctagaggaraaaaccgtgtttgaattagaaagtaaaaatgttaaccacagaaatagatttttgttccttcttctttgcaatttcttcagctggagaaagttgggatagtc

SEQ ID NO: 161652 - DNA, 527 bp, Homo sapiens
aggggttcagggaggccctgagggaagaggtgggccttaatggatctgggcggagcctgagtgaaggggcggggctgactgcatgaatggcaggagtcgggcttatgggctagagggaacactgaatggaagctcgggaccctggggctgatctggctggagagagctctggaatgggtttggggatgggctgtccttgagttaggggcaggacttagtggcaaagggtgggacttatgcatgagaatggagccgggttctgggcagagggagggaaggagaggtcgggaagtggaaaatcagtagggatgcaccataggaggtggtgattggaggcaggggaagtgcaggtttaggagtcagagggagccgcattcaytcaacaaatatagaagagaagggagaagagtgcaaagaccctgaggtgagaaccagcttgtcattttcagggaatagactgaaggtcaggagctatagtggagtgaatgagtcagagggtggtaggaggtgaagaggaacaagggcta

SEQ ID NO: 161653 - DNA, 547 bp, Homo sapiens
agaagtgagggtgataatgaccttggagggagggcaggtgataagggagcgccgagggggcttctggggggctggagatattgcttcttgggctggtggctggtgacacaggtgtgttcaatcggtgataattcctccagcggttacacttacggtttgtactttcctgaatatgggtctacttcaagaaaccactgctgaaaacgaggagctgcacccaccacccagtgtcccctccatccagtttaagcaacaggacattctcagccccccggggtccctccctcccaatgcaatgtgcttttatgtcttcaaggggcctggccaccaccttggttgcttcccccagcttgctatgcatgtcaccccacgcatgttccaggcagctccacagaggtccccagagagaaggcaggctgtgggtgggaggaagggcaggggtgggggacgtggcttcccagcggagcccgggcagggggaggaaacatttytgcaacaccccacaccaagtcctgacttcgggggggctttgcagggtgaattctaa

SEQ ID NO: 161654 - DNA, 594 bp, Homo sapiens
aattataaattctcaaggtaaatatcatatatacatacacacacaaacacaaacgcacacacacatatatattatatatatatatatttggattatgtgtatttgtgtgtatgtttgtagaattttagcacctaaaaaagatgataagaaagacatggaggcctgaaccccaaaacacaagcagcctcaagctctgtggcagtagatgagaacatgaagagtgaggaggagctctcccctctcttgcycttagcctgctcatattacacctgacactcaatagataggtgtattagtctgttttcacactactgataaagacatatctgagaccgggcaatttacaaagaaaggggttcaacggacttactgttctatgtggctatggaggcctcaaaatcctggtggaaggtgaaaggcatgtctcacatgacagcagaaaagacgagagcctgtgcagtaaaactcccgtttttaaaaccatcagatcatatgagacttattcactatcatgagaacagcacaggaaaaacctgacctattgattcaattgcctcctactgggtccctcccacaacatatgggaattcaaga

SEQ ID NO: 161655 - DNA, 584 bp, Homo sapiens
tgcacagggagactctcatttttaaaaccatcagatctcatgagacttattcactatcatgagaacagtatgggaaagatttgtcccaaagtttaagttgcctcccwccgggtccctcccacaacatgtgggaattcaagatgaggtgtgggtggggacacagccaaaccatatcaacaggtccatagagaggggctgggaggagcttagaaagtgcacattatccatcttcatccatactgcatttgctccccaaagagcttaagactgaaacatactcaatgcagcaaacactagactggaccataaagcctccttgatcttagtagaatggatgtgaggctagcaagcagctgctctggctacccatatgtcacagacaaattggattttttaataataaaagcagcagtgaaagcattaagagaactctttaaacatacctgaaacactgtttcttaacaacaacggtcatgcctgcgaagtctaaagccacttgtgatttataaccacaaagtttcagttttcattgacaagattggagaatcacacctttttcttctaactttcccctctggatattt

SEQ ID NO: 161656 - DNA, 584 bp, Homo sapiens
tgcacagggagactctcatttttaaaaccatcagatctcatgagacttattcactatcatgagaacagtatgggaaagatttgtcccaaagtttaagttgcctccctccgggtccctcccacaacatgtgggaattcaagatgaggtgtgggtggggacacagccaaaccatatcaacaggtccatagagaggggctgggaggagcttagaaagtgcacattatccatcttcatccatactgcatttgctccccaaagagcttaagactgaaacatactcaatgcagcaaacactagactggaccataaagcctccttgatcttagtagaatgkatgtgaggctagcaagcagctgctctggctacccatatgtcacagacaaattggattttttaataataaaagcagcagtgaaagcattaagagaactctttaaacatacctgaaacactgtttcttaacaacaacggtcatgcctgcgaagtctaaagccacttgtgatttataaccacaaagtttcagttttcattgacaagattggagaatcacacctttttcttctaactttcccctctggatattt

SEQ ID NO: 161657 - DNA, 492 bp, Homo sapiens
gaattcaagatgaggtgtgggtggggacacagccaaaccatatcaacaggtccatagagaggggctgggaggagcttagaaagtgcacattatccatcttcatccatactgcatttgctccccaaagagcttaagactgaaacatactcaatgcagcaaacactagactggaccataaagcctccttgatcttagtagaatggatgtgaggctagcaagcagctgctctggctacccatatgtcacagacaaattggattttttaataataaaagcagcagtgaaagcattaagagaactctttaaacatacctgaaacactgtttcttaacaacaacggtcatgcctgmgaagtctaaagccacttgtgatttataaccacaaagtttcagttttcattgacaagattggagaatcacacctttttcttctaactttcccctctggatatttcctacaaagttctaaatttagtagactattactatatgc

SEQ ID NO: 161658 - DNA, 617 bp, Homo sapiens
atgtccatctgattaattagatcaatataggaaacatatttgcataattctgggcacaaagtaataagtttatttggcttcaaaagatctagtttggcttatggcgtagttaagtttttgactgatttctatgtttttgcttggtagatttagcaattggaataaaaagctttgcctaaagtgttgtttagcagtttatgtctctaaatcaactataataagagtagtcactaaacagtttgaaataagtaatctttattcttatatatcccaaagtattcagtactgcagaaacccaagctcctttatttttgactctttaatttttccactgaaaaataaatcaagttaattcygacactatgtgaatttgagtttattcaatttcaagagacagtccagaaatctttcttatttcttatttatagtgtccattttgcaaactgttctcattcccatgtttcttaccagccattaaatgccctgtttctatgttctttccaaattctctctctctcactaaattattaaacaattcccactgcaacttctttccttaagttaggagagccaaaaaagggcagtatcaggcatagtaaagcacagaattctttgtt

SEQ ID NO: 161659 - DNA, 623 bp, Homo sapiens
  misc_feature (1)...(623): n = A,T,C or G
tactctaagttgtttctattaaaatttcaccatgacaatgtaaattgatagcttatctttatagatgcagtcacccccagcccaccagacgcaaatgaatatatgattgttctccttccccattttgtctgtattcttatgtaaaaggaagattccttacatttttcctctgccccatttgtctatgccatcttgttttattaaaaaaaaaaamaaaacaaaacagattcacttgagccaaaggnatgaatgactatatttccctacccttttcttacaggaaaattgtgtacttctcaatatccctccttttcccttttaaatttggagccctcaaaatcatcttcagagagaagcatagacctgtctcctaggcatgcatctttaactggcaaataaacctcccaaaatgattgagacttatctcatcattttcctcaattgataaaacagtaatatttataatctcatcatttctgtatgtcagtaatccaagtaggacttagctcagggtctttaatgaagcagaagtaaaggtgttggctgggacttcagccaagatcagcttccaaggtcatggacatgattgctacagggctcaattcctcatagggtattggatg

SEQ ID NO: 161660 - DNA, 618 bp, Homo sapiens
ttggctgggacttcagccaagatcagcttccaaggtcatggacatgattgctacagggctcaattcctcatagggtattggatgggggaacctcaatttctcagaggctgcctttggtttttttacatgtgaccttttccttaagacagctcacaatagagcaaatggctttatcaaagcaarcaactgagaggacatgacaatatgaggaagagggaagccacaggcttgtataacctaatttcagaagtgataccttttatttttgcttcacttttattagctataagcaagtcactaggtccagggtgtgctcgagggcattagattatacaaagaattgaacatcaggaggcagggctcattgggagccatttcagaagctgcctaccacagaggttaggaaatatgctaatataaaccattctttataaaaagaaactgagacatagaaaaataattttacctgatgtgtagctttatcaaaggccatcagtaatcaagacagttaacctttattgagttcttcatatgcctgcactcattgctaagttaataatacacactttttaatttaatcctctgagacaccttttgaaaaaaatgcatattaatcct

SEQ ID NO: 161661 - DNA, 579 bp, Homo sapiens
tatgaaattaacttattaaatactgctaagtgaaagaagccaatctgaaaaggctaaatactgtataatttccatttatgacattctggaaatggtgaaactatgaaacaatgaaaagatcagtgattgccatgggttatggaagagkggggaatgaatagtcagagcacagaggattttcagagcagtaaaaaccagtatgatttcataatggtacatacatgttatacatttgtcaaaacctataaaatgtagagtaccaagagtgaacccatatataaactatggactttggacaatatgatgcatcagtgtaatttcaacaattgtgataacaatataccacactggtgggggaatggtaaaaatggggaagggtttttatgggtaatctctgtatcttcctcttaattttgctgtgaacctaaaactgctctaaaaacatcaagaaaaaaaaaaaaaaacttccaacaaggggtaaatagaataatctttgggttagattttgtaggtggagataaagaaaataaggacaaaaatagccaatttatttaggaaaaaagataatctgattaggcc

SEQ ID NO: 161662 - DNA, 579 bp, Homo sapiens
tatgaaattaacttattaaatactgctaagtgaaagaagccaatctgaaaaggctaaatactgtataatttccatttatgacattctggaaatggtgaaactatgaaacaatgaaaagatcagtgattgccatgggttatggaagagtggggaatgaatagtcagagcacagaggattttcagagcagtaaaaaccagtatgatttcataatggtacatacatgttatacatttgtcaaaacctataraatgtagagtaccaagagtgaacccatatataaactatggactttggacaatatgatgcatcagtgtaatttcaacaattgtgataacaatataccacactggtgggggaatggtaaaaatggggaagggtttttatgggtaatctctgtatcttcctcttaattttgctgtgaacctaaaactgctctaaaaacatcaagaaaaaaaaaaaaaaacttccaacaaggggtaaatagaataatctttgggttagattttgtaggtggagataaagaaaataaggacaaaaatagccaatttatttaggaaaaaagataatctgattaggcc

SEQ ID NO: 161663 - DNA, 593 bp, Homo sapiens
agaacaaataggatacatgtatatacataagggagtttattagggagaattagcttactaaattacaaggcaaagtctcactacaggccatctgcaagctgggaaacaagagaggacagtaatggctcagttcaagtccaaaagccttaaaactaagaaagctaacagtgcagccttcaggctgtgccgaaggctcaaaagccctggggaagccacaggtgcaagtcctggagtccaaagtccagagaacctgaagtctgatgtccaagggaagaaggagcagaagcaaccattcaccacgaaaagaagaaaaaaattcagaagatccagcaagcaaagttattctacctttttcagcctgccttgttttatctgcaccaaattgtgcaaattgtgcccaactacattgaagatgtatcttcctctcccaggacaccaactcaaatatcaatctcctctggcaacacactcacaggcacacccagaaacaatgctttaccagccatctaaacaaccctcaatccaatcaagttgacagctaatattaaccatcacaartccaccccttgtcaacttggcatccatacagatct

SEQ ID NO: 161664 - DNA, 587 bp, Homo sapiens
gtatttttacaattttatatatgaatgtgaggacttatatacgtattaattatttattccctccttattctaagaatgagttaggagctttgccttacaaggcaatgtgattagggactttatggaagactttttttttwtaaaaaaagatatttttaagagaaaatggttgtcaggttcgtactttttattagctagcagtcatggaagttccaagtgactggtaaatttattttttaaattaagacaagggtggaagttgttttccttttgttatttgttcgttcacatcttcaattgaagcaaaacctcaaaatgctcaggttcatggaaaatctaaatttgttgcatatttgtattaccaggagtaattttccaaagagcatcatcaacctcactatttggtttgaatgcaaacttacacaatatttcttgaagatgaaataagatgtggaattgtttatgtgcttcttggatgccacctctgagcataactatgatgacagatttgagaagatcagtaaataatgcctaggcaggcttacagatgactttgtccttggactaaatctttaaaaccagagacc

SEQ ID NO: 161665 - DNA, 587 bp, Homo sapiens
gtatttttacaattttatatatgaatgtgaggacttatatacgtattaattatttattccctccttattctaagaatgagttaggagctttgccttacaaggcaatgtgattagggactttatggaagacttttttttttwaaaaaaagatatttttaagagaaaatggttgtcaggttcgtactttttattagctagcagtcatggaagttccaagtgactggtaaatttattttttaaattaagacaagggtggaagttgttttccttttgttatttgttcgttcacatcttcaattgaagcaaaacctcaaaatgctcaggttcatggaaaatctaaatttgttgcatatttgtattaccaggagtaattttccaaagagcatcatcaacctcactatttggtttgaatgcaaacttacacaatatttcttgaagatgaaataagatgtggaattgtttatgtgcttcttggatgccacctctgagcataactatgatgacagatttgagaagatcagtaaataatgcctaggcaggcttacagatgactttgtccttggactaaatctttaaaaccagagacc

SEQ ID NO: 161666 - DNA, 587 bp, Homo sapiens
gtatttttacaattttatatatgaatgtgaggacttatatacgtattaattatttattccctccttattctaagaatgagttaggagctttgccttacaaggcaatgtgattagggactttatggaagactttttttttttaaaaaaagatatttttaagagaaaatggttgtcaggttcrtactttttattagctagcagtcatggaagttccaagtgactggtaaatttattttttaaattaagacaagggtggaagttgttttccttttgttatttgttcgttcacatcttcaattgaagcaaaacctcaaaatgctcaggttcatggaaaatctaaatttgttgcatatttgtattaccaggagtaattttccaaagagcatcatcaacctcactatttggtttgaatgcaaacttacacaatatttcttgaagatgaaataagatgtggaattgtttatgtgcttcttggatgccacctctgagcataactatgatgacagatttgagaagatcagtaaataatgcctaggcaggcttacagatgactttgtccttggactaaatctttaaaaccagagacc

SEQ ID NO: 161667 - DNA, 637 bp, Homo sapiens
ggctgtgttccaataaaacttgatttacaataattaataacagactaggtttgatccttgggccttggtttgcttatcttgtatatgytgtcatggaaagagttgtataccctttttggaaaaagccattgcaatgattcttaataagaatgatatgttgtttggctaacttgtgaaatgatcttgctcaatctagcatgattatttggaataatgtatagcccagagtcaagatttgcccttcttaaagaaattaaaaagaaaaaatcctacctccttggattcagaaactgaaataaatatcctggaagtcataattagatacacatatttcacaaagagaaagaatttatatgaatagtcacctatgaactttagatatatattctgttgtttaatcacatggtttttaacttagaataataaaataatagaaataatgcttttacttcaataagcagaaagatgggttcagggaggttaagtgacttttatggtcatagctagtgttttcatttagttgaattatcaacttatttgtttccagtttaaaaataatcctattgacactaatttaccctaacccttctggagatactcatacttgtcattaagtcttggtttctgtttgttgata

SEQ ID NO: 161668 - DNA, 637 bp, Homo sapiens
ggctgtgttccaataaaacttgatttacaataattaataacagactaggtttgatccttgggccttggtttgcttatcttgtatatgttgtcatggaaagagttgtataccctttttggaaaaagccattgcaatgattcttaataagaatgatatgttgtttggctaacttgtgaaatgatcttgctcaatctagcatgattatttggaataatgtatagcccagagtcaagatttgcccttcttaaagaaattaaaaagaaaaaatcctacctccttggattcagaaactgaaataaatatcctgraagtcataattagatacacatatttcacaaagagaaagaatttatatgaatagtcacctatgaactttagatatatattctgttgtttaatcacatggtttttaacttagaataataaaataatagaaataatgcttttacttcaataagcagaaagatgggttcagggaggttaagtgacttttatggtcatagctagtgttttcatttagttgaattatcaacttatttgtttccagtttaaaaataatcctattgacactaatttaccctaacccttctggagatactcatacttgtcattaagtcttggtttctgtttgttgata

SEQ ID NO: 161669 - DNA, 590 bp, Homo sapiens
atctgtgaaaggatatattggagtgcatagaggcaaatgacaaaaaaagtgaacattacaggatattcactagaaggaagctatcggagaaacagctttttgawttgtgcattcatctcacagagttaaacctttcttttgattcagcagtttgaaaacactgtttttatccattctatgtgtggatgattttagctcattgaggccaagggtgaaaaagagaaagtaacaggataaaaactggaaggaagctgtctgagaaactgttttgtgatgtgtgcattcacctcacagatttgtatcttccttttcattcagcagttgagaaacactgtttttgtccattctgtgaatggacatttgagagctcattgaggccaatggcaaaaaagagaatatcccaggataaaatctataaagaagctatgtgagaaaccactttgtgatgtgtgcattcatctcacagagataaatcttccttttcattcagagtttggatacactgttttagttcattcttcaaacagacattttggagctcattgaagccaatgaagaaaaagtgaatatcccaggataaaaagtaggag

SEQ ID NO: 161670 - DNA, 590 bp, Homo sapiens
atctgtgaaaggatatattggagtgcatagaggcaaatgacaaaaaaagtgaacattacaggatattcactagaaggaagctatcggagaaacagctttttgatttgtgcattcatctcacagagttaaacytttcttttgattcagcagtttgaaaacactgtttttatccattctatgtgtggatgattttagctcattgaggccaagggtgaaaaagagaaagtaacaggataaaaactggaaggaagctgtctgagaaactgttttgtgatgtgtgcattcacctcacagatttgtatcttccttttcattcagcagttgagaaacactgtttttgtccattctgtgaatggacatttgagagctcattgaggccaatggcaaaaaagagaatatcccaggataaaatctataaagaagctatgtgagaaaccactttgtgatgtgtgcattcatctcacagagataaatcttccttttcattcagagtttggatacactgttttagttcattcttcaaacagacattttggagctcattgaagccaatgaagaaaaagtgaatatcccaggataaaaagtaggag

SEQ ID NO: 161671 - DNA, 590 bp, Homo sapiens
atctgtgaaaggatatattggagtgcatagaggcaaatgacaaaaaaagtgaacattacaggatattcactagaaggaagctatcggagaaacagctttttgatttgtgcattcatctcacagagttaaacctttcttttgattcagcagtttgaaaacactgtttttatccattctatgtgtggatgattttagctcattgaggccaagggtgaaaaagagaaagtaacaggataaaaactggaaggaagctgtctgagaaactgttttgtgawgtgtgcattcacctcacagatttgtatcttccttttcattcagcagttgagaaacactgtttttgtccattctgtgaatggacatttgagagctcattgaggccaatggcaaaaaagagaatatcccaggataaaatctataaagaagctatgtgagaaaccactttgtgatgtgtgcattcatctcacagagataaatcttccttttcattcagagtttggatacactgttttagttcattcttcaaacagacattttggagctcattgaagccaatgaagaaaaagtgaatatcccaggataaaaagtaggag

SEQ ID NO: 161672 - DNA, 590 bp, Homo sapiens
atctgtgaaaggatatattggagtgcatagaggcaaatgacaaaaaaagtgaacattacaggatattcactagaaggaagctatcggagaaacagctttttgatttgtgcattcatctcacagagttaaacctttcttttgattcagcagtttgaaaacactgtttttatccattctatgtgtggatgattttagctcattgaggccaagggtgaaaaagagaaagtaacaggataaaaactggaaggaagctgtctgagaaactgttttgtgatgtgtgcattcacctcacagatttgtatcttccttttcattcagcagttgagaaacactgtttttgtccattctgtgaatggacatttgagagctcattgaggccaatggcaaaaaagagaatatcccaggataaaatctataaagaagctatgtgagaaaccactttgtgatgtgtgcattcatctcayagagataaatcttccttttcattcagagtttggatacactgttttagttcattcttcaaacagacattttggagctcattgaagccaatgaagaaaaagtgaatatcccaggataaaaagtaggag

SEQ ID NO: 161673 - DNA, 476 bp, Homo sapiens
aatgaaactatctgagaaatggttttgtgatgtgtgcattcgtcacacaaatttaaacatttcttttcattcagcagtttggaaacactgattttgtagattctgtgaagggctatttggaagtgcattgagatctactgtgaaaaagaaaatatctttagataaaaactagaaagaatctttctgagaaactgctttgtgatgtgtgcattcatctagaaaagttaaaaytttatttagattcagcagtttgggagcactgtttctgtccattctgcgaatggacatttgagagctcattaagggcaatggcaaaaaaataatatcccaggataaatactagaaggaagctatctgcaaaaccgctttgctatgtgtgcattcatctgtcagagttaaaactttcctttcattcaggggtttaaaactgtttttgtccattttgcaaatggacatttgggagctcattgtggtca

SEQ ID NO: 161674 - DNA, 476 bp, Homo sapiens
aatgaaactatctgagaaatggttttgtgatgtgtgcattcgtcacacaaatttaaacatttcttttcattcagcagtttggaaacactgattttgtagattctgtgaagggctatttggaagtgcattgagatctactgtgaaaaagaaaatatctttagataaaaactagaaagaatctttctgagaaactgctttgtgatgtgtgcattcatctagaaaagttaaaactttatttagattcagcagtttgggagcactgtttctgtccattctgcgaatggacattkgagagctcattaagggcaatggcaaaaaaataatatcccaggataaatactagaaggaagctatctgcaaaaccgctttgctatgtgtgcattcatctgtcagagttaaaactttcctttcattcaggggtttaaaactgtttttgtccattttgcaaatggacatttgggagctcattgtggtca

SEQ ID NO: 161675 - DNA, 531 bp, Homo sapiens
acactgtttttgtggaaactgccgaggaatattagggagttcattgaggcttagggtgaaaaagaaaatatcttcaaataaaaactagaaagatggtttctgagaaattgctttgttatatgtgcattcatctcacagagttacacctttctttaccttcagcagtttgtaaacactgttgttgtccattctgactatggacatttgggaggtctttgaggccaaargtgaataagtgaacataacaggataaaaattaggaggaagctatctgagaaaccgctctgtgttgtctgcttttatctcatagagtaaaacctttcttttcatttgtcagtttggaaacactgtttttctggaatctgctaagtaatattaggtagtgcattgaggtctatggtgaaaaagaaaatgtattcagattaaaacttgaaagaagctgagaaactgctttgtgatgtgtgcattcatctctcagagttaaacttttcttttgattcagcagtttggaaacactttttgtccattatg

SEQ ID NO: 161676 - DNA, 531 bp, Homo sapiens
acactgtttttgtggaaactgccgaggaatattagggagttcattgaggcttagggtgaaaaagaaaatatcttcaaataaaaactagaaagatggtttctgagaaattgctttgttatatgtgcattcatctcacagagttacacctttctttaccttcagcagtttgtaaacactgttgttgtccattctgactatggacatttgggaggtctttgaggccaaaggtgaataagtgaacataacaggataaaaattaggaggaagctatctgagaaaccgctctgtgttgtctgcttttatctcatagagtaaaayctttcttttcatttgtcagtttggaaacactgtttttctggaatctgctaagtaatattaggtagtgcattgaggtctatggtgaaaaagaaaatgtattcagattaaaacttgaaagaagctgagaaactgctttgtgatgtgtgcattcatctctcagagttaaacttttcttttgattcagcagtttggaaacactttttgtccattatg

SEQ ID NO: 161677 - DNA, 531 bp, Homo sapiens
acactgtttttgtggaaactgccgaggaatattagggagttcattgaggcttagggtgaaaaagaaaatatcttcaaataaaaactagaaagatggtttctgagaaattgctttgttatatgtgcattcatctcacagagttacacctttctttaccttcagcagtttgtaaacactgttgttgtccattctgactatggacatttgggaggtctttgaggccaaaggtgaataagtgaacataacaggataaaaattaggaggaagctatctgagaaaccgctctgtgttgtctgcttttatctcatagagtaaaacctttcttttcatttgtcagtttggaaacactgtttttctggaatctgctaagtaatattaggtagtgcattgaggtctatggtgaaaaagaaaatrtattcagattaaaacttgaaagaagctgagaaactgctttgtgatgtgtgcattcatctctcagagttaaacttttcttttgattcagcagtttggaaacactttttgtccattatg

SEQ ID NO: 161678 - DNA, 587 bp, Homo sapiens
ttggaaacactttttgtccattatgtgagtggacatttgggagctctttgaggtcaatggtgaaaaagtgaatatcccaggataaaaactagaaggaagctatctgagaaaccactttatgatgtgtgcattcatatcacagagttaaattcttcttttcattcagcagtttggaaaaattttttgtttgaatctgccaacgwatgtttgggagtgcgttgaggactacgttgaaaaagaaaatatgttgagataaaaaccagaaagaagctttctgagaaaatgctttgtcatgtgtacattcctctcacagagttaaacctttcttttgattcagcaatttggaaacactgtttttgtccattctacaaatggacatttgggagcttgatgagggcaaaggcaagaaagccaatattgaaggataaaaactagaaggaagctatctggaaaatatctttgtgatgtgtgcattcatctcacagagttaaacctttcttttgattcaattgtttggaaacactgtttttgtccattctctgaatggacattttgaaactcgttgaggccaatggtgaaaaagtgaa

SEQ ID NO: 161679 - DNA, 587 bp, Homo sapiens
ttggaaacactttttgtccattatgtgagtggacatttgggagctctttgaggtcaatggtgaaaaagtgaatatcccaggataaaaactagaaggaagctatctgagaaaccactttatgatgtgtgcattcatatcacagagttaaattcttcttttcattcagcagtttggaaaaattttttgtttgaatctgccaacgtatgtttgggagtgcrttgaggactacgttgaaaaagaaaatatgttgagataaaaaccagaaagaagctttctgagaaaatgctttgtcatgtgtacattcctctcacagagttaaacctttcttttgattcagcaatttggaaacactgtttttgtccattctacaaatggacatttgggagcttgatgagggcaaaggcaagaaagccaatattgaaggataaaaactagaaggaagctatctggaaaatatctttgtgatgtgtgcattcatctcacagagttaaacctttcttttgattcaattgtttggaaacactgtttttgtccattctctgaatggacattttgaaactcgttgaggccaatggtgaaaaagtgaa

SEQ ID NO: 161680 - DNA, 557 bp, Homo sapiens
tgctttttgatgtgtgcattcatctcacagagataaactttccattgatgcagcagtttggaaacaccagtttgtcttttctgtgagtggacatttgggagatcatagaggccactggagaaaaagcaaatatccagacacaaaaactagaaggaaactatctgagaaaatgctttgttatgtatgcattcacctcgcaaagttaaacytttttttcattaagcagtttggaaacaatgattttgtagaatatgtgaaggcatatttgggagcattttgagactatggtgaaaaagaagatacagacaaaaactagaaagaagctttccgagaaactgctttgacaggtgtacattcctctcacagctaaacctctctttcgataaagtagtttggaaacactgtttttgtccattctgtgaatggacatttggaatctcattgaggccaattgtgaaaaagtgaatatccctggataaaaactaaaaaaaatctatctgagaaactgctttgagatgtgtgcaatcatcttgcagagttaaatctttcttttcaat

SEQ ID NO: 161681 - DNA, 557 bp, Homo sapiens
tgctttttgatgtgtgcattcatctcacagagataaactttccattgatgcagcagtttggaaacaccagtttgtcttttctgtgagtggacatttgggagatcatagaggccactggagaaaaagcaaatatccagacacaaaaactagaaggaaactatctgagaaaatgctttgttatgtatgcattcacctcgcaaagttaaacctttttttcattaagcagtttggaaacaatgattttgtagaatatgtgaaggcatatttgggagcattttgagactatggtgaaaaagaagatacagacaaaaactagaaagaagctttcygagaaactgctttgacaggtgtacattcctctcacagctaaacctctctttcgataaagtagtttggaaacactgtttttgtccattctgtgaatggacatttggaatctcattgaggccaattgtgaaaaagtgaatatccctggataaaaactaaaaaaaatctatctgagaaactgctttgagatgtgtgcaatcatcttgcagagttaaatctttcttttcaat

SEQ ID NO: 161682 - DNA, 557 bp, Homo sapiens
tgctttttgatgtgtgcattcatctcacagagataaactttccattgatgcagcagtttggaaacaccagtttgtcttttctgtgagtggacatttgggagatcatagaggccactggagaaaaagcaaatatccagacacaaaaactagaaggaaactatctgagaaaatgctttgttatgtatgcattcacctcgcaaagttaaacctttttttcattaagcagtttggaaacaatgattttgtagaatatgtgaaggcatatttgggagcattttgagactatggtgaaaaagaagatacagacaaaaactagaaagaagctttccgagaaactgctttgacaggtgtacattcctctcacagctaaacctctctttygataaagtagtttggaaacactgtttttgtccattctgtgaatggacatttggaatctcattgaggccaattgtgaaaaagtgaatatccctggataaaaactaaaaaaaatctatctgagaaactgctttgagatgtgtgcaatcatcttgcagagttaaatctttcttttcaat

SEQ ID NO: 161683 - DNA, 557 bp, Homo sapiens
tgctttttgatgtgtgcattcatctcacagagataaactttccattgatgcagcagtttggaaacaccagtttgtcttttctgtgagtggacatttgggagatcatagaggccactggagaaaaagcaaatatccagacacaaaaactagaaggaaactatctgagaaaatgctttgttatgtatgcattcacctcgcaaagttaaacctttttttcattaagcagtttggaaacaatgattttgtagaatatgtgaaggcatatttgggagcattttgagactatggtgaaaaagaagatacagacaaaaactagaaagaagctttccgagaaactgctttgacaggtgtacattcctctcacagctaaacctctctttcgataragtagtttggaaacactgtttttgtccattctgtgaatggacatttggaatctcattgaggccaattgtgaaaaagtgaatatccctggataaaaactaaaaaaaatctatctgagaaactgctttgagatgtgtgcaatcatcttgcagagttaaatctttcttttcaat

SEQ ID NO: 161684 - DNA, 394 bp, Homo sapiens
taaacctttcttttcattcagcagttggaaacactgtttttgtccattctgtgaatggacatttgggagctcatggaggccaaaggttaagtagcaaatgttccctgataaaactggaaggaatctatatgagaaactgcttcggttatgtgcatacatcacacagaattaaaccttattgaggagtttggaaacactgtttttcagaatctgcaaagggatattttgcagtgcattgaggcctrtgctgaaaaaggaaacaccttcagataaaaactagaaagaagctttctgagaaactgcatttttatgtgtgcatttatctcacagtgttaaacatttcttttgattcagcattttggaaacactgttttttttttacattctgtgaatg

SEQ ID NO: 161685 - DNA, 631 bp, Homo sapiens
tctatggtgaaaaagaaaatatcttcagataaaatctagaaagaagctttctgagaaactgctttgtaatgtgtacatttatctcatgaagttaatattttcttttgattcaatagtttggaaacactgtttatttccattctgtgaatggatggagctcattgagtcaaatggtgaaaatgggaatatcccaggataaaaactacaaggaacctaatggtgaaaccactttttgatgtgtgcattcatctcgcagatttaaacctttatttcattcagaagttaggaaatactgtttttgtagaacctgcaaagggatatttgggatcctgctgaggcctattttgaaaaagaaaataayttcagatgaaaactaaaaagaagcattgtgaaactgctttgagatgtgtgcattcatctgacagagttaatccattcttttcattcagaagtttggaaacagtgttttgtagaatgtgtgagagtatattttgaagtgcattgaggcctatggtggaaaaggaaatatcttaagataagaacaagacagaagctttctgagaaactgctttttgatatgtgcattcatctcacagagttgaacatttgttttgatttagcaatttggaaa

SEQ ID NO: 161686 - DNA, 159 bp, Homo sapiens
taaacctttcttttgattcagcagtttggaaacaccgtttttatctattcagagaatggacatttcagatckctttgagccccaaggtgaaaaagcgaatctcccatgataaaaaatagaaggaatctatctgataaactgccttgtgatgtgtacatt

SEQ ID NO: 161687 - DNA, 444 bp, Homo sapiens
atcttaccatttcaatgatccagtaaagacattctatgcctgtacaccacatattttctttgattgtggatttattttagatagaattttakgtctggctttcactttagcctggtccctacctcaagcataaggtaaagattttccatgcgttcttttctggtactactacctgccagtgtggggtcatgtcctagtctatcttgagggaatccccctgttcattattgtcagagtgagactgttaagtcttgatttccctggacaacttcactgcatgacttttaatatgattttttaatataccctttactggacaataaattctatagttatctgagaaagagatatggtcaggaagaggcattgcctcattcagcttttctctttggtgaactcgcatatgttctcctcacccgccagtcacctctaaaccgtattgtt

SEQ ID NO: 161688 - DNA, 444 bp, Homo sapiens
atcttaccatttcaatgatccagtaaagacattctatgcctgtacaccacatattttctttgattgtggatttattttagatagaattttaggtctggytttcactttagcctggtccctacctcaagcataaggtaaagattttccatgcgttcttttctggtactactacctgccagtgtggggtcatgtcctagtctatcttgagggaatccccctgttcattattgtcagagtgagactgttaagtcttgatttccctggacaacttcactgcatgacttttaatatgattttttaatataccctttactggacaataaattctatagttatctgagaaagagatatggtcaggaagaggcattgcctcattcagcttttctctttggtgaactcgcatatgttctcctcacccgccagtcacctctaaaccgtattgtt

SEQ ID NO: 161689 - DNA, 444 bp, Homo sapiens
atcttaccatttcaatgatccagtaaagacattctatgcctgtacaccacatattttctttgattgtggatttattttagatagaattttaggtctggctttcactttagcctggtccctacctcaagcataaggtaaagattttccatgcgttcttttctggtactactacctgccagtgtggggtcatgtcctagtctatcttgagggwatccccctgttcattattgtcagagtgagactgttaagtcttgatttccctggacaacttcactgcatgacttttaatatgattttttaatataccctttactggacaataaattctatagttatctgagaaagagatatggtcaggaagaggcattgcctcattcagcttttctctttggtgaactcgcatatgttctcctcacccgccagtcacctctaaaccgtattgtt

SEQ ID NO: 161690 - DNA, 547 bp, Homo sapiens
gctcaataagtgtaatggtgtaaaagcaaatatgccaggataaaaactagaaggatgatatttgagaaaccgctttgtgatgtgtgcattcatctcgcagagtaaacctttcttttgactgagcagtttggaaacactgttttttgtccattctgtgaatggacatttgggagctcattgaggtcaatggcacaaaagtgaatatcccaggataaaaactggaaggaagctatctgagaagctactgtgtgatgtgtgcattaatcttcccgtgttaaaactttcttttgattcagctgtttggaaacactgtttttgtggttcttcaaatggatatttgggagctcattgaggccaatggctaaaaagcaaatatcccaggaaaaaaaactggaaggaaattatctgagaatctgctgtacgatgggtgcattcatctcacagaggtaaamctttcatttcattttgcagttttgaaatgctatttttgtagaatctgtgacgggatatttgggagcactttcaggccaatggtgaaaatgcaaat

SEQ ID NO: 161691 - DNA, 578 bp, Homo sapiens
agagcagtggcaaaaaacagaatatcccacgataaaaacaggagggaaactttctgagaaactgctttgtggtgtctccattgatctcacagagttaaacctttcttttgattcaggagttttgaaatactgtttttctccattctgtgaatgaacatttaggagctctttgaggyctggggtgaaaaagggaatatcccaggataaaaacaggagggaaactttctgagaaactgttgtgtgatgcatgcattcgccacacagagttaaacttttcttttccttcagcagtttggaaatattgtttttgtaggaactgcaaaaaaaatatttgggtgcatattgaggcttatggtgaaaaagaaaatatcttcagataaaatctaagaagaagctttctgagaaactgctttgtgatgtgtgcattcatctcacagagttaaacctttcttttgattcagctgtttggaagcaccgttattgtccattctgcaaatggagctcattgaggctcattgaggcccatggcaaaaaaataaatgtcgcaggataactagaacgaggctatttgagaaatc

SEQ ID NO: 161692 - DNA, 384 bp, Homo sapiens
tgatgcatgcattcgccacacagagttaaacttttcttttccttcagcagtttggaaatattgtttttgtaggaactgcaaaaaaaatatttgggtgcatattgaggcttatggtgaaaaagaaaatatcttcagataaaatctaagaagaagctttctgagaaactgctttgtgatgtgtgcattcatctcacagagttaaacctttcttttgattcagctgtttggaagcaccgttattgtccattctgcaaatggagctcattgargctcattgaggcccatggcaaaaaaataaatgtcgcaggataactagaacgaggctatttgagaaatcgctttgtgatatatgcattcactcacagagttaaatttttcttttca

SEQ ID NO: 161693 - DNA, 384 bp, Homo sapiens
tgatgcatgcattcgccacacagagttaaacttttcttttccttcagcagtttggaaatattgtttttgtaggaactgcaaaaaaaatatttgggtgcatattgaggcttatggtgaaaaagaaaatatcttcagataaaatctaagaagaagctttctgagaaactgctttgtgatgtgtgcattcatctcacagagttaaacctttcttttgattcagctgtttggaagcaccgttattgtccattctgcaaatggagctcattgaggctcattgaggcccatggcaaaaaaataaatgtcgcargataactagaacgaggctatttgagaaatcgctttgtgatatatgcattcactcacagagttaaatttttcttttca

SEQ ID NO: 161694 - DNA, 529 bp, Homo sapiens
tgctttgtgatgtctccattcatctcacagmgttaaacatctgttttgattcaggagttttggagcactgtttttctccattctgtgaagggacacttgggagatcattgaggccagtggcaaaaaagagaatatcccaggataaaaacaggagggaagctttctgagaagctgttgtgtgatgtgtgcattcacatcagagagttaaacttttcttttcattcagcagcttggaaatattgtttttgttgaaactgcaaaaaaaaaatttgggtgcaccagaaggaagcaatctgagaaacagctttatgaagtgttcatttacctcccatatttaaatctgtcttttaattcagtggtttggaaacattgtttctgtcccttctgtgaatggacatttgggagctcattgaagccaatggcaaaaaagtgaatgtcccaggttaaaaatgagaaagaagcaaactgagaaatcactttgcaatgtgtgcattcatctcacagagttaaacctttcttttgattcagc

SEQ ID NO: 161695 - DNA, 245 bp, Homo sapiens
aaaaggacatttgggagcaccttgaggccaatggagaaaaaggaaatatcttcacataaacaactagaaagaagcattctgacaaactgcatagtgatgtgtgcattcatctcatagagttaaacctttctttacactgagmagctttggaaaactgtttatgtagaatctgtgaggagatattttggaacgttttgaggcccatggtgaaaaaggaaatatcttcagatacgaattagaaagaa

SEQ ID NO: 161696 - DNA, 245 bp, Homo sapiens
aaaaggacatttgggagcaccttgaggccaatggagaaaaaggaaatatcttcacataaacaactagaaagaagcattctgacaaactgcatagtgatgtgtgcattcatctcatagagttaaacctttctttacactgagcagytttggaaaactgtttatgtagaatctgtgaggagatattttggaacgttttgaggcccatggtgaaaaaggaaatatcttcagatacgaattagaaagaa

SEQ ID NO: 161697 - DNA, 245 bp, Homo sapiens
aaaaggacatttgggagcaccttgaggccaatggagaaaaaggaaatatcttcacataaacaactagaaagaagcattctgacaaactgcatagtgatgtgtgcattcatctcatagagttaaacctttctttacactgagcagctttggaaaactstttatgtagaatctgtgaggagatattttggaacgttttgaggcccatggtgaaaaaggaaatatcttcagatacgaattagaaagaa

SEQ ID NO: 161698 - DNA, 550 bp, Homo sapiens
aacattctgagaaactgttttgagaagtgtgtgttcayctcacagagttaaagcagtcttttgattgagcagtttggaaacactgtttttgtaaggactgctaaaagatatttgggagcacaatgagtcctgtggtgataaatatgttcacataaaaactataaagataatttctgagaaattgctttggaaatgtgcattcctctcacagagttaatgctttcttttgattgagcagtttggaatctctgtttttgtacaatctgcaaagggatatttgggaaggcattgaggcctgtggtgaaaaaataccttcagataaaactagaaagaagtttctgtgaaactgctttgtgacgtgtgcattcatttcaaagagataaaactttcttttgacggggcagtttggaaacactgtttttgtagaatctgcaaagggatatttgggtgccccttgagtcttatggtgaaaaagtaaacatctttagttaaaaactacaaagaagctttttgagaaactgctttaagttgtgtgtgttcatctgcatca

SEQ ID NO: 161699 - DNA, 550 bp, Homo sapiens
aacattctgagaaactgttttgagaagtgtgtgttcatctcacagagttaaagcagtcttttgattgagcagtttggaaacactgtttttgtaaggactgctaaaagatatttgggagcacaatgagtcctgtggtgataaatatgttcacataaaaactataaagataatttctgagaaattgctttggaaatgtgcattcctctcacagagttaatgctttcttttgattgagcagtttggaatctctgtttttgtacaatctgcaaagggatatttgggaaggsattgaggcctgtggtgaaaaaataccttcagataaaactagaaagaagtttctgtgaaactgctttgtgacgtgtgcattcatttcaaagagataaaactttcttttgacggggcagtttggaaacactgtttttgtagaatctgcaaagggatatttgggtgccccttgagtcttatggtgaaaaagtaaacatctttagttaaaaactacaaagaagctttttgagaaactgctttaagttgtgtgtgttcatctgcatca

SEQ ID NO: 161700 - DNA, 378 bp, Homo sapiens
gggaaattcccttgtgatgtgtgcattcatctcacagaagtaaaactttcttttgattcagcactttgcaaacactgtttttgtccattcagagaatggacatttgagagatmattgaggccagtggtgaaaatcaagtatcccaggataacaactaaaaggaagctaactgtggaatcactttgtgatatgtgcattcatcttgcagttaaacctcacttttcattcagttctttggaaactctgtgtttgtccattctgcaaatagacatttgagagctcattgagactgaaggtgaaaatgtgaatttcccaggataaaaactagaaggatgctatctcagaaatggctttgtgatgtgtccattcactcataca

SEQ ID NO: 161701 - DNA, 378 bp, Homo sapiens
gggaaattcccttgtgatgtgtgcattcatctcacagaagtaaaactttcttttgattcagcactttgcaaacactgtttttgtccattcagagaatggacatttgagagataattgaggccagkggtgaaaatcaagtatcccaggataacaactaaaaggaagctaactgtggaatcactttgtgatatgtgcattcatcttgcagttaaacctcacttttcattcagttctttggaaactctgtgtttgtccattctgcaaatagacatttgagagctcattgagactgaaggtgaaaatgtgaatttcccaggataaaaactagaaggatgctatctcagaaatggctttgtgatgtgtccattcactcataca

SEQ ID NO: 161702 - DNA, 378 bp, Homo sapiens
gggaaattcccttgtgatgtgtgcattcatctcacagaagtaaaactttcttttgattcagcactttgcaaacactgtttttgtccattcagagaatggacatttgagagataattgaggccagtggtgaaaatcaagtatcccaggataacaacyaaaaggaagctaactgtggaatcactttgtgatatgtgcattcatcttgcagttaaacctcacttttcattcagttctttggaaactctgtgtttgtccattctgcaaatagacatttgagagctcattgagactgaaggtgaaaatgtgaatttcccaggataaaaactagaaggatgctatctcagaaatggctttgtgatgtgtccattcactcataca

SEQ ID NO: 161703 - DNA, 568 bp, Homo sapiens
gagagctcattgagactgaaggtgaaaatgtgaatttcccaggataaaaactagaaggatgctatctcagaaatggctttgtgatgtgtccattcactcatacatttaaatcttccttttgattccacagtttggaagcactggttttatcctttcagtgaaaggacatatcagagggcattgaggactagggtgcaaaagaaaatatcttctgaaaaaaatggaaaagaggctttctgagaaactgctttgcaatgtatgcatccatttcacagagtcaacactttcttttgattcagcactttggaaacactgtttttrtccattctaggaaagggcatttgtgagctcattgaggccaatggtgaaacagtgaaaattccaggataaaaactacaaggaaactatctgagaaactgttttgagatgtgtgcattcatctcacggagttacacctttcttttcattcatcagttaagttttaacagatttaaaattttaacagagttaaaactttcttttgattgagcagtatggaagcactgtttttttcagtctgtgaatggac

SEQ ID NO: 161704 - DNA, 415 bp, Homo sapiens
gaaactgctttgttatttacacattcatctcacagagttaacaccttattttgattcagctgttttgaaacactgtttttgtccattatgcaaatggacatttgggaggaaattgtggccaatkgtgaaaaaaggaatatcccagggaaaaactacaaggaatctatttgagaaactgctttgtgatgtgtaccttcacctcacacagttaaatctttcttttgattcagcagtttggaaatgctgtttttgtccattctgtgaaaggatattgggagctcattgaggtctatggtgaaaaagaaaatatcttcagaggaaaacaggaaagaagcattcctggaaattgcttcgtgttttgtccattcatctcacagagttaaaccattcttttgattcagcagtttggaaacac

SEQ ID NO: 161705 - DNA, 415 bp, Homo sapiens
gaaactgctttgttatttacacattcatctcacagagttaacaccttattttgattcagctgttttgaaacactgtttttgtccattatgcaaatggacatttgggaggaaattgtggccaattgtgaaaaaaggaatatcccagggaaaaactacaaggaatctatttgagaaactgctttgtgatgtgtaccttcacctcacacagttaaatctttcttttgattcagcagtttggaaatgctgtttttktccattctgtgaaaggatattgggagctcattgaggtctatggtgaaaaagaaaatatcttcagaggaaaacaggaaagaagcattcctggaaattgcttcgtgttttgtccattcatctcacagagttaaaccattcttttgattcagcagtttggaaacac

SEQ ID NO: 161706 - DNA, 415 bp, Homo sapiens
gaaactgctttgttatttacacattcatctcacagagttaacaccttattttgattcagctgttttgaaacactgtttttgtccattatgcaaatggacatttgggaggaaattgtggccaattgtgaaaaaaggaatatcccagggaaaaactacaaggaatctatttgagaaactgctttgtgatgtgtaccttcacctcacacagttaaatctttcttttgattcagcagtttggaaatgctgtttttgtccattctgtgaaaggatattgggagctcattgaggtctatggtgaaaaagaaaatatcttcagaggaaaacaggaaagaagcattcctggawattgcttcgtgttttgtccattcatctcacagagttaaaccattcttttgattcagcagtttggaaacac

SEQ ID NO: 161707 - DNA, 415 bp, Homo sapiens
gaaactgctttgttatttacacattcatctcacagagttaacaccttattttgattcagctgttttgaaacactgtttttgtccattatgcaaatggacatttgggaggaaattgtggccaattgtgaaaaaaggaatatcccagggaaaaactacaaggaatctatttgagaaactgctttgtgatgtgtaccttcacctcacacagttaaatctttcttttgattcagcagtttggaaatgctgtttttgtccattctgtgaaaggatattgggagctcattgaggtctatggtgaaaaagaaaatatcttcagaggaaaacaggaaagaagcattcctggaaattgcttcgtgttktgtccattcatctcacagagttaaaccattcttttgattcagcagtttggaaacac

SEQ ID NO: 161708 - DNA, 555 bp, Homo sapiens
ggccaatggtgaaaaattgaaaaaaggataaaaattaagaggaagctatctgaaaaaccactttgtgatgtatgcattcatctcacataattaamacattatgtttattcagcaatttggaaacactgtttttgaaggatctgcgaagtgatatttgggagctcattgagaccaatggcaaaaaaagagaatatcccacgataaaatccagaaggaagctatctgagaaaatgctttgtgatgtgtgcattcagctcaaggagttaaatttttcttttaattcaacagttttgaaacattgtttttgtagaatctgcaaattgacatttgggaactcattcaggcctatggtgaaaaagaaattatcttcaggcaaaaactggaaagaagctttctgagtaactgctttgtggtgtgtgcattaatctcacagaattaaacctttctgtggattcatcagtttggaaacactgtttttgtccactttgctaatgggcatttggaggctaattaggccaaaggggaaaacgactatccaacaataaaaacgagaag

SEQ ID NO: 161709 - DNA, 555 bp, Homo sapiens
ggccaatggtgaaaaattgaaaaaaggataaaaattaagaggaagctatctgaaaaaccactttgtgatgtatgcattcatctcacataattaaaacattatgtttattcagcaatttggaaacactgtttttgaaggatctgcgaagtgatatttgggagctcattgagrccaatggcaaaaaaagagaatatcccacgataaaatccagaaggaagctatctgagaaaatgctttgtgatgtgtgcattcagctcaaggagttaaatttttcttttaattcaacagttttgaaacattgtttttgtagaatctgcaaattgacatttgggaactcattcaggcctatggtgaaaaagaaattatcttcaggcaaaaactggaaagaagctttctgagtaactgctttgtggtgtgtgcattaatctcacagaattaaacctttctgtggattcatcagtttggaaacactgtttttgtccactttgctaatgggcatttggaggctaattaggccaaaggggaaaacgactatccaacaataaaaacgagaag

SEQ ID NO: 161710 - DNA, 555 bp, Homo sapiens
ggccaatggtgaaaaattgaaaaaaggataaaaattaagaggaagctatctgaaaaaccactttgtgatgtatgcattcatctcacataattaaaacattatgtttattcagcaatttggaaacactgtttttgaaggatctgcgaagtgatatttgggagctcattgagaccaatggcmaaaaaagagaatatcccacgataaaatccagaaggaagctatctgagaaaatgctttgtgatgtgtgcattcagctcaaggagttaaatttttcttttaattcaacagttttgaaacattgtttttgtagaatctgcaaattgacatttgggaactcattcaggcctatggtgaaaaagaaattatcttcaggcaaaaactggaaagaagctttctgagtaactgctttgtggtgtgtgcattaatctcacagaattaaacctttctgtggattcatcagtttggaaacactgtttttgtccactttgctaatgggcatttggaggctaattaggccaaaggggaaaacgactatccaacaataaaaacgagaag

SEQ ID NO: 161711 - DNA, 555 bp, Homo sapiens
ggccaatggtgaaaaattgaaaaaaggataaaaattaagaggaagctatctgaaaaaccactttgtgatgtatgcattcatctcacataattaaaacattatgtttattcagcaatttggaaacactgtttttgaaggatctgcgaagtgatatttgggagctcattgagaccaatggcaaaaaaagagaatatcccacgataaaatccagaaggaagctatctgagaaaatgctttgtgatgtgtgcattcagctcaaggagttaaatttttcttttaattcaacagttttgaaacattgtttttgtagaatctgcaaattgacatttgggaactcattcaggcctatggtgaaaaagaaattatcttcaggyaaaaactggaaagaagctttctgagtaactgctttgtggtgtgtgcattaatctcacagaattaaacctttctgtggattcatcagtttggaaacactgtttttgtccactttgctaatgggcatttggaggctaattaggccaaaggggaaaacgactatccaacaataaaaacgagaag

SEQ ID NO: 161712 - DNA, 474 bp, Homo sapiens
gttaaatttttcttttaattcaacagttttgaaacattgtttttgtagaatctgcaaattgacatttgggaactcattcaggcctatggtgaaaaagaaattatcttcaggcaaaaactggaaagaagctttctgagtaactgctttgtggtgtgtgcattaatctcacagaattaaacctttctgtggattcatcagtttggaaacactgtttttgtccactttgctaatgggcatttggaggctaattaggccaaaggggaaaacgactatccaacaataaaaacgagaaggaaactatctgagaaactggcttgwgatgtctgcattcatcttgcagatttaaacatttcatctccttcaccattttggaaaaagtgtttttgtagtatctgcaaagagatattttggacgcattggggtctatggttaaaaataaaataacttcagataaaaactagttttgtccatcac

SEQ ID NO: 161713 - DNA, 533 bp, Homo sapiens
gtgtttctgaactgttccatcaaaagaaggaattaaatctgtgagattaatgcactcatgagaaagcagtttctcagaatgcttcttttctcttttcatctgaagatatttccttgttcaccatactcctttttgtgctacctaacattgcttcgcagactatacaaaaatagtttttccaaactgctctatcaaaaaacaggtttaactctgtgagttgtactcacacatcacacagcagtttctcaaaaaacttatttctttttttatctgaatatatttcctttttcaccataggcctcattgcactcccaagtatacctatgcagattctacaaaaacagtgtttccaaattgctgaatcaaaagaaaggtttaactctgtgcgatgagtgcacacatcccaaagcattttctcagatagcttctgactagttcttctctgragatacttccttttcactgtaggcctcgatgtgctcccaaatatcccttcccagattcagtaaaaaaagtgtttctgagctgttaaa

SEQ ID NO: 161714 - DNA, 599 bp, Homo sapiens
agaagaatgcacacatcacaaagttgtttatcagaaagattctttctatttttatctgaagttatttcctttttcaccataggactcatgccctacaaattatccctcacagattctaaaataacagtatttcctaactratcaaccaaaagaaaggtttagctctgtgatatgaatgcacacatcacaagacactttctcagatagcttctgtctcgttcccctctgaagatatttcctttgtcacattaggcctgaaggtgatcccaaatatccctccgcagaatctgtaaaatcattgtttctgaactgttccatcaaaagaaggatttaatgctgtgagataaatgcacacatcagaaagcagtttctcataaaggtttttccagtttttatatgaagacatttccttgttcaccataggcctcttttgtgctacctaacatcgctttgcagattttacaacaagagtgtttccaaactgctcaatcaatagaaagggttaattctttgagatgaatgcaaacatcacaacacagtttctcataaaggtttcaccttgttctcctacgaagatgtttcctggcctcaatatgctc

SEQ ID NO: 161715 - DNA, 546 bp, Homo sapiens
agaaagggttaattctttgagatgaatgcaaacatcacaacrcagtttctcataaaggtttcaccttgttctcctacgaagatgtttcctggcctcaatatgctccctaatatcccttctcagattatacaaaaacagtgttttgaaacagctccatcaaaagaaggacttcactcaatgagatgaacgcatacatcagaaagcagcttctcataaagcttccttccagtatttatctgaagatatttccttgttcacaataggtttttttgtgcaacctagtattgctttgtatatttcacagaaacagtgtttccaaactgctcattcaaatcaaaggtttaactctgtgaaatgaatgcacacatcacaaagcaattcctcaatatcttctttctagtttttatccaaagatatttcctttttcaccacaggcttcaatgggctcccaaatatcccatcagagattctacaaaagtactgtttctaaactgctcaatcaaaaacaggtttaacactgtcagttgaatgcacatatcacaaagc

SEQ ID NO: 161716 - DNA, 546 bp, Homo sapiens
agaaagggttaattctttgagatgaatgcaaacatcacaacacagtttctcataaaggtttcaccttgttctyctacgaagatgtttcctggcctcaatatgctccctaatatcccttctcagattatacaaaaacagtgttttgaaacagctccatcaaaagaaggacttcactcaatgagatgaacgcatacatcagaaagcagcttctcataaagcttccttccagtatttatctgaagatatttccttgttcacaataggtttttttgtgcaacctagtattgctttgtatatttcacagaaacagtgtttccaaactgctcattcaaatcaaaggtttaactctgtgaaatgaatgcacacatcacaaagcaattcctcaatatcttctttctagtttttatccaaagatatttcctttttcaccacaggcttcaatgggctcccaaatatcccatcagagattctacaaaagtactgtttctaaactgctcaatcaaaaacaggtttaacactgtcagttgaatgcacatatcacaaagc

SEQ ID NO: 161717 - DNA, 546 bp, Homo sapiens
agaaagggttaattctttgagatgaatgcaaacatcacaacacagtttctcataaaggtttcaccttgttctcctaygaagatgtttcctggcctcaatatgctccctaatatcccttctcagattatacaaaaacagtgttttgaaacagctccatcaaaagaaggacttcactcaatgagatgaacgcatacatcagaaagcagcttctcataaagcttccttccagtatttatctgaagatatttccttgttcacaataggtttttttgtgcaacctagtattgctttgtatatttcacagaaacagtgtttccaaactgctcattcaaatcaaaggtttaactctgtgaaatgaatgcacacatcacaaagcaattcctcaatatcttctttctagtttttatccaaagatatttcctttttcaccacaggcttcaatgggctcccaaatatcccatcagagattctacaaaagtactgtttctaaactgctcaatcaaaaacaggtttaacactgtcagttgaatgcacatatcacaaagc

SEQ ID NO: 161718 - DNA, 546 bp, Homo sapiens
agaaagggttaattctttgagatgaatgcaaacatcacaacacagtttctcataaaggtttcaccttgttctcctacgaagatgtttcctggcctcaatatgctccctaatatcccttctcagattatacaaaaacagtgttttgaaacagctccatcaaaagaaggacttcactcaatgagatgaacgcatacatcagaaagcagcttctcataaagcttccttccagtatttatctgaagatatttccttgttcacaataggyttttttgtgcaacctagtattgctttgtatatttcacagaaacagtgtttccaaactgctcattcaaatcaaaggtttaactctgtgaaatgaatgcacacatcacaaagcaattcctcaatatcttctttctagtttttatccaaagatatttcctttttcaccacaggcttcaatgggctcccaaatatcccatcagagattctacaaaagtactgtttctaaactgctcaatcaaaaacaggtttaacactgtcagttgaatgcacatatcacaaagc

SEQ ID NO: 161719 - DNA, 558 bp, Homo sapiens
tttctagtttttatctgaagatrtttcctttttccccataggcttagtgtgcttgctaatatccctttgcagattctacaaaaatagtgtttccaaactgttccatcaaaaacagtgcttcaaaaaaacactacaaaaactgcttccaaactgtttccaaaccgttcaatcaaaagaaacgtttaactctgtgagaggaatgcacacataacaaaatggtttctcagaaagcttctttgtggtttttatctgaagttatttcccttttcacaagagacctcgtgtgctccaaaatatcccttgcaggtccttcaaaaaccgtatttccaaactgatcaatcaaaagaaagctttaactctgtcacacgaatgtacgcatcacaaagctgtttctcaggaagcttctgtctagttcttctctgaagatatttccatttccaagatagacctcagtgcgtgcccaaatatcccattgcagattctacaaaaactgtgtttccaaactgttccatcaaaagaaggacttaactcagtgagatgaatgcccatatcagaaag

SEQ ID NO: 161720 - DNA, 500 bp, Homo sapiens
gagatttcataaatatttcagaatgcattacagaaaatttgaaaaaatgtaaaatgtggacagaatgatgaagagacatggaagatacagtgagaaagtgtagcatgcgtttagagagtgttctcrtagaagaagggaactgggaagggacaatatgtgttggtattttgtttgaaagttccctagacttttgtaagacactaatctgcatattcaaaaattccatgcaatgtaagcaagctacaatggagataaacctacacctatgtatctcctagagaaatagtaaacaaggaagggaaaaatatttcaattagcactagaaaaataaaattacttttaatcatattgaaatctgaaaaaatgaaaggtaaaataaacaataatatttgttaagaataataacgccattctgaatttctaaacaaagaaaaatattcattatcctatggctaaataacatatttagagataaaacacaaaacgccaccagcagaatt

SEQ ID NO: 161721 - DNA, 372 bp, Homo sapiens
agaaagagaaaaattttgataaaacacaaatttcatgttttccttctctaattggcttytacctaaaaatacaggtaaaatttatttgtgcttttttgctatttcagttttgctattctctgtttgtctatgtcttctccacatagacacaattagggaattttgtacactcttgtgccaactgctttgatagtaataaaatgtatttctcgaactcctaggtataaaactcaagtatccacaatttaaattcttttttgctcacttctattatgtttccagtctcaatagaaatcgatgccaatccagaaatacaagcattattctaatacttctcacacattacaggtatagattaaattttctagatct

SEQ ID NO: 161722 - DNA, 372 bp, Homo sapiens
agaaagagaaaaattttgataaaacacaaatttcatgttttccttctctaattggcttctacytaaaaatacaggtaaaatttatttgtgcttttttgctatttcagttttgctattctctgtttgtctatgtcttctccacatagacacaattagggaattttgtacactcttgtgccaactgctttgatagtaataaaatgtatttctcgaactcctaggtataaaactcaagtatccacaatttaaattcttttttgctcacttctattatgtttccagtctcaatagaaatcgatgccaatccagaaatacaagcattattctaatacttctcacacattacaggtatagattaaattttctagatct

SEQ ID NO: 161723 - DNA, 372 bp, Homo sapiens
agaaagagaaaaattttgataaaacacaaatttcatgttttccttctctaattggcttctacctaaaaatacaggtaaaatttatttgtgcttttttgctatttcagttttgctattctctgtttgtctatgtcttctccacatagacacaattagggaattttgtacactcttgtgccaactgctttgatagtaayaaaatgtatttctcgaactcctaggtataaaactcaagtatccacaatttaaattcttttttgctcacttctattatgtttccagtctcaatagaaatcgatgccaatccagaaatacaagcattattctaatacttctcacacattacaggtatagattaaattttctagatct

SEQ ID NO: 161724 - DNA, 653 bp, Homo sapiens
gcagtattcagtatagtagtgtagtacacaggtttgtagcctaggagagagaggttataccatataacctaaacgtggtaggctgtacaaactaggtgtttgtaatattttctctgacgtttgcaaaatgatgaaattgcctatggatgcatatgttagaacgtatccctgtcattcagtgatgcgtgactgtgctgaaatgctcaatctaagtttcaatgacctccataacattgttgtactgtgaratacaaatctctaacctatggcctgaatatgtttgcaaactaagcagatcatgggaaggagaatgtgctggaatcgctgggaagattttctcacactacctgaataatatctccagactttgcgaatatgagccacttgcatagagttaaagtaagcatctctttgctgggaaatttatcaaatgggattatgaagtgttttcaaatgatacttgtttgtttgtagacggtaggcctacagtggctcatggcaatggttgaggttgctaagatttggtggaagaaggcaaaatgaaatggccacttatatggtatatggatcacatgtttctgttgagttacagattcagctggctatttctcccaatgttagttatttggagaaaagaaacatgatagtaattt

SEQ ID NO: 161725 - DNA, 653 bp, Homo sapiens
gcagtattcagtatagtagtgtagtacacaggtttgtagcctaggagagagaggttataccatataacctaaacgtggtaggctgtacaaactaggtgtttgtaatattttctctgacgtttgcaaaatgatgaaattgcctatggatgcatatgttagaacgtatccctgtcattcagtgatgcgtgactgtgctgaaatgctcaatctaagtttcaatgacctccataacattgttgtactgtgaaatacaaatctctaacctatggcctgaatatgtttgcaaactaagcagatcatgggaaggagaatgtgctggaatcgctgggaagattttctcacactacctgaataatatctmcagactttgcgaatatgagccacttgcatagagttaaagtaagcatctctttgctgggaaatttatcaaatgggattatgaagtgttttcaaatgatacttgtttgtttgtagacggtaggcctacagtggctcatggcaatggttgaggttgctaagatttggtggaagaaggcaaaatgaaatggccacttatatggtatatggatcacatgtttctgttgagttacagattcagctggctatttctcccaatgttagttatttggagaaaagaaacatgatagtaattt

SEQ ID NO: 161726 - DNA, 571 bp, Homo sapiens
ttgagaaacacatatctatatgtctgcatatatatgtatcttgaatatagaaaaattgttttaattcagtaacaaaaatcccaactcaaaactgataaatgataggaatagatgtgtagcccaagaagatacaygaacggtcaataatcccataaaaacatactcaacaacatcactcatcaggcaactacaaatcaaaaccacagttaaatactctatggctagaactggccactttggaaaataggttgatggcttctaaatatatgaaacatagaattgtcatatgacccagaaatgtattcctaggtatacccccagagtatacagatttgtggttgcttaggattgagtaggggatgagtgcataggagggtaacagctagagaaggtggggtttctttttgaagtgatgaaaatgctctaaaattcattgtgctgatggctccacttatctgtgtatatactaaaagccattgacttgtagacattaatatgcgcactctacagtatgtaaattatatctcaataaatcctttcaaaaatacacaaaagactaatgggttttgga

SEQ ID NO: 161727 - DNA, 574 bp, Homo sapiens
tttagtgtaaatgaaatgaggagacaaatcattatcccattatcaatattttaataaattggatccatgaaccaaatccaatgagattaaatcaattagtaataatatgcaaatttgtattaaaattacaagaattccttgcacatttgagaacaggagagtcatgattgtttatcagcaataataaactattaattttaattgtcatcagctaattgagattaattgcaatacatcatgctttataatgtgactgtcaaaaggaaaatatgattttaatcttatactacatctatcaatgtctttgattcataggtctatagaataagcccctagttttcaaagccaactgatgaggcagcgacatcttatgcaagtttgctgctttctgccacagtggtccttggtcagctggcacaarttgttttaccaacaccactaggtctaaaaaacgtttggatcacaatgaacacagaaacaccttcatcccttcagaaatacctatcaattagttccaatacagaatgaaaaattgacaacggaagtatgttgattgtaaaaatgccagatagct

SEQ ID NO: 161728 - DNA, 240 bp, Homo sapiens
gtattttatttttttaaagattagagtgttcttgaagctctttctatttctttgtcaatgaactaaacattggcaaatatgtagggtttcccacataagaacattattaacatcaaaatagaaagctggtggcagaaatawtgattgggaacacagagtctctactcagcgttctacttctgccataccataactttgtgatctcacgaaatatctctccatgttctcatccctatgtat

SEQ ID NO: 161729 - DNA, 240 bp, Homo sapiens
gtattttatttttttaaagattagagtgttcttgaagctctttctatttctttgtcaatgaactaaacattggcaaatatgtagggtttcccacataagaacattattaacatcaaaatagaaagctggtggcagaaataatgattgggaacacagagtytctactcagcgttctacttctgccataccataactttgtgatctcacgaaatatctctccatgttctcatccctatgtat

SEQ ID NO: 161730 - DNA, 554 bp, Homo sapiens
gaaatatctctccatgttctcatccctatgtatagttctgtcatttttcaataagagctttttgcttaattatgaagtactagttactatacccattattttgagcttcatgtaaatcaagaacacacggactccacttgcaaaacattgaaaatgtagtyagggattgggggcacaaagcaacattttaaaatgtgtaaagacaatgagtaagcaacaaagtgtccaattttttaggtgaaagttgcatacgtcaggaaaagccaggattaagtaacagagaatttgaacgataactggccaattggtgtcgtttacaattgcaagtcatacaaatgaagtttgctttttaaagagaaaaggagttagttagaatgggtcaacctattggggaagcaatgtagttagagacaatgcccaaaaccatgtgagcaaatgctctgtagagcgcacccctgcaatgctgccattgtgaggccaagtctctccttgtcttggtactgagacctccattctgcctccatcattgccactgtagctgccacaaaatgatc

SEQ ID NO: 161731 - DNA, 554 bp, Homo sapiens
gaaatatctctccatgttctcatccctatgtatagttctgtcatttttcaataagagctttttgcttaattatgaagtactagttactatacccattattttgagcttcatgtaaatcaagaacacacggactccacttgcaaaacattgaaaatgtagtcagggattgggggcacaaagcaacattttaaaatgtgtaaagacaatgagtaagcaacaaagtgtccaattttttaggtgaaagttgcatacgtcaggaaaagscaggattaagtaacagagaatttgaacgataactggccaattggtgtcgtttacaattgcaagtcatacaaatgaagtttgctttttaaagagaaaaggagttagttagaatgggtcaacctattggggaagcaatgtagttagagacaatgcccaaaaccatgtgagcaaatgctctgtagagcgcacccctgcaatgctgccattgtgaggccaagtctctccttgtcttggtactgagacctccattctgcctccatcattgccactgtagctgccacaaaatgatc

SEQ ID NO: 161732 - DNA, 554 bp, Homo sapiens
gaaatatctctccatgttctcatccctatgtatagttctgtcatttttcaataagagctttttgcttaattatgaagtactagttactatacccattattttgagcttcatgtaaatcaagaacacacggactccacttgcaaaacattgaaaatgtagtcagggattgggggcacaaagcaacattttaaaatgtgtaaagacaatgagtaagcaacaaagtgtccaattttttaggtgaaagttgcatacgtcaggaaaagccaggattaagtaacagagaatttgaaygataactggccaattggtgtcgtttacaattgcaagtcatacaaatgaagtttgctttttaaagagaaaaggagttagttagaatgggtcaacctattggggaagcaatgtagttagagacaatgcccaaaaccatgtgagcaaatgctctgtagagcgcacccctgcaatgctgccattgtgaggccaagtctctccttgtcttggtactgagacctccattctgcctccatcattgccactgtagctgccacaaaatgatc

SEQ ID NO: 161733 - DNA, 529 bp, Homo sapiens
agtgttctcaaactgctgaatcaaaagaaaggtttaactctgcaagatgaatgcacacatcaaaaagtggtttctgagatatcttccttctagcgaatatcctggaatatttgcctttttgccattggcctcaataagctaccaaatgtccattcacagaatggacaaaaacattgtttccaaactgctgaatcaaaagaaaggcttaattctgtgagattaawgcacacatcacaaagtggtttctcagacaactttttctattttttatcccgggatattcccttttctgtcatagacctcaatgagctcccaaatgtccattcgcagaatggacaaaaatagtctttccaaactccagaattaataaaaatggtttaactctgtgagatgaatgggcacagtacaaaggtgtttctcagaaatcttcttactggtttttatctacagacattttcttttaccccataggccccaatgcactcccaaatatctgtttgcagattctacaaaaacagagtttcccaac

SEQ ID NO: 161734 - DNA, 362 bp, Homo sapiens
ggaaaagtatttcaattcgtatgataggcatgaayaaatgaacttcctctgacactagacattttcaacactattatagtctgcatttaaagaggtacaaataacagtatcgtatccattaatatttacatattaggcactcatttctacatggcactgagctaggagctgtgaagcattagaaattgtgtatctcaaggtcctcactctcaaggaactgaaagtttgattgattagagaagacttaaaaatttcacaaacattggagaattcactacattttaacttggagcttactttcccactttcttccctgttatgcctgatctgcagaatgctactacagaatattgcaaaaccat

SEQ ID NO: 161735 - DNA, 462 bp, Homo sapiens
aaacaaccagaaaacaacaaaatggcaaaagtccctacttatcaataataacattaaatgtcaagggactaaactctcamatcaaaagacataaactggctaaatggatgaaaaaacaagacccaaggctctgttgcctacagaaaacatacttcatctataaagatatacatagactgaaaataaagggatggaaaaatatattccatgccaatggaaactaaaaaagagcaagagtagctacacttatgtcactcaaaatagatttcaagacaaaaactgtaagaagagacaaagaaggtcattgtataataataaatgggtcaattcagcaagaggatgtaataattgtaaatatatatgcacccaacagtgaagcacccagataaatatacaaagcaaatagtattattctttaactttactttagatttgggggtacatgtgaaagtttgttacaca

SEQ ID NO: 161736 - DNA, 462 bp, Homo sapiens
aaacaaccagaaaacaacaaaatggcaaaagtccctacttatcaataataacattaaatgtcaagggactaaactctcaaatcaaaagacataaactggctaaatggatgaaaaaacaagacccaaggctctgttgcctacagaaaacatacttcatctataaagatatacatagactgaaaataaagggatggaaaaatatattccatgccaatggaaactaaaaaagagcaagagtagctacacttatgtcacwcaaaatagatttcaagacaaaaactgtaagaagagacaaagaaggtcattgtataataataaatgggtcaattcagcaagaggatgtaataattgtaaatatatatgcacccaacagtgaagcacccagataaatatacaaagcaaatagtattattctttaactttactttagatttgggggtacatgtgaaagtttgttacaca

SEQ ID NO: 161737 - DNA, 462 bp, Homo sapiens
aaacaaccagaaaacaacaaaatggcaaaagtccctacttatcaataataacattaaatgtcaagggactaaactctcaaatcaaaagacataaactggctaaatggatgaaaaaacaagacccaaggctctgttgcctacagaaaacatacttcatctataaagatatacatagactgaaaataaagggatggaaaaatatattccatgccaatggaaactaaaaaagagcaagagtagctacacttatgtcactcaaaatagatttcaagacaaaaactgtaagaagagacaaagaaggtcattgtataataataaatgggtcaattcagcaagaggatgtaataattgtaaatatatatgcacccaacagtgaagcacccagataaatatacaaagcaaatagtattattctttaactttactttagatttggggrtacatgtgaaagtttgttacaca

SEQ ID NO: 161738 - DNA, 606 bp, Homo sapiens
aatattgttaaactgtccatactaccgaaaacaatctgcagattcaatgcaatccctctcaaaataccaacgatattcttcatagaatagaaaaatacaatcttaaaatttatgtagaatcactaaagatccagaatagggaaagctattctaatcaaaaagagcaaaactggaggaatcacaggtcctaacttcaaattatactacagaggtatagtaacaaaaacggcaaggtattggcataaaaacagacacatagaccaatggaacagaatagagaactcagaaacaaatccacgcatttacagtgaacttgttttcaacaaagacgccaagaacacacattgagaacaagacagtctcttcattaaatggtgctgggaaaactggatatccatatgcagaagaatgaaactggacgctcatctyttgccatttataaaagtaaaatcaaaatgaattaaagacttaaattgaacacctcagcctatgaaactactacaaggaaacattggggaaaaatcttcagaacattgctctgggcaaaatttcttgagtaataccccacaatcacaggcaaccaaagcaaaaatggacaaatgagat

SEQ ID NO: 161739 - DNA, 606 bp, Homo sapiens
aatattgttaaactgtccatactaccgaaaacaatctgcagattcaatgcaatccctctcaaaataccaacgatattcttcatagaatagaaaaatacaatcttaaaatttatgtagaatcactaaagatccagaatagggaaagctattctaatcaaaaagagcaaaactggaggaatcacaggtcctaacttcaaattatactacagaggtatagtaacaaaaacggcaaggtattggcataaaaacagacacatagaccaatggaacagaatagagaactcagaaacaaatccacgcatttacagtgaacttgttttcaacaaagacgccaagaacacacattgagaacaagacagtctcttcattaaatggtgctgggaaaactggatatccatatgcagaagaatgaaactggacgctcatcttttgccatttataaaagtaaaatcaaaatgaattaaagacwtaaattgaacacctcagcctatgaaactactacaaggaaacattggggaaaaatcttcagaacattgctctgggcaaaatttcttgagtaataccccacaatcacaggcaaccaaagcaaaaatggacaaatgagat

SEQ ID NO: 161740 - DNA, 503 bp, Homo sapiens
tgctgggtcatatagtagttgtatgcttcattttgccaaattgccaaactgttttccagagtgatgtgccacttgrcattcccatcagcaatgtatgagtgatccagttcctctgcatctttgccagcatattgagttgccactattttttattttagtcattctgatgggtttgtaatgatatctcattatagttttaatttgcatattcctaatggctaatgatgttgaatatcctttcatgtacttatttactatctatatatcctctgctgaaatctcttcctgtctttttgtcattttttaattgtattgtttgtcttgagggttctttatatattccagatatatctcttgtatactcctttgtaggatatgtggttttcaaacaagtattgaattttatcaaatatgttttcagcattgatggatataatcatatgatttttagggctatggttgaagaactgcagtatcagtttctttactgtcagctatgggct

SEQ ID NO: 161741 - DNA, 517 bp, Homo sapiens
cccaggagtgcaattgctgggtcatatagtagttgtatgcttcattttgccaaattgccaaactgttttccagagtgatgtgccacttggcattcccatcagcaatgtatgagtgatccagttcctctgcatctttgccagcatattgagttgccactattttttattttagtcattctgatgggtttgtaatgatatctcattatagttttaatttgcatattcctaatggctaatgatgttgaatatcctttcatgtacttatttactatctatatatcctctgctgaaatctcttcctgtctttttgtcattttttaattgtattgtttgtcttgagggttctttatatattccagatatatctcttgtatactcctttgtaggatatgtggttttcaaacaagtrttgaattttatcaaatatgttttcagcattgatggatataatcatatgatttttagggctatggttgaagaactgcagtatcagtttctttactgtcagctatgggct

SEQ ID NO: 161742 - DNA, 463 bp, Homo sapiens
gctttcagacaaacaaaaacaaaattcaacgacaacagacctgtactaaaagaattgctaactcaggttgttaaagtagggaaaaaaaagtatgctactacatggaaatgtatatttacacaaagagataaagaatgacaaaaaatgtttaaatggtaagatttaaatccaaccatatcaataaacacaacaaatacaaattgtatgtaaatattccaattagaaggtatagatggtcaaattggattatttaagaaattaaggcccaactagatgtggtctaccaaaaactcactttaaatataaatacgccagttaamagcaaaagaacaaagaatatatattaggcaatgaccaatcaaaactggattatctgtattaataactgacaaagtagatttctgaacaaggaatgtgccagggataaagaatgatattatataaggagcaaatgatgaattca

SEQ ID NO: 161743 - DNA, 564 bp, Homo sapiens
aataaaaaatgggcaaaggacctaaagagacatttcttcaaagatctacaaatgataaacaggttcaagggctcaatatcactaaacatcagagaaatgcaagtcaaaacctcagtgagaaattacctcatctcctagaatgaccattaggaaaaagatgagagataatatgtgttggaatcatatgaagaaaagggaacacttgtacactgctgatggaaaggtaaattagtacagtcattatggaaaacaatatgaagccttcctcaaaaaattaaaaatagaactatcgtatgatccagcaatcagaagatgaagctgctcacatmaagccaagctcttccagggaagatgcttagctttcatttgaagcaacgcctattaaaaactaaattttgaataactctttcttggaatacaagttcaagcaactgaaaagaccctgacatgatatggtcgaggtagtcataattaaatacatataaaattcagtcacacacaaagcaaattgtgaagcctgtctgaaacactagatagaaaaggcttcagctaatcattggtgca

SEQ ID NO: 161744 - DNA, 413 bp, Homo sapiens
aagcttacacctgaagacacgggtttggttttcttttgtttttgtttgtttgtttttgagagggagtctcactctgtcacccaggctggggtgaaatgccacaatctttgctcactgcaacctccacctcctgggttcaaatgattctcttgtctcagcctcccgagtagctgggattacaggtgcacgctgccacacccggctaattttttgtattttagtagagaccaggttggtctcaaactcctgagctcaggcaatccacccccctcggcctcccaaagtgctaggattacagtcatgagccaccaygcccggctgaagacatgggtttcttcataccctagtgaaggatagaaaagaaaatttggaaaagatgaatgaattccagaggccattaatagtgggctgca

SEQ ID NO: 161745 - DNA, 542 bp, Homo sapiens
ttcctgcttccagctgccattttaattggagtgaagttttcctgttgctctgtctagaactctctatttgaactgccagcaggtcgacggggaactgactagcagtgggcaaaacactgtttcatctaattaaaaaattatgtaatattaatttattttaacaagaygttgttttttttaaataaatgaaaacgtatttatagccatccaaatcaaatacaattgcagcttaagctcactagtttagatagtgtggttatacttgagttactgccatcacatagaaatagtgtttcaaactaagaagtggcaaaaataaaatcagatcaagttataaaaatttaaaagtttattatcatacagtaagagaaagtacagctcgatatcagggagatttcagcccaggcagtaagaaagctcagaggcatgtattataggattgctcataaagtgaaaatgaggaatttcttcaaccttttccatgactggttattacaacggggtttccaggtgatagcggactggttaaaagtgatttacct

SEQ ID NO: 161746 - DNA, 563 bp, Homo sapiens
agccaattcacattatagaaacacatgttgtaacagaacaagtgtgtttcttcattttgcaaataaagcaaagtatggaaaggctgaaaaacttgcctaagattaacaaccaataagtgctgcaaccaagatttgaacccaaattcttaattgcttcactaaactgcatctttcagttttcacagatggtttcaagaatgaaatcttcccttgcatcaaggcacacattataggtgctgagcaagtggtaactgattgaatgattcaaatttttatatactgatctatcttcgattccaccctcagctccatcactayggtgatgcattagaggaactcctaaatacctatttgtaacaattggctagaataggtgaaaagtgaaaccttgcctggatctctttcacacattctgaatgcagagggaacattcattatagtcaataggtgctcctggctcagaaaaataatctagtaatattgtagatccaatagcaaaattccattattatagcagatctaatgtagggcttaataattctcctacaaatgggtactccaca

SEQ ID NO: 161747 - DNA, 486 bp, Homo sapiens
attctgtctccaaaaagacttttgtttcagccaggtatagtggttcatacctrtaatcccagcactttgggaggccgaggcggggggatcacttgaggtcaggagttcgagaccagcctagccaacgtggtaaaaccctgtctctactaaaaatataaaaattagccaggcatggtggtgggtgcctgtaatcccaacttgggaggctgaggcaggagaatcgcttgaatctgggaggcggaggttacagtgagctgagatccctccactgcactccagcttgggcaacagagcaaaactgtttctaaaaaagagaaactacaagaggataaacttcagccaaacaattaatgaatgagtagattactccaaaaagattggcattgagtattgatgtcactttataagaccaagtctcaaaataatagggagattatggttaaaggacaaatataagacaaaaatcctgataatctagaaataatg

SEQ ID NO: 161748 - DNA, 486 bp, Homo sapiens
attctgtctccaaaaagacttttgtttcagccaggtatagtggttcatacctataatcccagcactttgggaggccsaggcggggggatcacttgaggtcaggagttcgagaccagcctagccaacgtggtaaaaccctgtctctactaaaaatataaaaattagccaggcatggtggtgggtgcctgtaatcccaacttgggaggctgaggcaggagaatcgcttgaatctgggaggcggaggttacagtgagctgagatccctccactgcactccagcttgggcaacagagcaaaactgtttctaaaaaagagaaactacaagaggataaacttcagccaaacaattaatgaatgagtagattactccaaaaagattggcattgagtattgatgtcactttataagaccaagtctcaaaataatagggagattatggttaaaggacaaatataagacaaaaatcctgataatctagaaataatg

SEQ ID NO: 161749 - DNA, 531 bp, Homo sapiens
aataggctgaactaatctattaaaatgcaaaacatacaaaagactcataaaaaacaaagtcacttcccatcccaccaccacacaaattgcaggtggatccaaaatagattaaattccaggtggatccawaatagatcaaagatttaaacataaaatgaagttacagataaactaccaaaaatatgggagaatttttaatagtacagtattaacgtggggagaatctctgtaaaaccataaaagttttaatagatttacttatagaaaacaagaactaaaaaacattactagtccacattttcaaaatctagtcaaaggataaatgaaaacctagggaaaaatatcttcaaaatatgaaatgataatttctacaattggagagttctcctataccataatctaagtgtgatgaattgaattatttttaaaaatattccatgcttctcctgtgggatatacatccctgccctgttgaatgtagatacagccacctttgctttgaccagtggaatatcaacagaattgacatat

SEQ ID NO: 161750 - DNA, 531 bp, Homo sapiens
aataggctgaactaatctattaaaatgcaaaacatacaaaagactcataaaaaacaaagtcacttcccatcccaccaccacacaaattgcaggtggatccaaaatagattaaattccaggtggatccaaaatagatcaaagatttaaayataaaatgaagttacagataaactaccaaaaatatgggagaatttttaatagtacagtattaacgtggggagaatctctgtaaaaccataaaagttttaatagatttacttatagaaaacaagaactaaaaaacattactagtccacattttcaaaatctagtcaaaggataaatgaaaacctagggaaaaatatcttcaaaatatgaaatgataatttctacaattggagagttctcctataccataatctaagtgtgatgaattgaattatttttaaaaatattccatgcttctcctgtgggatatacatccctgccctgttgaatgtagatacagccacctttgctttgaccagtggaatatcaacagaattgacatat

SEQ ID NO: 161751 - DNA, 531 bp, Homo sapiens
aataggctgaactaatctattaaaatgcaaaacatacaaaagactcataaaaaacaaagtcacttcccatcccaccaccacacaaattgcaggtggatccaaaatagattaaattccaggtggatccaaaatagatcaaagatttaaacataaaatgaagttacagataaactaccaaaaatatgggagaatttttaatagtacagtattaacgtggggagaatctctgtaaaaccataaaarttttaatagatttacttatagaaaacaagaactaaaaaacattactagtccacattttcaaaatctagtcaaaggataaatgaaaacctagggaaaaatatcttcaaaatatgaaatgataatttctacaattggagagttctcctataccataatctaagtgtgatgaattgaattatttttaaaaatattccatgcttctcctgtgggatatacatccctgccctgttgaatgtagatacagccacctttgctttgaccagtggaatatcaacagaattgacatat

SEQ ID NO: 161752 - DNA, 531 bp, Homo sapiens
aataggctgaactaatctattaaaatgcaaaacatacaaaagactcataaaaaacaaagtcacttcccatcccaccaccacacaaattgcaggtggatccaaaatagattaaattccaggtggatccaaaatagatcaaagatttaaacataaaatgaagttacagataaactaccaaaaatatgggagaatttttaatagtacagtattaacgtggggagaatctctgtaaaaccataaaagttttaatagatttacttatagaaaacaagaactaaaaaacattactagtccacattttcaaaatctagtcaaaggataaatgaaaacytagggaaaaatatcttcaaaatatgaaatgataatttctacaattggagagttctcctataccataatctaagtgtgatgaattgaattatttttaaaaatattccatgcttctcctgtgggatatacatccctgccctgttgaatgtagatacagccacctttgctttgaccagtggaatatcaacagaattgacatat

SEQ ID NO: 161753 - DNA, 259 bp, Homo sapiens
gccttggttagtttatcacaggaaggggcattagatgtcccagaacattcmacaaccaaggtgttgctctcatcacagcctgaccttcagcacagctttgcccctactctgcctctttctgcttccagatgaaggagtccttggggtccccagagtgactggcaggtgctccagatgtccactgagcaggctgaaggtgggggccagaggaaaaaagaagcagacaagtgttggtgtccagagtttcttgcatagacaa

SEQ ID NO: 161754 - DNA, 614 bp, Homo sapiens
cttccactttttcctcatggtctcttctgtggtcacctgcaggcatacttatgggaaaggagtttaagatgaaaaactccaatagtgtcctctgattcaattccaagacacctaggtaaatgttattaaggcattgatccactaatgacaaaacacgaatgaatttctggagcagagtctataaagataggcattcagtcctaggwtcgtgcttacagtgaaaaaaaatcaagacaatttcaagatgaaagaactttagagttatctattttgaggttggttaaagaactattgaggaatggtaagagcagaggttttggataaaactagaacttatttgaatccaatctctaccactcatcaactgtgtaaccttagacaagagcttgattggcctcttccttaaattttttagtgtcatgtaaataataacaatgtctaccttctagtgcttttggcagaaatgaatgaggtgatacatataaatatttagtatcatggccaaccttgctagtgcttaataactaggaatcattttatcattataaaggaaagtaaagggcctttagaatcaactaggcttgggtttaaatccttgttctgtttattagttt

SEQ ID NO: 161755 - DNA, 437 bp, Homo sapiens
tccatataggcataatagtataaagaattaaaagaaacaacaaaaattagaaattgaggatgacatatgtattaatatcataaaggagtcagagggaactttctaagsaagttttaagccactcggtttgtggtgctttgttacagcagccccagaaattataaggaaggaaaagaatgtgcatagaccacagaagaattaaattattttgcatgtcaagagagtataaatcaaagccaaaagacaaatgatagattgggggaaatatttacaactcctatgatagataaaggttaatagagagagctcttacaaattaacaagaaaaatgccaacaactcaaaggaaaaaaaaatgggccaaggttaggaatggttaattcaaagcagagattatccaaaatgccaatagacataacagctcctggatagaaactg

SEQ ID NO: 161756 - DNA, 461 bp, Homo sapiens
tggtataactattagctattaaaagaaataaattgaccctaggytttaaatgcactttagatgcagtcaaaatattaaaattcaaaagtaaaaggacaaacctactgttttgttaagttgatctattatttagctatctagctatgtaaactcatcccagaaatgacttagattcttttctgagtaagcccaaaagccaaggatagaaagtatggaatgacaaaccttgggtcattatatagaaaagctttctaatggtcaaaaatgttcaacaataagacaaactgcttgagcaatttctggatccttaagagcattcaagctgatgttacaatcacttctcctgatgttgtgcaggggttttgtgcatccaatcgtggttaaactaggagacatttaaggccgttccctgagattcaacaaatcaaattagttggtgcttattactttagagtaggaaa

SEQ ID NO: 161757 - DNA, 391 bp, Homo sapiens
ctggtatttaatggatgcacacacaagaaaagcttgctgtttgctgataacgttgaggagtgcataaatggttggggccagtctgagtagcagtaaatttggttcrtctgtgttagcagggttactctggcttggacccggattccagagtgattccggaggaattcctgtccccatccctacccctcatcaccccaaaattttgcttaagataacgaggaggtcagggcatgttcactgtgaacccccactccatataaggtgccatgttatagtgggttcagaggatccccgcccccccgccaatgctgcttagccaccagacttacaagggatactggatgctttcgtaccttggattcatacacacaggtttctgagatgaagcagt

SEQ ID NO: 161758 - DNA, 568 bp, Homo sapiens
agatgtgtttaactttattccagttggtttcatcttcctttttaattgatttttgtcctctccatcattttctytcccaattaacgttgaatttctctcatttagttctagctgtttgttgtggtcgggtttggtacatctgggttaggcatgttgctgtgttcttttctttccttgccattagtttaaaggaggtctaagctcacagtctagctctatttctggagagacctgccacctttacaggatttactgtggtcattttctttttttttcctccccacaatatggcgctttgtgaattaaaatcaaggttcctgggggctggaggtaggaatagggcaggagaagcctagccacattataatcaataataataataactgtctccctctgttgtgagctctaccaggcagactgtgtcttattcatccctagcttcttacataggtcctagtgtataaatgatgctcgatgagtgcctgttgaatgaatgaactaatttttgccgagccctttataatgtataaagatgcttcacatagcaacgtggggtgattgtttttaa

SEQ ID NO: 161759 - DNA, 568 bp, Homo sapiens
agatgtgtttaactttattccagttggtttcatcttcctttttaattgatttttgtcctctccatcattttctctcccaattaacgttgaatttctctcatttagttctagctgtttgttgtggtcgggtttggtacatctgggttaggcatgttgctgtgttcttttctttccttgccattagtttaaaggaggtctaagctcacagtctagctctatttctggagagacctgccacctttacaggatttactgtggtcattttctttttttttcctccccacaatatggcgctttgtgaattaaaatcaaggttcctgggggctggaggtaggaatagggcaggagaagcctagccacattataatcrataataataataactgtctccctctgttgtgagctctaccaggcagactgtgtcttattcatccctagcttcttacataggtcctagtgtataaatgatgctcgatgagtgcctgttgaatgaatgaactaatttttgccgagccctttataatgtataaagatgcttcacatagcaacgtggggtgattgtttttaa

SEQ ID NO: 161760 - DNA, 578 bp, Homo sapiens
ctaaacatttttaaagttttcattatagttagagttggggaacatgacctctgattctccattattttgtaatttcatcaatattacagcaatgatttacccaaagtaaagatagtggacaccagatgatgtcacaaccccaagcaatagccaagagatactttcttttcatgtacataatcaactagatcatgattttccttggtaacagcaagaagaaatatctttaatctcaccttatgaggaactgttatttaaaagggttgtattgtctggcttgagacaacaataagaagtctgcagacttgtccacacaaatacaaatgtgcttatcttttcarctggctggaactggaggctatggtcaacacttaaatcagattttataataattaaagtgaaaataaaactaaaggacaaatgcctgtcctgaagactctttcaatcatccctttggggcaggctgtttccatcttgactagaagtttcattcttttaatggcttgctccaggctaagaagagaaatgattcaaatcattcactcgttaacttttcccttcaactcaaggcattcaaa

SEQ ID NO: 161761 - DNA, 580 bp, Homo sapiens
attctaagtatttaaaagggggtagaagagggagggagagcttgaagaattcacaaagaatgcatatccattgataaagagcaattcaatgtcacttagataagttcaggcatctaagactgatccaagagggacaacccacagcttggagaggtctttgtaaatttaatgtagaagcaaattttcctgatatgacatcccaaagtataaattttgtctcacatagtaatattttcagccatattttaaaaacattttttatcatatgggaaattttcttataagggccttgctatgttgcgcaggctggcatcaaacttctaggctcaagcaatcctcctgcctcagcctcccgagtagctgggactataggcgcacagcactgcacctgataggaartcatttttaaactgttatcaagtcagtaagcacatttttggaaatgatctctatcttaccatagctacatttgtaaggaacacttaactgagcagtgaagctttagtacctcaccatcaatatgacttacagcaaaagcgggacacagtcactgccttacaaatgtgtctgattaaaatgt

SEQ ID NO: 161762 - DNA, 599 bp, Homo sapiens
gagctctgtagctttgagcaaggtgcatatccaactattccgcagtttcttcaggttaaaaatgagagtactggatgacccttccagctccctcaattcatgaccttaatgtttacccaatattgatgagtattgtcctgctttactttgaaaatcctggatcctccttattgactagtaattcattctatttgttgcaccaaacagccatctactaatcaaaatgatatattactgcagtgattctcaacatagcctttcattgtagaataaatcataaatgacacaaactgttgattagggcataaagaattgtggcataggatacattcagcaggctactgtttacaatttaagcattttatgtttaattcttgtggcaggctatctaccaagctcaaaaatagtgctcagcaattgtgaaatccacacaaggtgggaaaatcactgcccaccartgaaaactcatagtcaagtgcattcacttttctaaaggctgggtgtgtcttcagaccattcttcaagagtcttctaaaaatgtggcagcaactgtttgactacaaacagtaaattctgcctgtggtgaaaagaaccatatg

SEQ ID NO: 161763 - DNA, 509 bp, Homo sapiens
ataacacattgactttgattacattacaaaacatttatagcttaaaaagcattgacaaagccaaagaaaaatgtaaaaatttgagaaaaggtatacagaagtatataacaggaaattaggcttaaaagttccaacacataaagaatgagaattaagaaggggaagaccaagagaaaaatggaccaaatttatgaatagacattttgcagaaaaataatttaagatggcccttaaatatatgaactaattctcttactgatagaaaagtgtaaattttaatgctcctaaagtgtttcagaaacatgaaaaaaaggttaattaatataaaatcaaataactagcataaaaactarttttacagttgaactgaaaatatcattataaacttctgacattatctttttgagaatacatatttcttctatgcacttatcaacagagcttcaaaatatgtgagacaaaaatggacaggtctaaaaggaaaaatataaaaactcacagctatagtt

SEQ ID NO: 161764 - DNA, 580 bp, Homo sapiens
gtgtctctaagagatttcttagaggttaaaattaaatgttattttttcatccaccttatatttttaggttaccaaaaaagtgaaaacttttgccataatcttctatgaggcaggaacagacactaatatttaatttcatttcataaaacaggttattctttctaaatgtactttttttttcattgtagccatccttagcaattcaatcctctctgaaaatcatatttcttttgtatggttgtttgtttgtttggagatatggggatttccctatgttgcccaggcgggtctcaaactcctgggctcaagtgatcctcccaccttggcctcccaaagtactgggattacaggcatgagctaccatgcccggcctgaaaataatatttgagttacaaagtaatcatcgccaaattttactgttgatgaagatttttctgaatagttctacaaatactcaaaggtgatgaaaacttcrgaaataatacaatttaacacatggtttctatactggtactgtaggatggccctacccagacatctaaactgccgctaaagtcagttatgccttcaaagtcaagat

SEQ ID NO: 161765 - DNA, 553 bp, Homo sapiens
actgccatattgctatacctacaacacgggatataaaaagcatcctttaacttatgtaagaagtcctgaatttgaataccatcccccaccaccaccacatacacacactcaaacactcgctgtggaatttgtgcaagctccttaaccttctgcgattttacattctacatttgtgaaaggaaaagaaaaatgccatattggctaagcagtgttcatttatagaggttaagccaatttttattatacttttgtatattgytctaaatgaaccaaaaggctgacatattgacctgaaagattccctgaaattcttactattaatgtacttcctggaaacctatacatttttagtggatattttgagttttctcttatgctgtcttaaagtgccttcacaaaggaattcctctttggagacttctgttaagatcaggctgtttcccaactcattcaggagaaggggcatgcctgaccctcactcagcctccgttggttctcaccactttcctttcactacaactgcattcgaaaccccatcttcctgactgtgggg

SEQ ID NO: 161766 - DNA, 553 bp, Homo sapiens
actgccatattgctatacctacaacacgggatataaaaagcatcctttaacttatgtaagaagtcctgaatttgaataccatcccccaccaccaccacatacacacactcaaacactcgctgtggaatttgtgcaagctccttaaccttctgcgattttacattctacatttgtgaaaggaaaagaaaaatgccatattggctaagcagtgttcatttatagaggttaagccaatttttattatacttttgtatattgttctaaatgaaccaaaaggctgacatattgacctgaaagattccctgaaattcttactattaatgtacttcctggaaacctatacatttttagtggatattttgagttttctcttatgctgtcttaaagtgccttcacaaaggaattcctctttggagacttctgttmagatcaggctgtttcccaactcattcaggagaaggggcatgcctgaccctcactcagcctccgttggttctcaccactttcctttcactacaactgcattcgaaaccccatcttcctgactgtgggg

SEQ ID NO: 161767 - DNA, 627 bp, Homo sapiens
tactttttattcacaatgcccaagtaaaacaaaaaacattataagattctcaagaaagaaagaaaatcaaataatagaagcaaactcaaaaataattaagacacaggagtggcctagtgcagtggctcacacctctaatcccagcactttgggaggccgaggtgggcagatcacttgaggacaggagttcaataccagcctggccaacaatgcaaaactcagtctctactaaaaatacaaaaaatagctaggcatggtggtatgtgcctgtagtcccagctgcttgggtggctgaggcacargaatcccttgaacccgggaggcagaggttgcagtgagccaaggttgagccactgcactccagcctgggcagcagagcaagactgtctcaaaaaataaacaaataaataaaataagatataggagttagtgaacacattttacatggccataataaataagttaaagaaaatagacattttaaatggctgaaatgatgaagaattttaattaaaatttggaatctataaaaactaattaaatgggcattctagaactgaaaaaaatatatgtaatactgtgagacctactggagggatagaaagagacatttagaagaaggtagga

SEQ ID NO: 161768 - DNA, 577 bp, Homo sapiens
cagttcctcaaaatgtgaccctgttgggagacaaggtcttaaagaggtgattaagttaaaatgtgaccattagggtgggactgtaatccaatatgactastgtctttacaagaaaaggaagagacatcaggcgtgcatctgcacagaggaatgaccagatgagaacacagctagaaggtagcaatattcaagcaaagaagataggcttcaggagaattcaaacctgccaagacttttgtcctggacttctagcctccagaactgtcagctaatatatttctttttttttaagctatccagtctggggtattttgttatgacagccctgaaaacctaatacagttacatactatatgaccccactcacgtaatttttacaaatgacaaaattatagagatggagaacaattagtggttgccagggagtggggaggagtgagggagtaaggtggatgtgcctataagaggatgacatgaaaaatactttcgatggaacttttctgtatcttgactgtggcagtggtcacatgtaattgcacatgtgataatattataatgaacacacatgataaatgaa

SEQ ID NO: 161769 - DNA, 577 bp, Homo sapiens
cagttcctcaaaatgtgaccctgttgggagacaaggtcttaaagaggtgattaagttaaaatgtgaccattagggtgggactgtaatccaatatgactactgtctttacaagaaaaggaagagacatcaggcgtgcatctgcacagaggaatgaccagatgagaacacagctagaaggtagcaatattcaagcaaagaagataggcttcaggagaattcaaacctgccaagacttttgtcctggacttctagcctccagaactgtcagctaatatatttctttttttttaagctatccagtctggggtattttgttatgacagccctgaaaacctaatacagttacatactatatgaccccactcacrtaatttttacaaatgacaaaattatagagatggagaacaattagtggttgccagggagtggggaggagtgagggagtaaggtggatgtgcctataagaggatgacatgaaaaatactttcgatggaacttttctgtatcttgactgtggcagtggtcacatgtaattgcacatgtgataatattataatgaacacacatgataaatgaa

SEQ ID NO: 161770 - DNA, 590 bp, Homo sapiens
aggtgacaaaactttttttttctggatgccttttgtattctatccttatcttcaaagacttttaaaataaatgttaccgctgtagatagatagatagtaattattacttatccttttatcccttaaatactgtactttttcctgcaggttctaggttttctgtatttcaaacatgtgttttcaaaaaatttgataaatttattctgttctttagtactatcaattatgcatatgtcctacttcctcatctgtcattcatatacaggcatacctcattttattgtatttctctattgtgcttcacagatattgcattttttttacaagctgaagttttgtggyaaccctgcgttcagtgtctattggtgccctttatccaacagcgagcatgtgctcacttcgtgcctctgttacattcttggaatattttcacaatatttcaaagtttttcattattattatatctgttctggtgatctgtaatcaatgatttttgatgttactattgtaattttgttgaagtgtcatggacctcacccacataagatagcaaacttaatttataaatgttgtgtgtgttctgactgctc

SEQ ID NO: 161771 - DNA, 631 bp, Homo sapiens
attctaagagtggaagcacaaaatcatttctcatgtagctcacttctttcaaaacaatggtctgtgtttgttttcttgtaatgtttgtctagtttcgtatcagggtaaaataggacgaaaagagtaacagtggagcatttgtacaggcaagggtggtctcaccagaagcaggtgaactttacaagcctacccttttaactatgttctgtgagaatctatataagacagattcctaaaggaaaaagtattgggtaaaaatgtataagcatattctaaaatgtgactattatttctctaaaaatatgtcttttgataattatgtaacttggctagagcaaaaatgaagaaaamccaccacaaatcccgccattcagaaaataagttccttaaataatagatacatttttaaaagatctatttacaagctgacataaaaagagaatgttttataaaatattgtaatatttcttcacaggttatagtttttaaaagctacatgttacttcatcattttaaaataaaaggattgtgaaataaaacagaggaagctaaaacttataataaatattttatatgtagattatttcctaaaagattccactaggtaatgaaaatgattaacacaagcgtt

SEQ ID NO: 161772 - DNA, 567 bp, Homo sapiens
atggcttcttgcagattacacatacagtaaggtgttcaactttagccaactttggtttaaaaatattaaaaacaggataatatctggaaaagcctaactgcactagataatgaatgtcacattgtgtcatttaaagaggagatgaaggatctagaagtgtttaagaatttaagatggaaaggaaaagtcaattatagctggcttctaatattttaaggtctgatgtacaaacaatactttagagcattttctgtggcctacgaaggaaaagtcctacataaacaagcaataggtttgaagaaaacgaatgctgggcactatgaggaagagtttctctacaattaaaactgtgaaatatggacgtctcttcactakgagataaatttctttcagaaaatgtgttcatcagaggacagatgacaattggccaagagtcttgaaaggagagttcacatatcacacttcccaaactgctatgagaaataaattgtcaaacagttgaggaaagtttaaaggagtatctcatgtgttaaatcacactgtgtctttggatatgaatcccaggtt

SEQ ID NO: 161773 - DNA, 567 bp, Homo sapiens
atggcttcttgcagattacacatacagtaaggtgttcaactttagccaactttggtttaaaaatattaaaaacaggataatatctggaaaagcctaactgcactagataatgaatgtcacattgtgtcatttaaagaggagatgaaggatctagaagtgtttaagaatttaagatggaaaggaaaagtcaattatagctggcttctaatattttaaggtctgatgtacaaacaatactttagagcattttctgtggcctacgaaggaaaagtcctacataaacaagcaataggtttgaagaaaacgaatgctgggcactatgaggaagagtttctctacaattaaaactgtgaaatatggacgtctcttcactatgagataaatttctttcagaaaatgtgttcatcagaggacagatgacaattggccaagagtcttgaaaggagagttcacatatcacacttcccaaactgctatgagaaataaattgtcaaacagttgaggaaagtttaaaggagtatctcatgtkttaaatcacactgtgtctttggatatgaatcccaggtt

SEQ ID NO: 161774 - DNA, 510 bp, Homo sapiens
tacaaatgtatacatggattgggtttaactgggtttggagctaaattcctagataattttttggatttgtaaatgtagaatcaattgtcttcagactgatgtaaactgttggtcattgacaatgatgttggaaaacagaaaggaagatttagcaggacttacagattttgccattttgttgaggacataaaataatgtaatttataacacacttttctgaattgctttcatgtaattgctgttaattgagcttttaaaatacttatattgtttatcaataaaattattttggttgtttattctccagtccctaagaatccagacaaacaagctgctgaattcattcacaacaagagaacacttttttttcactcttcacttcttagtgtccagttaacagctaaaatgatatgtcactatggggtcttactctgctktgtatgttttttgtttgggccatggacacaagagatcttacagagtcacagtaaagaaccaatttaactgctt

SEQ ID NO: 161775 - DNA, 612 bp, Homo sapiens
gtccaaaaccagtgaccaatggactagagttggacagcaaatatgcttcatttggccagcacaggagttggttgttgttttgcctgttagttttgttttattatttcagaccaacaatcaaaagttgtgaaatttcaaactaaaatccagatttctgacttctctttagaaatccgaacacctggagtcttgggatcagaattgcagcacagcaggcatcagctggagctggtggccattgtgcawcttagatgaggtgtgaagcttaggatcacattggcagttattttgtcactttcttctctggcaccagcactgaggccaaagttcagttgccatttctctttgttttcatgccattggttttccctgtaactatatttccatcaaagtaaggaaagaaaagttaggtttacagaattacgtgtttcaagaaaaatggtggcaaaatatataaaccagtccttatgtcagctgaatacaattcagccattcatttatattttttcctggtcctattaggcatatgagtttgagatacttgaactagggtgttaaaaatcaagagcatggcatgttaatgaccttgattgtgatgattatttcacaagg

SEQ ID NO: 161776 - DNA, 517 bp, Homo sapiens
tattccaaaccttaccatcacacaatatacccatgtaaaaacctacacttgtactccttgaatctraaatagaatttgaaattaaatcaaagagagataacaattattttacagcactactgtaccaaatgtggtgtgattggaaataggtgtaggtaggtaaaagcaggtggaaaatagtgtacttcactgatttgagatttttctccaacacagctttctaacacggggaatctcctttggcatgatagctccttttacacaaggccatcacagtactaatcatggtactctgtttctgtttataatttaaactccttgaaagagatgttcttacaagagaagctgatatactcttcatatctcaacaactggcacaacttctcccgtgtactaggctctaaattaatacttgttaaatatatttttaaaacacagtaaaaaaacttgctgtaaacaaactctatattgtaattgctacataccgcttctagggaatgaggtgtaaaagcataaa

SEQ ID NO: 161777 - DNA, 571 bp, Homo sapiens
aaataccaacactttttgccaaatacacagacacatatattttataattttggcatatataaagaaattaaataggacacaaaggattggcacactaatgggaaaaatgrtgaattagactactttataaataagaatcattggggtagcagagtggagaggggaatatgtaggtcaaatgatacaaagtaccaaatatgtaggatgaacaaatctagagagataatatatagcatgagagatatagttaataaaattatattgcattggggatatttgttaaataagtaaatttaagcttctgttgttacaaaaaagtaattatgtgagataacagatatgttaatttgcttcactatcgtaaccattttactacctatatgtatctcaaagcatcatgttataaacctcaaacatacacagtaaaattaattttaaaaaagaagttcatcaaagcatgccatttagagagtaaaaaggcaagccatggagtaagtagcagaagatattggcaagacatacacatccaacaaaggatacatatccagtatataaaaataaagtgcttgaa

SEQ ID NO: 161778 - DNA, 571 bp, Homo sapiens
aaataccaacactttttgccaaatacacagacacatatattttataattttggcatatataaagaaattaaataggacacaaaggattggcacactaatgggaaaaatggtgaattagactactttataaataagaatcattggggtagcagagtggagaggggaatatgtaggtcaaatgatacaaagtaccaaatatgtaggatgaacaaatctagagagataatatatagcatgagagatatagttaataaaattatattgcattggggatwtttgttaaataagtaaatttaagcttctgttgttacaaaaaagtaattatgtgagataacagatatgttaatttgcttcactatcgtaaccattttactacctatatgtatctcaaagcatcatgttataaacctcaaacatacacagtaaaattaattttaaaaaagaagttcatcaaagcatgccatttagagagtaaaaaggcaagccatggagtaagtagcagaagatattggcaagacatacacatccaacaaaggatacatatccagtatataaaaataaagtgcttgaa

SEQ ID NO: 161779 - DNA, 571 bp, Homo sapiens
aaataccaacactttttgccaaatacacagacacatatattttataattttggcatatataaagaaattaaataggacacaaaggattggcacactaatgggaaaaatggtgaattagactactttataaataagaatcattggggtagcagagtggagaggggaatatgtaggtcaaatgatacaaagtaccaaatatgtaggatgaacaaatctagagagataatatatagcatgagagatatagttaataaaattatattgcattggggatatttgttaaataagtaaatttaagcttctgttgttacaaaaaagtaattatgtgagataacagatatgttaatttgcttcactatcgtaaccattttaytacctatatgtatctcaaagcatcatgttataaacctcaaacatacacagtaaaattaattttaaaaaagaagttcatcaaagcatgccatttagagagtaaaaaggcaagccatggagtaagtagcagaagatattggcaagacatacacatccaacaaaggatacatatccagtatataaaaataaagtgcttgaa

SEQ ID NO: 161780 - DNA, 571 bp, Homo sapiens
aaataccaacactttttgccaaatacacagacacatatattttataattttggcatatataaagaaattaaataggacacaaaggattggcacactaatgggaaaaatggtgaattagactactttataaataagaatcattggggtagcagagtggagaggggaatatgtaggtcaaatgatacaaagtaccaaatatgtaggatgaacaaatctagagagataatatatagcatgagagatatagttaataaaattatattgcattggggatatttgttaaataagtaaatttaagcttctgttgttacaaaaaagtaattatgtgagataacagatatgttaatttgcttcactatcgtaaccattttactacctatatgtatctcaaagcatcatgttataaacctcaaacwtacacagtaaaattaattttaaaaaagaagttcatcaaagcatgccatttagagagtaaaaaggcaagccatggagtaagtagcagaagatattggcaagacatacacatccaacaaaggatacatatccagtatataaaaataaagtgcttgaa

SEQ ID NO: 161781 - DNA, 571 bp, Homo sapiens
cctgaactgcttctcatgcaagcgttacagaatccagatggcctaaccacagggtcgctttactcactttccttagatcatttacattaaaaaagttgtaattgtaaaatctttcttttcccctttcagatgtagatccttttaaaagtctgttgacagtttttacaaagacctgagatctatccttttgaaatgtaatcattaagggaaatagcactcctattttctagtgtccctgggagtatagggtcctatttctggtgggcacgtagggctaggtgtaaaacttccttctgtcatgaagatacaaagaaagtktacttctttttttttttttttcttattttactttcagttctgggacacatgtgcagaacatgcaggtttgttacgtaagtatacatgtgccatggtggtttgctgcacctatcaacccatcatctagattttaagccccacttgcattaggtatttgtcctaatgctctccctccccttgtccccaccccctgacaggccccagtgtgtgatgtcccccttcctgtatccatgtgttctccttgttcaacttc

SEQ ID NO: 161782 - DNA, 528 bp, Homo sapiens
cgactggtttttctacattgattttgtattctgaaactctactgaggtcatttatcaattctaggagccttttgatggagtctttagggttttctaggtacagaataatattatcagtgaatataaacagtttgacttcttttcctatttgtatgccttttatttatttctctgggctagaatttccagtactattttgaagtcataaaggtaggcatccttgccttgttcagtttcttaaggggaatgcttccagctttttcccattcagtattacggctgtacgtttatcattgatggttcttgttattttgaggtatgttctttcaatgcctaatttgttgagggtttttattatgaaaaggttttatcaaaagccttttttcacattaattgagatgattatgtattttttgtttttgattattttatgtggtgaatcaaatttaytgatttgtttatgttgaaacaaccttgtattccaggaataaagcctacttgatcatgatggattagctttttgatgtc

SEQ ID NO: 161783 - DNA, 380 bp, Homo sapiens
gaattccttctctgtggtacctagaatttcactgagcttcctcaaaacaattattttgaatyctctctaaaaggtcagctctctgtctctctgggtttggtctctggtgccttatttattttctttggtgaggtcatgttttcctagatgttcatcagtaaacatgcttgtggatgttcgttggtgtcagggtgttgaagaattaggtatttatcatagtctttgcaccttgtggttgtttgtactcattcttctttggaaggctttccaagtatttgaaagaacttgggtgctgtgatctaagtctttggtcactgtagccatatctgcattagtggccaccccaagcccagtaatgctgtgactcttgcagactcata

SEQ ID NO: 161784 - DNA, 438 bp, Homo sapiens
ctggctgataaacagctatgagcggaaatgtatgcacctttcataagcaagacaaatcactcattctcaccaaatgcttccaacaggaacactaattctgtatttatttgcacagcatatgtactgcgtccgaagcagtgcattaaaaaagatctcaggcagccaattgctttgattactttattcatcgtagtattacaagggctcaatggcagagcaatgaaataggaagctagtgaagactgaaacacctcgtcaatggcttgtcagagttgaaggtttttctggtgcataaaacayacacacacacacacacacacacacacacacacacactctcacccctggtgtaggaaagaattttttttttaaataaaatactgtggccatgcatcttaaatttgccatatgcctttcctgtcaaccagcagttatttt

SEQ ID NO: 161785 - DNA, 587 bp, Homo sapiens
agctgggtgtggtggcatgtgcctgtaatcccctctactggggaggctgaggtgggaagattgcttaagcctgggaggtcgaggctacagtgagctgagattgtgccactgcactccagcccgggtgatagagtgagaccctgtttcaaaaaaacaaaaacaaaacacacacacaaacaaacaaggaaaaacacagattgctgccccctcccctgcacccagtgtatctgcattcagtaggtctggagtgggcatctgagaatgtggatttctaacaagttcctgsgagatgctgatgctactggctaagaaaccaaactctgagaaccactgccctacaggctgacacgaccagcttaggaaaatgtccagagagtaatttttctcaacacaacataaaaaccaacataaatctatacagttttctttatcaaatgtcatctcctctgtgctggcttatccctgcctaatgcttgctaagtgcctcacttgggcttgtacctttcctttgtcagtgtcactatctgagaaagacttgaaggtgacttgagagaagcatcctgcatcagcagagaagggttgttccc

SEQ ID NO: 161786 - DNA, 472 bp, Homo sapiens
ggcccatttgtggtcctgatttctgaatgcgattaccagctatttttcattggaaaaatagcttgaagtttagcctcactcctcacgtcttgtagcttcatcggagaaaaagcaactggggaaatggagaagtgacatggaccgctgatgtcagagtaaaggcatggttcaagccagcctccttttcctagggaaggaactgtctggttgcatttgggggcttcagcttgcagtgctaaatgtgggtctggtggtaaggtgtgtccttctggaagaccctttcatgctaccaagccattttgtctgaaggtaattgactaggctatgttatgaagcaagaacaggaatctttcaggaaactggcttttttttttctccttcatgatytgagctagaaaactccctctacaggggtgactttttctgagaagataagcaaatgaacatgggacctgttgtgttgatgtgctcc

SEQ ID NO: 161787 - DNA, 607 bp, Homo sapiens
aacgtgggcaaattctgtatttatttttatgctccttctgcttccatagaggcttgagaggtgttcactaaaagggcccgcatgccataaaccagttaaaactaatcaattactctagagccaagtaataaaagaataaagagaggagggagataattatgccagaaacctaggccaaattactgtaattgagaatcatatcataataaacccacccctaaatctcattacagctggtacaatgtgatcattcattctttcaaaatatcttcactgagcagctactgggtgcaggttctgcattagaggctggctaatccaaggaagagttcccagacacattgttagtaatgcttcatttaatccttgcaacaatccgtgaaaaatatgccattattgcatccattttgtaaatgaggaaactgaggcccagagaagttaagaaacttgcccaaagtcacacagcttgttagtggcagacccaggactgaaatcgaggcctttgggctctagagatgctcaaccgattcrcattcacagtcctcactatttgcaaactacagctgggtgcagggggtattaaaaatgcaagtgatcaccaccattc

SEQ ID NO: 161788 - DNA, 535 bp, Homo sapiens
gctgttgttcgtaggaagagagtcaaatcaattgcatgccggcccctgtaaatgcagactacaagtccaatcaaacagggtgtttggaaaattcgctttatggttcagctaagtgatacttgaatcaaggggacgctagacactgaggtaccagctcttttctcccagtgggcctggctgtgcatctcccacaatcacagcttcttcaagcacaccaaggagagaaaggacgctctgaaatgctccaaccataaaagtggggtgggggagttagggactyggtgagtctgagcaggagactgtggactcttccagatgggagctggcagccagtgcagctgtgcagggagcgctggccccaggggagaaggtggtgggccctgagatgtggaaggccgagcttggccacaagaggaccagagaggtatggcttaaggctggagttagggtggctctctgggcatctgccacggcaaaagcagcttggagcagaaccttgaagtcctgggcaagtgcaaaaaccacaccccagggg

SEQ ID NO: 161789 - DNA, 535 bp, Homo sapiens
gctgttgttcgtaggaagagagtcaaatcaattgcatgccggcccctgtaaatgcagactacaagtccaatcaaacagggtgtttggaaaattcgctttatggttcagctaagtgatacttgaatcaaggggacgctagacactgaggtaccagctcttttctcccagtgggcctggctgtgcatctcccacaatcacagcttcttcaagcacaccaaggagagaaaggacgctctgaaatgctccaaccataaaagtggggtgggggagttagggactcggtgagtctgagcaggagactgtggactcttccagatgggagctggcagccagtgcagctgtgcagggagygctggccccaggggagaaggtggtgggccctgagatgtggaaggccgagcttggccacaagaggaccagagaggtatggcttaaggctggagttagggtggctctctgggcatctgccacggcaaaagcagcttggagcagaaccttgaagtcctgggcaagtgcaaaaaccacaccccagggg

SEQ ID NO: 161790 - DNA, 535 bp, Homo sapiens
gctgttgttcgtaggaagagagtcaaatcaattgcatgccggcccctgtaaatgcagactacaagtccaatcaaacagggtgtttggaaaattcgctttatggttcagctaagtgatacttgaatcaaggggacgctagacactgaggtaccagctcttttctcccagtgggcctggctgtgcatctcccacaatcacagcttcttcaagcacaccaaggagagaaaggacgctctgaaatgctccaaccataaaagtggggtgggggagttagggactcggtgagtctgagcaggagactgtggactcttccagatgggagctggcagccagtgcagctgtgcagggagcgctggccccaggggagaaggtggtgggccctgagatgtggaaggccgagcttggccacaagaggaccagagaggtatggcttaaggctggagttagggtrgctctctgggcatctgccacggcaaaagcagcttggagcagaaccttgaagtcctgggcaagtgcaaaaaccacaccccagggg

SEQ ID NO: 161791 - DNA, 485 bp, Homo sapiens
aaccgaggcatgggtgtattgaggacttgcctgagtgggcccaacagagacagccagactccacgctagttgtcccagaaaataaagtcaggggtgcttaggggaggttgggtcggagccccagtcttggtcctgatagtccaatggttctcaactgggggtggttttgccccctgactcctaacccggggaacatttggcaatgtctgtagacagttttggttgtcaacactggggcagggggtggctactggcatctggtggtagagtccagggatactgccacacattttacaaagcacaggagagcccyaaacaacaaagaatgacctggcacgaaggggctgaggttgggaaaccccatgacaatccaatcctaggccctgccaggagaaactgggagattgggtggctgtgagaagccattgctggggcagctggtgctctggagggctgatgctgtgctcttgctcccagaggggctg

SEQ ID NO: 161792 - DNA, 587 bp, Homo sapiens
agaaagagggaagctgatttaagcaaagggcacaagctcaagtgtccgtaagggaagctcatgtagatagctatgcagtgttcttcagaccctacaccaccaccacccacacatctgactcctctaggggtgggacatcctgctagcccatccaggcctgctatccccaagtagacagattttgttttgttttgttttgttttttgagacggaatctcactctgtcgcccaggctggagtgcagtggcacgatctcagcccactgaaacctccgcctcccgggttcaagtgattcttgtgcctcagcctcccgagtagctgggattacaggcacccgccaccacrcccagctaatttttgtatttttagtagagacggggtttcaccatattggccatgctggtctcgaactcctgacctcaagtgatccacccgccttggactcccaaagtgctgggattacaggcatgagccactgagctggtcaagattctgaactacaagaatacccatctatctcatgcagagaatggaatgagcactagatcttaactaccactagcccagcctctatcatttacagaaga

SEQ ID NO: 161793 - DNA, 560 bp, Homo sapiens
agcaggtcttgtctctgtcctttactctctagcccaccactatggctagattcagaccctctcatctctagcatggactattttaaaacaccctaaactgggttctttatccctggtcatccctgcttcccttgacacatcaacccattygccacacaaaacccacatcccatccctgatgaaaatgactttccattgtcttgcttacagctcccccacagctgaccttgtcctcaacgacccccttccctcccctcctgccatggcccaaccatattgaattgccagtagtctcccaagctgggcccggttactcatctcttccaggcccccattctctttactcttctgcctgagaaatacctactggtctgtcagcttcttgctcaagggtcatgcctctgtaattaaatagctctcaatgcccccaggcagacataattcccagtgtctacatacttgatcacattgattggtttgaggcatacctcaatactgggtcaatagctctagcctgatggcccacatggtggctcccactccagcaccccctaaagatc

SEQ ID NO: 161794 - DNA, 505 bp, Homo sapiens
tttacaacataaatatatgttaataaatctattgtatgtgtcagagataatcttaaaaaatatatatataatgacctaagatgctcagcttattcaagagtaagcactatcatttttcaacagctgtttcattttttatgttcagtaaatgtcatgatactaaaaaaaaacccctcttctctagcatctttatcacacatgtgaccacactattgctaaaaacattaattttcactcagtgccagaatggcttactgcccactaaaacaaaaggcagtgtaatgaaagcaaataaactcgctggtttactaaactggaggaaatgtaacatactttgaaaagcacctggggattttatgtgataacatccaacaggggaaatacacctgcaaaaatgataaaayagagttgggatcagtcactatgagtttttggatttcttttgaaatcttagtacatttcactgttagaggcagtgagagagaaagcaaaataaaaaaggaaa

SEQ ID NO: 161795 - DNA, 590 bp, Homo sapiens
ctaagtttttcaagcttcctgatgttgctggagttatctacctataatttttttccttattagagttgctcctctcccaattctaagggttctgctrtgtttccacagcccatatattttgggcctccatggacttaattagaactcttccttgggatttgaaatggtaactgaggaagttattcagactctgtgcaattgaagctggaaactgtcagtagccgtattctctgcaagtctatttaataacctaaaagagctcaggtgtcatttgattatctagttcagttgttgctagagcttggaagtaccactacccttttcagctccacaaatgagcacattatttaccccccaaaagactcctttttttgcccagggtagtcagaagtagatgtctgttcattccaactataagagtcaagattaatatttctaaggattctgtctatttgaaaggcctctgctttgggttattcttttatagtcatttcttctcccatcctaccttgcaggaatttttttcctttggtcttgtgcctggaataagtgaaaattaaaacccttctttccagcactcaatatcaaat

SEQ ID NO: 161796 - DNA, 533 bp, Homo sapiens
tctcctctttctctgatctctcatgggaatttcccttattcaaacccaaccataaatcatagggtgaggaaaacctgctgacctagtccattcaggtcaatctcctggacaaagagtagggtggagatgggtagaaaatgggtctagcataggaaacaacagattttttcttttttttttttttgagatggagtctcgctctgtcacccaggctagagtgtagtggcgccatcttggctcactgcaagctctacctcccaggttcacaycattctcctccttcagcctcccaagcagctgggactacaggtgcctgccaccacgcctggctaattttttgtattttttggtagagagagggtttcatcatgctagacaggctggtctcctgacctcgtgatccacctgcctcggcctcccaaagtgctgggattacaggcatgagccacatcgcctggccggaaacaacagatattccacaagcatccaaaacccaactctgactaacctccatacagtaaagattttgaaaa

SEQ ID NO: 161797 - DNA, 533 bp, Homo sapiens
tctcctctttctctgatctctcatgggaatttcccttattcaaacccaaccataaatcatagggtgaggaaaacctgctgacctagtccattcaggtcaatctcctggacaaagagtagggtggagatgggtagaaaatgggtctagcataggaaacaacagattttttcttttttttttttttgagatggagtctcgctctgtcacccaggctagagtgtagtggcgccatcttggctcactgcaagctctacctcccaggttcacaccattctcctccttcagcctcccaagcagctgggactacaggtgcctgccaccacgcctggctaattttttgtattttttggtagagagagggtttcaycatgctagacaggctggtctcctgacctcgtgatccacctgcctcggcctcccaaagtgctgggattacaggcatgagccacatcgcctggccggaaacaacagatattccacaagcatccaaaacccaactctgactaacctccatacagtaaagattttgaaaa

SEQ ID NO: 161798 - DNA, 465 bp, Homo sapiens
ccaactctgactaacctccatacagtaaagattttgaaaaatatcttgcctcagggaagttggagaaccaaactccaaaatgaacaggaagcaaaccaagaaataggaactgcaggaacaacccagtgaagacaaactctgtcattttgctccagattcaacttatagcttgggaccagaggtttatctagctttaatcacgtgcaaatttgstttaagaagacaggactccagtttctgtaccataagactagtcccaaagagaaagaagtagtactccaaatggaaattagagtgctatctaaagaaaaaactatactgcataggcccaaaatagcaattgtccaggtaaattgtgaaagaattccctgggggactaaaaaggcagtcctgaactgggctctcaggaagctctgttatttgcagtgcagctgctctatctgcacaggccagaagaaacagaac

SEQ ID NO: 161799 - DNA, 373 bp, Homo sapiens
gcagcagtttcaaagtctgatcaaggtaggattatttggatgctctttcccacaytgaacatccatggcactttagttgaacctcttatgtcattgatcacattcttcttggattatgtccatttaacaatgtgttacagcattcctaatcaaccacacacttttgtgaggtgggatggggtgcaatttgtttatgtataccccttgcaactagcttgatgccttaaacacagagctcaataaatacgaattaagcaaataaataaatgaatgaaaaagcaactttttgaaccatccccccaaaattaagctaagtttgatttcctttgagaagcaagtacatttcacattcccacctcttacccatggcata

SEQ ID NO: 161800 - DNA, 373 bp, Homo sapiens
gcagcagtttcaaagtctgatcaaggtaggattatttggatgctctttcccacactgaacatccatggcactttagttgaacctcttatgtcattgatcacattcttcttggattatgtccatttaacaatgtgttacagcattcctaatcarccacacacttttgtgaggtgggatggggtgcaatttgtttatgtataccccttgcaactagcttgatgccttaaacacagagctcaataaatacgaattaagcaaataaataaatgaatgaaaaagcaactttttgaaccatccccccaaaattaagctaagtttgatttcctttgagaagcaagtacatttcacattcccacctcttacccatggcata

SEQ ID NO: 161801 - DNA, 373 bp, Homo sapiens
gcagcagtttcaaagtctgatcaaggtaggattatttggatgctctttcccacactgaacatccatggcactttagttgaacctcttatgtcattgatcacattcttcttggattatgtccatttaacaatgtgttacagcattcctaatcaaccacacacttttgtgaggtgggatggggtgcaatttgtttatgtatmccccttgcaactagcttgatgccttaaacacagagctcaataaatacgaattaagcaaataaataaatgaatgaaaaagcaactttttgaaccatccccccaaaattaagctaagtttgatttcctttgagaagcaagtacatttcacattcccacctcttacccatggcata

SEQ ID NO: 161802 - DNA, 674 bp, Homo sapiens
ccccactccttgaactctgctgcctctgctgctgttgtaaatgccttcatggagacaggcaccccagtacccactagcaccctgctgcagccaacaagcttgcaccccaccaagctgctgctgctgctagyacatgcaaataaggatggatcccactaccaccccactacaaaatactttggctggtagcacccactggagtgtactgaccagcagtcaaggaacacctcaatctccgcagtgcagtggatttctaacctcaaggagtcagagaacaaagttggggcctgatacaagtcccctagatttacagtatgaagtccaggagtcctgagctgagccttggtcctttaaaaacttccagtaatgaagccagttgactgaacccaccttataccacaatcaaaccctcaaggtcatcaaataagataaaagaaaaaaagcccatccaaaggtcagcaacttcaaagattgaagaaaattagcccacaaagatgaaaaagaagtagggcaagaactctaataactcagaaagccagagtgccttctttagtccaaattaccacactacctctccagcaagggttctgaactgggctgagatgcttgaatgaacagaaatgaaattcagaacagggatagaatccaagatcgttgagatccagaattacctt

SEQ ID NO: 161803 - DNA, 566 bp, Homo sapiens
gccactgtctctgtggttcagttgacttaccagcctgctggctctggagagtctaggcagtctggacaagaggggttccaccaagtgtagcacacctgctctgccaaggagcagtcagaatgcttctttaagtatgtccctgattctgttcctcccagaagacatctccagacacaaataggagcattcgagctggcatcaggtcagtgccccctgggacaaagctcccagaggaaggaacaggctgctatctttgctgttttacagccttcactgctgatacctccaggtgcaggaggtaccaaggcaactgaggtctggggtggacccccagcaaactgcagcaaccctgtggaagagtggactgactgttaaaagaaaaaaaaaaatagaaagcaacaacaacaacactaacgaaaaagaccccacaaaaaaaaccatccaaaggtcagcagcctcaaagattgaaggtagataagcccacaaacatgagatagaatcaatgcaaaaacamtggaaactcaaaaagccagagtgcctcttctcctccaaatgaccacaatgtg

SEQ ID NO: 161804 - DNA, 562 bp, Homo sapiens
tagtcacagtttataaaacattgatgacttttggctactgtgctttactccaaatgggagaaattcatgcataacctattgagtaggatggcttcagagtgaataatacagagctgaataacacagtttcattcgactttgagactcctttcatcttacataactaccaggcaaagcattgcggctcatgytccttgaattgattaagttgttaaaggaggcttgtccaggccctgtgtattgctcagaaattctcaggagaaagattcaccacatctctgccagtccccagagggataaagtctgaacaggaacagacattgcccaaacacttcctcctgatataaacatctcaggctcctatttttgggaggaccaaaatacccttgtttctctgcctgcactcttgcctgctttctgaaaggaaaagcattagttggtttttgctcatgaggccatggaagtcttcactgtaattaaatagtacaatttcaaagttggctctgcctctagcaaaacagaagctatgttagtcaaaggtctttatttcctttattataga

SEQ ID NO: 161805 - DNA, 616 bp, Homo sapiens
tagtctcccacagaataatagtgggagattttaacaccctactaacaatattggacagatcattgagacagaaaattaataaagatattcaggacccgaactcagctctgtatcaagtggacctgataaatatctacagaactctcctctccaaaacaacagaatatacattcttctcatcatcacatggcatttactgtaaaattgatgacataattggaagtaaaacgctcatcagcaattctttgaagctcatgacaacaaagaaacaatgtaccagaatctctgggacacagccaaagcagtgttaagaaggaaatttatagaactaaatgcccacatcaaagagccagaaagatctcaaatcaacaacctaacatcacaactaaaagaacyaaagaaccaaaagcaaacaagccccagtgctacaaagacaagaaatgaccaagattggagtaaagctgaaggagattgagacacaacaaacccttcaaaaaatgaacgaatcaaggggctgtttttttcaagaaaattaataaaatagaccactagcaagactaataaagaagaaaagcaaaagctggaaccaaatagataaaaggggcgtatcaccact

SEQ ID NO: 161806 - DNA, 589 bp, Homo sapiens
acatgctcttttgactaggctagagaatgatgacaaaatatcaactgacagataatatgagaggctagaggagagaatattcaatagtttttcttttcaattttcctttattgtgcgtccctatgtgcctggctttgggttgagctgccttttcctattattattgttttacttacccctaaaattagcccaaagatcttagtgggtagttaattctttaagatggattaaaaacatcagtctcattctctagtggcatcttgtctctactgttcacttgtcttttgattctgacacaaccatctaaccccattcttcagacatgggtkctgacatccaacagaggctcggcttgtctgtgtttcttttctctttgttcctgggcacgtctgctaggaacttctaaggcaggaagaagcccagcattacacctttccccagactgtatgcggcatactaatgcttgctccctgggcacttgtaattgcagatatggactgtttatgacagtgatgaaagtggatgaacagctgcagctgccaggcaaaagataatgcaggaatgagaatgtcaaagtggctatatctga

SEQ ID NO: 161807 - DNA, 490 bp, Homo sapiens
taatgcatctctgttaggctttttgtcctggcactgcccatctgctggaagctgcccctacaagagcaggcagccattagaagtttctctgtttagatccttcctggggaagggagactctaaatagagttgggtttagttgctgaaaacttgtgattagctgtagactgtcaatcacctgcagccaagtctatttcggcaatgctgtagttttcttgtttcagatcacttctcactgcctaaggttattatgctcgggcttcccattrcagatagtcaagctctttccagcttgccttagtttatatccactctttcacggctattttaaatgtgcaattactagggaaaaaatagatggctttgagctatgatgttaatgtccacatctcacatggctttcacagtaatacaacagcccctaccttgcagagttataggttctgttgtgataatatggtttaatttttttatttcagtaattatttga

SEQ ID NO: 161808 - DNA, 580 bp, Homo sapiens
ttggtttaatatgattttcctaggtgtgtttcttttgatgattttctgttgtaggctctctaagtttcttggatatgtggtttggtgtcttttattaatattaatttagggaaactctgagctattatcacttccaccgagttgtctgtctttcttatcctactgtgaatctaatttcatgtatgtcaggccatattttgatatttttctggtttctgtatgttctgttctttcttttcttttttatcttttactttgggtaatttctagtgacctattttcaagttctatgattacttccttggctgtgttgaatcaactgacgaacccattcaaatattcatttcttttagtatgttttgcatttcttacattttgattggaatcttttgtatagttccagctagagtctgggtacttatgtttagaaattggcatgcattatctactagtagaccactagcatgtgaggttgaggcaatgtagttagaagytgaactgagtgtgaatttagttgttgctatagtcaccttgtgtgataaccagcttcaaattccccttgtgcttagactatggggta

SEQ ID NO: 161809 - DNA, 598 bp, Homo sapiens
agtggaacgttagggttaatagaggagccactcccatttccagcccttgatccccagacccatgaatatggctattgaagaaacagcacagaagtttaactgatttagagcatatacagcaccctggaggacattttctccagaccctcaaggtactgccaaccagtttatgcttaactgagtcttcaaaaaatggttccacagttccatcaggccagctgcttcagggtgattaggtacatgatcagactagtgagtttcactaacatgaccccattggcacccttcatttgctgtaaaacgagttcctttgtcagaagcaaaatctggtagaataccatgtatggggaatacatcctgagataactctcaatgaatgacacccttgtataatctmtccataagtgtgtgtgacatgtgacttgattctaaccaatagaatacggcaagggtaatgggatgtcactttcatgatcatattttattatagaagtgtccatcttaacaggctggagggagagattagcctgctggccttgcaaaagtaagcagccatatttggaactgcctatggagaggaccacatggccaggaactg

SEQ ID NO: 161810 - DNA, 548 bp, Homo sapiens
atacaccacaaacttgtggaactctggtcaagtttcaaactgtattcaaatgttattaccataaatgatataattcttccctcttcygtgttcctattgctctttatacttatctctattagattagaaatgttttcttctttagacgcatatgtatttcttatacatattaaaatataaacaatcaagaataggaagtagaatacccgtctagagtaaattctcaataaatgtggaaaagcaaaggaaaagaggaagaagggaaattagttcagatttggaggaggacacaaagattataaaattcaaccatattttacaaatgaggaaagtaaaacaataagaaattaagtgagccaaagccttatacctattgagaggctgttttggacattcatgaatttgggggaaccaagcaccttgtaacctcattagtttgctaagagctctctgacttttgacccttgaccatccaggacttttgtttgaactcttagaggaagagaagctgttctaccagccagccttgagcctggaaggacaggagc

SEQ ID NO: 161811 - DNA, 618 bp, Homo sapiens
atttgaatctgtgttgcatgcctccacattgcctaataaaaataaaacacaatattctaaagccacactttgatttagagtttaaaaatgaaaacactaagatttcatatttcttttttcctttaaggcaaaagcaggacccttccacctttgttacttgcttttgaacaaataggakgtagtatttttagactttctccctggagccgaaagctcacaggattaaagcaaccaaggaaatatagagaagtaggagcccaagttctatgttctaaatatttttcagtcatgaagaaactagctttttccctaatgcttctgtttataccggtaggagcatgcactaaggtaatttcttcttttttcttgctggattaaagaatgtgcttaattctctctctctctctctctctctctctctctctccctctctctctcgctctctctctctctctctctctctctctctctcactctccccctctcccagagaagtttctgttgttctttccctcaaagtggacacacatctgaacacagctctagtgcatttctgctggaagaagcaagaagctattaacggtggcacttgaggccgctgtgcaagtccattacccc

SEQ ID NO: 161812 - DNA, 618 bp, Homo sapiens
atttgaatctgtgttgcatgcctccacattgcctaataaaaataaaacacaatattctaaagccacactttgatttagagtttaaaaatgaaaacactaagatttcatatttcttttttcctttaaggcaaaagcaggacccttccacctttgttacttgcttttgaacaaataggaggtagtatttttagactttctccctggagccgaaagctcacaggattaaagcaaccaaggaaatatagagaagtaggagcccaagttctatgttctaaatatttttcagtcatgaagaaactagctttttccctaatgcttctgtttataccggtaggagcatgcactaaggtaatttcttcttttttcttgctggattaaagaatgtgcttaattctctctctctctctctctctctctctctctctccctctctctctcgctctctctctctctctctctctctctctctctcrctctccccctctcccagagaagtttctgttgttctttccctcaaagtggacacacatctgaacacagctctagtgcatttctgctggaagaagcaagaagctattaacggtggcacttgaggccgctgtgcaagtccattacccc

SEQ ID NO: 161813 - DNA, 494 bp, Homo sapiens
gatacttgtgggttgggactagcttgatgccatctccctagttaaaaggactggtcagacaaacctggataatttatcatcctctgcaccatatagcactttactcactgcaatacactctctcatcacagccctgcaggacaggcaagaaactctatttatctccattttacagaggagaaaactgaagatccaacagacttgccaaaggtcagttgcacattaactcagaggcagctctggaactccaaataaagcctctattgtcaccatagttttcgctacagccctacaggttcctccaagcttaaagtccaagatgagcagttttggtgctagcaactattttgcttcctagaactaaaggaaaaaraagcatgaaacccaggatacacctaaggagtataatcccttaattttagagatgaggagattgaagcacagtgacttgcccaagatcacatagctagctagcgagaagaaaagtaaacaac

SEQ ID NO: 161814 - DNA, 578 bp, Homo sapiens
tagtttcatgaattggtggttwttcaaattgatgtttctgtagggggataaatactggagagtcctatttcaccatcttgctgatgtgcatcctaaacatgtttttaagagcaacattattcttactgaataatggtatggttattcagtaagtatggttggcctccatgtccccacccaaatctcatgttgaattgcgatcccaagtgttggaggtggtgcctggtgggaggtgattgtgtcatagagatggtttctaatggcttagtgccatccccccatgctgtcttgtgatagaattctcataagatctgattgtttgaaagtgtgtagcacctcccactttcctctctctcttcctcctgctttagtcatgtaggacatgccagcttccccatagacttccaccatgactgtaggtttcctgaagcctccccattcatagatcctgtgcagcctgtggaaatatgagccaattaaatatgacttttaaataaactaccagtctcaggtagttctttatatcaatgtgagaacagactaatacagaaaattggtacaagagaagtggggcattg

SEQ ID NO: 161815 - DNA, 372 bp, Homo sapiens
acggggttaaaaatatgagtggagtttagcaataatatcacctactgctactaccaccaccaccactggctcagttgccagatgcccctactgcggactttacagaggctgaaagaagataaataacttgcccaaagtagcatcgctcttaagtgactgagccaggacttggacytaagtctgtttaactccaaaacccatccactctgctatgggaacttttctgtctattagcctttaccagttctatcatagcggtattgtccattacacctaaggtctcttctcaatattaaggggttattattattgtataatccttacaacaatatttgtctatggtgattattattgcttaatagtaaagcaaca

SEQ ID NO: 161816 - DNA, 372 bp, Homo sapiens
acggggttaaaaatatgagtggagtttagcaataatatcacctactgctactaccaccaccaccactggctcagttgccagatgcccctactgcggactttacagaggctgaaagaagataaataacttgcccaaagtagcatcgctcttaagtgactgagccaggacttggacctaagtctgtttaactccaaaacccatccactctgctatgggaacttttctgtctattagcctttaccagttctatcatagcggtattgtccattacacytaaggtctcttctcaatattaaggggttattattattgtataatccttacaacaatatttgtctatggtgattattattgcttaatagtaaagcaaca

SEQ ID NO: 161817 - DNA, 566 bp, Homo sapiens
atccacaagctaaatgtaactatggagcatttcayagatacccaatctgaattgactgtaagtgcaaaatacacaccagatcttgaatatagtataaaaaaataaataaataaaatagctcattaaaattcttatattgatgatatgtggatatgatattttgcatatactaggttaaaaaattattattaaaattagtcccacctgtttctttttacttttgcaatacagttactaaaaaattttaaattactatgtggttctcattatgtttgtgtcagacagtgctgatctagagtttcacatgaatcaagggagtgaggacagcaaaagacaagttatccagagcctggtagaaaggtaggagacaggcgtcatatcctgcactactcagacccatttggtcagcaggtgccctcaactgcctaagaaagaacatctgaattctgccctgcaagatgcaaaccacactctaaagctaagttttgctaatggaataagaaaataatacaccaaatcttagtagatgaataaagcagaatgaccccagaaacacattctgtctt

SEQ ID NO: 161818 - DNA, 560 bp, Homo sapiens
ctgtggctgtgccagtttttaacttttgattcgtgtctatgtcttccctcctgcrctaggttacaatttatgtaaagtggatagtgccacttctttccttgtcatccacagtgcctggtgcctgagaggacaatgtggcctaatgggaaagacctgagttttagagtcagcaaaagcctgccttgaattcagctcagctatgtacctgccacatcagtctgggcaagttgctacacctctctgagcttcagtttccacatttgcaacacgggcctcacatttcctatttcacagggctgccaggggttttgatggtatcctggccagctcagacctaagacgtggctatgccagcatttagagttaggtggcccacttatgggggttgtgtgctttgcatagataaaacctctctaacaggcatgaaatattggacgagaacacgaactctgccctcaaccagggttcaggagtgaacagacatggctaatgggcttcagggcaggacaagagataaaagcaggttacaggtagggacaagtaatcactgttgctaagct

SEQ ID NO: 161819 - DNA, 560 bp, Homo sapiens
ctgtggctgtgccagtttttaacttttgattcgtgtctatgtcttccctcctgcactaggttacaatttatgtaaagtggatagtgccacttctttccttgtcatccacagtgcctggtgcctgagaggacaatgtggcctaatgggaaagacctgagttttagagtcagcawaagcctgccttgaattcagctcagctatgtacctgccacatcagtctgggcaagttgctacacctctctgagcttcagtttccacatttgcaacacgggcctcacatttcctatttcacagggctgccaggggttttgatggtatcctggccagctcagacctaagacgtggctatgccagcatttagagttaggtggcccacttatgggggttgtgtgctttgcatagataaaacctctctaacaggcatgaaatattggacgagaacacgaactctgccctcaaccagggttcaggagtgaacagacatggctaatgggcttcagggcaggacaagagataaaagcaggttacaggtagggacaagtaatcactgttgctaagct

SEQ ID NO: 161820 - DNA, 641 bp, Homo sapiens
aatgcttttaccaaatgttccctattttttttcacacttgcattcaagtcatatgaatactccctaatatctcatttaggtggcagtttcaaatattgttcccagaaagaacactaaattattatttttttcttagtaaagtacatagtctagagaacatgaagatgagtgttccatatatgccctttattgctggttacttgtatgatacttctttttaaggtagtgtaaaatcagatctccattaaatcttaaataattggtccaagactatagctcttaaaaatattatatgccattttgttatttaaraggataaacatctcttttattgtctggtcttactttaaaaacatttctgttttattggctgaccttactgaaaatgctttagtataacagtgtgaatgttaatataaactctatagtaggaatgattagttaatattttaaggacataatgacagctcatcactccaaaagcagcttgaacaagttgttcaaaattggttacctgtgtctgcatcagaaatctgcttaatctgcataagaatatttaaagtacctttaaaaattgaggcataatagatgtacatagttttgggggcacatgtgataatttaatacatgcctataatttg

SEQ ID NO: 161821 - DNA, 641 bp, Homo sapiens
aatgcttttaccaaatgttccctattttttttcacacttgcattcaagtcatatgaatactccctaatatctcatttaggtggcagtttcaaatattgttcccagaaagaacactaaattattatttttttcttagtaaagtacatagtctagagaacatgaagatgagtgttccatatatgccctttattgctggttacttgtatgatacttctttttaaggtagtgtaaaatcagatctccattaaatcttaaataattggtccaagactatagctcttaaaaatattatatgccattttgttatttaaaaggataaacatctcttttattgtctggtcttactttaaaaacatttctgttttattggctgaccttactgaaaatgctttagtataacagtgtgaatgttaatataaactctatagtaggaatgattagttaatattttaaggacataatgacagctcatcactccaaaagcagcttgaacaagttgttcaaaattggttacctgtgtctgcatcagaaatctgcttaatctgcrtaagaatatttaaagtacctttaaaaattgaggcataatagatgtacatagttttgggggcacatgtgataatttaatacatgcctataatttg

SEQ ID NO: 161822 - DNA, 577 bp, Homo sapiens
taaatacatgaacattagccagcaggaagcttcaggacagtagagcgatgaaatgtttttccgatagttacgcttccttccaataaaaagttcctcaaaagtataatagcaagggtcaaatgtttatataaagaactatttagagctttttaatgtaaaatattgaacccacatctgagggattcatttcctttcaaaaactgttagggttttcaatrtacttttgtctctcatcattcaacatatacaacccagactagcctttgtgagcccaaataaatgtgccagttgcaatttgcagcctaatatcagaagaagtagtgctagcaacagaccctctgaaaaagcctggcagtattgatacaagtaaaatgctatttttcaccttatctccacacttctctgaattaaaaacattatttctggaaagtctaacaagtagtaacaaatcctcaagttcattttcagcaaatgattcccaaacaaggtgttgacagatttctatcattatgattccagagattctagtctcatgaaagtgttcatggagattgatatatatttatgtatatatatt

SEQ ID NO: 161823 - DNA, 561 bp, Homo sapiens
gttcattaattcactaagtccttctatctccaagtgctaagttgtattgttgattttattctaygtatgagaaaattgaggcacagagtttaattaacatgtccccaaaccacttaggtagggacgctctggctttggagcccatgatgttaacctctctgcttactgctgatcaatatgcagttctcctttcacaatccaaagctgcatttacttagcaaagtagtggcaaggtcttttatactgtaatccccaggatgatggtgtaattcttcagagtaatcctttcttagaattaagtgctatccacctccacacgttgctcactatatgctatgtactttttaaatggtggcttaagcttttaaaagcatttttctgcagcacaagaattacaagatatgagtcaaaagaacaacatagctccaggatgcttgtgtctaataatctagggttcttagactttacgtttggccttattgtaactttttcaattcagtgagaaacaaccatcaatttttcataataatatgttcaaatcaatagaaatgagaacttttt

SEQ ID NO: 161824 - DNA, 561 bp, Homo sapiens
gttcattaattcactaagtccttctatctccaagtgctaagttgtattgttgattttattctacgtatgagaaaattgaggcacagagtttaattaacatgtccccaaaccacttaggtagggacrctctggctttggagcccatgatgttaacctctctgcttactgctgatcaatatgcagttctcctttcacaatccaaagctgcatttacttagcaaagtagtggcaaggtcttttatactgtaatccccaggatgatggtgtaattcttcagagtaatcctttcttagaattaagtgctatccacctccacacgttgctcactatatgctatgtactttttaaatggtggcttaagcttttaaaagcatttttctgcagcacaagaattacaagatatgagtcaaaagaacaacatagctccaggatgcttgtgtctaataatctagggttcttagactttacgtttggccttattgtaactttttcaattcagtgagaaacaaccatcaatttttcataataatatgttcaaatcaatagaaatgagaacttttt

SEQ ID NO: 161825 - DNA, 457 bp, Homo sapiens
tcaggatctcattctttttttatggctgaacagtactccattgtgtatatgtaccacattttctttatccattcatttgttgatggacatttatgttgcttccaaattttgcctattgtaaacagtgctgaaacaaacatggcagtgcagatatctctatgatataccaatttcctttcttttgaatatttacccagcagtgcgattgctggattgtatggaagctctcttttcagttttttgagaaacctcyaaactgttctccatagttgctgtactaatttacattcccatcaacagtatacaagggttcccttttctccaaatacttgccagcatttgttattactattcttttggatataagccattttaactggattgagatgatattccactgtagttttgatttgcatttctctgatgatcaatgatgttgaacactttttcatattct

SEQ ID NO: 161826 - DNA, 306 bp, Homo sapiens
gacgctcaaggcttggtataaacttatggtggaaaaaatctgcctgagatctgggaggcaggactgactctaaaagagactttgagagggtgtcaaactcagcccttagcctagctactgtaaatagccaagtgttatgaactgaatgcttgtgtcccctcagaatgtacatgttcaaactctaatccttaacatgctggtattaggaggtgayccttttggaaggtaattaggtcatgagggtggagcccccatgatgagactagtgccccaataagaagagacaggagagagcctggtctcctt

SEQ ID NO: 161827 - DNA, 306 bp, Homo sapiens
gacgctcaaggcttggtataaacttatggtggaaaaaatctgcctgagatctgggaggcaggactgactctaaaagagactttgagagggtgtcaaactcagcccttagcctagctactgtaaatagccaagtgttatgaactgaatgcttgtgtcccctcagaatgtacatgttcaaactctaatccttaacatgctggtattaggaggtgacscttttggaaggtaattaggtcatgagggtggagcccccatgatgagactagtgccccaataagaagagacaggagagagcctggtctcctt

SEQ ID NO: 161828 - DNA, 233 bp, Homo sapiens
ccatttgtttaaaaaatgtgaaggaagagaatacatatatgtgtaggcttctatattgtgggttgctagttgcctattcaatatcccttcttcctttattctttaccamcagaacccctgtatttgggacttgcaaagtatccagcttaaaacctacttaaaaccttaaaacctactttaggcttaagcctaaaaggctaaacaattagatatgatgtgggattttcaagaaa

SEQ ID NO: 161829 - DNA, 520 bp, Homo sapiens
atgttaacctatattaggatctgactatgaaataatattgtctaaaggacaatgctccttcctttcctttttatttctgtttattatttttttctaatttggaaagattttacattatataatacatacagatacctctactcaggaaagtaattaaatggttgtataaaaaggaactattaagtatatctaatccttgctaaaatgaattaaggcagccttaggaatctattgtatctcctatgtcacccatcttcatcagccctagttttgttgtttgtgccattgctaccaattctaatcctacaaatagcaggagtttaagccttattccactggtcatggattctcaaatagttttcagcagggtctttcctgacatccctactttagtctcatcattcagctagtatttattgtgtgaagatgaaaaagagaaagckgggggaaggcaaggaagaagagaaagaggatgaagagtgtgatgaagagaaaagaaggagaaagagggaagaagcca

SEQ ID NO: 161830 - DNA, 535 bp, Homo sapiens
taagactgatagaatctgatgaccactgatctccatggcctgcagaatctggtctaacaggagcatggtggtgttgtggagtatgtggactttacagccaggccagctgagttcagtctgattctgccttacaaagctctgtgattctgagcaaaagatgtgcaaatgggtctaatgccacttaacctttttttttttttttttgcaaagatgaaatgatgccatgtatgtaaatctaatatggtccctggcacataagtaattcatacaccttatcgccyttcagctggtgttcaaggcctcttataatttgattcacatgcatctttctaggcaaatgaaccactctcctgtactcatctctttcctccaaaaacagagggcttttttgatgtaggcatttctgcttataaatttccgtcttggtactacttttgctgtatctcacagattttggtatgttgtgtttctatttccattggtttcaagaaatttttaaatatccttcttaatttcttcattaacccataggtca

SEQ ID NO: 161831 - DNA, 450 bp, Homo sapiens
acttgcttttaggatctcattatagacatttcagagttgctttgagtagccattaaaacagctccctgtgaagcgttatgtcattttattaagtgccttttcatctcagtagaaaatctctccttcatttgatatcctttccacacactgtgactcaacagggaacctaacaccaggatggggctgtttcagttcctcccatctcacctccccattccacgcgtccttagcgggggccttgggaactgtgacaagacatgttaggsgaaacaggattgttcttccaccctgcagattgcccacagccaggatccttagtcctgggacccgacagacagagggagaagggaagcatgaacacctcccggagctcactgcctcatctctcggctttaaataatcctactgacccttctcataagatcattctatttgaaatgcagggaagac

SEQ ID NO: 161832 - DNA, 319 bp, Homo sapiens
gaattccttcttctaaaagaagagccggttctaagggcgttttcagcagccattagcatctggtgtacccscccgtgtcattggcaaagctggtctcatgaaaaccatttcctaaaaaagggcagcgaaagggtcgcattcttgtgcgaactgatctgtcaagatgggggtacaagaactgtagaaagaggaaatgatttcggtgaggactgaattgtgccagcgtctctaggcttcctctaggctcttgtggaacctccggcaggctcccatcatcggctcccatcaccggcctcttccaaaaccatcccttacgcta

SEQ ID NO: 161833 - DNA, 319 bp, Homo sapiens
gaattccttcttctaaaagaagagccggttctaagggcgttttcagcagccattagcatctggtgtacccgcccgtgtcattggcaaagctggtctcatgaaaaccatttcctaaaaaagggcagcgaaagggtcgcattcttgtgcgaactgatctgtcaakatgggggtacaagaactgtagaaagaggaaatgatttcggtgaggactgaattgtgccagcgtctctaggcttcctctaggctcttgtggaacctccggcaggctcccatcatcggctcccatcaccggcctcttccaaaaccatcccttacgcta

SEQ ID NO: 161834 - DNA, 516 bp, Homo sapiens
tgtccaatccctcaaccagacttaacctcttgaagaagaaaaaggaaatgtcaactaggccaccaaaaaagagtagatagataggggaggaaggaaaccattccagactgaagaaacatatatgctaaggtccagaaagasaaactatggagttttagagaaactaaatgaagaccactatagtaaccctaatctttggtaccgtgccttgtctgtggtgaatctataaaagaatgaatataaaaccaatggattaatgaaaacaaatacatctggatgtgactgatcatatgtccaggcataatatatgtagtgatagaaattcatatgtgtgcatacatgatttttccattgctatattttgtacccttcagtattcactggcaggccttttatcacaagcttgggcaagttatgccaaatgactaatttaataggtgtgaatgcttattgtttgacaaattcttgttcctttgccaacaaggagccacaggtgttgagtgctaagaaggggac

SEQ ID NO: 161835 - DNA, 473 bp, Homo sapiens
caaacaccaacagtttgacttcctctttatcattttggatgtcctttatttctttctcttgtctgattgctctggctaggacttccagtactgtgttgaagaggagtggtgagagtgggcatccttgttttgttccggttctcagagggaatgctttcaaattttccctgttcaatattatgttggctgtgggtttgtcatagatggctttgattacattgagatatgtcccttgtttgctgattttgctgacagttttaatcataaaggtatactggatttcattgcacgctttttttgcatctaatgaaatgatcatgtgatttttgtttttaattctgtttatgtggtgtctcacatttattgacttctgtatgttaaacaatctctatatccctagtatgaaacccacttartcatggtggattatcttttgggtatgtcattggatttggttagctagtattttgtta

SEQ ID NO: 161836 - DNA, 532 bp, Homo sapiens
gcacttaagagtgaaaggattttaaatttgttagtcagtccttcataatcccaaaggttcacctgtgtgtttcagtgcctcagtgttgtccttatgagtattaactatcactctgctgtagattgtgtgaacatcctggtgtgggcagtgttttagataatcaagtgcttgataatagcaaacttgctctatgtagaagcactgaggaagtaaatggtrcttgtggtctgaccaagttaatgtgcataccatttctcatattccaccagggagtctcttaggcaagggaaagatattgtgagtagattttaacaaaccgttttcctatcttttagacttctgtataatttggtgaatgtgcttgtcttgttttccttgaaaaatgcctatcagcccatttgtatatatacatgcacagaatggttggaggctgatcctgcaactcaatagatgctgcattctgatttttgttctaatttgactttggggaaataacttttgtctccacttcccatctctgaaatcacatcta

SEQ ID NO: 161837 - DNA, 559 bp, Homo sapiens
tgtgttaacttattgccattgtaaacacatttcaaagaaaaccaatcttcccctttgttctgaattaaatttttttctccaaaagtatacctgcaatttataaacctaactttcctgctgaaggagaatggatgggattctccagcagcttattgcaggtggctaactatatgaattgtggtggaggaggctgctgcctrctgattttctaaagacttaggcactttatctccttattcagctgcattcttgggttgcgggtgagggaaaaatggaaggaataaaatattaaattaagttgtaaatgtaattttctaccatcaatctagctttcttgactgtttagaaaaatctagataatctaggtctcaaacacctagtgaacacaaatatccaattgttttgattatacaggtggaatatatcaccttaatggtgctaatggcaactatagtgatagaaattaacaattccattggacatgtaattggaaaaagtattgtactacaagttaccccaagaaacatactttttcaaagaatatatactagtaagtcac

SEQ ID NO: 161838 - DNA, 434 bp, Homo sapiens
ataaacttccagtgtaaacaggaaggctcttgggcctcttacaaattttagaaacaaatgatactcattgccttgcactcaataattttgactttgagacaagagttggaatggttaataaaaagtkccaattctaagttcaatatgaagtttatttgccgttaccataatatttatttgtgtgcgcagcagtttattgaaagaatgtgaaggacacatgctatttagtatatttaatactaactaaaatcctataattcgaaagaacttgactattatataatcagtaccaaagaagagaactaggaactccaatcctttatgctgattgatactgtgtagcagaaatattaaacaattaccccaaagttagaataatgtaattttcattataatttagaaaaaggggctagtgaaacttttttagcaaaact

SEQ ID NO: 161839 - DNA, 653 bp, Homo sapiens
tcaaactgaaacatcatctctgtctgagttgtgagcctgaagcctttgaaccggaattaacaccatcagctctcctgagtctccagcttgctaactgcagatcttggatcttgggtcttgtcaacctccataattacatgaaccagttccttataataagtcaatgtctgtctgtctctctctcttgctctgtctctccatatgcgtatacatcctattggttcgatatctgactaacacccctaaggcacgctttcttcaagatgctttataaaacaaacttaaacaacctcaaacttaaactaaaatgtgccttatttaagaagcagttgtattagttactcagatcaaaataaaatgccacagttctgggatcaataaaattctggaggcrtaagtgttcagctgtgaagtagaaccacagtagatttttcagaattttagagagcgccattcaatttcaagtcatccactttattttacccacagcaggagactcaaattattttaaataaagtgtcataaccgaagcaacttccttaatattctgataaacctcagctttgggaatgtgcagagcgacaaatggaataaaccctggcacttgcttacttgtggtacaaatcctaagaatttaacctctctactatact

SEQ ID NO: 161840 - DNA, 506 bp, Homo sapiens
ttgttgcaagaatatagtcctccttaaccgctctatagacaacaactttaacattataaacattaagttttccatttgagatatcctttcaaggcctgcatttttgtgaaactactgatgtcagatggtttgatggaccccacaagaagctgactcatcaaggaatgagctttccacatcctgatgattttcascccccggacctcgaccaatgaatgaccccaattatccagcccctccctttccatggtccagctcagaactcgttggtgttggatttgagagtctccttccatctccttacttggcatcctgcaatgattacactctttctctgatgcaatccctgctatctcagtgaattggtccattactgtgcagcaggcatatgaacctattagtccttgatatggtttggctgtgtccccacccaaatctcatattgaattccccatgttgtagggagggacctggtgggaggtaacggaatcatgggggcaggtctt

SEQ ID NO: 161841 - DNA, 669 bp, Homo sapiens
aggggtatagtttcattcttctgcatatggatatctgattttccaagcactatttatttatttattttaataggttttgggggaacagatggtgtttggttacatggataagtgtttttagtagtgatttctgagattttggtgcacccatcacctgatcagtgtacaccgtacccaatgtgtagtcttttatccctagttcccctcccatccttccctaccaagtctccaagactcattttatcattctcatgcctttacatcctcatagtttagctcccacttataagtgagaatatacaatgtttggttttgcattcctgagttacttcacttagaataatgatctctaattccatccaggttgctgtgaatgccattatttcattccttttcatggctgagtagmattccatggtgtatatgtatatatatatatgccatttttgtatctagtcattgattgatgggcattttggctggttccatatttttgcaattgcaaattttgctgctataaacatgcatgtacaagtgtatttttcacataatgacttcatttcctcagagtggatacccagtaacaggattgctggatcaaatgatagatccactattagttctttaaggaatctccatacagtttttcttagtggttgtagtagttta

SEQ ID NO: 161842 - DNA, 323 bp, Homo sapiens
tatgcttcattctttttctttcttttttcttttgtctcttctgcctatgtacacaaatagactgtcttcaagctcacttattctttattctgcttgatcaattctgctgttaagagactgatgcatttttcagtatgtcaattcatttttcaactctagaatggctactttactwcttttaattatttcaaccactttgttaaatttatccgatagtattacaaattttctctgtgttattatggatgtctttgagtttccttaaaacaggtattttgagttctcttctgaacggtcacatatatctatttccctaggattgg

SEQ ID NO: 161843 - DNA, 645 bp, Homo sapiens
atgaacttgaaaatggtggaagacactatggataaggtaaaaatccaggggctgtcagctgacctttaacttcacagacttaatagatatcacctgcaaggtaaaagccattttagaggagagaacatcacacaaaaagcttaggaggggagaggtaaaaagagggaggtggaacgacatgccagkcaaatgaaggaactgtttgaaaaaacagtatgatcaatgggataaaatactggctctgaagtgacgggagacaagcacagagagttctccattagatttgccattgttgaggctattagtgcctcttaacggagcttgctcagaatagtggtagaagccactgtcccagaggaaatgtgggtgagcaagtggaggtggtctatattgactgaggtttatgttggcatgaggacgtgagcagagaaatggagcagtagtgatggggcagtgcatccattttaacaggaaaaataaagaatatataggcatgaaagttgggaaaaattcaccaaagggggtgaagaagttattttctaattgctttcattttttcagtgaaacaggaacaaagtcagtagctgaaaaagagaaagggccataggtggtggtaatttgaagagttgtatatagtataaatag

SEQ ID NO: 161844 - DNA, 360 bp, Homo sapiens
agctctcaattatacttttaattttatttattgagttattcagttcgaaggtttctgttgcattcttttttatggcatctatatctttgctgaattttttattccaattgtgaattattttccttatttctttgttccgtccattggtgttcttgtgtatcttgcagagtttctttaagattattagtttcaattgyttttcaagtattctaatcattatcttttatttggggtctgttactggataattattgtgtttctttggaggtgtcatatttcctttctttttcatgttcttttgtccctacattaatatcacctcaactggtctaatagtcatttctttgaattttattaaat

SEQ ID NO: 161845 - DNA, 360 bp, Homo sapiens
agctctcaattatacttttaattttatttattgagttattcagttcgaaggtttctgttgcattcttttttatggcatctatatctttgctgaattttttattccaattgtgaattattttccttatttctttgttccgtccattggtgttcttgtgtatcttgcagagtttctttaagattattagtttcaattgcttttcaagtattctaatcattatcttttatttggggtctgttactggataattattgtgtttctttggaggtgtcatatttcctttctttttcatgttcttttgtccctacattaatatcaccwcaactggtctaatagtcatttctttgaattttattaaat

SEQ ID NO: 161846 - DNA, 552 bp, Homo sapiens
taggacccaagctcatcattatgggatcggaacagaaagctgttgtgagtatmcccatcctccatatacacacaagttcataaaaaatgacactgaataataatataacaactttgaggaagctaaaaaagcctttattactattcaaatctatgtagccatgctgtttttattactctcacactgttttgtacagtgccttagattggtttccctggaaacatgctctgagactgggcattgcctgtagagggtttattggagaaaactcttgggagattacacctgcaaggaaaaggagaaggcagggggaagctgaaccacaataaggctgcagctgagggctctgaatcctacaggaagctgtggatctgagacagtcttgcagagattttcccagtcagaatatggcctgggcctttgtatttctgcttcagccagtctcaggctgttggctgtcccctgggcaaggcagatccctgccaccaggactgtgcatctttgagctgtccacagtggacatgccagcagcctggacatggatgtgtcagc

SEQ ID NO: 161847 - DNA, 415 bp, Homo sapiens
gaattcataattagtaatcactaatcttccaaaaaagaaaagccctgaacctgatggtatcaccaatgagttctaccaagccttaaaaagaaagcaaattcttacatagcccataacatgaatggaccttgagaacattatgatgaatgaaataagcctatcacaaaaatataaatgctgcatgattctagttataagaggcacttaaggtagtcaaaatcatagagacagaaagtaaaatggagattgctgggggctgggaagtggggaactgaggagtcattgtcgagtgagcacattgtttagagtttccatttttgcaactcttttcaagagttctggaagtggatgatgtaaaggcttttgtaattatttaaaggcyttttgatgatgtaaaattactaccttaactatt

SEQ ID NO: 161848 - DNA, 527 bp, Homo sapiens
caaaaaacttgttgaggttcatttggagctcagaatatctgactctaaatctggattcttctcacctccccacattacctttggctgagtttctgcctgctatgctgtccaaagcatgcacagaacccaattacattttataaataagaatgtaaaatctgagaaagatgattagtctctggaacttctatatacatgaaaactttattatttccccacgttacatttccatgctcctaaraatccagtctctgaaagttatgttactgtagactgactcagcagtcacaggcagcctctgaagtgacggtttttcgtttggaatgttgtttccagctgtattaatgggcactttctgcactattgatcagtttagctgggtggttggtttaatctggtcatcaacacagccatagaaaccaggtgcatcacttttttttagtttactgttgttgaacaagcaaagccataagcttacatagggtgttaccaacccctggattagctgcacacagatgtggattatt

SEQ ID NO: 161849 - DNA, 527 bp, Homo sapiens
caaaaaacttgttgaggttcatttggagctcagaatatctgactctaaatctggattcttctcacctccccacattacctttggctgagtttctgcctgctatgctgtccaaagcatgcacagaacccaattacattttataaataagaatgtaaaatctgagaaagatgattagtctctggaacttctatatacatgaaaactttattatttccccacgttacatttccatgctcctaagaatccagtctctgaaagttatgttactgtaractgactcagcagtcacaggcagcctctgaagtgacggtttttcgtttggaatgttgtttccagctgtattaatgggcactttctgcactattgatcagtttagctgggtggttggtttaatctggtcatcaacacagccatagaaaccaggtgcatcacttttttttagtttactgttgttgaacaagcaaagccataagcttacatagggtgttaccaacccctggattagctgcacacagatgtggattatt

SEQ ID NO: 161850 - DNA, 606 bp, Homo sapiens
tactgtcaacagttcataactgaagaaaaacaccacatttcttctgcaagttttgccaagtggagtcatttacagaaaaaaaaggcatgtattagtccattctcatgttgctatgaaaaaatacccaagactgtttaacttataaaggaaagaggtttgtttaattgactcacagttctgcattgttggggaggcctcaagaaacttacaataatggctgaaggcaaaggagaagcgggccccttctttatagggtggcaggacagagtgggtgaaagcagggaaaatgccagacacttataaaaccatcagatcctgtaagactcactcactatcatgagaacagcatgggggaaaccaccccccatgatctaattacctccacctggtcctgctcttgacatgtggagattataattcaagatgagattttgggtggggacacagccaaaccatatcaaggcatgacmgccagtatcccattgtccatataaaaaggtttgagagaaaaagaaagtatttgagggcatagcagaaactttgagtagtaagcaatgttttcttctccttgatgggtgtgggaaaaacagaggcaccatccatttg

SEQ ID NO: 161851 - DNA, 583 bp, Homo sapiens
atttttaatgtttccaacacaaataataaaagtttgaggtatctgatgtgctaattaccccaatttaatcatcacatatttaaacattacatacatttacaaaaatatkaccatgtattccataaatatgtacaatcactgcatgccaaataaagggaaaaaagaaattttgagagagaccaaattcacataacttttattgtattataatattataattgctttattttattactagttatgtttattaatctctttctttgcctgatttataaattaaattttatcataggtatgcatgtatgaaagaaacagtatagctaggattcagaaccatgcttgctttcaggcattcactgggggtcttggaaggtacatctcttggatcagtggggactgtgaaaggaagaaacaaactgtctgtcccactatactcttaaccacagagaacacttctgataccagatgtgtggagtgttttccccactcaccaaacaattccctagggataccaactgagcatcctataattcagttccattttggtattttctacccggagatagcatcagatcccacaggt

SEQ ID NO: 161852 - DNA, 577 bp, Homo sapiens
actgcgactcatgaaaccacctttgcaaagatgatggcagtgaaragaagcctagtgtgtcccactccacctggcttccgcctcacaggctggctggccttgctcatttgcggacataggccaagctaattatgggaggaatgtagtttaccatttcacttgcaaacaaggatggccatagtccctccctaaaacagatccctccttggtcagggacggaaactaatggaaggccacaagatcaggattatgggaggggcctgggctctgctaaacgtgggcatagtttctagaatcccttactgctcaggagtcatgtggccagagctcacaagatttgtgacttctccggttgctcctatagataacatcactgttgcaggacctaagatttgtctttggagatgtttttcagactttttcattctggcaaccaatggaccccatgcacatccatgactcacgactcaaccagtcctgtggcccccacccagaggccgactcagcccacgagaccctctctccaccccctcacgactgcatccctaaacagtcagcagcacccagttcctagccc

SEQ ID NO: 161853 - DNA, 528 bp, Homo sapiens
ctcagaatcccaaggattcaagggtttgattggaagcatttctgggataaatgtgtgtgtatgtgatttcatgcttccagattcttacaataatcacgtggtatacagatgcagaccaagtatcaaatatcttaaaaacttaggcttgttcatagtagcattattcacaataactaaaacatggaagcaatccagtgtccacgtgttgggtaaatgcatgagtgaaatacagtctacgcatacaatgaattttttttaaacacagggtctcaccctgttgcccagttgctggagtgaagggtgtcatcatggctcactgaagccttgacttcctgggctcaaccaaccctcccagctcaacctgaatatctgggacatgaggtgtgtaccaccatgcccagctaatttttttgctttttgtagagttggcatcttactatgttgcccaggatggtcttaaactcctgagttcaagggactctcycacttcagcttcccaaagtactgaaattacaggcatgagtcacc

SEQ ID NO: 161854 - DNA, 489 bp, Homo sapiens
attgaatatttttaaggtgtacagtgtgatgatttgatatgcatatacattgtktagtgattaccacaaacaagttaattaaaacacccatcacaaattccaatgccattctttacaaaaatagaaaacatattctaaaatttgcatggaaccacagaagaccctatatagccaaagcaattttgagaaagaagaataaagctggagccatcacatttcctgatttcaaagcatatcatgaagctacagtattcaaaacagtgtggcactggcataaaaacagatgcacagaccaacggaatagaatagagtctagaaacaaactcaggtgtatgctgtccattaatctttgacaagggcaccaagaacacacagtgtagaaaagaaagtctcttcaacaaacagtgtgacaggaactggatgtccacatgcagaagaaaaaaactggactcttatcttgcatcatacacaaaaatccactggaaatgg

SEQ ID NO: 161855 - DNA, 492 bp, Homo sapiens
tgcacattatttctattcttattactttgcaatatataacaaaataattacacaactcaccattttgcatagaatcagtgggagccctgagtttgttttcctgcaactagatggtctcatctgggggtgatgggagacagcgacagatcatcaggcattagatccttgtaaggagcacataacctagatccctcacatgtgccgtttaccatagggttcgcactcccatgagaatctaaggctgccgctgatcggacaggaggaggagctcaggaggtcatgtgagcsatggggaggggctgtaaatacagaggatgcccccactcacctcctgctctgcagcccagttcctcacaacaataaaggctgaggaaatgtaagtgtcaatcaagcaatgaaaaaaaaaaggaattctacatctcaagaataaagacgttttagatgaatagaatgaccacaaatgctcacttgaagacataatcttctaaatga

SEQ ID NO: 161856 - DNA, 492 bp, Homo sapiens
tgcacattatttctattcttattactttgcaatatataacaaaataattacacaactcaccattttgcatagaatcagtgggagccctgagtttgttttcctgcaactagatggtctcatctgggggtgatgggagacagcgacagatcatcaggcattagatccttgtaaggagcacataacctagatccctcacatgtgccgtttaccatagggttcgcactcccatgagaatctaaggctgccgctgatcggacaggaggaggagctcaggaggtcatgtgagccatggggaggggctgtaaatacagaggatgcccccactcacctcctgctctgcagcccagttcctcacaacaataaaggctgaggaaawgtaagtgtcaatcaagcaatgaaaaaaaaaaggaattctacatctcaagaataaagacgttttagatgaatagaatgaccacaaatgctcacttgaagacataatcttctaaatga

SEQ ID NO: 161857 - DNA, 453 bp, Homo sapiens
gaattcctctttcaagccgaacctgactgtctccacctgtggaggggacacggcccgcaccccctgtctcaggtgtccggggctgctgattccggatcctaagactaacggcgaaaacagcatctgcttctctggcaccccgagccataaaaccacccaaatatcttaagtaacagcattttagaaactaatgaaataaagtgagacttgagaaaaaaaaaaaaaaagctkatatgagctctgagagaacttgctctatcactattagcacagtgccacctaatggaaacgtgacataaatgtacagccttgaaaatttagaagattacaaaacaccctatcaagttatacagaaggcacttttcctccacgtgtgtaccctttttcaagaaaataatgatctgtatgttttaaatgattataattttagttggacaaaaatatgcacaggcc

SEQ ID NO: 161858 - DNA, 450 bp, Homo sapiens
gaattcctctttcaagccgaacctgactgtctccacctgtggaggggacacggcccgcaccccctgtctcaggtgtccggggctgctgattccggatcctaagactaacggcgaaaacagcatctgcttctctggcaccccgagccataaaaccacccaaatatcttaagtaacagcattttagaaactaatgaaataaagtgagacttgagaaaaaaaaaaaaaaagctgatatgagctctgagagaacttgctctatcactattagcacagtgccacctaatggaaacgtgacataaatgtacagccttgaaaatttagaagattacaaaacaccctatcaagttatasagaaggcacttttcctccacgtgtgtaccctttttcaagaaaataatgatctgtatgttttaaatgattataattttagttggacaaaaatatgcacag

SEQ ID NO: 161859 - DNA, 444 bp, Homo sapiens
tgactgtctccacctgtggaggggacacggcccgcaccccctgtctcaggtgtccggggctgctgattccggatcctaagactaacggcgaaaacagcatctgcttctctggcaccccgagccataaaaccacccaaatatcttaagtaacagcattttagaaactaatgaaataaagtgagacttgagaaaaaaaaaaaaaaagctgatatgagctctgagagaacttgctctatcactattagcacagtgccacctaatggaaacgtgacataaatgtacagccttgaaaatttagaagattacaaaacaccctatcaagttatacagaaggcacttttcctccacrtgtgtaccctttttcaagaaaataatgatctgtatgttttaaatgattataattttagttggacaaaaatatgcacaggccagacattcacagaa

SEQ ID NO: 161860 - DNA, 480 bp, Homo sapiens
tgatttcaaatctttaacacccagaagtggggttgtatggatctcttacttaatgtttttgttccatttaacatggatgtccctctaactcttctaaagaatgtcacagatgatctcagttgggctagagtttttcttgacttcatactttgcattcttctggccttaatgcattttggaaaggagccagttgtttagaaatgtgctcctgcttttctaacctatgttcaaaaaagagtaagcttcccctgcacccatggctgtgaatctgtgggactgtcgacagtcaggcactgaggatgaagaactggaagattctgcacatcccaggccattcttgatgttagcttttcccatatgtgatgctgtagcgtgggaaggaacgggaaatttctcmtacttgcttccagttacaggagaattccttttcagcagctcaacaaaggcctgctactgatggcctcctggatgtgacgtcac

SEQ ID NO: 161861 - DNA, 439 bp, Homo sapiens
gaattccttttcagcagctcaacaaaggcctgctactgatggcctcctggatgtgacgtcacgctctggggctgcaagtccagtttaattcatcagctttttccagctgtataataggacataaaacagacgtaggaggamtgtggaagaaagaggtacagtccctgctcttttctgatttatacccattgtaccttgccccaatgtggtcttcggttggtaattcaacatctcttgtatatattatctttgtatataccttaatatattaataatttaaagccccagtataattccctgcataaagtaagactgaactaagtcccctttttataatggtgaacctgattatgcactgttaacagacagtgcagtaattttcagagatcatagcacaaccacactcttctgagctggtttctctgtctacagcagccat

SEQ ID NO: 161862 - DNA, 613 bp, Homo sapiens
gttcttaaactacatttgctaagggataaatactatacaaaatcactaggaaccaatctctgcacataatcccacatgtattgtaaagtaagttttactcattttaggaactaaggaaaataaatttaaaagaatctgtttggggaggaaggctatgtaaggacaatgacaactgataagggatgcaaaaccaagagaatcattcatgaagaatgactataccatgcctggttctgatgctcgtttaaaatattaaaaaagttttttaaaagccatgttattaagctgatttgaaaatatctgtacaaattcatgatgctttctatttccaatatagatatttcctagctctgtctattgaaaaggcctaggagcaatgataacccattagcaataatcactccgagcaccctractgtgatgtctaagaacccttcctcaataaaagaaaagaggcatccttgaagggaaggctgattccaggactggaacagaaaatatgtataccatgagcctggacatcttgttatgccagaaagcaaataatcaaagacaaatggaatcatatcatggaacagaggaggtaacccaaaggagtctcttcattggccat

SEQ ID NO: 161863 - DNA, 601 bp, Homo sapiens
gaataattaggcctattaatccttctttcccctctaacccctggtcaccactggttttcttactgtctccayggttttgacttttacagaatgtcacatagctgcaatcatacagtgtgtagctgtcccagattggcttttctcttagcgatacggatttcagtttctctgtctttttgtggcttgatagcttatttctttagtgctgaataatattttactgactacatattggagacctttctctcatgcctcatgcccttccctctggaaccttcatatttgtcatgtgactgttacttcagctctgtaacataaatctaacttcatctctctttctaagcctggatgcccagaccctgtgccaatttgtaagatttagttttgaagatcacaagtattattagtactgtgctaagtactcataggattaaatgaattaatacatgtacaacatttaaaaacagtttctgacacttagtttaagcactaaataattagcaactactactatcaccaccccaactactactatttatgcatgggagtaaattttgagattggcttttttctcccactcagcgtaacgtccacgatgtcc

SEQ ID NO: 161864 - DNA, 601 bp, Homo sapiens
gaataattaggcctattaatccttctttcccctctaacccctggtcaccactggttttcttactgtctccatggttttgacttttacagaatgtcacatagctgcaatcatacagtgtgtagctgtcccagattggcttttctcttagcgatacggatttcagtttctctgtctttttgtggcttgatagcttatttctttagtgctgaataatattttactgactacatattggagacctttctctcatgcctcatgcccttccctctggaaccttcatatttgtcatgtgactgttacttcagctctgtaacataaatctaacttcatctctctttctaagcctggatgcccagaccctgtgccaatttgtaagatttagttttgaagatcacaagtattattagtactgtgctaagtactcataggattaaatgaattaatacatgtacaacatttaaaaacagtttctgrcacttagtttaagcactaaataattagcaactactactatcaccaccccaactactactatttatgcatgggagtaaattttgagattggcttttttctcccactcagcgtaacgtccacgatgtcc

SEQ ID NO: 161865 - DNA, 567 bp, Homo sapiens
catgaaaatatttgtgccccataagcatgctcactaaacagtgacctcagcagaggaagattttaatactcaagtggataggatgatgcaatttcttgatgccactcagcctccatccctagacaccctggttattacctaatggggtcatgaacaaagtagtcatggtggcaggaattgaggttatgcatgggctcagcaatgtggacttctgttcacyaaggttgacctgactacagccactgctgagtgcccactctaccagcagcagagaagaacactgagcctccaatatggcaacattcccaggattgatcagctagcacctggtggcctgttgattacattgaactgtttccatcacagaagcggtaacattttgttcttactgaaatagacactttgggtatagatttgacgactctatctatactcaatgcttctaccaaggctatcgtctgtggtattgaagaatgggcattatctgtcatcatatcatagtattccaaacaacattgcttctgatcaaagaactcacttcacgtgaaatgaagtgcaacagtgagg

SEQ ID NO: 161866 - DNA, 617 bp, Homo sapiens
aattaatatgctggaggcaaattcttccctggtccttcctcataatggctcctaatgatgcagagattgtgaaaacaagtgctatttgttaattatgataatgtactttggatctgaatttgctacctttcgtcatggtaagacaccaactacttaagaaataaagatgttttagttcattcttagataggaagaacattttaagagatgtactttctttgaaaaatggatcgaattcatgtggcacactagatgtgttcatgaagaaacttatgacataaaaaatatgctaagggctctaataataaaagtggacagcataaaataacatatcggaaatgtaagcagagagatggaaattcctaaagaaccaaaaagaaacgctggagatttaaaacgctgtaacagaaatgaagaatgccacttgatgggcttattagttgatatggttcaggaaaaaaaaattgctgagcttgaaaatatctctatggaaatctccaaaactgaaaaacaacgacaacaaaaacatagattatccaagaactgtgagacaaccacaaaacgaaactktatttaatgcaaaaaccagaagaagaagaaagaaaaagaaatctttg

SEQ ID NO: 161867 - DNA, 595 bp, Homo sapiens
gcagttccaacaggcctaatcaccattcaccaccaaagacaggctatgctatagtattttccacatctatcactgaggctaccgctctgccccctccactacctctcagcaagctgaactcattgmcttaactcgggctctcactcttgcaaagggattacttgtcaatatttatactgattctaaatatgccttccatatcctgcaccaccatgctgttatatgggcagaaagaggtttcctcactatgcaagggtcctccatcattaatgcctctttaataaaaactcttttcaaggtcgctttacttccaaaggaagctggagtcattcaccgcaagggccatcaaaaggcatcagatcccatagctccgggcaatgcttatgctgataaggtagctaaaaaagcagctagggttccaacttctatccctcacggcaatttttctcctcatctggtcactcccacctactcccccactgaaacttccacctatcaatctcttcccaaacaaggcaaatggttcttggaccaaggaaaatatctccttccagcctcacaggcccattctattctgtcatcatttcataacctc

SEQ ID NO: 161868 - DNA, 595 bp, Homo sapiens
gcagttccaacaggcctaatcaccattcaccaccaaagacaggctatgctatagtattttccacatctatcactgaggctaccgctctgccccctccactacctctcagcaagctgaactcattgacttaactcgggctctcactcttgcaaagggattacttgtcaatatttatactgattctaaatatgccttccatatcctgcaccaccatgckgttatatgggcagaaagaggtttcctcactatgcaagggtcctccatcattaatgcctctttaataaaaactcttttcaaggtcgctttacttccaaaggaagctggagtcattcaccgcaagggccatcaaaaggcatcagatcccatagctccgggcaatgcttatgctgataaggtagctaaaaaagcagctagggttccaacttctatccctcacggcaatttttctcctcatctggtcactcccacctactcccccactgaaacttccacctatcaatctcttcccaaacaaggcaaatggttcttggaccaaggaaaatatctccttccagcctcacaggcccattctattctgtcatcatttcataacctc

SEQ ID NO: 161869 - DNA, 546 bp, Homo sapiens
ttcctggtggtggtataacttattgcaaatcagacaagacagtccagcccaaaaaagaaatcatggaatgagttatgtactggctgcaatggggaagtcagaaatgtggagttaagagacaaaaaaaaaaaaaaaaagaaagaaactacctaatttactggttaccaagaaaagtatagaagaagaaaacacagaagttttgtaaaaataacaatgtgctttgcgagagatgcgttctraatttaaaagtgtaattgaaaatttaagtataattttacaatgacaatgaatagcaagactgtcataatgtatttacagaccagataatcaaaatatataagtgtaattttaccaacaataccaactgtatgcatacatcaattttttctattttcaaaactgaaacaatgttaatgaactagttttactcagagcagtctgacatcaaatacatggtctcttttccaacactacatttccaattctctgacactgcctgggtgacctacaattcaattcaattctgacattatctatttgaaatta

SEQ ID NO: 161870 - DNA, 540 bp, Homo sapiens
gaaacccaaggttttctgattcgttttcctggtggtggtataacttattgcaaatcagacaagacagtccagcccaaaaaagaaatcatggaatgagttatgtactggctgcaatggggaagtcagaaatgtggagttaagagacaaaaaaaaaaaaaaaaagaaagaaactacctaatttactggttaccaagaaaagtatagaagaagaaaacacagaagttttgtaaaaataacaatgtgctttgcgagagatgcgttctaaatttaaaagtgtaattgaaaatttaagtataattttacaatgacaatgaatagcaagactgtcataatgtatttacagaccagataatcaaaatatataagtgtaattttaccaacaataccaactgtatgcatacatcaattttttctattttcaaaactgaaacaatgttaatgaactagttttactcaragcagtctgacatcaaatacatggtctcttttccaacactacatttccaattctctgacactgcctgggtgacctacaattca

SEQ ID NO: 161871 - DNA, 566 bp, Homo sapiens
agaagcagtggtttatttgaaagaatgataaacttagtgctgggagaactgagaaccaattctagctttgatacttactagcyatgtcacctaaactctcaaaacttcagtttccccttctgtaaaatgggattcctgctgcaagatttagaggtgggtaggaggattcaataattagtgcatctgaaaaaaacttggaaagctgataaacaatatttatgtaaaaagtttgatttgagcaagattaagaaacatataataactatggcttatattacccccaaaaagctatatttaaaaaaatttggagatggggtttcacaatgataggtcattgtgatgttaatgtatttcctgtaataaatgcctgacactcacttatagtgttttttcccagctaagtttgggaaacatgttgcccaggctgaactcaaacttctgggctccagggatcctcctacctcagcccactcagtagctgggactacaggcatgctccactgcaccaggccaaagactgctatctaaatattgtacttgcacattgatttttttcatacatccct

SEQ ID NO: 161872 - DNA, 557 bp, Homo sapiens
gtttactttagtagctctttgttgacctagtcatttaatggccctggatcctgtttcttccccatcagctgtttcactctcttccttccactttcacatgtcttagcgcaatgcaacttcataagtaactctaccttgttatgaargttcttatgtttagttaatagtcttcaaagatatgtttataaattagtgttttcactttttaaaattatttctattttaagtcaactgctagccaaaaagtttttcgatgagtttagtttgaataattctgtaaagtagctactcgatatttattattgattgctttaaaaatgtttcccatcacctatatacattacaatagacaggcatttattcaacataaaaaagaaactttctgacttcaagatcattagattataaaatgttgacccactcaggcagattatcttctttccttgatgaccttaaaagtcagagaggcattgaaatgatttcaacaatttaaatgctattctgatacacttacaataaatatgtgcaagtttcagcccaggatatagctataattt

SEQ ID NO: 161873 - DNA, 557 bp, Homo sapiens
gtttactttagtagctctttgttgacctagtcatttaatggccctggatcctgtttcttccccatcagctgtttcactctcttccttccactttcacatgtcttagcgcaatgcaacttcataagtaactctaccttgttatgaaggttcttatgtttagttaatagtcttcaaagatatgtttataaattagtgttttcactttttaaaattatttctattttaagtcaactgctagccaaaaagtttttcgatgagtttagtttgaataattctgtaaagtagctactcgatatttattattgattgctttaaaaatgtttcccatcacctatatacattacaatagacaggcatttattcaacataaaaaagaaactttctgacttcaagatcattagattataaaatgttgacccactcargcagattatcttctttccttgatgaccttaaaagtcagagaggcattgaaatgatttcaacaatttaaatgctattctgatacacttacaataaatatgtgcaagtttcagcccaggatatagctataattt

SEQ ID NO: 161874 - DNA, 425 bp, Homo sapiens
ctgcctccttaaacttaatttcgtttttactttttggttcattttcctgcttatgaatcaaaaatcttccctatacattttaccatggcattttacttaaattccttagatgcttgggactgagacacttagttcttatcacaaccatgccccccaaaagtgtttaatwgctaaatgctaaaatttaagagtgaatattattcttcaacattatatacatgagtgtaattactatgctgaaatataatgaaactctcattatgcccaaatcagctaccaaaaataaaatcattttgcaggatgatgcaggtgcttgtagtgaattatagaaataagcttgaagtttcacagactcttcctctataaaaaataattcatcttttcaattgtcagcactattcagaagaagcccaaatgttatttat

SEQ ID NO: 161875 - DNA, 596 bp, Homo sapiens
cctctctttaatgaatacttcagaagacaaagtatgaaacattgtaaatacagaagtcacacatgtatgcaaaataggatttgatactttcaaatgacagttgtcagttagataaatccccatatctttttttcatttttaagtattcattgcacaaatcgaacaccaattatttgcccagaactgaggatatagcagttaagaaaaaaaaaaaatcctccttcatgaaaactgcatcgtgatggtgggagagacaaaaaatatragaaatactcaaaacaattatgtgttagaaagtgcccaggaaaaattatataagtgaagcaagacagtgagttgagggtgggaaattttagacaaatggataaaagaaagcttcattgagaaggggataaaatcagccctccttatctgcaagttctgcagctgcagattcaaccaactggggaaatacaaaaatacaaataaaaacaatattgtattagataagtactctagaaatgacttagagtatatggaaatatgtgtgtaggttatacgcaaatactacatgttttatatcagggacttgagcatccttaaattttggtatgcac

SEQ ID NO: 161876 - DNA, 370 bp, Homo sapiens
catccagtgtattcagaggcaacttgtttatataaatgctattactcacagcatttattatctcagctgccatcaggtacaatgggcacttcatctccaaaaaytttcccttccacgtcacgatgatgcaggattttttgctccttagctcagcgaggtctgggttcttgtctcacaacaaggaagaaggaggcacatagacactcaaatagtgagtgcagtagaatttactaagtgaaaaggaaagctctcagctaaaggaggggtcctgaaagcaggttgttggttgccccctcacaactgaatacaagggcttttatatatccaacctgaaggggctgagttccttatttgtatagggtgtgaattc

SEQ ID NO: 161877 - DNA, 550 bp, Homo sapiens
cagcttttcaaaggaaacaaaattcggacatcttttacaccacagctgaaatttgaggacataaggctaagtgacataaggtagtcacaaaaagacaaatactgtatgattctacttatgtgagacacttagagtagtcaaaatcatagatacagaatgtagaatggcagcttccaggggctaaagggaggataaaatggaaattattgtttaatgagtatagagtttcagttttgcaagaagaaaagagttatggagatacagtgtattgatgatttcacaacaatgctgatgtatgctatactattgaaatataagcttaaacatgaccaaaatgataaagttgcattgtatgtatcttaccgcaatgaaaacactggaaaaaaaaaactttgaatagacttctgyggagcagcatgaattaaaagcacagatataattctcaatcttttcctaaagcctaaagtagtcttgaagttcatctatattctttgttccatgattaccacagctttttaatttaatttttctaagaatgacatgtaggatt

SEQ ID NO: 161878 - DNA, 347 bp, Homo sapiens
aggaatttaagggtacagtgagctgtgatcccatcactgcactctggcctgggcaacagaacaagatcctgtttcttaaaatacgtaaatacrtaaaaatagtgcatgcttctgaattcttgatcatacagacgatctcaggagtcattgaatattacctttcttctttcatcaaattataaaagcagtagtttagacctttttaaagcctccaaagtctttttcatttgagagcgctgagacatggatgcgtctgcacaactgaggtaaaagtcaacttaacatcgttctttaaaccattagaaaaccttataaaaatcttccagtcaacttagatccttaagctt

SEQ ID NO: 161879 - DNA, 488 bp, Homo sapiens
tttaaaatgatcgcaaaaactgtttttaaaattttttttttttttttgagccaaagtctcgctctgtcactctggctggagtggagtgttggaatcccagctcattgcaacctctgcctcccagggttcaagtgattctcctgactcagcctcctgagtagctgagatgacaggcacatgccaccatgcccagacaatttttgtatttttagtagaggtggggtttcaccatgttggtcaggctggtctcgaactcctgaccttgtgatctgaccrcctcggcctcccaaagtgttgagattacaggtgtgagccaccgtgcccagcctaaaaaaagtttaactgtatctatctaaaagataaatatctagatcttttcaatggagagagtaactccatcagcccaattaagacagcagagccagaatcctatctagttatatagaagtctgtgaaacaaaaataatatttgtctgccagtgcctcac

SEQ ID NO: 161880 - DNA, 577 bp, Homo sapiens
attgactttatttcatagtcctctgtggtaagtgacagaaaatatcaagctctctaagcttcaaatttctcatctctaaaataaactataacataaaccattgattttgaaataatgtttgcataatgcttactatgtgtctgcaaatgttttaactcctttgcaatcaataacttgctttatcctcaatgacttcattttacagatagaaaaaccgaggtttagagaggtcaatgcattctctaggccaggtgcagtgtctaacgcttgtaatctcagtattttgggaggccgaggcaagtggatcgcttcagcccaggattttgaaaccaacctgggcagcatgatggaatcctgttgcttataaaaaatgcaaaaatttagctgggtatggtggtgcccacctgtagtcctaggtaytcagaaggctgagtgggaagttccactgagccagggaagctgaggctgtagtgagccacgatcctgccactgcacactctagcctgagcaagagagtgagaacctgtcttggaaaaaaaaaaaaatgtctctaaagttccaatttacttaaaattga

SEQ ID NO: 161881 - DNA, 569 bp, Homo sapiens
gtttatccatacaataatatattaattcgtcataaaaagggacacaaatcttgatattgatacatggatggaccttaaaactatgaggctaagtgaaagaaagcagacacaaaaagtcacatattgtataattccatttctataaaatatccagtataggcagatccatagagacaggaagtatgttagtggttgtcagaggcttgagggcagaggcatacaggaaatgactgctaatgagtaggggattctttttgggataataaaatgttctagaattagatggaaatgatggttgtaaayatgctaaaaaccactaaactgtacattttaaaaaggtgaaatttacagttcataaagtatatttcaatttttaaaaaatcaaaaaatgaattatgttgcatgtgaattacattttaatcaattttttgtgtgaaaagatatttttcttaacctcttgtgttaacaggcaaaacttatactttctttcatggcatttattaaaaactgaatttaatatttacctagatcattgttttcttaatgccatctcccccaaattcttcaac

SEQ ID NO: 161882 - DNA, 569 bp, Homo sapiens
gtttatccatacaataatatattaattcgtcataaaaagggacacaaatcttgatattgatacatggatggaccttaaaactatgaggctaagtgaaagaaagcagacacaaaaagtcacatattgtataattccatttctataaaatatccagtataggcagatccatagagacaggaagtatgttagtggttgtcagaggcttgagggcagaggcatacaggaaatgactgctaatgagtaggggattctttttgggataataaaatgttctagaattagatggaaatgatggttgtaaacatgctaaaaaccactaaactgtacattttaaaaaggtgaaatttacagttcataaagtatatttcaattttwaaaaaatcaaaaaatgaattatgttgcatgtgaattacattttaatcaattttttgtgtgaaaagatatttttcttaacctcttgtgttaacaggcaaaacttatactttctttcatggcatttattaaaaactgaatttaatatttacctagatcattgttttcttaatgccatctcccccaaattcttcaac

SEQ ID NO: 161883 - DNA, 569 bp, Homo sapiens
gtttatccatacaataatatattaattcgtcataaaaagggacacaaatcttgatattgatacatggatggaccttaaaactatgaggctaagtgaaagaaagcagacacaaaaagtcacatattgtataattccatttctataaaatatccagtataggcagatccatagagacaggaagtatgttagtggttgtcagaggcttgagggcagaggcatacaggaaatgactgctaatgagtaggggattctttttgggataataaaatgttctagaattagatggaaatgatggttgtaaacatgctaaaaaccactaaactgtacattttaaaaaggtgaaatttacagttcataaagtatatttcaatttttaaaaaatcaaaaaatgaattatgttgcatgtgaattacattttaatcaattttttgtgtgaaaagatatttktcttaacctcttgtgttaacaggcaaaacttatactttctttcatggcatttattaaaaactgaatttaatatttacctagatcattgttttcttaatgccatctcccccaaattcttcaac

SEQ ID NO: 161884 - DNA, 644 bp, Homo sapiens
ttgttaatttagggcactatccaaggactttttgtcatggcataagagtatttagctaatttacatcatacctctactgcttcattcatttcccccatgtcattatttttttttttattttcagcccctttattgcttaccattgtaacttyaaggaatatatttagatgattttttccatcaactatgtaaagtatcccttaactctccaccacataaaatgagtatatcagccttctgttttacccctttagttttcttcccctttgaagtctactttatctgatgttaatatagttactcctgtaaaaaatatatttgcacagtatatattttccatccttttacttccaacctatatcattatatttgaagtgagtttcctgtaaacaacatatagttgggtcatgtttttaaatccactctgcactcttttgtgtacttagaccatttatatttgagataattactgacgtgttggagcttaagtgtgccattttatttttctctgttgtttttcatccattttcttttttctgcctttctatgggttatgtgagtagtttttagagtctcattttacctacagtgtttttgagtatatctgttttatagttttttagtggttactctaggtattatat

SEQ ID NO: 161885 - DNA, 642 bp, Homo sapiens
atattaaattttcccactatcatttgttgaaaaaattgttctttcttcattgaatggttttgccacccttgccaaaaatcatttgaccttatacatgagggtattttttctaggctttctattgtattgmatttttctgtatatctgtctttatgacagtatcacactgttttgattactgtagctttgcagtaagttttgaaattagaaagtgtaagtcctacagctttattcttcttttccaatattttttggctatttggggtccttgagattccataggaattctaggaagaggttttgtatttccacaaaacagtcattagagtttaatagggattgcattgaatctgtagatcactttgtgtagtattgatataattaacaaaaacttccaaattagaaagaagtgaaattatccctattcacagattatgtaacattgtatatagaaaatcctgaagattctactaaaaaaactattaaaattgatcattgaatttagcaacatggcagaataaaatcaatacacaaaaatcaattgcatctatatacactaacaatgaataatctgaaagaaaattatataaacaatttcttttacaatagcatcagaaagaataaaatgcttaagaattaaca

SEQ ID NO: 161886 - DNA, 642 bp, Homo sapiens
atattaaattttcccactatcatttgttgaaaaaattgttctttcttcattgaatggttttgccacccttgccaaaaatcatttgaccttatacatgagggtattttttctaggctttctattgtattgcatttttctgtatatctgtctttatgacagtatcacactgttttgattactgtagctttgcagtaagttttgaaattagaaagtgtaagtcctacagctttattcttcttttccaatattttttggctatttggggtccttgagattccataggaattctaggaagaggttttgtatttccacaaaacagtcattagagtttaatagggattgcattgaatctgtagatcactttgtgtagtattgatataattaacaaaaacttccaaattagaaagaagtgaaattatccctattcacagattatgtaacattgtatatagaaaatcctgaagattctactaaaaaaactattaaaattgatcaytgaatttagcaacatggcagaataaaatcaatacacaaaaatcaattgcatctatatacactaacaatgaataatctgaaagaaaattatataaacaatttcttttacaatagcatcagaaagaataaaatgcttaagaattaaca

SEQ ID NO: 161887 - DNA, 563 bp, Homo sapiens
tgtattttcatcatctaaaactatttagacaaatacctgtaatcttagatcagtatactccctcagataacctaatattgtcttacctgacgatgtgttagaatgtcaaattctgacagaagagacaattttgaagtaaagatagacccatattgtacgatgtattttgaaaataatttctcaaacatcttaaatgacacttaatcacttgagaaagttataaaatagtaataataattatttcataagatttttaagaggcttaaataaggaaaaacatattatggaatatagcataagctcaataaatttattttcttttttttctccttaaatttgttaatcatcttactggactaattaaacccsttattccaatctttgatttcaccctagttatttgtttgtttgttgttttgcttattagtgagttggacagccattgttctggtgcctttttcactaactagacttgtaacctactgtaaatctcttcacttctttgcaactgaatgtattcatttgaaacataagcacactgaagcttttaatccctgggatcc

SEQ ID NO: 161888 - DNA, 496 bp, Homo sapiens
acccaatgattgatttattgatagagtgctcctctttggctatacttggaattttttttttttacttgagttgacctaaagcatattttagtattcttccaatgcctaggatacgtgaactgtttcagaatatgtacataggcacttataagggacaactgaatagcattattccaaatgtcctcaaattaaaatgatttatcaagttccatgttaaatttctcattacattaagcttttatttagcaaaaatgtatatcaaatcatcaggttactacaaaaatccacttaaaataatytagttttatgtgataaaataaatataaatctgtgattaacgcgtgtatttacccaacattaattaactgaaagttaatagattgttcttactaaacatcaattgatacaaataaacattcagaattatatcaatagcattgtcagttataagtttagagaaagacatagtaaaatcaatctcaggggaagctggtga

SEQ ID NO: 161889 - DNA, 540 bp, Homo sapiens
agaaacagaaatggtgtttcatttgctgacttctgatgtgtgttgtttataatacataaaaagggtaagaagagaagtttcacaacttcatgaaatttcatacgtggaatttcacagccgggagaatgatgagggaagcagatggcataatcatttattaaaaaatcagccactttctcatatatttgatagctctttcttcattctttgggatttgcattttaaatgattaaggatacagtaagacagcatgaaacctcattaacaaagatatatcttccggcctctacctgaagggaaagtggtgatttttccacctcatagccctcagtttaaatacctgctgatttgttttatctctacttacttcaaagtatttcagccacattaatgcagcttttaactatagaaaatcaagcwtttagctatatcctaaaacaaaccagaacatttttcatttatgaagtttctattgtctatggcaatatgtaatatatgaggttaaccaagtgcttcccttgatgctaacataagagagga

SEQ ID NO: 161890 - DNA, 574 bp, Homo sapiens
tctgctttaaactaccctgtctgtggtattttcttatggtagccatagcaaacgaatacactatactttattctttagaaactacacattgtttaaaactgcctgaaaagctgatttcatgttattaagagcttggcttmaaaattactagatgtataaaggttgtcataagcaaacagaaatcacataggtgctaaggatatttatcacaaagaacagccttcctagttacaaattgtaatgctttataattcgtttctcatttaaaaattataatctctaaatttagagtagctgacatgcctttgttaccagtagaatgtttccaggttcctggcatcttgaacaaagaattggacaaaatgcacaaaacaaaccaaggaaaacaaaagcaagtatttattgaaaaacaaagtacactccacagtgtgggaacatgcccaagcatgggggcttaagagccctggttacaaacaaattttctggggtttcaatactctagaggtttcccattggttacttactgtatgctctatgtaaatgaggagaatgaagtgaagttatggagtcattt

SEQ ID NO: 161891 - DNA, 590 bp, Homo sapiens
gagaggatgaatgtgaaattacagagtgtaaatggcgtaaatggagaggataaaatgaagttacaaagccattcacattcttgtcattgctaaagtgctttcattttatttagttctaggaagtcagcgtgggtcggccttatgttccctgcctccaggcctatttcctctctcatcttgatcatgggtatccataggtgaaatagtaaccaaatttaggtttgtcatggaattgatgaactaattttaaagattttgtaaaaattttgttctcacttaatgaccartatgagtagaacctcatatttcttattaaagcaataatttttattgagaggcatcaaaaacttaattgatgaactgatatttgaaattactccatgaagtaggtattaacctattttttctgtggctctgttttaatatatgcattgtattagtctgttctcacattgctaaaaagaaaacctgagattgagtaatttataaagaaaagaggtttaattggctcacagttccacaggctgtaaaggaagcatgatgctgacatctgcttggcttctggggaggcctcaggaaacttacaatca

SEQ ID NO: 161892 - DNA, 522 bp, Homo sapiens
tcgagaccagcctagtcaacatggtgtaatgctatctctactaaaaatacaaaaaaattagccgggagtggtggtgtagcagtcccagctactctagaggctgaggcacgagaattgcttaagcccaggaggcagatgttgcagtgaaccaagattgcaccactgcattccagcctgggcaacaaagcaagactcwgtctcaataaataaataaactgtgtgatatggtttggctgtgtcccctcccaaatctcatcttgaattgtaacacctacaatacccatgtgttgtgggaggaacctggtgagaggtaatttaatcatggggggcaggtctttcccatgctgtgcttgtgacagtgaataagtctcatgagatctgatggttttaaaaatgggagtttccctgcacaagctctctctctttgcccgccaccatccacgtaagatgtgactcgctcctccttgccttccaccatgattgtgtggcctccccagccatgtagaattgtatgttcattaa

SEQ ID NO: 161893 - DNA, 508 bp, Homo sapiens
acaccaactgacctcaaatgttgtagttggaggtggcatcatgttcagagcagtcacaggtaacagctgacaaatggacccaaacagagctgaagcacaaaatttggccctgaatgtaacttttcttccatatgagtaacagtagcccaagaccagcatttcaacaccggtctagttattcagtctcatgctatagtgggaaaggaacataatgttggccagcaaagtcagtctggtcaccagactgttctgaaaccaggggcctgagacagcyacatgagggagtttcagatcatctcaggacatctggtaaatgccacacagggagttagtggtggcaaagctctccaaaagaaaaaaaaaaaaaataggaaccataacttgtaagattcacagtggaagttcaggacacactgttgtgatagtaatgccagtgccaacaagatttaaagcttcaaggaagacatttttggtccctgagcagtgagcatatggagctctgacaaga

SEQ ID NO: 161894 - DNA, 508 bp, Homo sapiens
acaccaactgacctcaaatgttgtagttggaggtggcatcatgttcagagcagtcacaggtaacagctgacaaatggacccaaacagagctgaagcacaaaatttggccctgaatgtaacttttcttccatatgagtaacagtagcccaagaccagcatttcaacaccggtctagttattcagtctcatgctatagtgggaaaggaacataatgttggccagcaaagtcagtctggtcaccagactgttctgaaaccaggggcctgagacagccacatgagggagtttcagatcatctcaggacatctggtaaatgccacacagggagttagtggtggcaaagctctccaaaagaaaaaaaaaaaaaataggaaccataacttgtaagattcacagtggaagttcaggacacacygttgtgatagtaatgccagtgccaacaagatttaaagcttcaaggaagacatttttggtccctgagcagtgagcatatggagctctgacaaga

SEQ ID NO: 161895 - DNA, 312 bp, Homo sapiens
  misc_feature (1)...(312): n = A,T,C or G
nnnnnnnnnnnnnnntttgatgcataggcattccattccgtttgattccagtccattcaagaaagttccattccagtccattgctttccagtccattccattccactctagtctattccactccattcctttccattccattccatactattccattccattcctttgcattccgtttscaatctattcgagtccattgcattccagtccaatccattcgattacatttcttttgattccctgccagtcgattgcattgcatactacaccattccaaaggagtccattccattctatctcaacactttccat

SEQ ID NO: 161896 - DNA, 312 bp, Homo sapiens
  misc_feature (1)...(312): n = A,T,C or G
nnnnnnnnnnnnnnntttgatgcataggcattccattccgtttgattccagtccattcaagaaagttccattccagtccattgctttccagtccattccattccactctagtctattccactccattcctttccattccattccatactattccattccattcctttgcattccgtttccaatctattcgartccattgcattccagtccaatccattcgattacatttcttttgattccctgccagtcgattgcattgcatactacaccattccaaaggagtccattccattctatctcaacactttccat

SEQ ID NO: 161897 - DNA, 437 bp, Homo sapiens
attccagtccaatccattcgattacatttcttttgattccctgccagtcgattgcattgcatactasaccattccaaaggagtccattccattctatctcaacactttccattccactctgttcgagtccattccattccagtccatttaattcaagggcattccattccattccattccatttcatattattccattccattcaattccattccagatgattccattccattctataccattgctctctgttccattccattccatctgtctccattcctttcgtttcgattcctttccattccattccattccatttgatcctattttattaaattgcattctattcgagtgatttccattcgagtcctttccattcgattccattccattctattccattcctttggattccattccattccgttccgttcaca

SEQ ID NO: 161898 - DNA, 312 bp, Homo sapiens
  misc_feature (1)...(312): n = A,T,C or G
nnnnnnnnnnnnnnntttgatgcataggcattccattccgtttgattccagtccattcaagaaagttccattccagtccattgctttccagtccattccattccactctagtctattccactccattcctttccattccattccatactattccattccattcctttgcattccgtttccaatctattcgagtccattgcattccagtccaatccattcgattacatttcttttgattccctgccagtcgattgcattgcatactacaccattccaaakgagtccattccattctatctcaacactttccat

SEQ ID NO: 161899 - DNA, 437 bp, Homo sapiens
attccagtccaatccattcgattacatttcttttgattccctgccagtcgattgcattgcatactacaccattccaaaggagtccattccattctatytcaacactttccattccactctgttcgagtccattccattccagtccatttaattcaagggcattccattccattccattccatttcatattattccattccattcaattccattccagatgattccattccattctataccattgctctctgttccattccattccatctgtctccattcctttcgtttcgattcctttccattccattccattccatttgatcctattttattaaattgcattctattcgagtgatttccattcgagtcctttccattcgattccattccattctattccattcctttggattccattccattccgttccgttcaca

SEQ ID NO: 161900 - DNA, 593 bp, Homo sapiens
acaccattccaaaggagtccattccattctatctcaacactttccattccactctgttcgagtccattccattccagtccatttaattcaagggcattccattccattccattccatttcatattattccattccattcaattccattycagatgattccattccattctataccattgctctctgttccattccattccatctgtctccattcctttcgtttcgattcctttccattccattccattccatttgatcctattttattaaattgcattctattcgagtgatttccattcgagtcctttccattcgattccattccattctattccattcctttggattccattccattccgttccgttcacatcaattccttgcgattccattacattcgatttcttcccattcgattccattccttttgactccatttcattcgattccattccattccattaatttccattccattcgagacctttccattgcagtcctttcccttcgagtccattccgttcgattcccttccattcgattccattccattggagtccgtaccagtcgagtccattctattccagtccatt

SEQ ID NO: 161901 - DNA, 575 bp, Homo sapiens
atttgggtatatgccaggcagaggatgcctatgtgatcagcctccaataaaagctgggtgtcgtctctaatgagctccccttgttggcaacgttttacacattgccataatttgttcctgggggaattaagtgaaggactccattgggagaagactctggaagtttgcatctggtttcctccagatttttttcctgcatctttttgcttttcttgtttactttgtatcctttcactgtcataaattatagctacaagtccaatgatattctgagtcctatgagacctcccaatattagaggtccataaatcatcaaatctggaagtggtcttaaagatctcccaacacatatagtatattagttaggtttctccagagaaagaggttcaataggctatagatagatggayacatagataaaaagagatttattgtgagggattggctgctacagttatggaggttgggaagtcccacaatcttctgtttataacttattagcacaggaaagccagtggcgtattttcattccaaacctgacatcctgagaaccaggagagctgtctttgtctgtt

SEQ ID NO: 161902 - DNA, 632 bp, Homo sapiens
tgagggattggctgctacagttatggaggttgggaagtcccacaatcttctgtttataacttattagcacaggaaagccagtggygtattttcattccaaacctgacatcctgagaaccaggagagctgtctttgtctgtttagtaactatacaggaatacttgagtcagagtaatttataaggaaaaagaggcttatttggcttatggttctacagtctgtacaagaagcatggtgacaacatctgctggtttctggtgaggtcttcaggctgcttccactcatgggagaaagcaaaggggaactggtgtgcgctgagagcctatggcaagtgaggaaatgaaagagagaggggaggtgccagactatttttaacaatcaggtctttttggaattaacagagtaagaattcactcattcctgcctcagggagggtattaatctattcataaggaatctgcctccaacacccagatacctaatgctccctaatgggagcattaggctcacctgtcagatttgatcttaatggagatcaaatttcaacataaagtttagaggggtcaaacatccctactataccaggagccagtggtgtaagtcctgatctgagtccacagacccaagaacca

SEQ ID NO: 161903 - DNA, 632 bp, Homo sapiens
tgagggattggctgctacagttatggaggttgggaagtcccacaatcttctgtttataacttattagcacaggaaagccagtggcgtattttcattccaaacctgacatcctgagaaccaggagagctgtctttgtctgtttagtaactatacaggaatacttgagtcagagtaatttataaggaaaaagaggcttatttggcttatggttctacagtctgtacaagaagcatggtgacaacatctgctggtttctggtgaggtcttcaggctgcttccactcatgggagaaagcaaaggggaactggtgtgcgctgagagcctatggcaagtgaggaaatgaaagagagaggggaggtgccagactatttttaacaatcaggtcttttkggaattaacagagtaagaattcactcattcctgcctcagggagggtattaatctattcataaggaatctgcctccaacacccagatacctaatgctccctaatgggagcattaggctcacctgtcagatttgatcttaatggagatcaaatttcaacataaagtttagaggggtcaaacatccctactataccaggagccagtggtgtaagtcctgatctgagtccacagacccaagaacca

SEQ ID NO: 161904 - DNA, 437 bp, Homo sapiens
attccagtccaatccattcgattacatttcttttgattccctgccagtcgattgcattgcatactacaccattccaaaggagtccattccattctatctcaacactttccattccactctgttcgagtccattccattccagtccatttaattcaagggcattccattccattccattccatttcatattattccattccattcaattccattccagatgattccattccattctataccattgctctctgttccattccattccatctgtctccattcctttcgwttcgattcctttccattccattccattccatttgatcctattttattaaattgcattctattcgagtgatttccattcgagtcctttccattcgattccattccattctattccattcctttggattccattccattccgttccgttcaca

SEQ ID NO: 161905 - DNA, 437 bp, Homo sapiens
attccagtccaatccattcgattacatttcttttgattccctgccagtcgattgcattgcatactacaccattccaaaggagtccattccattctatctcaacactttccattccactctgttcgagtccattccattccagtccatttaattcaagggcattccattccattccattccatttcatattattccattccattcaattccattccagatgattccattccattctataccattgctctctgttccattccattccatctgtctccattcctttcgtttcgattcctttccattccattccattmcatttgatcctattttattaaattgcattctattcgagtgatttccattcgagtcctttccattcgattccattccattctattccattcctttggattccattccattccgttccgttcaca

SEQ ID NO: 161906 - DNA, 593 bp, Homo sapiens
acaccattccaaaggagtccattccattctatctcaacactttccattccactctgttcgagtccattccattccagtccatttaattcaagggcattccattccattccattccatttcatattattccattccattcaattccattccagatgattccattccattctataccattgctctctgttccattccattccatctgtctccattcctttcgtttcgattcctttccattccattccattccatttgatcctattttattaaattgcattctattcgagtgatttccattcgagtcctttccattcgattccattccattctattccattcctttggattccattccattccgttccgttcacatcmattccttgcgattccattacattcgatttcttcccattcgattccattccttttgactccatttcattcgattccattccattccattaatttccattccattcgagacctttccattgcagtcctttcccttcgagtccattccgttcgattcccttccattcgattccattccattggagtccgtaccagtcgagtccattctattccagtccatt

SEQ ID NO: 161907 - DNA, 593 bp, Homo sapiens
acaccattccaaaggagtccattccattctatctcaacactttccattccactctgttcgagtccattccattccagtccatttaattcaagggcattccattccattccattccatttcatattattccattccattcaattccattccagatgattccattccattctataccattgctctctgttccattccattccatctgtctccattcctttcgtttcgattcctttccattccattccattccatttgatcctattttattaaattgcattctattcgagtgatttccattcgagtcctttccattcgattccattccattctattccattcctttggattccattccattccgttccgttcacatcaattccttgcgattccattacattcgatttcttsccattcgattccattccttttgactccatttcattcgattccattccattccattaatttccattccattcgagacctttccattgcagtcctttcccttcgagtccattccgttcgattcccttccattcgattccattccattggagtccgtaccagtcgagtccattctattccagtccatt

SEQ ID NO: 161908 - DNA, 634 bp, Homo sapiens
atgacagttggtatcatgcttgagactttgtttaattttatattctctactttaccagcagtgtgacattggcctcagtgtaagtaatgcctcaatgcactgatttgcttacatataacatgaggataataatattgtacaaggttgttataagaattacatgagtatatatatttaaaaaaataaaaataaataaaaaataaaaaactctgctgggcacagtagttcatgcctgtaatcccagcactttgggaggcctaggcgggcagatttcttgagttcaagagttcgagaacagtgtaggaaacatggtgaaacctcttctctacaaaaaagtacaaaacttagctcagtgtgctagtatgcacctgtagtcccagctactcaaaaggctgaggttagagaattctatragcccagaaggttaagacgctgtgagccctgatcaggccactacactctagcctgggcaacagagtgagaccctatctcaaaaaaacaaaacaaaacaaagaaaaaatctttatagaaatgcctggacatatagtaaattttatttactgccatatgtatcctttcttcttcccaaagtctttgataggtgataaaatttggcagagcctagaacatttat

SEQ ID NO: 161909 - DNA, 631 bp, Homo sapiens
tggagtgctctataaatatcaattatatcatgctttttgatggtatagagatctacttcattgctctttttttcacttgttgagaatgggttgttgaagtttccaattctaatttgactatttctccaacaggtactatcaatctttgtttcacataytctgcagtgctacattcagcaaatacgcatgatgtaatagtgctacatttccttatagattgacactttcaccattatatattgctcctctctgcctggcactttttctggctctgaaatccactttatttgatatttatatagccactattgctttattttgattatttttttctgatgtatcttttcctatctttttactttcagcaggctgatattgtcaaagtgtcatacactgtgtaatgacattttgatcaataacagaccacatacatgctagtggtcccataagattatactataatgcagctgaaaaatttttattccctagagacatcatagtcatcataatgtcctagtataatgattactcatgtatttatagtgatgctggtgtaaacaaacctactgcacttcaaatataaaagtatagcatgtacaattatgtacagtctgtaatacttcataatgat

SEQ ID NO: 161910 - DNA, 631 bp, Homo sapiens
tggagtgctctataaatatcaattatatcatgctttttgatggtatagagatctacttcattgctctttttttcacttgttgagaatgggttgttgaagtttccaattctaatttgactatttctccaacaggtactatcaatctttgtttcacatattctgcagtgctacattcagcaaatacgcatgatgtaatagtgctacatttccttatagattgacactttcaccattatatattgctcctctctgcctggcactttttctggctctgaaatccacttwatttgatatttatatagccactattgctttattttgattatttttttctgatgtatcttttcctatctttttactttcagcaggctgatattgtcaaagtgtcatacactgtgtaatgacattttgatcaataacagaccacatacatgctagtggtcccataagattatactataatgcagctgaaaaatttttattccctagagacatcatagtcatcataatgtcctagtataatgattactcatgtatttatagtgatgctggtgtaaacaaacctactgcacttcaaatataaaagtatagcatgtacaattatgtacagtctgtaatacttcataatgat

SEQ ID NO: 161911 - DNA, 569 bp, Homo sapiens
tgcttttgattttatagagtcataggtggaagagacttgccttgtctcagatgagactttggacttggactttgagttattactggaatgatttaaaacattgaaatactgttggaagggcatgattatgttttgaaatgtgagaaaatgagatttggtaaggaccagggcagaatgatatgttttggctctgtgtcccaacccaaatatcaccttgaattgcaatccccataatccgcttgtgtcaaggtcagaaccaggtgaggtagtagaatcatgggggcagttttccccatgctgttcttgtgacaatgagtgagtcttataagatctgatgattttataagcttctggcattttccctgctggyactcattctctctcctgccactctgtgaagagatgccttccaccatggttgtaagtttcctgaggcctccccagctatgcagaactgggagtaaattaaaccccttttctttataaattacccagtatttcttcatagcagcatgagaacagactaatacagttggtcacaaaaaaagaatgagtggaggagaaaaata

SEQ ID NO: 161912 - DNA, 601 bp, Homo sapiens
tttcattcaattctcctgtcttcagtgrctccccatccatcttaggcaatggcattcattttttcaacttcagctgctttgctactgtcattgtattgcataaaacattaagttttattcccaagtttttggattttcttctctccttctatatctgaactgttcagtgctgcccccaaaaaagtatgtatctacaaatatgttacctgtacaaatttatagtctccagtagtactagatctttatcaaattctaaatctccatccttcttttatttccactcaactcttaccattcatctcaagaataacttcaaaccttccttattctctttccacctcttacctaacttttacttttaggagatgaccttaactcctttctcagagttgtcaaatgtcatcatactgaaactccagaaatttctcacaatctcaatggcaaatccaacttctgcacccagaataactgtaagaactgtaatattactgtaaaatagctcatttgatgtatactctatgttcggtatttcacgtcactagtcattttcttttttgttgttgttgttgccagaactttctattggtcaatgtgtctatca

SEQ ID NO: 161913 - DNA, 443 bp, Homo sapiens
gtgcctgtagtcccagctactcgggaggctgaggcaggagaatggcgtgaacccgggaggcggagcttgcagggagcmgagatcgcaccactgcactccagcctgagcgacagagcgagactctgtctcaaaaaaaaaaaaaaaaaaaaaaaaagagagagagagaagtaaaaagaaaaaaaagaaaaactaagagtctttggttaaaaaaacttgaataagtgaaagattttcatagtttgatataagataaataaaaaaaagttctccaaatcaagaaaaagctacatacaaatcgaaataaaaacatacacatacacagatgcatatatttaaaagagtggccaaagaagtaagaacgtgaggaaaaaaatgtaatgagaaatgtagccctaaaataagaattacaggaaggaaacaaccaatttttaaggacattaaaa

SEQ ID NO: 161914 - DNA, 439 bp, Homo sapiens
gtgcctgtagtcccagctactcgggaggctgaggcaggagaatggcgtgaacccgggaggcggagcttgcagggagccgagatcgcaccactgcactccagcctgagcgacagagcgagactctgtctcaaaaaaaaaaaaaaaaaaaaaaaragagagagagagaagtaaaaagaaaaaaaagaaaaactaagagtctttggttaaaaaaacttgaataagtgaaagattttcatagtttgatataagataaataaaaaaaagttctccaaatcaagaaaaagctacatacaaatcgaaataaaaacatacacatacacagatgcatatatttaaaagagtggccaaagaagtaagaacgtgaggaaaaaaatgtaatgagaaatgtagccctaaaataagaattacaggaaggaaacaaccaatttttaaggacatt

SEQ ID NO: 161915 - DNA, 613 bp, Homo sapiens
taagaacaatcaaaaatgagatcttgatgcccttcccaaggtaatgagtgagttctcactatattagttcacatgagagttggtcatttataagaagcctggcacctttctctttccttctcttttttcatctcttgccatgtcatacgctcactccctttccccattgcaccacgattggaagcttcttgaagtcctcaccagaagcacgtgctggtaccatgattcttgyatgacctgaagaaccatgagccaaataaacctcaattatttacaaattacccagtctcagctgttcatagggcaacaggattccagcagttccttaagtagatccaaagtcatccctagaggaaaggagactgcttgctcattgatacagcaagtgcctctttgttttcctttgttggaaaagacagtaatcttatccaatccagacctcagatgtatgacctaatttatccttaattacctcctaaagtcaaacatcatacagtatgatgtttctgtataaatcatttttattttattatggaactcttctggataccgccttccatattagcatgtttgtctgacattacataagaaattagggtcatttcagatttca

SEQ ID NO: 161916 - DNA, 571 bp, Homo sapiens
gccagggctcagggacacagcccatcagattccagaggacacagaacacagcctgaacacagtgggagaaccttccagaggccacagagccagctcgcccctgcaactgtctccccaccacacatagccttccttccttgctgccgttcccccatgctggggttcagacaatttcccagcaagctggcatgacttgaagcatgtggaggcaccattaaataactttgccagggctacgggtgcaaactgggctgtcccaggtataacaggacttagggccctggccaggcctctgctcagagtccacgtggccacagggtgcccaggggtcttgtttggagccagtccttcttcctcccccagcagccccacctcccctggtctatgggcagtccctgttttggcatcatctgttccatctgaatcttttccctccgcagagggcttctagragtatgtggcacataaatgtggtccaggaatgtcgccatcccatcctggccctggcatggcagccaccccagtgttcagtcagtccctcaccagatatttgcaaagcgcctgccatgcg

SEQ ID NO: 161917 - DNA, 463 bp, Homo sapiens
ctttcatctcactgagaaccctccgcctctggcaggttagagtagcactcagggttggatgtattatctcaccacatctgcttcggtttcccctgcagaggcggctcggcgttggcactggcgctggccgggcacagccctaactaacttgcttctttgcgatccttcccccactttcatttggaaacgttctcacactctctgcttcttgtaacctcaacagtgggtgatgttgagaaagtgtcatttttgtcccaaggcctttctccctgttggatggtcccagggctcggcacagcagccttagcagggcggagagggaaaaggccaggagcccagcaccgggtgcagtccagggtcccaacctagattctctgcctgcygcgagttcacgtggggaaggccaatttgtcctgaggaaaccacagctcaagtgctcaccatgatgctgatgacagtggcc

SEQ ID NO: 161918 - DNA, 540 bp, Homo sapiens
aaaaaagaaaaaaagacatgactactttttaaagggaggggaaaattgctagagcagggaaaattaacatcataaattatctcagtaaattatcctgctacatgaaaaaaagaaaatggaggctccctgaggtttgtaacctccttagggccataaagcccmgaaaaaggatccaggtctcctagcacctggctaagtatcttttccacacgttcactgctatcaggtatttattgggtgaagacggcaaacctattccaaatgggcagatttctacaaggagcacaagttcaatctgttcaaggtcataggacaggcttgtgggaagatggaatagacatatttttccctacttctccctctaagcacaattcaaaaccttggatattacacaaaaccaacataaggagactctagaagataggaaaaggaaggcaaaccatccagggttcttgggacccaaagagccacactgtggtgaggtccctagatttttgttttgcatcatatgtcccagagtttgagttgaagaagctgaaa

SEQ ID NO: 161919 - DNA, 540 bp, Homo sapiens
aaaaaagaaaaaaagacatgactactttttaaagggaggggaaaattgctagagcagggaaaattaacatcataaattatctcagtaaattatcctgctacatgaaaaaaagaaaatggaggctccctgaggtttgtaacctccttagggccataaagccccgaaaaaggatccaggtctcctagcacctggctaagtatcttttccacacgttcactgctatcaggtatttattgggtgaagacrgcaaacctattccaaatgggcagatttctacaaggagcacaagttcaatctgttcaaggtcataggacaggcttgtgggaagatggaatagacatatttttccctacttctccctctaagcacaattcaaaaccttggatattacacaaaaccaacataaggagactctagaagataggaaaaggaaggcaaaccatccagggttcttgggacccaaagagccacactgtggtgaggtccctagatttttgttttgcatcatatgtcccagagtttgagttgaagaagctgaaa

SEQ ID NO: 161920 - DNA, 540 bp, Homo sapiens
aaaaaagaaaaaaagacatgactactttttaaagggaggggaaaattgctagagcagggaaaattaacatcataaattatctcagtaaattatcctgctacatgaaaaaaagaaaatggaggctccctgaggtttgtaacctccttagggccataaagccccgaaaaaggatccaggtctcctagcacctggctaagtatcttttccacacgttcactgctatcaggtatttattgggtgaagacggcaaacctattccaaatgggcagatttctacaagragcacaagttcaatctgttcaaggtcataggacaggcttgtgggaagatggaatagacatatttttccctacttctccctctaagcacaattcaaaaccttggatattacacaaaaccaacataaggagactctagaagataggaaaaggaaggcaaaccatccagggttcttgggacccaaagagccacactgtggtgaggtccctagatttttgttttgcatcatatgtcccagagtttgagttgaagaagctgaaa

SEQ ID NO: 161921 - DNA, 540 bp, Homo sapiens
aaaaaagaaaaaaagacatgactactttttaaagggaggggaaaattgctagagcagggaaaattaacatcataaattatctcagtaaattatcctgctacatgaaaaaaagaaaatggaggctccctgaggtttgtaacctccttagggccataaagccccgaaaaaggatccaggtctcctagcacctggctaagtatcttttccacacgttcactgctatcaggtatttattgggtgaagacggcaaacctattccaaatgggcagatttctacaaggagcacaagttcaatctgttcaaggtcataggacaggcttgtgggaagatggaatagacatatttttccctacttctccctctaagcacaattcaaaaccttggataytacacaaaaccaacataaggagactctagaagataggaaaaggaaggcaaaccatccagggttcttgggacccaaagagccacactgtggtgaggtccctagatttttgttttgcatcatatgtcccagagtttgagttgaagaagctgaaa

SEQ ID NO: 161922 - DNA, 428 bp, Homo sapiens
agactatttgaatagtctcataactattaagaacattgaatttagttttgaaaactcaaaaaaaaaaaaacaacaaaaacaacacctaattctccaggcccagatgatatcactggagaattctatcaaacattttaaaaaattaacactaattctaggcaatctcctccagaaaacagaagaggaagaaatacttctcaattcattttatttagttagcatacccaggtatcaaaatcagacaaatataatatttttwaaaaatactatagttgatcattggctgaggcaagagggtttcttgagcccaggagttcgaggccttagtacacaattgtcatgcctgtgaatagccactgcactccagcctgggcaacacagcaagactactacactgcagaccaatggccctcatgaatataaataca

SEQ ID NO: 161923 - DNA, 536 bp, Homo sapiens
ataggtcacagatactttacatcacagtttaagtcacaaatgattgctgcctgaactaggagatgtggcttacatttttcttaatctacatctagttaattacacttattccatacatttatatttaaagatattttcttactagaaagcattttgtcagtgacttacccacaaacataggtagtccagctgctgccctctgaagtgacatatatttattttgcaattaataaagggaagaagaaactcccttaagtgggacaaaatttcagttttcaccactgcaggcatgtaaagccccccaaactacaaatgatgattcagtgtctgtgtaatgctacagggaggattgttttaaaatcagcatgatgcaattccatgtgtaataatattgcctaatgtaattgttactgcagaaaacaggaagtgagcagggttactaaagggcagttctgttccctcmcaagtcactgggcgtaaagcagcacctagtacctgtccacagaaggacccaagtaggaaaatctacccatctc

SEQ ID NO: 161924 - DNA, 351 bp, Homo sapiens
tgaacatgagaacctccagggacccagaaccccaggagcccaaggcccactggccttggggaacccctaagccctcttcccacatctcagaggtactctgagttctaaagcctgcaaagaccctccttcccatcccccacagaaagcagagggtggcatgaactttacacccaatgagcttggtttgaattgcrgttccttcactggccagctgtttggcttcagaaaagttgctgtctccatttcctcaactgcgcagtgagaacaatcatttgtggagggcttataatgaggcttgtatagaatatgtctatgtcagtttccccgcttccacagacaggaggatttgag

SEQ ID NO: 161925 - DNA, 552 bp, Homo sapiens
ctccaggcattcaccaccatgcccagccaatttttaatatttttttaatgacagagtatcactatgttgcctaggctggccttgaactcctggcctcaagcgatcctcctatctcagcttcccaagtcactaggattacaggtatgagccaccatcccagcgcaatatgtcattttttaaaaatatgaatgagtccattttgatgtcaacaacttttatatttcccaatgttaatcaagacctttgtctaaaagcactgctgataaatcatcctgtagttcggttttgattgtcccatggtgccaggatggacttatcttgggtataagataccaatagktctggtcccacattggagggagtgaatggctactaaaagtcagtttcaaaatccatttagccagatttgaacaatagaaaggtttaaagagagtggctctccagctaagcctgtggtccattattaagttcaatttttgtctgttccatagtcttttgctatcatctcaaagtgctggatcagctttattctgttagtacttgtattgctgc

SEQ ID NO: 161926 - DNA, 481 bp, Homo sapiens
gctgatagcaaactcgaactaagaccaatgtctgtccaacactattttggttttgaatcatttaacacagtgttgataaaaggtatcccccttgcacaaggctcaagtctgtaagcaggaagtggcccatgttggattacaattaaagcaggggaagaggggcctaacgcactataggaactaaccaatagccactaggaaagcctccaagaggctgggcatggtggctctcgcctgtaatcccagcactttgggaggccgaggcgggcatatcacgaggtcaggagatcgagaccgtcctggctaacacggtgaaacccygtctctactaaaaatacaacaaattagccgggcatggtggcggtcacctgtagttccagctacttgggaggctgaggcaggagaatggcgtgaacccagaaggcggagcttgccgtgaaccaagattctgccactgcactccagcctgggcgacagagcg

SEQ ID NO: 161927 - DNA, 481 bp, Homo sapiens
gctgatagcaaactcgaactaagaccaatgtctgtccaacactattttggttttgaatcatttaacacagtgttgataaaaggtatcccccttgcacaaggctcaagtctgtaagcaggaagtggcccatgttggattacaattaaagcaggggaagaggggcctaacgcactataggaactaaccaatagccactaggaaagcctccaagaggctgggcatggtggctctcgcctgtaatcccagcactttgggaggccgaggcgggcatatcacgaggtcaggagatcgagaccgtcctggctaacacggtgaaaccccgtctctactaaaaatacaacaaattagccgggcatggtggcggtcacctgtagttccagctacttgggaggctgaggcaggagaatggcgtgaacccagaaggcggagcttgcmgtgaaccaagattctgccactgcactccagcctgggcgacagagcg

SEQ ID NO: 161928 - DNA, 591 bp, Homo sapiens
gctagggaacaccctacaaccaataggctgtttttccaaacagctggatcaaaccactgaaagatggcctccctgcytctgggcagtggctgccacctgtaagatgctaagaggggcagagatgtttaccctgagataggctgtcaccatttttttaactcatcaggtgctaaccttgctggaggagaagggaggctattggcttactacagggcaaatggacaaataccaggccatcctactgaatgactcaaatatcaccttgcaaaccatcattgctctaaacccagtcaccttgctccaggccactgtaaccaaccaagaactgaaacaattgcctggaaattcatgatgcattttaatctagcaggccagacctgtcagaccaaacattggccactccagactacaagctttacaccaacagatgcagcttcatggaagaataatgatgccaagctcagtatgctgtgctgactgcagataaggcagtaaaggcccatgcccattctgctgccatttcagcacagaaaactgaactgaatgttgtcaccagagctttggaactatcccagggaaaagaggtaaata

SEQ ID NO: 161929 - DNA, 591 bp, Homo sapiens
gctagggaacaccctacaaccaataggctgtttttccaaacagctggatcaaaccactgaaagatggcctccctgcctctgggcagtggctgccacctgtaagatgctaagaggggcagagatgtttaccctgagataggctgtcaccatttttttaactcatcaggtgctaaccttgctggaggagaagggaggctattggcttactacagggcaaatggacaaataccaggccatcctactgaatgactcaaatatcaccttgcaaaccatcattgctctaaacccagtcaccttgctccaggccactgtaaccaaccaagaactgaaacaattgcctggaaattcatgatgcattttaatctagcaggccagacctgtcagaccaaacattggccactccagactacaagctttacaccaacagatgcagcttcatggaagaataatgatgccaagctcagtaygctgtgctgactgcagataaggcagtaaaggcccatgcccattctgctgccatttcagcacagaaaactgaactgaatgttgtcaccagagctttggaactatcccagggaaaagaggtaaata

SEQ ID NO: 161930 - DNA, 571 bp, Homo sapiens
ctcttcactcttttacttaggagataaggtgctgctggagtcttggaaaaacctaggaacagatcagcagctagccaaaaagtgcacaggacttcatggggtccgctgcactttttccagttaacactcattcctctgtcaagctacctgggatcaagccattgctacatcagcttmaggcaaaggcaggtccttctccacctgacatctcagaccacaagcctacttagttttgcaagccaaagaaagatctggagttattggcaaggaaaaatcacacagctagtggagaccctgcctgggctttggtcagccctgggcatgtcacaacctgttttctgccttgggtgcctacatctggaaaaagataaggagaagatgatggtgcctgtaatcttggagatgctagcaactggtgagccccaaggtgtattatggctcttgcctgggagtcccaagttctgagccccaaggaccattacagctccctctccttccctccatccatggtgcagcaaatggggggccatgcggagagtgtgctaggcttgttcatgttacagttcatatt

SEQ ID NO: 161931 - DNA, 576 bp, Homo sapiens
tctacacattccatggaggagtctcttcactcttttacttaggagataaggtgctgctggagtcttggaaaaacctaggaacagatcagcagctagccaaaaagtgcacaggacttcatggggtccgctgcactttttccagttaacactcattcctctgtcaagctacctgggatcaagccattgctacatcagcttcaggcaaaggcaggtccttctccacctgacatctcagaccacaagcctacttagttttgcaagccaaagaaagatctggagttattggcaaggaaaaatcacacagctagtggagaccctgcctgggctttggtcagccctgggcatgtcacaacctgttttctgccttgggtgcctacatctggaaaaagataaggagaagatgatggtgcctgtaatcttggagatgctagyaactggtgagccccaaggtgtattatggctcttgcctgggagtcccaagttctgagccccaaggaccattacagctccctctccttccctccatccatggtgcagcaaatggggggccatgcggagagtgtgctaggcttgttc

SEQ ID NO: 161932 - DNA, 608 bp, Homo sapiens
gtacttcttggaactcagaagcctctgcataatacataggttacatgacaaagacctttcmattttcatcaaaatttgatttaacatataaagttataaggctttcattctttaccttgtgctgaccctgttaagtatgcattacataattatttttcagagatttgcttccagagttgttttcacttgccttagaaagttctcacttggtttcttaaattccaagttgattgcttttctgatggctccatgaacagctctcttttctttcaaattttgattcttcttgagtgcaggctcatggctcacattcccctagtgtctcaggtgtttgtttcttattcttgtgtaatgataattgtatataaaatacaatttaactagcagtttgcctctgtgattttcctctttaaaacatttttataggattgacacatattttcttttttctaattttctgaatatctgtttcatacaatattatcctatactatactatactaaataatacaatctttgttaagctaaattatggaaaagacacacatacagaaaaaaagaaaccatgttcacttaacaatcaaagttatttaccgctttcttaatgt

SEQ ID NO: 161933 - DNA, 608 bp, Homo sapiens
gtacttcttggaactcagaagcctctgcataatacataggttacatgacaaagacctttcaattttcatcaaaatttgattwaacatataaagttataaggctttcattctttaccttgtgctgaccctgttaagtatgcattacataattatttttcagagatttgcttccagagttgttttcacttgccttagaaagttctcacttggtttcttaaattccaagttgattgcttttctgatggctccatgaacagctctcttttctttcaaattttgattcttcttgagtgcaggctcatggctcacattcccctagtgtctcaggtgtttgtttcttattcttgtgtaatgataattgtatataaaatacaatttaactagcagtttgcctctgtgattttcctctttaaaacatttttataggattgacacatattttcttttttctaattttctgaatatctgtttcatacaatattatcctatactatactatactaaataatacaatctttgttaagctaaattatggaaaagacacacatacagaaaaaaagaaaccatgttcacttaacaatcaaagttatttaccgctttcttaatgt

SEQ ID NO: 161934 - DNA, 552 bp, Homo sapiens
agtgcaaggaggtgaggcctgtggatttggcccctttcctgatggcatgcaagggagcctgccctcccctattcctagagcttcagccgctaatgctgggacacccggcgctcctctgtgaccccgtgtgtgtctgagcagcggctctgcccatactccacgcagctctccctgtcggtctggaggccctgatgggatgggctaacaggggaactcctgaacccacggttgcaaaggtccctggcaaaagtatgggtccccgrggactctcacctcactcactggttccccatattttggggggtctcccctagctccatgccattcccaggtggacagtcctcctgtctcactcctctctgttctccgtgggtcgagttgtttccttgatgaatcccatcgtgtccaccgggatgtttcagttaagctagtatttactcgccccctccgtgagagccacgcacgctagctgctactagtcagcaatcttggccctgccccctctttgttaattttgtatctaattgcactatcgataactgaacaaggagt

SEQ ID NO: 161935 - DNA, 555 bp, Homo sapiens
gtctaatattaattcaaaacatattgtgatagatgaagaatgtgtactataatccctagggcaaccactacaaagtaaaaaagaagaattgtaaataataaaccaagagagaagctcaagtcaaaagctaaaaagaattttttaaaatagcaaaatgatagatttaaatacaaccgtatatcagtaattaccttatataaaattgacttaaggaaatacatgaaagtattagaacacattaacagattagaaaaaataaacctttgattatttcaatggctgcatattaaaataatcactaaatatcaacatttattaatgttacagactctttaacaaagaatggaagaaattttttaatctgatagaggattgatatggtttggctttgtccccacccacatctcatcttgaattcccacatgttgtgggagggaccagtgggaggtaattgagtcatggggcaggtttttctcatgctgttctygtgatagtgaataagtctcatgagatctgatggttctaacaagggggagtttccctgtacaaactctc

SEQ ID NO: 161936 - DNA, 519 bp, Homo sapiens
aactgccttcccacttcctctcctcccgtctttgaaagtagtctctacacatctgcaaaacagatcttaaactcacatcaggaagtattactttcttgctcaaaattctttaatgactatccattgctttaagaaataaccatgatttacctaaagtgcctacatatttcatatgatttttttctagtcagtttctccaaacgtatgcattcatggaacctattgaaatatagtcaagccarttgaaatatagtcaagccactttggttttctttcagtttttgatcatgatcagttttgtgccaactcaaggccattggctaccatttcttcctccttaaatgctgtcaaacctcactatttgcatgactattttcttctcattggttatttctcaacacaaatatcatccacaaagaggccttctctataattcttattagagaatgtttcctcctgtattattgatgtcagtctcctgattttttattcacattattttatctgtatttacctgtt

SEQ ID NO: 161937 - DNA, 454 bp, Homo sapiens
ccaaactcatagcaacataagagagaatgatttttgcttggggtggttgggggaaaatgaggagttactgttcattaggtatagaatttcggtcatgtaaaatgaaaaaagttccagaaatctgctctgtaacattgtgcttataattaacaatactgtactgtatagttaaaaactgaagaggtttttcttcatattatgtgctctttgctacaatagaaaagtaaaaagaatatgcaatttgactaatgccaatactgttttctatgggcaaaatccatttctcttttcttcaaagaatattttaactctcttgatgytttcaaggacattatgtgcattgcattttgcttccaatattatgtgatgaaagcaatggttttccttaaaatttaaaagtaaatattttaaaaatatattttgtatagaatttatagattttaaaacatcatca

SEQ ID NO: 161938 - DNA, 646 bp, Homo sapiens
atttttaagaaaaaagcaaaaaagttttttaaaacaaattatgacataggtagtttagagtgattaaaagaaaatacgactgctcttaagacaattatttaatcaactatttttgactctttagtcattacaagtgtggacttattttttttaattatcttctgtttcctgaatagaacagatctagtaaaaacaaacaaataaacaaacrattaccccggaatttagagtatgcagagtaatttatttatgcatatgtaatttatcaaagtatttaaaaccattatcaaatacgacttttgactttgtcttacttataaatatatgatggcatataaataaagtctactgtgtacactgtcatattatagacataattagtattggagttttgacacacgtggtataaataatttagacataaaattttgagaaatttgaaagccatgtctttcctttaatatacagaaagatatactcatgaaagagagataatattaaaatcaccaaaaaataaaaatggaataatatattaagggaaagttgtgggtacaaggaattggcaggatatcacaggattaactttcaggtggctgatgaaatgtgtaacatcattggaaagaaaagtgtactaatagtgcagtct

SEQ ID NO: 161939 - DNA, 551 bp, Homo sapiens
ttatctctcatgtattttaagcctgtgcatttctagcagttccttccacttattattaaactcactgcaaccaagggggaaaagcagcacagctaaacccctttcttaacccctcatcatcctgctgctaccttcagatctctttcctctctctcacagcaaaatttctccagtgtgtttttaatattcttttatttcctcactttctattcactcctctccatatagcaaatttactgtcttccagtgagatgttaattactccagtaagtaataactcagtattacttattaatttatataatataaagyaataatattactttaaataatacttactacatatattaattatataatatataaatgtaatatatattattactttatattaggtaaagtaatattcatttatttccattattaattattaagtaatgtatttaattaattaataagtaatataataagtatttgtagtgggttcttttttaacattttggaattgtcctctgacactgtgtcatcttagatctactggtggaaatcag

SEQ ID NO: 161940 - DNA, 603 bp, Homo sapiens
tgtaagaatatttgaaacatacagagcacttcttagacacggttcttgtttttgttaaacatattaacacttgtttaaccttcccaacaaccttgggaaattgtgtacaagttttatactcattgtatagatttgtaaactgaaatgtggagatattaagttgcccaaaattactttagaaagacccaaatcaaggcagtctagctcaaaagtctgaagttttttttaccattaagcgttcttactgccttgagacactttgtttaatacctattcctaccactaacaactcttggttttactgcacagtcatttcattccttcgagtttttagaccatagtaagtacattttatgatttaytattacacaacatgaaaaaatcctcgaaatgaccacttgctgtattagtacatatatcgaaggtatatttatctaactgatcaatcaattaaaatgttgggaaacaaccccccatagaaacagattttgggactcttgtctttgcaacctccttcatagaaactcttccaatccttcctccattatttcatagtacttctgattttcatcattaaagcaaatgaaatggtaagactgaagg

SEQ ID NO: 161941 - DNA, 490 bp, Homo sapiens
aactttgtacaagttcaaagtccttaatatggtgttggaagccccatttactatctgcccacaacctgtattcccaaccactctgtggcccatgagagaagacgagagggcagaaagaagaagagagttggcactgtcactctggaaagaatgccagcctatcaatgagggctgcaccctccaatcatgagatgatgccaaagctgaacaagaaagttgagtgggctggactcagggggtagactgcagcctggaaaggaatgctaaagagatggcagagcctctgaatgcaccatggcaagcccactggatcctgagtcggggaggaattttygcatacccttattgcccctgaggaacaggagaagtttccgtggccagaatccccaggaaaggcactcaaggttccttgggtagagaaaacagaagtgagaagacaacatgagaggtacaggtggagccttttcatatattccagagataaagcaaa

SEQ ID NO: 161942 - DNA, 634 bp, Homo sapiens
caaaactatacaccgtatctcacattaaccactgcctgttgggtccactcaggaaagaggaacatgggcaagttgtgcttcttttcagaaaggtcccttacttctctaagtctcttgctcacagaaaagacccaattcttgtgatggtctgccttcctgatactcactcatgacatcaaaatagcctctcaatttaaacaacatcatgcaaagttttgcagctatgtactgagactkgctatctgaaaggagtcccatattttgtaggagaacagcttaaggacaaagtttagtatatcatcaataaaagttgttattcatccaacagacatggggaggagggtggtatattttattcctactacaggttgagtatcccttattcaaaatgcttgggaccagagtatttctgatttcagatttttgtagattttggaacatttgcatatacataatgagatgtcttggggacaggacccaagtctaaacactaaattaatgtttcatacacaccttatatacatagcctaaaggtaattttatacaatatttcaataattttgcacatgaaacaaagtttcggctgcattttgactgtgacccatcacacagggtcaggtgtggaattttccac

SEQ ID NO: 161943 - DNA, 506 bp, Homo sapiens
catttgttaatatcagacatcttctcagttgtagtttagaactttctacagtgacctttgcatccaccttcagtgtgggctgtgacctgcctccttatccctgatggtttttggtgaaagtgagccctacttcattactttgcaaaatgtagttctmttccagcacctctcatctgaaaaccctggctttatatttcaaactatgtgtactgctttcatacacattcattggcaaaatatgctcaaggaatccacaaaactatgaacagaatcctggctatgtgttcatacagcagattaaactattctgggtctctgttaagttttgtgtctgtaatgcctcgtttctgaaagactatcttctccagcaatgaaaaccaatcacttctcttgagaaccaaccaaatcccaacatcatattgttgcacctgaacatattattcgtattttagtacatcactgaaatacaattttgttaagcaatatttctttgagagctggaagta

SEQ ID NO: 161944 - DNA, 564 bp, Homo sapiens
tagtgattataatggtgatgatgatgataaagttcatgcatgtaagtaacccttgtctccattattgaggttttttcagcattttattatgaagaaaatctcaaacatacagcaaacatggaagacttaccatgcaaacctgtatatccaccacctagattctactacacattttgttgcatgcctattcaaccatctrgccctctatccatcggccaatctgtttaattttgaaagattgaaaagtaaactgcagacattattatacacacatacacactgcatgtgtagtattaactacagttcagtatttttctttcagtgtaaatgttatatacattcgcatgatcgtcagtgtaaagtcactgttttgatgaaataatgtacttatagtatcaagatacaggacattatcttcaccccccaaagttactttaaatccgttaccctggcaattcccctccatacacacatattcacacaaacacacagcggcctcacttctcactttttatttcaggattagttttgcctgttctggaatttcaaataagtgtactcttt

SEQ ID NO: 161945 - DNA, 561 bp, Homo sapiens
ttttgctttggttgcctataactgtgggttattactcaaaaaatctttgcttactccaatatcctggaaagtttccccaaacttgcttttgtagtttcatagtttgaggatttagatgtaagtctttaatccattttgatttaaatttttatatgatgagagagataaaggtcaagcttcattattttttatatggatattcagttttcccagtatcatttgctgcagagactgtctgttttccagtgtacattcttggtaccttcattgaacatgagttcactgtagacatgtggatttatttctttgttctctattcccttccattggtctatgtgtctgttttaatgccagcaccatactcttttgattactatacctctgtggtataatttgaagtcaggtaatatgattcctttagttttgttcttttttcttaagatagctttrgttattctagaaatagcttttggcttttgtggtttcatgtaaattttaggattttttttctatttctgtgaagaatgtcattggtgtttctacagggattacattacatct

SEQ ID NO: 161946 - DNA, 628 bp, Homo sapiens
cacagtctagggacattaaacctgggactgatggggaaagaggcaagggtaagaaccgcagattacgagaaccttagggcctctttgtcctagccccatgaggctccattccttcttgtactcagggctygtttctgcccagttgcagcctttctcgatgtcactgcatgcagaggcagtgggccagaaagcccgtccttgtttgcagctcctcaccatttctcgtgggtgctgaagatttgccccctggtctggatgttttgttgcttcttgaagctgcactggacagagcgaatgtgtgtctcggaaggtagcctgccatcaagctggatgtctgagtcatgtccaggtggtcactgtgcatggaaaggacaaatgtcatcagtgcccctacccgcagtggctcatggtttcctaagcattgtctccggggctgcctctcatctccaaattggcccatagcaatgaagttatccagtcgtctttggaggggaaattccgtggttttcattgacgcaatcagtcctggctaatgtgccaaacaggaatatcctcaaattgctgggaggccatttgcccatgtgccccctccactctgcctctcattgcaggcagctgtcctcacatt

SEQ ID NO: 161947 - DNA, 603 bp, Homo sapiens
tctttacaggaaatggccccaagccgaggagcctaatggaagcttcatttattatggttttaagccagacatcctccccagctggcctctagcaactggccaagcagaaaaagaaaacaaacctttttaataccagcccccaaatctctgattgagctcatactgcaatgttacctgaataagaaccgcaaggtaggaaagaggttctcagaatggaacagcataattttacagagcattttagagctattcagtaacactgactcggattgtttctcaaacttcttttttaatataaatgggacaaaaaggtctggctttcacaatctagtatcaatccaaataacagactagcaagcagtcactagtcagaatgtgtcattactggatatttttttaattaaccatcaagatttgtttttcttaccagtcraaaggaaatttcatatcacgtcattttaacatgagggaaaaagaataacaaaaatagggtcaataatagtaaaaaatctgatggtgtatgcctaccttatgataaagataaaggcaaatgtaattatatagacagattattctgcactttaatagaactgggaaaagaat

SEQ ID NO: 161948 - DNA, 607 bp, Homo sapiens
agcctgtgcaaagccaaggggggttggcatgggactatctgccatggagcatggccatgaaagcccaccccccaaggcttggcatactcctctaggcagcattagcctttgttagctgctggaccccgacagagcaaggatgtcttgctatgggacaggaacaatctgatctgagtgtyccacctgtctgctggcctctcccagggtccctgcctggccacacaacttacagcacagcctcagctgcccagccaaagcatttacaagcagccactgccataggtttttcaacagcagaccccacctacctgtcagagtacttttgcagaaagacctctgccggtgtgcacccacccacagccttcttctgcctggtgcacccacccacagcctcctcccactgcctcaccagtgcacacacatataacgacacaccaccgccccactggatcacttttattggcagcccccatcagagtgttgctgctaggggactgtgaacacttcagctcctccagcacagcaggtgcttaaccttgaggggccagagaaccaagctgctggcctgtttccagcccccaatgataagggcatgcaggccaggagt

SEQ ID NO: 161949 - DNA, 525 bp, Homo sapiens
ttttctgaacaatgctagcatttggatttttttaaaaaaaaataagtaaatgttttattgacagcaactaaatggtgtttgtagcatttttatcaaatgacagataccatccattcactagacttttctcactgaattgtcctacatgcagtacgtgttttttaatgttgtctttcttctgtgttgtttctgtaagtttgctattaaaatacattaaactatttttaaaaaactctccataggtcgtggtcakcaagcatgtcttcagcaatcacatcagtctcaggagaaattttcatggtcaggaagataaatttcatcctagatagggcagtgttgtaataaaggcatagaataggatggaagcatggtgatgaccaggaataatgagaactctcctctacctgcctgtccaacagatatattatttaaggataattagttcaatgcttaaatcaatgaaatcttattttaaaatagagttacaaataatcacttttagtaactcagaaggaagcactggga

SEQ ID NO: 161950 - DNA, 478 bp, Homo sapiens
cagtcctaaaaccagcaatgtccccrgcaaacctactgggaaggtagaactcatctttttctttccatgtctctcttcacagaatgcactggaaacaccatcagggcttataggctctggcagcagaaaggttgaaaacgggatccatttagtttgggcttattgaggtgtacgtgctttgtagtggttttgtgtttaattactggttgtgtttaattactgggaaccaccctagggtaggaatggccttcagaatgttagtactgcttacatcattgacccaactcagcattctctcatgaagatacaggaccttgcttgtaccatactctgatcacgtcctactgcaactggccccggaagcacaaggatagtagaagagaaacaaggtttggcatatatcgaatcagaagtcaatttgtggaaatgtcttcaaatagtcaaatgtacacaactgatggcagaattgatggaattc

SEQ ID NO: 161951 - DNA, 499 bp, Homo sapiens
tcaagttatgtaagagttctgtgtctcactgttattcccatgttacagatgagtttaacagtaagtacctcgggaggctgcggtgaggactgaatggactaatacacagaaagtgctttggtatctagaacagtgctaggtatggagtaaatgtttaatacaatgttagcgacttttaaaattgtttcaattactttgtattgggtcattttggctttaaatgtttaaaataktttacaactttttttgcagcttttaaaaacgttatcctaaacagaaacttgaatttcacgttagcaatacgcaagtacattcaattcacatctcataacttgacttgcaaatacgataaaaggcattgcttctattttcatatagcaatattttccttcaattagcatttaatgaaggagagtagggtagcactctatggagacctgggaggaatctgtaagaaatgggaagtgtcaaaccagctaatacaaccagaggacccaca

SEQ ID NO: 161952 - DNA, 279 bp, Homo sapiens
aagggcctgggaggagcagggcaacagcaggaaggatggtgtgtgygcaaggagggcattccacagagcaggagcgggatgtgcaaaggcacagaggtatgaaatcctaggacattttggggaacctgtaagcaatacaaaaatggctggagcccaggccggctacagacagaggcaaaagaccagatgatgtgttgctttgtatgccctgctaaaagcaatgggagcctttctagaatcccctctcgaagaagtatttataatttgcaatctacaaca

SEQ ID NO: 161953 - DNA, 534 bp, Homo sapiens
tttaaaaaaatcaattctgccaatctctgccctttaattttagagtgtattaatcatggttcttcagaaaaaaattaataggatgtgtgagtgtgtgtgttcctgtgtatgtgtgtgtataaatattactgtcttaaggaattttcccatgtgattatagaggcttagyaagtccaaaatttgatgggataagccagcagactggggattcagggaagagttgcagcttgagtccagaggcagtctgctggcagaattccttctcgctcagggaggtcagtctttgttctggtaaagccttcagattcatttggtgagagccacacacattatgaatgacaatctgctttactaaaactccactgatttaaatgttaatcttttccaaaaacaccatctcagaaacatccagaataatattaggccatatatctgggcaccatggtccagtcaatttgacataaaattaactagcataaatctaccctttgtcaacctgtcatccatatgcatttccttaaatcatacttaatc

SEQ ID NO: 161954 - DNA, 465 bp, Homo sapiens
tgtgcaggagttgtgtcacagagaagaaaggaatgttcttctgctagtggtgccaaggcagcagtcataggttgagacatgagaaagagcttagggttgttagaaattctcaccatttcagtggttttggtattctgrgggaatctgatgttctatggtagtgagattaattggagatacagtgacaaccatataaacaaaaaaactaatttttttgtacatatgtacataagcatgtgtgtgtgtacatacatatatataatttcccttggcagtttagatgaaggagagggaattgttgggttccaatgtttctctcagcttcaacaccattggacaaactttgaacagtagttttgtatcttaacaaatgtgtgacactggttttcccaataaccctcctgcctccaatatctactggtgtccttattttataggctgttgattctcagagaaaaaaaaaac

SEQ ID NO: 161955 - DNA, 588 bp, Homo sapiens
tgcttccagactctcacctctgtatccaccagtcctaaactattaggtcacagactttgcccaatcccagtttcacaccttgagggacgggccttaaacccctttagaccagactccaatccctgtaaatactctacttccgttaagatgatgttctcccttactgtagtgagctggaataaacttagctttgttttattaatgaactgtctcttgacattttgcagagttcaacagaagcctttgcctatgcttgctatggagcaggacaggaaagccagggtcccctgagataaggccggagggctggtcttagcagcagtaggtagcagaggacagccatgtcgtgtggattgctgatayatagcaggtcattggcagtagcagaggacagccatgtcgtgtggattgctgatatatagcaggtcattggcagtagaggctgaatgacaaagacagtagaagaggggagaattaggatggagggtttgtttctgaacgcacaggttgtgtcctgggacagtctcagaaacagctgaagatcatctggggaagacagtgtgagtggtagccagcttctagcaatca

SEQ ID NO: 161956 - DNA, 588 bp, Homo sapiens
tgcttccagactctcacctctgtatccaccagtcctaaactattaggtcacagactttgcccaatcccagtttcacaccttgagggacgggccttaaacccctttagaccagactccaatccctgtaaatactctacttccgttaagatgatgttctcccttactgtagtgagctggaataaacttagctttgttttattaatgaactgtctcttgacattttgcagagttcaacagaagcctttgcctatgcttgctatggagcaggacaggaaagccagggtcccctgagataaggccggagggctggtcttagcagcagtaggtagcagaggacagccatgtcgtgtggattgctgatatatagcaggtcattggcagtagcagaggacagccatgtcgtgtggattgctgatatatagcaggtcattggcagtagaggctgaatgacaaagacagtagaagaggggagaattaggatggagggtttgtttctgaacgcacaggttgtgtcctgggacagtctcagaaacagctgaagatcatctggggaagacagtgtgaktggtagccagcttctagcaatca

SEQ ID NO: 161957 - DNA, 612 bp, Homo sapiens
ttcacgaaatgtctaccagatgcctcaattagaaagttaataatacataatttttaaataagtcgattatttgattttgtcacaaagcaaaaagcctcaggtggaggtcacagaataattttgtttcatatgcatctttgtttatttcctgtctttactaaataatgrctcgtgactaatgcaggtatttcatcacgggaaatgactctacctgcaccttcatccaggatccattaggttcaaagtgtttaaaggtaaagtgttttgaaaaaaccacaaaggtgtataagtaatggactggttccagtttaatggctataaaaccttgtttgtgaattaaacatcagattctttttaattaaggaaattgctttttgaacttctgcttcctctcttataaatttgaaatgaaaaagcaagttataaccacatattttagtgtgtttgttaattatgtgttatttgcaagtcattttaggatacaaatgactttgtttttgttcaaaagaggctttaaataggcataataatgacaatagtaatgatagtagttaaaattttttgagggtttattctgtgccaggcactgggtcagctgtcttatgtatatca

SEQ ID NO: 161958 - DNA, 591 bp, Homo sapiens
agtgaacaaaacttccctgctcttayggagctgacattctagaggagggagagagtcaatgacaataataaataaatgagaaattatatgagaggaggagtactatggaaaaaatagctcagagtcagggagatcagggctacagtgagatagggagggaggttccacagtggcattaaataggtcatcaggacagatctcttaagaaatgtaacttgtctagttatgaagaccacattccatctcattttcttaatcttatttgcaaattatatttgtgagacgtgaacactgagatagccttgcatttctattctcgtcgagaaacattaagtggaaaagagatgaacccatcaatatcaactcatcataaacaaaagctcagggcttgcaactcaaacccttgaggtgccttctcactgcacttcagtgtcaggaacaaataggcgttcaagcattatgaagctccaagctatggagtaaacttccttctcccccttccttgccccactccaaaaaaaagtaaacagatccaaggacaggtcaaatgtgctgtgagcatcttgtttgctgaaaccatctaatatgcat

SEQ ID NO: 161959 - DNA, 591 bp, Homo sapiens
agtgaacaaaacttccctgctcttatggagctgacrttctagaggagggagagagtcaatgacaataataaataaatgagaaattatatgagaggaggagtactatggaaaaaatagctcagagtcagggagatcagggctacagtgagatagggagggaggttccacagtggcattaaataggtcatcaggacagatctcttaagaaatgtaacttgtctagttatgaagaccacattccatctcattttcttaatcttatttgcaaattatatttgtgagacgtgaacactgagatagccttgcatttctattctcgtcgagaaacattaagtggaaaagagatgaacccatcaatatcaactcatcataaacaaaagctcagggcttgcaactcaaacccttgaggtgccttctcactgcacttcagtgtcaggaacaaataggcgttcaagcattatgaagctccaagctatggagtaaacttccttctcccccttccttgccccactccaaaaaaaagtaaacagatccaaggacaggtcaaatgtgctgtgagcatcttgtttgctgaaaccatctaatatgcat

SEQ ID NO: 161960 - DNA, 591 bp, Homo sapiens
agtgaacaaaacttccctgctcttatggagctgacattctagaggagggagagagtcaatgacaataataaataaatgagaaattatatgagaggaggagtactatggaaaaaatagctcagagtcagggagatcagggctacagtgagatagggagggaggttccacagtggcattaaataggtcatcaggacagatctcttaagaaatgtaacttgtctagttatgaagaccacattccatctcattttcttaatcttatttgcaaattatatttgtgagacgtgaacactgagatagccttgcatttctattctcgtcgagaaacattaagtggaaaagagatgaacccatcaatatcaactcatcataaacaaaagctcagggcttgcaactcaaacccttgaggtgccttctcrctgcacttcagtgtcaggaacaaataggcgttcaagcattatgaagctccaagctatggagtaaacttccttctcccccttccttgccccactccaaaaaaaagtaaacagatccaaggacaggtcaaatgtgctgtgagcatcttgtttgctgaaaccatctaatatgcat

SEQ ID NO: 161961 - DNA, 606 bp, Homo sapiens
cctagggacgggcacagcccttgagtgacatcaggctggccactctgcctccggaaagcccccaggggactaagggagtgggatcatggagaagggaggctggagggatgttgtgactgtgcacacagagactaggcaggaccacccctgcccccactctgactctgcctggaaatgctggtagtagtggggactgcaggtctaatgggggagacagaggcatcagcagatacaatgagatcaaccctgggaagggagaatgggcctaggactgtgaaagaccagaggaggcactgacccgtccaaagattagggaaggcttcttagaggaggggatacctggatagggtcttaaaggatgagtaggtgtgaaaagaggaagagcattccgggtagaggaaacagcctatgcaacagtctgagactggaatctgaaatgtctctggggtctgaaattactcccctccawgcctgacccagggacagagagagcaggagagagggagaggctgcccacaaaggatcggcacaagcagctctgtccaggccctggtagaaagctttgttcgaaggccagatgcccacagactcacggtcactttgaag

SEQ ID NO: 161962 - DNA, 570 bp, Homo sapiens
ctcagtgttaataaatggtagcaattaatattagcccgcatttcgcagatgagaaaacaggcccagagagggaaagtggcagaggcagtattagcacttggggcaccagagagaagtgaaacacaaagccccaccttccaacaggtctgtggtaatgtccacatacccagccccttgggcctcaatcctgacagtccttgcagggagcaggtgtgcccagatccccgttcctgtagcccagcatgagccaagaaaagcayactcaggatccaggctcagcgagtgtcagggctgagagtcctgcctccagagaaggagcactcggttagaggtccagggactcatatattattcacctgtcaccttgggcaggtcacttctctgaacctcagcttcctcccttgtataaaacaaggacagagtaggtcagccccaacactccccctacctgtctggcctttctttcatggaggcacacaacactattcactctctgtagattgaggaggccctaaatccattgctcccttctgtctggacctaaaggacacaagaccttattaagcttca

SEQ ID NO: 161963 - DNA, 358 bp, Homo sapiens
gtgccggccagccggcccagcgagcagctgctgcagcaggtgtccaagctggcttcactgcagcatcgcgccaaggaccacttctacctgccgagcgtgtgagcatctgccctcctgcctcagctggggtggacaggcaaccctgccctctcagcccacctccaccctcctcagagctggcagtccccaggccctcaggctcccctcttataccagtggggctatctgggaaggggctgtccttgcctgggggctgaagtcttccaactagcyacaggagctgggaccccgcctctctttcgcaagttgcttctggctggtattattagctcagagcaaaggtaatgataaaaaaagc

SEQ ID NO: 161964 - DNA, 542 bp, Homo sapiens
ggagaacagcagagcctgtgaggctccaggagacctcaaccaagtgcagacatcagtgagggaaaggggcgagcagaagactgaactttgtttagaacactgcgaagatttacactgaaagcaaaataattttcttaaccaaaacattttgttgcttttaaataaacccagcctgatacagccccacttaaaagatggctgctctgctccaccacctctactggccactccagcatcagcctctgtcccctattgatgccaacagcctttccatccaggaggaataccaagaatatgagaacctaggtcctggccaattctattcttcagccytaacaggcaacaaaaccaaggaaaaatatatagaatcaaaaaaaacaaaaaacaaaaaccccccaatgaacaaaaacaaaaccctcaaaacaaaaggaggggcaactacgtaaggatgagccagagttcccaggagggcggcgggtagactcagtgccgccgcatcttcacctttcgggcagggctgcctgctgcctcagagcagtcct

SEQ ID NO: 161965 - DNA, 558 bp, Homo sapiens
cattgtgctaattctacataaaagcaaacacctttcaaataagtctctcactaatacatcctatctctatatccaatcctttccacttcatgaagaaaatatatttattgatgctgagcaaatgctgagccttcgtagccattcactgatgctctagtacacctgggctcaagggcactgagtcatcagcctcacaagaaycaattggatctgtttcctgtcttgcttttgccaattagacttgtcaatataattacctaatttatcaaaatacaccacaaatcaatgaaataccagtatgaaagaagaattgtggtttccatacaaattaatgtgaatgcttaaagggacaataaaagcaggttccaaaattattgttagtttaataggtgtgagtcttccaactctacaagattaaacaaaaatgaacaatattgaacaatatcctcagagagaatgctatgtatttgatgctaagatctacacttaaactaatccacactgcaaatcatagacaatgattgatagatatgctttcagcaagatagagtagaattc

SEQ ID NO: 161966 - DNA, 563 bp, Homo sapiens
ttgtaatgtagtatctatagtgtgttgatatttagctcagtactcctggtttaatatcctgatacacgtgtgaaagaataatacataccaacctgagaagttctaaagaagttgatgagaattgtcattccctgtccaggtcctcaggcacacttaccttcttatcaaattcatatacagttactagtgagagtagagatgcaggattcagcctttaattgtgtctgtaaaagtttatatactaattgcaagagaaattggaagcaaatatgataaaaatttaatatgtgctcaatttygtggtaggtgtgtgaatcattattatatcatcttctaccctatgtccctggcttgcaaacttccttccagtacaccccatgtcctcattcttggttgattagtctgttctcaccctgctaataaaggcatacccaagactgggtaatttataaaggaatgaggtttaattgactcacagttctacataggtgggtaagcctcacaatcatggcggaaggcgaacggggagcaaagtcacatcttacatggcagcaggcaagaca

SEQ ID NO: 161967 - DNA, 563 bp, Homo sapiens
ttgtaatgtagtatctatagtgtgttgatatttagctcagtactcctggtttaatatcctgatacacgtgtgaaagaataatacataccaacctgagaagttctaaagaagttgatgagaattgtcattccctgtccaggtcctcaggcacacttaccttcttatcaaattcatatacagttactagtgagagtagagatgcaggattcagcctttaattgtgtctgtaaaagtttatatactaattgcaagagaaattggaagcaaatatgataaaaatttaatatgtgctcaatttcgtggtaggtgtgtgamtcattattatatcatcttctaccctatgtccctggcttgcaaacttccttccagtacaccccatgtcctcattcttggttgattagtctgttctcaccctgctaataaaggcatacccaagactgggtaatttataaaggaatgaggtttaattgactcacagttctacataggtgggtaagcctcacaatcatggcggaaggcgaacggggagcaaagtcacatcttacatggcagcaggcaagaca

SEQ ID NO: 161968 - DNA, 581 bp, Homo sapiens
gactttggcttttttcattcagcacaatgttttcaagatccacccaagctgttgcaggtatcagtagcttattgctgatttttttttaatgctaccgagtagtgttccattgcatggatgtactatgctttgtttcactattcataagtggaaggacattgtcatttttttctaacgtggcatttaaaaataaagcaactagaaacctatgtgtacacatttttaagtgaacatagttttcctctccatatgataaattctagagctggatttctgggttgtatgaaaataggatttcccagcgtagctctatcattttactttcttactggcaatccctccaaatctcagccratatttgagattttttatttattgccccaaatattagtgatgttgagcatctttcgggcatttatttgccatgcatacatctccctgttgaagcatctgttcatcttttgccctggttgaatccagctctgcactaactccagacctgttcccatagaactgaatgtggctagagcaaagtaaacaaccatgccccattgtttcactttatatttatgacttgcaac

SEQ ID NO: 161969 - DNA, 581 bp, Homo sapiens
gactttggcttttttcattcagcacaatgttttcaagatccacccaagctgttgcaggtatcagtagcttattgctgatttttttttaatgctaccgagtagtgttccattgcatggatgtactatgctttgtttcactattcataagtggaaggacattgtcatttttttctaacgtggcatttaaaaataaagcaactagaaacctatgtgtacacatttttaagtgaacatagttttcctctccatatgataaattctagagctggatttctgggttgtatgaaaataggatttcccagcgtagctctatcattttactttcttactggcaatccctccaaatctcagccgatatttkagattttttatttattgccccaaatattagtgatgttgagcatctttcgggcatttatttgccatgcatacatctccctgttgaagcatctgttcatcttttgccctggttgaatccagctctgcactaactccagacctgttcccatagaactgaatgtggctagagcaaagtaaacaaccatgccccattgtttcactttatatttatgacttgcaac

SEQ ID NO: 161970 - DNA, 631 bp, Homo sapiens
gtaagggtatatatcaagaattgtcttctttccaaagtcagttatgggtttttgctataaattcacattcctgtgttttctccttagggtgtgtattagtcggttctcatactactaacaaagacatacctgagactgggtaatacataaagaaaaactttaatggactcatagtttcagaggcctcacaatcatgaaggaggagcaaaggcacatcttacatggtggcaggcaggacagcatgtgcaggagaacggccctttataaaaccatcagatctcgtgagagttattcactatcacgagaacagcagagggaagacccaacccatgattcaatactttccactgggtccctcccctgacatgtgggcgctatgggaactacaattcaagatgagatttgggtggggacacagccaaaccatatcaggatgctacatgcagggagtcattagcttgcttgaggaaaagtcaggaggcatgaagcttctttcttgaaactgagtgctggcaaacmtgattgtaggagttccaaatggggtcaaacagacttttctccctactctctatctctccatggcctctcctctatttcaaccattcaaatcttctgtcatggagagaatgct

SEQ ID NO: 161971 - DNA, 631 bp, Homo sapiens
gtaagggtatatatcaagaattgtcttctttccaaagtcagttatgggtttttgctataaattcacattcctgtgttttctccttagggtgtgtattagtcggttctcatactactaacaaagacatacctgagactgggtaatacataaagaaaaactttaatggactcatagtttcagaggcctcacaatcatgaaggaggagcaaaggcacatcttacatggtggcaggcaggacagcatgtgcaggagaacggccctttataaaaccatcagatctcgtgagagttattcactatcacgagaacagcagagggaagacccaacccatgattcaatactttccactgggtccctcccctgacatgtgggcgctatgggaactacaattcaagatgagatttgggtggggacacagccaaaccatatcaggatgctacatgcagggagtcattagcttgcttgaggaaaagtcaggaggcatgaagcttctttcttgaaactgagtgctggcaaacctgattgtaggagttccaaatggggtcaaacagacttttctccctactmtctatctctccatggcctctcctctatttcaaccattcaaatcttctgtcatggagagaatgct

SEQ ID NO: 161972 - DNA, 391 bp, Homo sapiens
atttttaaaatacccaaagaattgagcaaaaaggactttggcaaggcaggttgttggatttaaaaccgttctcccattaatgccaaagccagcagaggtaccaactatagctccacggccagaagataccagcagctctgcctttactgaaatttcakctggagaaaggtccacaggtgaggtttcttccaaggagtaatttctcttatttgactcttttgagatccttttctcacataattgtcaaatttcaattggagagaaactgtgttttctacctcattacggggtcagtgctgaggagagtaggaactcaggaaatgcttcttgattgactttagtctgctgtattgggtgacaaattgaccacagaccaaataacacgttggaa

SEQ ID NO: 161973 - DNA, 565 bp, Homo sapiens
aagcacaatgtaaggtattaraacacacacgtataactggatgaataaaatttaattcattagaattctatttgtggaaagctgtatctgtgttgagaagaattcttgatgtgtgcccaaaacttgaaattgaccactgatgtgcctttgaaatgaagactcagtgtggctttgctgaacacctagaagcatttttgtacacagtgtttgggtagggtgtgggtctgagctgaattactcagcaatagaacagaggaaagagtaagtgaagatgaggtctgagtgtaactgacggaggtaatggaagtgtggaaatatctatgggggactactaagtgttctgctgggtatacacaatgtaaaccttttttgttctctctttcaggagatctttggtagcatttctttgttgatgcaaacatttgtatgagaggcgtccatgaggggaaataggcgatgtgtagggcttggagtgtaaagagagagattcatgcagatttcaactggagaatgaggattaggtctaatctgggagaataacagcagctgattgagagtttgtaag

SEQ ID NO: 161974 - DNA, 393 bp, Homo sapiens
tctagatggaattggagacccttattctaagtggggtaactcaggaatggaaaaccaaacatcatatgttctcacttacaagtgggggctaagctgtgaggacacgaaggcatagaatgatataatgaactctggggacttgaggggaaggatggaagagaggcgagggataaaagactacacawtgggtacagtgtacactgctcaggtgatgggtgcaccaaaatctcagaaattaccactaaagaacttatccatggaagcaaacaccacctgttccccaaaatcccaatgaaataaaaataataataataaatgatttaatttcacagaatttaaaaaagttcactgttcagagtttataataatgaagtaagaatgaaaagtgtagca

SEQ ID NO: 161975 - DNA, 513 bp, Homo sapiens
tttaggctcacataggtaattctttttaacacagacagagctgtccacaaatagaattctgatgaatgaaattttcttcatcttatgcatatatgtgttctgatacctttaattgtgctttcatttttattttctatttaactcaaatctgccactaccattaggctcctcattcatgcattcactcactgaataaatgtttgtggagaatatagtgtgccttacatggagctaggcactgggaatataaaaagcggtgctccttcctggggmttagcccaagcaggttcttggctttgtacagaaaagaattcaagggcaagccagtggtgttagatagcatgttttattaaagcagcagaggtactgctccttgccaagcagggctaccccacaaacagtgtgtccagagtagcagctcaggggcagttctgcagtcatatttatgcccacttttagtgatacacaaattaaggggcagtttatgcagaaatttttaggataagagtggta

SEQ ID NO: 161976 - DNA, 513 bp, Homo sapiens
tttaggctcacataggtaattctttttaacacagacagagctgtccacaaatagaattctgatgaatgaaattttcttcatcttatgcatatatgtgttctgatacctttaattgtgctttcatttttattttctatttaactcaaatctgccactaccattaggctcctcattcatgcattcactcactgaataaatgtttgtggagaatatagtgtgccttacatggagctaggcactgggaatataaaaagcggtgctccttcctggggcttagcccaagcaggttcttggctttgtacagaaaagaattcaagggcaagccagtggtgttagatagcawgttttattaaagcagcagaggtactgctccttgccaagcagggctaccccacaaacagtgtgtccagagtagcagctcaggggcagttctgcagtcatatttatgcccacttttagtgatacacaaattaaggggcagtttatgcagaaatttttaggataagagtggta

SEQ ID NO: 161977 - DNA, 626 bp, Homo sapiens
ataataaatatagagaaagcagtattttatgttctttgaaacgttcagttcctatttaaaatgttggatattaaaaaytgtcagaatttactcaccctaatgcaacaacatgaagcactatctggaaaacacatgcattcttaaaattaaaatgctgtacttgacagtggatcaaagataattctatagactcgaccctaatgagagtaaaacaatcctccagagcattctgtctcatttgtttgaattccatattcaataagtaaccctatgtttactcattttgtttcttaggcacttagttggtgcttgaaagggctatcttttttacagaaataaatgtcccaatggctagtatggcattataaattagaaaattaaaatttgttcattagtttactactagaatattatacagatttatataaatctgatcatctgtgttgtataattttggaaaaaagaaatctataaagctgaagatcagctcctagaccagagttaatcccccaagacaaaattactagaagaaacagaatttgtagacattaatgtcctctcttgatatttctgagttatattgtttttcttataggatgatttctacctaaatttgaaagttaaaa

SEQ ID NO: 161978 - DNA, 585 bp, Homo sapiens
gacagtttcctgttctacttctcatgtaaaagttctcattttctgtttttaaggagggaggaagsagattgcgttttgagagggaaggcagactaggtgaggaaacagcaggcgtatctatcccaggaagggaggagacagaggttgggttccacctcctctaatctcttgaaattgtgtgggtaaaatgggtgaccagagatttctggaatctctgcaaccattccagaagtccttgcaagttgaaggatccagaatcttctccactgatattcaaaccagagtggaaactgccatcagttttcaaaacacagtagccaaggcttggatggatttagatcttgcatcaaatgcaggaaatcccagcctactggctggctggccaaccaagtcaatttcattcatcttgcaacaaggcctccttgaatttttcaagattaattttatgatcacatagggatttatattcatactctttccatttcttactaccttcgtggctgccaccccactcctagccaccatcaactgttgtacgattactgcaattgccttgtcttcctgttcacagctgtgctcctccca

SEQ ID NO: 161979 - DNA, 606 bp, Homo sapiens
tcttctacattcattcatcatttgttttatgcttatttgcttttttcttctcccatattcactatgcatgtaataagatagaaaagtaattaaaactttctgtttatcacagcagtggttcactaactttacagtttataaaagtcacataaagtgcttgttttgaaaggcagattcctaagtctcatagctataaggttatacctcagtcgacctgggatgggtgacaatacttgtaattttaaatatgtatcccgaggttctaaatcgtgtgacccatgaactatcttttgtgaatttctatttcaatgacttacagcgcaatagacaagtcatgtaaactactaattacaatatgtcttgaaaaattttctaaatatttctggtgcctctgaagccaagaaaatgatctttgcctagaaaatacattcagagragactagaggtagacagcaccaaggaggccatcgccatagatagagttgctaactgatgttaataaagaagtttggactggaatagctataaggaggaaaaggactgaataaattgtggaaacaattaaaacaaaaaaattgacaaaacttctgagttgttgaaaaaaga

SEQ ID NO: 161980 - DNA, 606 bp, Homo sapiens
tcttctacattcattcatcatttgttttatgcttatttgcttttttcttctcccatattcactatgcatgtaataagatagaaaagtaattaaaactttctgtttatcacagcagtggttcactaactttacagtttataaaagtcacataaagtgcttgttttgaaaggcagattcctaagtctcatagctataaggttatacctcagtcgacctgggatgggtgacaatacttgtaattttaaatatgtatcccgaggttctaaatcgtgtgacccatgaactatcttttgtgaatttctatttcaatgacttacagcgcaatagacaagtcatgtaaactactaattacaatatgtcttgaaaaattttctaaatatttctggtgcctctgaagccaagaaaatgatctttgcctagaaaatacattcagaggagactagaggtagacagcaccaaggaggccatcgccatagatagagtwgctaactgatgttaataaagaagtttggactggaatagctataaggaggaaaaggactgaataaattgtggaaacaattaaaacaaaaaaattgacaaaacttctgagttgttgaaaaaaga

SEQ ID NO: 161981 - DNA, 571 bp, Homo sapiens
ttcactatctagtgaaataatgtatttaacattcaaacgctacatacataggcacacatatactatttttaatgcatttatttgtatgtatttgatgaatccagggattttaattgttttacttctgtaaaatatgaatctttaaattaccattaaaagtggactgcaaggtttttgccaactatttcctcatgggctaacaacaattgagaaagctttcatcytccttatattaggatgaaaagcctgtctctgacgttaattctgtagatagatgggtgaatacttttccttttacgatgcttgcctttcaactgcccctcctggtaaacctgaaaggcaacctctaagccaggcacattgtgaagtacttctacagatctagagagataagaaatcagcaaaagatgaagctgcagctagatttctcatgccacactgaatgtacttcagaaatacttctttaattttaaaactttttaatagtatccactattctggatattgcgtgatataaagaaattaaaatacagtgctccaatctagacaaacagttttacattagtgaatt

SEQ ID NO: 161982 - DNA, 602 bp, Homo sapiens
ttataaataggctgtatatatggctatttctagattatttccgtggtcagttttttactcttgcgtcaacagcataatgtctcagttattgtgacattttgataaatcttggtatgctaatgttagtactcttttttcttgtttttgttcacaattgtcttgcctcatttttgttagaaaattttacacaattttattagacttatatttaagaatctgacgcacttcatgctcaatttaatgctttcttttacattttttattatctaattctaatactaagcaaattctaatacatatatctgcagatgcttytgtgtattttgtgtgcacagtcaatgctatttgcatacaatgttcatttgtttatttattttcaaactttataatttacatttatttttataacagtattgcacaggctagggcatccaggacaaagttgaacagaagtgataatatcagaagtccttaccttattctcaatcttggtaagaaatttttatatttcattataaaatataacgcttactatagatatttatagatattctttttcagcttaagaagattatcctttgtttctagtttgttaaaagctt

SEQ ID NO: 161983 - DNA, 490 bp, Homo sapiens
tatacaaattttagaaataaaaactataactatttcttagaaatgttatattctaagatcttcctatgttaaggaagatctgcttcaattggcaagggtagtttcaactgaagtatatttagaatacttttaggaaaattgttgatgctatcatccactaatgattatcatgtagttatgttaacagtctcatttactacttaaaattgtgtgttttccagttttagtttgtgtttccttttagtgatgagtgygtgtgtgtgtgtgtgtgtgtgaatgcagacgagccacttgattaaaagtaaagtgccatttgacagtttcttgaactttgagagtagattttttaaaatatcatgtgattgattaaatattgataattggatcctacgtttaaataaaaagcttttggtcatattgtattagagcctgaacaacaaaaaaagtgtttggaaatgtctttgaagtgagctaagccaaccagatatca

SEQ ID NO: 161984 - DNA, 424 bp, Homo sapiens
gtacatgctggagtggttcgaaatcacggtggttatgttgatgtaatgcctgtggacaaaagaaagacctacattgcttcttttcagaatggaatcttctcagaaaggtaaaaacaaaacatatgtatgtatacttttaaataccatctatcactgtattcatgattgctttacagttgacccacttgaatatttttaatttttttcaaagttaagtggcagagccagtgtgttcctttgcacacttgtgtaccagtcagccttccagggatgggagaagctgtagtaccagaggtgcctgtctcctgcaggcttataaaaatcaacatgaaaatcggattacaagtcagaactactcttttgttaattrgtcttataattaggaactttctttcatcctcttttggattttctagattagttt

SEQ ID NO: 161985 - DNA, 511 bp, Homo sapiens
agtcttttcctgaccgtctgatgttataagtcagctaagacatgtgagcggcatgtatttgactcagtgtattgtatcctaggcattctttgtggaccacaactcccgcaccaccactttcattgatccccggctcccacttcagagcagtagacccacaagtgcgctggttcatcggcaacacctgacaaggcaacgcagccacagtgcgggtgaggtgagtcatgcgttttgggsactgacctgttggttgatagaagcttctagtatgtgatggtttgaggaatttgactgatttttttaaagcattttttcttttttttttttttgagtttgatttagaggctgaaaagctttcgaatgttgacagggcttctctggaaatacatacagcctaaatcacaaatttaaaaaggtaggatatatgaggcaaaactgacgaaatttaagattttttgactcagaggaaggtgagagggtgttgataatgtactaaaatgttcgagacagg

SEQ ID NO: 161986 - DNA, 541 bp, Homo sapiens
ggctgactctgctttgagttttaaatacaatcagcaaggcaactgttttctgcatttggctcagtgttgctgatatattttcacataagtcattgcaagttagagtcctgagaccacactagtttgtgtagggatcataatgagctttcaggtcttactacctaagagtagaacaaatattaagtctcttcagggacaaattatttgggggataattctgtcggataaatcattacattacccattgttctaaatagrtatacctctttatcgccttcactgctccctctactcactaaaataactaaataggccacattctgatttcttatctagagcaccagaaatgctcctcactttgttaaaaaagaacttcattagggcaagaagcagtggcaattaagttaagaaactcatcccagcctcagacctgaagtaattccctggggctgaatagctctttaagcacagaaatcttaaggctggtcttataattaattatgtcatttcatcttcctcctctccactcaatgaaacatgt

SEQ ID NO: 161987 - DNA, 455 bp, Homo sapiens
gaatgtgggtttaggaaaaaacaagcaacctcttggcctcttttgggccttggtccattgaactgctgtaacagaataccagagacttggtagtttataaacaacaaaaatttatctcttacagttctgcagttcaagatcaaggctctggcagatttggagcctgttaagggctggcttcctggttcatagattgctgtcttttcactgtgttttcacatggcagaaggaatctatggggtttcttttataagggcactaatcccattcatgatagttccacctttaggatctagtcacctctcgaaggccccatctctaaacactatcacattggaaattaggttttaacatatagattttgagaggacacaaacatkcatttttaaagcattcagtcttcttagacctgactctacttatactcaaaagatgtcattcatatggttgaattc

SEQ ID NO: 161988 - DNA, 435 bp, Homo sapiens
tctgagcggggagaccttggacttaatcacatagctaggaagaaggcagcatggtttgcatccagatgggcttgagttcaaattcagtgctcttttaaaaaatggctcttctgctgctgaagtaacaggcctgttaaacagcaatcttcaaacttaaataatgggtctctattggaacckgggtttgtagatacacaaccaaacaggctggcagcttcaaccttagtgtaatctgcaaaggttatgagaaacacctagccactcttcctttctaaaatttcacagtggaagattaatgtatgctatgcatcaaaggtagtgtttttgtcttctacaatttaggaatgtcaactaagttaggtgatgtcttctgacttggagaataagctgtttttgtatccaaggacacaaatttacacctgaaatttgtattac

SEQ ID NO: 161989 - DNA, 546 bp, Homo sapiens
tatgtatatcatctgattttaatcacaaagtgaatctttcatctagcatgttgcctgcctctcctttaatttctaatatggtaagtattgagcatactaaccatgtcctatggactatacttactagattaccatatttaccattacttatctacrtagatataacctgcatcaaccaaaactctttgaggtcctgagtaatatttgagtgtagaagtttgagaaccaaacagcttgagaaccactattctcatcatagtgaccgatttcaagtctttcaagactgggacatttgttactctatggccaccctgtatcttaaccccatcagtgtttagagaattcctcaccttttgagtccatgacagtgaaagtgacaaatatactccttgtagcttgggaggaacaattaccttaggttctatcaaccaatcacacatatgcacttgaacctttgaatctggagctagtaagtctgggccatgaagaatgctgagacggaaggagcaatcaggccctggaagcagcaggtctagtggcatctcc

SEQ ID NO: 161990 - DNA, 536 bp, Homo sapiens
taagtaagaggctattgtggtaaagttccctctgctagagggaactttggggggtaaatggcatttactgagtactttacgtgttccatttgccttgaatgttgatatactttactccttacttctttcaggtatctgctcacctatggccttatctgtgacatcytccccaaccaccctctatgaaataacattctccattcctgtctttcactagacctcatttgttgcgttatttttcatcatagcattaatcagctcttggcctacaaagaatagtatgtttatttatttgtctattgcctgtctctgagacatgaatgctgcattcatgagaatgacagttctacaaagtagttggcttacctgttttgcttaggcgctcaacaaatatttgttgaacaaacactccaagggttgttaaatactttaaatatgtcattttaattttccctacccttcaagtcacatattcccagactttttatagacagagaaactgaggttggttactcaatacttgcagagcataatgt

SEQ ID NO: 161991 - DNA, 536 bp, Homo sapiens
taagtaagaggctattgtggtaaagttccctctgctagagggaactttggggggtaaatggcatttactgagtactttacgtgttccatttgccttgaatgttgatatactttactccttacttctttcaggtatctgctcacctatggccttatctgtgacatcctccccaaccaccctctatgaaataacattctccattcctgtctttcactagacctcatttgttgcgttatttttcatcatagcattaatcagctcttggcctacaaagaatagtatgtttatttatttgtctattgcctgtctctgagacatgaatgctgcattcatgagaatgacagttctacaaagtagttggcttacctgttttgcttaggcgctcaayaaatatttgttgaacaaacactccaagggttgttaaatactttaaatatgtcattttaattttccctacccttcaagtcacatattcccagactttttatagacagagaaactgaggttggttactcaatacttgcagagcataatgt

SEQ ID NO: 161992 - DNA, 660 bp, Homo sapiens
catggtatatatatacaccatggaatactactcaaccataaaaaggaacgaaataatgacattcacagcaacctggatggaattggagaccattattctaagtgaagtaactcaagaatggaaaaccaaatatcttacattctcactcatatgtaggagctaagctatgaggacacaaaagcataagaatgatacattgaacttttgggacttgggggaaagagttgggggtggcaagggataaaagactacacattggatacagtgtacactgctcaggtgatggtgcaccaaaatctcagaaatcaccactaaagaacttactcrtataaccaaacaccacctgttccccacaaatctattgaaataaacaagaataacaatttaaaaaaaaagaatcactgctctcaaggtagatatcaatttgtttaaggcaaacagtagaaaatatgcccttcagaaactgctgtaggtctggggtaggcacatgatgtaatttggcccaattagactgaaagaaactctgttatgttgtagctggtgaaaggtttcactaaaaaagaaaaaatctattttgcagaatatttccatacaatcagcataactctctactctaggtatggaatgtgcatagtgactttattccaaatagtatagtat

SEQ ID NO: 161993 - DNA, 660 bp, Homo sapiens
catggtatatatatacaccatggaatactactcaaccataaaaaggaacgaaataatgacattcacagcaacctggatggaattggagaccattattctaagtgaagtaactcaagaatggaaaaccaaatatcttacattctcactcatatgtaggagctaagctatgaggacacaaaagcataagaatgatacattgaacttttgggacttgggggaaagagttgggggtggcaagggataaaagactacacattggatacagtgtacactgctcaggtgatggtgcaccaaaatctcagaaatcaccactaaagaacttactcgtataaccaaacaccacctgttccccacaaatctattgaaataaacaagaataacaatttaaaaaaaaagaatcactgctctcaaggtagatatcaatttgtttaaggcaaacagtagaaaatatgcccttcagaaactgctgtaggtctggggtaggcacatgatgtaatttggcccaattagactgaaagaaactctgttatgttgtagytggtgaaaggtttcactaaaaaagaaaaaatctattttgcagaatatttccatacaatcagcataactctctactctaggtatggaatgtgcatagtgactttattccaaatagtatagtat

SEQ ID NO: 161994 - DNA, 631 bp, Homo sapiens
ccacccaccccctcattcattgtgagccatgaagttgggcattcgttgccctggaggatcaggtagctaaaagagatggtgacccgtgaggatctgtgacagtgaatgtgcaggagattttggtaagtctgcttatatagagattctgtttaagacccctaggtgttcctcctaaaaataatgtggttttaatgaaggaaaaggggcctatttctcacctcattaacaagctctgagaagtttctctgtgtcattatatagttagtagaagagggttgtgtgttgtaatcttctatttctactcttttatctcctgggtccaaacactttgtttctcccttgaagaagcagaattaacataactaattccagtattagtaacaggattaatgggagtagctctaagttgtaatttaaaataataataaatgaaatcactttggataagtatcatgttcaggcatggtggctcacatctgtaatcccagtactttgggaggccaaggtacgcatgtgtgcgcgcrcacacacacacacacacacgtttcacttttctatttagagaaaatgtgtagccaactagacttgtaagagaatgaagaagtcgtgagacacaaagggacaagcttaa

SEQ ID NO: 161995 - DNA, 614 bp, Homo sapiens
ttgaccatttaaaacaacagagctgactttacaaaagtaaaagctgcttagtagcaacagagctagtcttcccgtcaactgcttgctgtttacgagccacaacgctggccgacgtgtaaacgatgacacgatccgatcgaggtacgatatatttttaagtgaacatacacatttggtctagtaaacatcaataagtctaaacacctgttaacaagcacacttcattttaggacaagaggttttttgttttttttttttttttttttttacatatacaaaatcccacaaatttaatgtgcgtcaatatccatgcagtaaataaatgtttttacaaatagagttctttttaaatgataaaaatattacactggacccaaaattccatacaaacattaatacatgatttctcatccattttgactaaatataggattactgaaaatgtgctgtaraaaggccactctcctgtacagttgtgcaaagtctgcaaaacgatagtgattcaatggtggtttcaaaagcaaagaaaaagatccccgctgtggagtttttactttctcctctacagcaaaaatattcactggcatatatctgaactcttaaagatgaaagta

SEQ ID NO: 161996 - DNA, 496 bp, Homo sapiens
gtcatttttatttttaacatacttagtttctttcataaaaggcaaaatgtattaattcccagttaacaaaagaaaatacatctcataatgaagaaatctacaaccttatctgaatttccttatacattttgasaaattattatttaaatcatatacctcaggttattcatatagaaaatgcaaccaatagagaaaagtataagatacaaagttgtcacttagaattcctaaccccagtggtccccattgttagcattagatgaacaagtactaaccttgcttttatttttcctctaaaaattggcactttccaggtcaatgactaaaaataaacgtcatcatttttaatagccgactagtcaattttattgatatgccattatttatttaactaactttacacttacagaaatttagtttgtttctagtttgtcactattacaaacaacgttttaatgaacaatattgtacatttgttcactgaattatcatgctg

SEQ ID NO: 161997 - DNA, 449 bp, Homo sapiens
aatcatagttttaatagatagttttatgmtaagtttagatttcagaaagagtgcgttctcttttatgctttcagaaattatctggaatttggaatttaaatcagctgcaggtcttcagatttcgagtacagtatgccgttacataacacctccacttactcatctctgttcattcttcagtaacataacccccaacaaaattttgctgggaaaaaatgcatacttttcagggaaaatacacagttcaatataactttttaaaaaattgtgaaaacatcaaaatgtagatgaatcaagttttaatatactgtatgatgggtggatgagactgtccattgcactatttgtttgaattttcaggcatggtttggcagtgcaagaactctgtaacattaacaaattcaataaaaagtaaatatatggagaaaaaaaagaaatgatctgtacgt

SEQ ID NO: 161998 - DNA, 596 bp, Homo sapiens
acatttatgttatgcagctatctagtttagatcagagacgcttttacactgtttaccttggatatgttaatacttatttgcatatctttctaaaaccaatttcagtatttcttcctaccttttagaaatatccattacactctgacaatatatagctaaagcaactattggaaagatattttcaccatttccttctgcttagaaaatctaaactttccctacattcaagaaaactggccacttctttgctttttctcctgttaaataatcagattcaactaagatctatgttaatttttctagatactggatactgarcattttctattttgtcctatgtgcttttttctttcaacactgtctttaattttgattttagttctataaagtagcatacatttaattctttgcagtcccaaataataatgcaaaaatggtaacaatgaaaaatcaatcttaaaatgttatttaccacagatatctgcatacttcacataagtccaggatatatgcatatgtatgtatatatgtatgttatatatacatgcacagacacacatgtatacatgtatatacatacacattagagatatata

SEQ ID NO: 161999 - DNA, 596 bp, Homo sapiens
acatttatgttatgcagctatctagtttagatcagagacgcttttacactgtttaccttggatatgttaatacttatttgcatatctttctaaaaccaatttcagtatttcttcctaccttttagaaatatccattacactctgacaatatatagctaaagcaactattggaaagatattttcaccatttccttctgcttagaaaatctaaactttccctacattcaagaaaactggccacttctttgctttttctcctgttaaataatcagattcaactaagatctatgttaatttttctagatactggatactgagcattttctattttgtcctatgtgcttttttctttcaacactgtctttaattttgattttagttctataaagtagcatacatttaattctttgcagtcccaaataataatgcaaaaatggtaacartgaaaaatcaatcttaaaatgttatttaccacagatatctgcatacttcacataagtccaggatatatgcatatgtatgtatatatgtatgttatatatacatgcacagacacacatgtatacatgtatatacatacacattagagatatata

SEQ ID NO: 162000 - DNA, 483 bp, Homo sapiens
acctttttacccctacaccacttatttgctgaaaacacaccccacaggcaagcagacagcataaactaatcggaggaaggagtttgtgatatatcttcactttctgcctcccctactccgacccaacaaacgatttatatgtaaatacacacagagctaaggcagacactaagttgcctaaattaaatgacagtcagtccctgaggaccagcaaacattctccaggacatcaaggattatggtcgttctcctcaagggcctgacaagacaaagggctrtttggataataagacatacagtctcagttcatctatttgcatacatagaaattaaagtctgattggtgagcatgtgggtgtatgattactgtatgtacagagttccttccattctttctgcctgttttggtaacacttattacaatattttcccccttaaagggggctcaatttgcattaactccatatcttaaatgccataaat

SEQ ID NO: 162001 - DNA, 506 bp, Homo sapiens
tgtaatgtattccagagaggtcagaagaagaggtaatatatggraaaactttctgagcattagatctgtccccatatggaactggcactcttgtaaaaggccagatgaccatctggaagagataccaaataggagtttctacattgtctctaaatttcctccaagtgccaagagtctgccatcatctctctctactgtgacgattctggattttctctggagctgcatggatcacaatcatatgtgcatttctgaaatactacttgatagtgagaatcgccctctaaagcatgatcatttctaattggatatattttctcaatcaattactgtactaatttaaatgtggaactgtgaataaattttgtccaacactgaataattcagtcactcgagggggagtcattgaaatgcaaagtgttgacagaactcttttgaacgaaagttccaaaaccgatccagaaaacagatggccccaggattagctcactctgccagaatttctg

SEQ ID NO: 162002 - DNA, 506 bp, Homo sapiens
tgtaatgtattccagagaggtcagaagaagaggtaatatatggaaaawctttctgagcattagatctgtccccatatggaactggcactcttgtaaaaggccagatgaccatctggaagagataccaaataggagtttctacattgtctctaaatttcctccaagtgccaagagtctgccatcatctctctctactgtgacgattctggattttctctggagctgcatggatcacaatcatatgtgcatttctgaaatactacttgatagtgagaatcgccctctaaagcatgatcatttctaattggatatattttctcaatcaattactgtactaatttaaatgtggaactgtgaataaattttgtccaacactgaataattcagtcactcgagggggagtcattgaaatgcaaagtgttgacagaactcttttgaacgaaagttccaaaaccgatccagaaaacagatggccccaggattagctcactctgccagaatttctg

SEQ ID NO: 162003 - DNA, 596 bp, Homo sapiens
attgtctctaaatttcctccaagtgccaagagtctgccatcatctctctctactgtgacgattctggattttctctggagctgcatggatcacaatcatatgtgcatttctgaaatactacttgatagtgagaatcgccctctaaagcatgatcatttctaattggatatattttctcaatcaattactgtactaatttaaatgtggaactgtgaataaattttgtccaacactgaataattcagtcactcgagggggagtcattgaaatgcaaagtgttgacagaactcttttgaacgaaagttccaaaaccgatccagaaaacagatggccccaggattagctcactctgccagaatttctgggacacattttaatctggctcgtatataatctgatctgtaaaataaaaacctggtttcaggcacagctatartcaattctatacaattaattaaaatttcttccagcatattcacagaaacaaacctgaatttattttaagctgtcctaatacaccatattcaactctatttagtttatgtgattgaaatgagctggtaaaaaagaaaactgcctgaggaggcaggaaacct

SEQ ID NO: 162004 - DNA, 508 bp, Homo sapiens
aaaacaaatttaaaaaacaagacttaattataaaattggaattgatcaccctgaaaagcagtgaaggtccaatggccactaaattcacaagagtgtatacgtctcatcgaagattgttatgggggtccatctgacccatttccaaccctgaatgactatgatgttatgattcaagacttcctttttatattgaaagatgccttattggtttgtatggatttgaggacataggatgtacaatagcatttgagtttatttgtagcaagctttttatccccgctttgcatagaatactggtgcagaaaatacaatttacatccttttcaattgtttcagattgagcatctatcacttaagtaaggtttgcattcttggttaccatctctttactaatttatctattattttggattcaatgtaaaatgggtaggtacacaaatgagaagcagacagaatacctgatcctcaggaatttagattataaygggggtgacagacacataaaacc

SEQ ID NO: 162005 - DNA, 598 bp, Homo sapiens
atagaaactccatgcagaggttcaattcattgatcatggatgaattcaggtgacatacatgttagtttggcacacaagttttaaaaattaacatggaatttgtttcaaatatttaaatattcatccattgaaaatcctaatatatattactttgggagrgtggatgtgaaaaaaaccaaataatatagcagtgacaagcctgcatttctaccttttcactgttgctgaaaactgacttgcagctgccctgtatgaatggtttatgtccaatcaagtttgccacagtgttcaccacttcttcatgagttagactatgtcattcactcacctatagttctgcctggctcctgtaatatttaaagtctgaggatgtggatttggaacattcttcgccactcaatattgacaattattattggcttaagccacaggataaaatttttatgtactgtatccatttgtaatcagtttattgagtatgtaagaattaatacacattcagtgctaaatatagccatctatatcttaactgaattatattgctcatcttgtattaattttctctcccaaaaaacagagttattatagaaacatatga

SEQ ID NO: 162006 - DNA, 598 bp, Homo sapiens
atagaaactccatgcagaggttcaattcattgatcatggatgaattcaggtgacatacatgttagtttggcacacaagttttaaaaattaacatggaatttgtttcaaatatttaaatattcatccattgaaaatcctaatatatattactttgggagggtggatgtgaaaaaaaccaaataatatagcagtgacaagcctgcatttctaccttttcactgttgctgaaaactgacttgcagctgccctgtatgaatggtttatgtccaatcaagtttgccacagtgttcaccacttcttcatgagttagactatgtcattcactcacctatagttctgcctggctcctgtaatatttaaagtctgaggatgtggatttggaacattcttcgccactcaatattgacaattattattggcttaagccacaggataaaatttttatgtactgtatccatttgtaatcagtttattgagtatgtaagaattaatacacattcagtkctaaatatagccatctatatcttaactgaattatattgctcatcttgtattaattttctctcccaaaaaacagagttattatagaaacatatga

SEQ ID NO: 162007 - DNA, 234 bp, Homo sapiens
gtgctcataatgaccctatgtggtgtgtactttatttaatattaccactttccagaaaagaacacagaggcacagggaggttaagaaacttgcccargagtacacaagaagcgacagaagcagaatttgaatccttccagactggctcttgggtccattgtttttatccccaagcttttcccctggggaactcaggttctctctggtaggtcgcactcagcatttgaggtctgg

SEQ ID NO: 162008 - DNA, 634 bp, Homo sapiens
attaacgtcatacattattgtatataacatattaacgtcatacattattgtatataacatattaacgtcatacattattgtatataacatattaaygtcatacattattgtatataacatattaacgtcatgcattattgtatataacatattaacgtcatacattattgtatataataatatatatcaatattctatatataatatatcaatattctatatataatatatcaatattctatatataaaatatatcaatattatatatatatatatatatatatatatatgtagtgggaagatgatcatgattcctatataacagatgaggaaaacaaagtcccaagatcccacagtgaggaaatagcagagtccagatttgctgcaaatctcaggatagttctactataccctgatgcatggacattagtgcagtcattagcaacgtgtgtgcatgccattcttagggcctagtgtcccaagatgcatctcctctcacccctgatcagcaggggaattgtgaaggaaggactcagctgttcttccctgttggttccaaccagcctggggggatcctggagtgggaagtcccaaaaggggcctggctgctggcccaaagacctagactcaagaa

SEQ ID NO: 162009 - DNA, 634 bp, Homo sapiens
attaacgtcatacattattgtatataacatattaacgtcatacattattgtatataacatattaacgtcatacattattgtatataacatattaatgtcatacattattgtatataacatattaacgtcatrcattattgtatataacatattaacgtcatacattattgtatataataatatatatcaatattctatatataatatatcaatattctatatataatatatcaatattctatatataaaatatatcaatattatatatatatatatatatatatatatatgtagtgggaagatgatcatgattcctatataacagatgaggaaaacaaagtcccaagatcccacagtgaggaaatagcagagtccagatttgctgcaaatctcaggatagttctactataccctgatgcatggacattagtgcagtcattagcaacgtgtgtgcatgccattcttagggcctagtgtcccaagatgcatctcctctcacccctgatcagcaggggaattgtgaaggaaggactcagctgttcttccctgttggttccaaccagcctggggggatcctggagtgggaagtcccaaaaggggcctggctgctggcccaaagacctagactcaagaa

SEQ ID NO: 162010 - DNA, 634 bp, Homo sapiens
attaacgtcatacattattgtatataacatattaacgtcatacattattgtatataacatattaacgtcatacattattgtatataacatattaatgtcatacattattgtatataacatattaacgtcatgcattattgtatataacatattaacgtcatacattattgtatataataatatatatcaatattctatatataatatatcaatattctatatataatatatcaatattctatatataaaatatatcaatattatatatatatatatatatatatatatatgtagtgggaagatgatcatgattcctatataacagatgaggaaaacaaagtcccaagwtcccacagtgaggaaatagcagagtccagatttgctgcaaatctcaggatagttctactataccctgatgcatggacattagtgcagtcattagcaacgtgtgtgcatgccattcttagggcctagtgtcccaagatgcatctcctctcacccctgatcagcaggggaattgtgaaggaaggactcagctgttcttccctgttggttccaaccagcctggggggatcctggagtgggaagtcccaaaaggggcctggctgctggcccaaagacctagactcaagaa

SEQ ID NO: 162011 - DNA, 585 bp, Homo sapiens
agattgcatacatagatgtttgcatatatgactgtatggctgcatctattctcccatcttgttttaaaaggtggcgggggtgggggtgagttgactatgatttaattaatttgcaaggtccctaaacacaagattaagtttgggtttctctgtgttctttttccttatagcccagcactgagtggatgctcaggagctggaggctaatcatagagcatggcgaggtcggcagcagcagggcagaatgatcagggaagaccttgttgcaggcacagacccaaacaaagctaaatcagaccaaacayagggcagtgttagctctgtcttcagtttcacattcggaccttcaagggcagtgtgccttgtgtatttagggtactatattttctcccagatcaccaaggtttctgatcactgaactgatagaggggtattctgtgaggacaaagagagagaccccgtatcaggttggatattgcctgaaactcagaggtagctcatccaagtgatgagctgtggaaaatttgaaatgaggagaaaggagaatgaaacagttgtcttctaaaaatatagatatcaccaccc

SEQ ID NO: 162012 - DNA, 585 bp, Homo sapiens
agattgcatacatagatgtttgcatatatgactgtatggctgcatctattctcccatcttgttttaaaaggtggcgggggtgggggtgagttgactatgatttaattaatttgcaaggtccctaaacacaagattaagtttgggtttctctgtgttctttttccttatagcccagcactgagtggatgctcaggagctggaggctaatcatagagcatggcgaggtcggcagcagcagggcagaatgatcagggaagaccttgttgcaggcacagacccaaacaaagctaaatcagaccaaacacagggcagtgttagctctgtcttcagtttcacattcggaccttcaagggcagtgtgccttgtgtatttagggtactatattttctcccagatcaccaaggtttctgatcastgaactgatagaggggtattctgtgaggacaaagagagagaccccgtatcaggttggatattgcctgaaactcagaggtagctcatccaagtgatgagctgtggaaaatttgaaatgaggagaaaggagaatgaaacagttgtcttctaaaaatatagatatcaccaccc

SEQ ID NO: 162013 - DNA, 464 bp, Homo sapiens
tccttcttacttgggaggcagcacttcttatttcttcctgaagtaaaaaaaaattatacgtatgtgtatatatatgagtatttctatatrtatgtatgtatgtatgagtctgttctcatattgctacaaagaaataacctgagactggtaatttatgaagaaaagaggtttggttggctcacagttctgcaggctgtacaggaagcatagtggcttctgcttctggggaggcttcaggaaacttacaatcatgacagaaagtgaaggggaaagcagacacatcttacatggccagagcaagagaaagagagagagggaggtgctacacatctttaagcaaccagatctcatgagaactctatcactatacagtactcgtgggatggtgctaagtcattcatgagaaactgcccccatgatccgattacctcccaccagtccccacctccagagtcagggattac

SEQ ID NO: 162014 - DNA, 610 bp, Homo sapiens
attatgtagctactatgtgccaggcagcagggattaaatggtatcatatatataatggtagctaaaaaatgattatgatggtaataataataatataaatagttgttatttgcctccctagaattccttttcctttccttttttttgagacagagtctcgctcttttacccaggctgaagtgcagtggcgcgatctcggctcactgcaacctccatctccctggttcaarcaattcccctgcctcagcctcttgagtagctgggattacaggtgcatgccaccatgcccagctaatttttttgcatttttgtagagatggggtttcaccatgtttgccagactggtctcgaattcgtgacctcaggccatctgctggccttggcctcccaaagttctgggattacaggcatgagccaccatgctcagcctgcttttcatttctttaacaacagatcctgattctgattgcagattcagcccttgcccaggggtttcattcacctggttctaaggacacatgactcaggcctaacccatagaatatgttgcatattcctctgtctacaatcattgattcagagatggcacactacctaatctggtctaatc

SEQ ID NO: 162015 - DNA, 622 bp, Homo sapiens
aatactcccatcttggcaaagttcaagttaccaaccaaaactcattgaattggatttgggaagagatgcacacaattggctcttgtgggaaggtatgtggcagtgccagccagcatcagcacactgctagctaaaagagccaacaacaaatcatttcctgtsccttctaggacgtcttacttttcctaaacaagtacagaatggctccaaaaggaaaataacacttcacctcactaaaggagctacagctgtttttatttttattttatttattctagtcaaataaaaggagcaagtcaggcacttctgggcaacactgttgcatcctggtctcttcactgcacaggactgatttgatttctactttgggattctgctaaagtccggataactttggggtgacttgataagaatctgtggacccaagagaagcagaacagcataatgattgagtatagaatttagattccaaacaaagttccaagtcaattttatctagagaatacaataagcagttcaagtaagatccacggcctctctaaactggagtaaattcataatataacaaattcatagtgcagatgtgaaggttaaataagaaatgtatataaagcatttagct

SEQ ID NO: 162016 - DNA, 622 bp, Homo sapiens
aatactcccatcttggcaaagttcaagttaccaaccaaaactcattgaattggatttgggaagagatgcacacaattggctcttgtgggaaggtatgtggcagtgccagccagcatcagcacactgctagctaaaagagccaacaacaaatcatttcctgtgccttctaggacgtcttacttttcctaaacaagtacagaatggctccaaaaggaaaataacacttcacctcactaaaggagctacagctgtttttatttttattttatttattctagtcaaataaaaggagcaagtcaggcacttctgggcaacactgttgcatcctggtctcttcactgcacaggactgatttgatttctactttgggattctgctaaagtccggataactttgggstgacttgataagaatctgtggacccaagagaagcagaacagcataatgattgagtatagaatttagattccaaacaaagttccaagtcaattttatctagagaatacaataagcagttcaagtaagatccacggcctctctaaactggagtaaattcataatataacaaattcatagtgcagatgtgaaggttaaataagaaatgtatataaagcatttagct

SEQ ID NO: 162017 - DNA, 562 bp, Homo sapiens
ccagaattgtattctgattagaccacagtaaatattactgattactgaagttaatgaaacagactaaacttccattggggggaattttacttataattacttaatctagattccttagaaagcagagcctgaaaatgctatgttggtactactgtgatagggagtgtgatcccatgaagcagaagtgaggggaatgaggcagggaaggagagagagaaattcaagcaggcataactgagctggtcaccactaaatacttctgattgctctatcttacaagaccaggacttttaaaagctgcatcccaagtctggaattaaaaaaaaaaatctatcagttttcatctcccatttgggagcattttgaccatgtggtattaattcctctgtaattatgagttgtgcaattctggggcctgagggagggcctctggattccttggaagttaacagggaatcctaggttgggaagatcgaggttcatggcatgggtatgkagctgggctctggaaggaggtgcctggcagaaataaatggagtggggtgccaaggtggcagctgga

SEQ ID NO: 162018 - DNA, 615 bp, Homo sapiens
aggccagcctggccaacatggtgaaaccccctctctaataaaaacacaaaaattagctgggtgtggttgcacacacctgtaatcccacctgctcgggaggctgaggcaggagaatcacttgaacctgggaactggaggttgcagtgagccaagatcacaccactgcactccagcctgggcaacagagtgagactctgcctcaaaaaataaatmaatcaatcaatcaataaagatacttcttagatatgagcttaatattctacagtggaagagaatatctccactttggccatagtgatttattcatgcatttctagttttggtatactctaatttagttggcagtgagaggaaactggtatgttctattttaccaagctgtttcctacgttcatactcaggttaccaactttcaaagagctggttaccaactttcaaagaactggaattcaatgaaatgcattaacattgaagctattaatttattctttctttggcaatttagaagagctttgggatctgttgggatctcattgtttcgttatcaccatgtatttcttcaggtttagaagatgtaagcagctgagcccaatatatgtccagaagctatcttgt

SEQ ID NO: 162019 - DNA, 374 bp, Homo sapiens
aacttactttggacttctggcctccagaaaaatgtgtgttgttttaagatgccacattcatggtatcttacagcaatcacaggaaactaatacaaaacgctcacgcaacctgatttcaagtcttactctaaagctacaataatcagtggggtttggcactggcataaggataggcatatatattagtggaacaaaatagagtcctgaaataaacccacatmactgatttttgataaagaaaccaagataattccatggggaaaggaaagtctttccaacaaatggttctggaacaatgggataatatacaggaaaaaaatggacctcgacccctacttcaccccatatacaaaaattaatttgacatagattat

SEQ ID NO: 162020 - DNA, 567 bp, Homo sapiens
tgaatttttttcttgtgaatcattattgttcctagatcatcacatcctatttttcaatatgtccctaaacgatcagtgtaaacagtttgcttggaattataccaagctcaccagtatttaagttttaaagcattcttttcctgccttgtaaatatagtgtcaacattttcacctttcctgtattatgacaccatttttatcctaaagaatttctcaagaatttttgacactgattccatagacacatcaatacattattttaatatctagatttaatttcaactaaaaagaaagttaaaataatggtccccatgtcctgggatatatatagtactatgtaaaaaaaaaaaggcaagttatacttatagactcactgtgtattacsgtttgtattaaaaacacagatatttttaagtaaatttcagaatttgtatagaatattgtacaaaatgatttacaatggttgcctttctgaagagaaacggagaggacaagaggctaggagacaagggcaggcaaaatactgtgtgactttatgtaccttttctatttagtatcatgttcacc

SEQ ID NO: 162021 - DNA, 567 bp, Homo sapiens
tgaatttttttcttgtgaatcattattgttcctagatcatcacatcctatttttcaatatgtccctaaacgatcagtgtaaacagtttgcttggaattataccaagctcaccagtatttaagttttaaagcattcttttcctgccttgtaaatatagtgtcaacattttcacctttcctgtattatgacaccatttttatcctaaagaatttctcaagaatttttgacactgattccatagacacatcaatacattattttaatatctagatttaatttcaactaaaaagaaagttaaaataatggtccccatgtcctgggatatatatagtactatgtaaaaaaaaaaaggcaagttatacttatagactcactgtgtattacggtttgtattaaaaacacagatatttttaagtaaatttcagaatttgtatagaatattgtacaaaatgatttacaatggttgcctttctgaagagaaacggagaggacaagaggctaggagacaaggrcaggcaaaatactgtgtgactttatgtaccttttctatttagtatcatgttcacc

SEQ ID NO: 162022 - DNA, 458 bp, Homo sapiens
aggcttccagaggtcatagaagtttaaaatttcagctgtattttttattgactacaaaatctgcaggagggtaaaagttatctgcatgagaacaagctgaaatagtgatcccctaaatagcaataatatatggatgtgttgtatataaaagttattaattttcatttaaaaacatatatatatatatttaaccatttcttagggcaaataactaataataattttttttgaaaattatattctaatgaaaattttctactgtcagaatttacttttctttcactagatacacctgggaaagaattatttggctgraacctttttggtgaatttgtatggaccggcagcaaatagacaaactttcaaaacaggaatgttctgcaaataaatacagttgatttcatcagtgactaaataccacaagaacccagccgaacagtgcagtacgcaaatgagaa

SEQ ID NO: 162023 - DNA, 461 bp, Homo sapiens
ttggtgggtaaattctcaaactatttttaattgaaggatgtatctagagagcactattagaggatagaagctaaggagaggaaggagataagagaaaggtgaagatgacttgggtcaccattgttcacatgatattggtgcctatcccagaagaggttcagagtctccagggcagaaacataaaaatagcctctcagccatcttttcagacatctctaaaagctaaggaagagacaaactggtgggcctcagagagaccataccgagggkcatatgctcaaatttttcaaacttggaatagtaatattactgtcaactgaagaggtaatcacttgtattgtggacagagctggtgatccatttacttcctactgccatttaaaaactaatttgtgtaatttgaagtctcatttaatctccagcacttccttacccattcttactctcaacagatgatgctg

SEQ ID NO: 162024 - DNA, 585 bp, Homo sapiens
ctgtcattgcctcaactaccctgatccccactcccacccccatcccgcagggacaggagcatcctggagggggatccayccccattatgatttgtatctctattgtcctacagggaccttttgcctcccagaacccacacttgtcctgatgaggaacgagggcacttcgtcttcttgatgcaaactctacatttaatgagatgatcttaataaaaagaacaatcaccccaatagaaaaatgagcaaaaatccccacaaacaggagagaaaatatttatgaccaataaaaaagagatgtttagtttaattagtaatcagattattagtcagaaaaatgcaagtgaagaccaccatgaggtatcattttactcccactagagaggcaataacaacaaaatattataataccagatgatggaaagaatgtgaataaatgtgatcctgtctacattgctggagaaattttcccctgtggaaaacagtttggtcttatctcatgaaggtgaatagttataattttgtacctactaattccttagagcgcaggcttatgctatagaaaaaccattatgtttgaatctaata

SEQ ID NO: 162025 - DNA, 585 bp, Homo sapiens
ctgtcattgcctcaactaccctgatccccactcccacccccatcccgcagggacaggagcatcctggagggggatccatccccattatgatttgtatctctattgtcctacagggaccttttgcctcccagaacccacacttgtcctgatgaggaacgagggcacttcrtcttcttgatgcaaactctacatttaatgagatgatcttaataaaaagaacaatcaccccaatagaaaaatgagcaaaaatccccacaaacaggagagaaaatatttatgaccaataaaaaagagatgtttagtttaattagtaatcagattattagtcagaaaaatgcaagtgaagaccaccatgaggtatcattttactcccactagagaggcaataacaacaaaatattataataccagatgatggaaagaatgtgaataaatgtgatcctgtctacattgctggagaaattttcccctgtggaaaacagtttggtcttatctcatgaaggtgaatagttataattttgtacctactaattccttagagcgcaggcttatgctatagaaaaaccattatgtttgaatctaata

SEQ ID NO: 162026 - DNA, 570 bp, Homo sapiens
gcactaccttcccttcttgttctgaaatgtctgtggatccactctgaactgacttgatgctatttcccattcccaaggatgcttccctctcagatgatcaacaggagactgcttactgcctcactctctgttcaccagaggagctgtggtggaagagaagactcatttcttttttatcaacaggagactgcttactgcctcactctctgttcaccagaggagctgtggtggaagaaaggactcatttcttttttattgttcaagctatttcctaaccaaatagaaacaaacctgacattcatgcctatttaatcctacctcctctgccacatagccaaatccgtggtcacccagtcactttcacaacattttggctctggactcatgatactcttccacacttctgattccgctaagtgcttggttgacttaaatgtcctcacagttaacccatgaaatgtcctaaactaagatttttgtgacctcttcaactttgccctcacttccgctcatttycagtgatccactcccattggcacaagtttggcctacttactataaatcagaatt

SEQ ID NO: 162027 - DNA, 360 bp, Homo sapiens
aatctgtgttcccaaataattctatgaggcacttactctgatatcctaactgcattagtctgttctcatactgctaataaagacatacccaagactggataatttataaaggaaagacgtttaattgactcacagttccacatggctggggaggccttgcagtcatggctgaaggcaaatgaggagcaaagtcacgtcttacatggtggcaggcaagagagtctgtgcaagggaactgcacttttataaaaccatcagctcttgtgagacttattcactaycacaagaacaacatggaaaaaaacccacccccatgattcaattacctctcatcaggtccttccacaacacatggggatt

SEQ ID NO: 162028 - DNA, 597 bp, Homo sapiens
ggaatgcctcttgatcttcatctgttcaggggaatagaaacaggaaaacaagagtcaaccaaatctgcctggtttcctttttcagtttggatggatcataagactctcttattgtactttgttaagaaacatatatttccagtgattctgatttcatggttytgggtgggtcctaggaatatatacagactcttgattgcactctcaacatcatattggttgtggggtaatctgaggaactgtcttaagaccaacgatttccactctacatcttagggctcttgttagatgcagggctgctctactgccttcaatctcctttgctacattctgagaatccagacaaatacattttttgctgtagaagcccctcaatctttcttggagtactgttagcgtcccactcgtatctctcttcttggactcctggaggaacagggctagtttcacaggttgagataccttgagggcagttaatgttgaaagcctgttcagctgcttgctcttttggtgagaccaaattgaaagattaaagtcaggtgagcagtaataacaacaatggcaataagaaattaataaaagtattaataatgaaaa

SEQ ID NO: 162029 - DNA, 598 bp, Homo sapiens
atcaaatgcttcagccaaagatttttgcactcaggcacttaatgactgaggtccctacatgcatcattgttgatgataggaactttttaaggaatatttgagaatcttcaaaagaaaacaatttcttggagaaaaatatgagcaggtgaaccttcatttaggagataaatgttttgctatcaaaatatttgtctaaaattctgctgtcttttaggttwtagacactttttgttaaaacacgtatctaggtaaacatgactaaaaatgataaaagcataaaatgctaaatgtgctggtaaagtcaatgacattcaaaagacagtttgaagaacttatcaaaatggattctagcaattctagttttagaatatgaagatagcatctagaatggaatggaattaaaatcatcatgtccactgatggtcacacttatttttaagcagcaacaccattattttaaaaagaaatcttactccgaattataatattaaaaactgatcaaagttgtgttgaactgattagaatcaagtggccaccaggttccctcatcgcctgacatcatctgctttaccctaagtaatgattcaacagcatcatc

SEQ ID NO: 162030 - DNA, 598 bp, Homo sapiens
atcaaatgcttcagccaaagatttttgcactcaggcacttaatgactgaggtccctacatgcatcattgttgatgataggaactttttaaggaatatttgagaatcttcaaaagaaaacaatttcttggagaaaaatatgagcaggtgaaccttcatttaggagataaatgttttgctatcaaaatatttgtctaaaattctgctgtcttttaggttttagacactttttgttaaaacacgtatctaggtaaacatgactaaaaatgataaaagcataaaatgctaaatgtgctggtaaagtcaatgacattcaaaagacagtttgaagaacttatcaaaatggattctagcaattctagttttrgaatatgaagatagcatctagaatggaatggaattaaaatcatcatgtccactgatggtcacacttatttttaagcagcaacaccattattttaaaaagaaatcttactccgaattataatattaaaaactgatcaaagttgtgttgaactgattagaatcaagtggccaccaggttccctcatcgcctgacatcatctgctttaccctaagtaatgattcaacagcatcatc

SEQ ID NO: 162031 - DNA, 597 bp, Homo sapiens
ggaatgcctcttgatcttcatctgttcaggggaatagaaacaggaaaacaagagtcaaccaaatctgcctggtttcctttttcagtttggatggatcataagactctcttattgtactttgttaagaaacatatatttccagtgattctgatttcatggttttgggtgggtcctaggaatatatacagactcttgattgcactctcaacatcatattggttgtggggtaatctgaggaactgtcttaagaccaacgatttccactctacatcttagggctcttgttagatgcagggctgctctactgccttcaatctcctttgctacattctgagaatccagacaaatacattttttgctgtagaagcccctcaatctttcttggagtactgttagcgtcccactcgtatctctcttcttggactcctggaggaacarggctagtttcacaggttgagataccttgagggcagttaatgttgaaagcctgttcagctgcttgctcttttggtgagaccaaattgaaagattaaagtcaggtgagcagtaataacaacaatggcaataagaaattaataaaagtattaataatgaaaa

SEQ ID NO: 162032 - DNA, 601 bp, Homo sapiens
agaccctttttgctgtgtccccaagccggccttgccctcaaattctgcaggccccgagctctctcagacacctgttatatttatggaccagacaatgggggagcatcaagcacagcctgtctgggtgtagcttcttcagctatctggctgcaccatagaaactgggcatttcaggaggcatcacttgggtcaccctgaaaatcccctggggggttgcaatcctggaaaatatttcaactagctgcttgagctggatgtacaaagaaattagcaataaaataatgctgtaatgttgtatgatacttcaactgtacaataatattgtcacttatcataaatgtaccatggttttattaacaataaaaccataaatagaaataacaatgaaaagaaatctattaatgaggtattaatataggaatatatactgtacatatatattgcattatataagtatattatatattatatatgtaaatatayattacatatacatatatattatacatatatagatatatacatattccccagaggtttagaccgaggaaaccaggtcaagctgcttctcaggtgcttgctgtataattaaccactttta

SEQ ID NO: 162033 - DNA, 536 bp, Homo sapiens
gttggaacagtaccagctgggaagattctagtcagaagaggcatgtcaggggcacaggcgaataaagcattgttgtcacatggagtgataccagaaaaaattattaatttattcctgtgagagatatttgaaatctgccctgytcttaaagatcataaaacagtttaatcttaatatgggattttggctgttcttaaatctcttccttctaatgcaaatgctattttctttgaaaattgggcatataaaatcaactttgttattcagaagcaacatataccatattgcgtattaagagtttgtgtataatatatttatttgcatacagaaatatgtatttctattgtacattttattattttatttatagaatatatatatatttagcacatagcatattccaggaagatacattaaatatgcacacatttcatgctacagcgtgcaccctttaagagaagcatttttaagaggcatggtattgaatatacatgctgagaatacactttgcacaatttcatccagctttgggtgct

SEQ ID NO: 162034 - DNA, 567 bp, Homo sapiens
aaaaaaaaaaaagaaagaaaaaagaattatgaaagacaagctgaacaaaagaaaatactgatgagtgagggtctaaaggtttaaaagcaatagttgactctggctaggttgggagtagtagaaaaataattacctttacagtttgtaaaattgtcatctgtgcaataggtctgtttgagatgttgttttagtactttctgttatttaraaaacatattcatggatttcttaagctcaggtgaattgtatagctttgctctacttattccatataataacaattttcatgaagtcacatcctcttacattcatcaccatttattactggactctataagtttgtaatacataaatttgctaacagttgtttcccgttcaccaacatttccagaaattgaaccttggttgcagactgtggcagcatttatgtagtatcgggaagcagttgggaacagaagtatctgtactatttacttatcctgtatgtagaacaaacagcagcagattttggatatccagagcaagaatgtgtcatgtgtgacttctgtttaactattagtagcttta

SEQ ID NO: 162035 - DNA, 624 bp, Homo sapiens
atatatttagtgcagtgcctgacacacagtaagaactcagtgattaataataccattactaattttttttaaaaaaggaattaaaagaaggcacattgaatatctatttagtcttgctccctcccaaagttctactagaaaataatgggattaaagataaagaagtccacaaatataatggaaaaaaggaaaaaaatcagtaaaaacaaaattctagcaggtggaaaacagatagatatgtcataactagtggagaaagctgaatcctacgtccactgcaggactcttagctgtaccattttaaaccaaaatttactcccaaaaaattgaattattttttgtggttttattacattaaagcatccctgtctttaaaacgtcagctaagcaaaaaagatttcttaaggattacatatgaaaactgtaatccattgcttcaaatattttgacgacgttagagaaaatgattctaayatatttcaattttttaaactgcagaaattaaaaaatatgactagggttaggcagcataaccaacaaaacaaaatatggggttacaaaggctttcaggatagactattaaatcaattaaccactaaactgacagtcatcaaagagcaaatt

SEQ ID NO: 162036 - DNA, 535 bp, Homo sapiens
atacaacttttgaaaaataattatttttattgctcttctttctccagttccatttttctttagtttaatttctttttcttccctgtctaactttggctatttcttctatttgtcatttctcaagttattgttggttaaacttttcttctggtcttaaaagtattccagatttcacattaatatatcttgaatcacagatatatgaaacaaatattttagttactctctggccctcaaatttttttcctctagagaaggtattgagatgctattaaattctacactggtacaccttgcctggacaacaggttaattgagcagtctcttttgttcaacatttttgatgttgaaatcaccagggtagaggactttgtgttttattatgaaaacattgatcaggacttggtggttatgataccactatacataattacttgattattttaatagttctattaaggtatgtttkacatactgtaacctgagcataaaaatctgaattttaatgtcattttcttcttttcactatgtgatt

SEQ ID NO: 162037 - DNA, 517 bp, Homo sapiens
agaaactccatgtagggaggaagarggaggtaaaggcaggacttatgaggtagggatgggaattttttttacttcagagccatgccaaatataatcaatttccttggcatttcttcatctataaaattgccatcatggcactgttaatgccttcacttcaggccaatcaaaggaagaggaaatcaggataataatctaagcaattcaagaaaaaaaaatatattttgccagaattagatcagaactttacatttccaaacagcagcctcatgctggcagagctggacctcgggagcagattctgggacgcttgctggtgccaggcacagtgacattagcacctggcagcccttccctgcctggcagtgcacgcacccttctgtggcaactgccagcacttctctactcaagtcatctaatcagttcccagatcatatgggggtaggggaagaaagctggcatcagagcaatgaggagagggacaggtgaccaggaaggtagaatgccccacagtgac

SEQ ID NO: 162038 - DNA, 517 bp, Homo sapiens
agaaactccatgtagggaggaagagggaggtaaaggcaggacttatgaggtagggatgggaattttttttacttcagagccatgccaaatataatcamtttccttggcatttcttcatctataaaattgccatcatggcactgttaatgccttcacttcaggccaatcaaaggaagaggaaatcaggataataatctaagcaattcaagaaaaaaaaatatattttgccagaattagatcagaactttacatttccaaacagcagcctcatgctggcagagctggacctcgggagcagattctgggacgcttgctggtgccaggcacagtgacattagcacctggcagcccttccctgcctggcagtgcacgcacccttctgtggcaactgccagcacttctctactcaagtcatctaatcagttcccagatcatatgggggtaggggaagaaagctggcatcagagcaatgaggagagggacaggtgaccaggaaggtagaatgccccacagtgac

SEQ ID NO: 162039 - DNA, 517 bp, Homo sapiens
agaaactccatgtagggaggaagagggaggtaaaggcaggacttatgaggtagggatgggaattttttttacttcagagccatgccaaatataatcaatttccttggcatttcttcatctataaaattgccatcatggcactgttaatgccttcacttcaggccaatcaaaggaagaggaaatcaggataataatctaagcaattcaagaaaaaaaaatatattttgccagaattagatcagaactttacatttccaaacagcagcctcatgctggcagagctggacctcgggagcagattctgggacgcwtgctggtgccaggcacagtgacattagcacctggcagcccttccctgcctggcagtgcacgcacccttctgtggcaactgccagcacttctctactcaagtcatctaatcagttcccagatcatatgggggtaggggaagaaagctggcatcagagcaatgaggagagggacaggtgaccaggaaggtagaatgccccacagtgac

SEQ ID NO: 162040 - DNA, 517 bp, Homo sapiens
agaaactccatgtagggaggaagagggaggtaaaggcaggacttatgaggtagggatgggaattttttttacttcagagccatgccaaatataatcaatttccttggcatttcttcatctataaaattgccatcatggcactgttaatgccttcacttcaggccaatcaaaggaagaggaaatcaggataataatctaagcaattcaagaaaaaaaaatatattttgccagaattagatcagaactttacatttccaaacagcagcctcatgctggcagagctggacctcgggagcagattctgggacgcttgctggtgccaggcacagtgacattagcacctggcagcccttccctgcctggcagtgcacgcacccttctgtggcaactgccagcacttctctactcaagtcatytaatcagttcccagatcatatgggggtaggggaagaaagctggcatcagagcaatgaggagagggacaggtgaccaggaaggtagaatgccccacagtgac

SEQ ID NO: 162041 - DNA, 628 bp, Homo sapiens
atcgtgtcccttttctggatggtacatttaccacaagatactactagaaatttttcaacctgaaaagtgttttggtctgcaactttcaggttttacagtatcaacttaaaagaaaaaaaaattaaatcacccaatcacttacacctttttagcccaaggctgaaactatgccaatgcatcacacccagacaaccacaacccaaaatttcaccacattactattacaaccaaatctttaataaaattaaaactgtgctttctaagaccagaagcagattatcacmagccaccaattttaatataaaaatatataataaatataagcttgttaaatgatttacaaaggaaggaatcacagcttccttcaccctcattgaatttaggcacaaaaaaatgaaaatacagatagtctgcttcaagccaagaagacaaatcagccattatactggcaactttgtcattaagatatgtttttgcccatgtacacagccttttttccctcaattaattttatatctttcacttactctgtgaccaaggggaggggaccccgacactacccaagaggttacaaatttacaaccagtgagaaacctgcattctgaaaaaacaatataaaaaaagctag

SEQ ID NO: 162042 - DNA, 425 bp, Homo sapiens
cacattcacatattatgtaccttcaccatgttgtatatcttttagaaccatyaattttcagtgttacctcatttccaatgtagtagacatatcatattaaatgtttaggtagttgcacacagttacatgtttttaaccatttctctaccattcgttttttacactgcagtcaatttttcatattgtaaataattcagcaaaaacattttcatgcatgtactgccacccccatatttattacttcattcagcaaatattgattgaaaacctaataaaaataccaggccctgtgttaagtactgagtttaggatttttcccctaggatagtagttcaatgttgaaaaacgagaacatgttttatgcctcgatacatattgccaaattgctttctaaaaatcgatgtcagattaatctaaatgaattc

SEQ ID NO: 162043 - DNA, 337 bp, Homo sapiens
tttgggcatatttagattgaggtgacaattggccagataagtattctcttttgatgatagcctggaatggataatagagacagggattggaaccagagatttaagagtcagctatgtggagctgttggttaaaaccatggaatacagtctattcatcagggactgtgttttgtagaataatcacagttaacagatggaaggaaaaggagtatttaaagaaaaataaaatcatagcatgggaaaacccaaaaagtacyagtcagggaagctcaaaaagaaaggaatttgaagaagtttaatattaccagatgctgaaaagatatcaaagtgagctaag

SEQ ID NO: 162044 - DNA, 619 bp, Homo sapiens
aggcctcaggttatcccttcccttgttttttcagacccagaggtggtaatagtgcccagctgatgctggccatagggtgctacactaatccttgtggtcttatattctgctcatgcctttgtaaataatccgttcaaatcatctaaatttgagtgtgccattggtttcttgcttcctgactgatatggaagaaacaaatgaataaataattgaatacatgtattctatgtaaataaatgattgaattatttttaatgcctttttaattcttattttatatttttgtggatacatagtaagtgtatatatttatggagtatatgagatgttttgatataggcatgcaatgtgaaataagcacgtcatggagaatggggtatgaatggttgagttaaataactgrgtgaattaaagcatgaatgaatgaatgggtatggagatgaatgtatgaaaacagaatgcaggcacatataacatatatctatttcatgcatgaataattgcataataactaagcaaatgaatgacacccatgtaaaaaactgaatggaagcatgaatgaagaatgaattcataaaaatgtgatttaagaccagttttaatcaatttcaatgcctga

SEQ ID NO: 162045 - DNA, 550 bp, Homo sapiens
cagtagttctccaatatatacagaacatggcccaggctcctcagcacagcttcaataatagtgctaatagttccagcagcatctcccactctcctcacctgtgtgtatcccaaaccccaggccatggctcaacagggggacctagcatgctggtatatttttgtcaytgtaagttatgtcacaagcaatgtgttatccataatggttcaagtaccttagttgtgaattatttatttttttaaactagctagaaaaatatcagttttattcctataatctcttcccatttacctgcattaaaaatgaggatggaatctatgctgaaacactgcccataactctgtgtttcccatggaggcatgatacaaataaaatcttctctgccacatgagtcacagcggaaagggatactccaaacctgagctcctcacaaagtggcatcactggaagtgctctccacctgcaaagggagcaagcaggctgccttgcttcaaattatggctggcaattaaattttaaaagccaccttttctcctcataaaaaagcaag

SEQ ID NO: 162046 - DNA, 424 bp, Homo sapiens
cttcatgcatccacttgtctctgaaactacaaagaaaatttgatatgcatgtccttttttctggggaatatgtctgtagtttcataacattctcaaagagcagcatgactcaagaaaagttaagaacsactgatctaaagaataagactatatatatattcttcaggcaaccctccataaggagtttattttctgagcttctgagaagtgctgagcctcaagactgcagtccctggcaagcgcttgaagtatggcttctccctcatgcaaaatgtggaactctgggctttaaccactggccaagctgtgtgtcaattatcaagatacataagacctttaatagagtagtgctcatgaacatatggagcacataacaatctattcttctagctaggcttcagccatgaacattgatagaggtgcc

SEQ ID NO: 162047 - DNA, 384 bp, Homo sapiens
acatagattttggacccataatatgtatataattatacatatgttaattatgttaaggaactatatgtacttttttgttttattaagaatttttcaaaatttgtagtttatattgaagtttatcaaatatgttttcaaatttatacatatgatcatagtttttttttctccttggacctgctaatggtataaattacattggtagatcttctgatatcgaaccatctttattctactagtatraatctcacatgatcatgtgtgtatagtcttcccttggtatctgcaggagattggttccaggagacccctccccactgtggataccaaaatacatggatgctcaatttcctaatataaagtggcatagtatttgcgtataac

SEQ ID NO: 162048 - DNA, 501 bp, Homo sapiens
gaattctgtacagttctcaatattttccaaagtttctacagtgagcatgtgttacttttatattcggggataacacactttatttttaaaggagctgtttaatcttcatagcgtatataaaacacgagtggacaatgcttgtatggccttagaactgtcatttcaaatgcattaatctaaagtattaagaagtccttttaaagaccagaagtattgcaatgtatagacacatgggggcactgtaaccaagtattaataattaaagaaaagcaaatccaataaccaaaacagttaacatgtattgaaaatttactgtagtccrggttctgttattagcatttatatgtattatctcatttaatcctcacattgaatctgtggactacccttgttatccccattagtacagtgaagagatctgagactcaaagctatgcagccacctaaaattgtgaaaagcgtttactgtggtcttttatacataatcaagctttcactatc

SEQ ID NO: 162049 - DNA, 387 bp, Homo sapiens
tatataacagtggcatgcttagataggttctaactgacaaaaagtagccttttcatctgtccataaaaaaatctttaaacccaaaatgatgaatcaattatttcattacattaaggaaacgtgtaagctagcaaaattccagacaaggrtaattgttgtatttaagtgagtcttaaacatatgttttccatgcctgtgaacattgtaaaaataaataaaaaattttaaaatataagattttattttgtcagctgtattacttaccccagaagtcaattatataccttgaggtacaatggaagtgaaatgcatttaatgctaggctagttgataaagtcaatctgtgaggtaagaattttacactgaaaattaatatttaatttagaa

SEQ ID NO: 162050 - DNA, 184 bp, Homo sapiens
aaaaattaatattcaaaatctcctaaatacagatgaagtaaaatgtttatagttttctgtatgacaccgtatttagtmaaacttatgcatggtaagatttcagggtcaatgaggaaagttacaaagaacaaaagaaaaggcaatatacaagggaccagacattctgcttttaagataactgtcg

SEQ ID NO: 162051 - DNA, 184 bp, Homo sapiens
aaaaattaatattcaaaatctcctaaatacagatgaagtaaaatgtttatagttttctgtatgacaccgtatttagtcaaacttatgcatggtaagatttcaggstcaatgaggaaagttacaaagaacaaaagaaaaggcaatatacaagggaccagacattctgcttttaagataactgtcg

SEQ ID NO: 162052 - DNA, 515 bp, Homo sapiens
ttttatgcttgattattgaaaacacttttaaaaaatgatcaaaactaacyaaagtagatattgctgaaggaagaataaatgtatcaaataaattatttgattttcaaaagtattttgatcatttcaaaataagaacactaatggcatgcttaccatgctctaatgatgtattttaatgatacaaataatgactctgctataattatttgttccaaggttgatagctcactcagtgcataaaatgcatattactacatgtagtagctcaggaaacagcatgtagcaaacacttgttgaatcagttattataaataacctacagtttataagtgaattctagttaggttagacataacaacaacactagtgccaactccttgggcatccatttgttaaacctgataattggttatttacaagaaaatcactagtactgccattcttcaatgaaggaaatttgctacttaacaagagttctcaaggatcatggtgaaaatattccaggaagtcattta

SEQ ID NO: 162053 - DNA, 515 bp, Homo sapiens
ttttatgcttgattattgaaaacacttttaaaaaatgatcaaaactaactaaagtagatattgctgaaggaagaataaatgtatcaaataaattatttgattttcaaaagtattttgatcatttcaaaataagaacactaatggcatgcttaccatgctctaatgatgtattttaatgatacaaataatgactctgctataattatttgttccaaggttgatagctcactcagtgcataaaatgcatattactacatgtagtagctcaggaaacagcatgtagcaaacacttgttkaatcagttattataaataacctacagtttataagtgaattctagttaggttagacataacaacaacactagtgccaactccttgggcatccatttgttaaacctgataattggttatttacaagaaaatcactagtactgccattcttcaatgaaggaaatttgctacttaacaagagttctcaaggatcatggtgaaaatattccaggaagtcattta

SEQ ID NO: 162054 - DNA, 536 bp, Homo sapiens
tatagtgactttctttgtcttttttttttttctgttgttgctttgaagtctgatttgtctgacataaaaatagcttaytcagctgggtgtggtggctcacacctgtaatcccagcagtttgggaagccaaggcaggtggatcacctgaggtcaggagttcaagaccagcctggccaacatggtgaaaccccgtctccactaaaaaatacaaaaatttgccaggtgcagtagcatgcacctgtaatcccagtgactcaggaggctgaggcaggagaatcacttgaacacaggaggcagaggttgtggtgacccaagcactccactgcactctagcctgggcaatagagcaagaatctgtttcaaaaaaaaaaaaaatttgcttacccctgctcacttttgtcttctgtttgcatgggatacctttttccaccctttcaccttgagtttatatgaattcttctgtgttaggtgagtctcttaaagacagtaactatttggattctgatttttttttttttaatcagttctgcccttct

SEQ ID NO: 162055 - DNA, 493 bp, Homo sapiens
ttgcttcactcttgagtactggttctcaaccttttgttgtccattagattacctgaagaaactttaaaaatctcaatgccaaggccttgccacaaactaattattcctcagaattttcagaggcataatatcagtatccacaagccaacaccaaagtgtgagatgcaatgctctagaaccttgggacccamtatggcccccagaccagtggctggcattgggatcacctgtgagtttattggaactacagactcctgggtcccactccagacctactaaattagcatcttctctttggcaagatccccaggtgatttgcatgcatatgaaagttggaaaggaatagatttagtttagagggtcttgtagcatccttacccaaagagttcactggcataatcagaataccctaaagtagtaatttacccaagaagttattttttttcaagtttgtgttgcttgctgctttagtcaacttgtcagaagtgtagct

SEQ ID NO: 162056 - DNA, 493 bp, Homo sapiens
ttgcttcactcttgagtactggttctcaaccttttgttgtccattagattacctgaagaaactttaaaaatctcaatgccaaggccttgccacaaactaattattcctcagaattttcagaggcataatatcagtatccacaagccaacaccaaagtgtgagatgcaatgctctagaaccttgggacccactatggcccccagaccagtggctggcattgggatcacctgtgagtttattggaactacagactcctgggtcccactccagacctactaaattagcatcttctctttggcaagatccccaggtgatttgcatgcatakgaaagttggaaaggaatagatttagtttagagggtcttgtagcatccttacccaaagagttcactggcataatcagaataccctaaagtagtaatttacccaagaagttattttttttcaagtttgtgttgcttgctgctttagtcaacttgtcagaagtgtagct

SEQ ID NO: 162057 - DNA, 562 bp, Homo sapiens
ccacttttactagttttatctctacttctgtaaagtcaaatgattattccaaaaaatgtatgtaaaaagcttaaccacaactatctacatatccttaatatccccttaatattttttccattgtaattgaagtataatttacattcagctataaaacaatgtatttttagtttacacatcaaggggtttcagtaaatttgtaaaattctgcaactwtaatcacaaccacttttcagaataattaaatcacccccaaagtgccttccaatccttttatatttaatctctaccccaccaccatgtctaggtacacattgatctatttttgctgtagtagttttgcttttactagaaatttcatatacatggaattatttaataagtgattgtccctagcttctttcaattaacacaatattttttaaagttatccatattgctgcacttattaatagtttgctatttctttattctaagtagtattttattgcatgaacataccatattttatctatttgacattggatgaatagttgcattattccagttttgggctactgga

SEQ ID NO: 162058 - DNA, 597 bp, Homo sapiens
ccttctcgcttagacttaattggcttacaggtgtctttcatatgatctacatgtctgactttgccttatttacttgtaagctctttatatactgatagggctctctgtcttagaaagcttgataaatgcagagaccttatctatcctataacttgctttacttccaacatccagaaaaatatcagtgttatttcctccacagtctatggtctgaacaactacacaaattatacaaaacccttcaatggcttgctatctcatttaggatataaactctaacccttagcaccacctccatggccttacctgtttttgcttctacctttcttttaatcttaccctctccagttccccacaggcacactgagccaagacacaccagcactgtactcagcagaaatgcactgagtgtaacattcttaagttcttgctgtttccactcttcctggagtgctgtactccagacatcyccatgactagaacttctctttgactcaggcctccacaccaacaccatcttatcagaggggcattacctaccacctcatctaaaagcacaattccccctgctcactgtgcaatgtttcctcaccctgt

SEQ ID NO: 162059 - DNA, 572 bp, Homo sapiens
gaaaaagtctctgactttgagaatataataatagaaacttccaaaattgaaaagcaaagagaaaaaaaaaaactaagagaaaaaaaaactaagaactaacaaacaaaaaaacaaaaaacccctgagaacagaatactcaagaactctggaacaactagttccagagttacaaatagtgtaacgtacacatattgagaataccacatgtagaagawagaaatgaacagaagaaatatttaaagccataatgactaaaagttttcccaaaataatgtcagacactaaatcacagatctagaaagctcagagaataccaagcagcataaatactaaaaaacctacacctaagtacagcatattcaagcttcagaaaatcaaagattaaaaaaatttgaacaaagctgggggaaaaaatacctatagaggagcaaagataagaattacatccaacttctcagaaactatgcaagcaattattgtagtaaaatatttaaagtgttgacagcttatgtatgcttttgtacaagtgaaatgaaagacagcaatgatataagagatgagaagaattcgga

SEQ ID NO: 162060 - DNA, 572 bp, Homo sapiens
gaaaaagtctctgactttgagaatataataatagaaacttccaaaattgaaaagcaaagagaaaaaaaaaaactaagagaaaaaaaaactaagaactaacaaacaaaaaaacaaaaaacccctgagaacagaatactcaagaactctggaacaactagttccagagttacaaatagtgtaacgtacacatattgagaataccacatgtagaagaaagaaatgwacagaagaaatatttaaagccataatgactaaaagttttcccaaaataatgtcagacactaaatcacagatctagaaagctcagagaataccaagcagcataaatactaaaaaacctacacctaagtacagcatattcaagcttcagaaaatcaaagattaaaaaaatttgaacaaagctgggggaaaaaatacctatagaggagcaaagataagaattacatccaacttctcagaaactatgcaagcaattattgtagtaaaatatttaaagtgttgacagcttatgtatgcttttgtacaagtgaaatgaaagacagcaatgatataagagatgagaagaattcgga

SEQ ID NO: 162061 - DNA, 572 bp, Homo sapiens
gaaaaagtctctgactttgagaatataataatagaaacttccaaaattgaaaagcaaagagaaaaaaaaaaactaagagaaaaaaaaactaagaactaacaaacaaaaaaacaaaaaacccctgagaacagaatactcaagaactctggaacaactagttccagagttacaaatagtgtaacgtacacatattgagaataccacatgtagaagaaagaaatgaacagaagaaatatttaaagccataatgactaaaagttttcccaaaataatgtcagacacyaaatcacagatctagaaagctcagagaataccaagcagcataaatactaaaaaacctacacctaagtacagcatattcaagcttcagaaaatcaaagattaaaaaaatttgaacaaagctgggggaaaaaatacctatagaggagcaaagataagaattacatccaacttctcagaaactatgcaagcaattattgtagtaaaatatttaaagtgttgacagcttatgtatgcttttgtacaagtgaaatgaaagacagcaatgatataagagatgagaagaattcgga

SEQ ID NO: 162062 - DNA, 615 bp, Homo sapiens
gggggaaaaaatacctatagaggagcaaagataagaattacatccaacttctcagaaactatgcaagcaattattgtagtaaaatatttaaastgttgacagcttatgtatgcttttgtacaagtgaaatgaaagacagcaatgatataagagatgagaagaattcggaatattttgtgaatgtaagatacttatgctaattgtgaagcagtacagtgttatttctaaagtggactttagaagtataattgatgtgaaaagaagataaaaaataaggaaaaaagggattttataaagtgcacaatgtttaacccaaaaaaaaaaaaaaaaaacagacaaagtgtgaacaacaaaatagaaacaaagaataaaggcaacaaatagaaaccagtaacaaatatagtagatattaatccaactgtatcaataattaatatatgtgaattaaaagacagagatttttagagtgcatcaaaaaataagacccaattatatactttctaaaagaaactcactttaaatctaaggaactctatagaggaaaagtaaaggatggagaaagatataccatactatctctaatcaaaataaagtgggagtagctctgtcagttgc

SEQ ID NO: 162063 - DNA, 504 bp, Homo sapiens
aacaatataacacagtctgccatcgggatcctttctacagatgagtttgttttgggtccttcccccaagatgttaacaawtttttttctttaattagctaccaacttcttttttattttatttatatatttttgagacagagtctcactcagatgcccaggctggattgcagtggcgtaatctcagctcactgcaatctctgcctcccctgttcaggcgattctcgtacctcagcctcctgagtagctggaattaaaggcacgtgccaccacaccaggctaatttttgtatttttagtagagatggggtttcgccatgttggccaggctggtctcgaactcctgccttcaggtgatccacaagcttcagcctgcaaaaatgttggcatgagccaccatgcctggccccaacttcctttctaattgggagattttacttttggctatgctcaaagagttggaagacctgctcatactgtttccctttccacatggggagtgtgta

SEQ ID NO: 162064 - DNA, 531 bp, Homo sapiens
acatcttgtagttcacacatatagtgcaacaatataacacagtctgccatcgggatcctttctacagatgagtttgttttgggtccttcccccaagatgttaacaaatttttttctttaattagctaccaacttcttttttattttatttatatatttttgagacagagtctcactcagatgcccaggctggattgcagtggcgtaatctcagctcactgcaatctctgcctcccctgttcaggcgattctcrtacctcagcctcctgagtagctggaattaaaggcacgtgccaccacaccaggctaatttttgtatttttagtagagatggggtttcgccatgttggccaggctggtctcgaactcctgccttcaggtgatccacaagcttcagcctgcaaaaatgttggcatgagccaccatgcctggccccaacttcctttctaattgggagattttacttttggctatgctcaaagagttggaagacctgctcatactgtttccctttccacatggggagtgtgta

SEQ ID NO: 162065 - DNA, 484 bp, Homo sapiens
gctgggacgactcaaactttatcctgcccagaaggaaaaaagtgttttcctgtatttttcctgtatacgcacaatacttctgataccaaatatatgggttttccgctggcattcagcaattcttcagctccctggtcaccawctgggcatcctacaatttaattctggcactaactacctacagtgagtgcagacccacagggtaagggctcagtcccacaagactgccccctacttcagacaccagccacaagtcctggattgtgatccacgcttctgaccaaaaggctgtaaatcaggagtttccacgacccactcctttcaataatttgctaggacagctcacaacactggtttattatgaagggaatcacgaaggatacagatgaacaaacagatggagagacaaccggggcaagtgtagatagaggcccagaacttgcttgtcttctcccaggtgccacccttctagcacctggatgtc

SEQ ID NO: 162066 - DNA, 554 bp, Homo sapiens
aggttgagagatcctggtatgacgcttatgcagatacaagaaaagccataattatggaggtaagtgctctacatttgactcaaactgatgaaatgatgacatcagtagactaatttacatgtatacctagaataaccactaaaaaagctacctggagagatacacttaaaaataccatagatatatcaaaccagaactctaaaaaatattcaaataactcacaggaagaccacaaaaaaagaaaggaaaataaaacagaaaaattaaaaccagaagaagcaaacaaaaaataaaatggcagacttaagccctagtatggtaacgacattaaatgttgatagttgtattagtctcttctcacattgctataaagaaatacctgagacagggtaatttattttaaaaaggggtttaattggcctacagctctgcaggctgtacaggaagcatgggtgggaaggcctcagggagcttttactcatggcagaatgcraagccagagaaagcatcttacgtggctggagcaggaggaagcggggtggggagatgctaca

SEQ ID NO: 162067 - DNA, 663 bp, Homo sapiens
aatcaataatccaagtcctacctcaagaaagtaggtaaaaagagtaaagtaaacccaaagtgagcagaaagaaggaaataataaagataagaacagaaacgaatgaagttgaaaacagaaaagccaaacataaaatcaatgaaacaaagaataggttctttgaaaggctcaatataattgacatatgttgcaagattgacaaagataaaaagagaaacaaatcattaatcccaggaacaatacagaggatatcactacagattctatggtcattaaagggataaaaagaaaatgctatgaataactttatactcataaattctataatttgtaagaaattgaccagcttttaaaaaccataagctaccaaatccaatcaagatgaaactaattaccatagtaacactataagatcctgaaaaagaatctccaggccaagatggtttcactggagaattttagctaacatttaaaaagaacattttataccaatgttacagtgtcttccagaaaatagaagagagaacacttcccagctcattttatgaggccaatactattttgatacccaatccagataaaaatagaaatakaaaactatataaaaagtaaaaaattgaaaactataaaaatagaaaactatagacaaatatctctcacaaa

SEQ ID NO: 162068 - DNA, 574 bp, Homo sapiens
cagtgctcatgcctgtaagcccagcactttgggaggctgaggcaggtggatcacctgagattgggagcttgacacyggcctggccaacatggtgaaaccccatctctacgaaaaatacaaaaattaaccaggtgtggtgatgcacacctgtaatcccagctacttgggaagccgaggcaggagaattgcttgaatctaggaggcggagattgcagtgagccaagattgcgccactgcactccagcatgggcaacagagtatggctccatctcaaaaaaaaaaaaaaagaaaaaagaaatctgacattttttcctccctctgtatctaagggttatccttgtttatttgttatttttgttttgttttaggcttttgaccacctgaaactgctttttaatttttttttattttttatttttgtctctggctgataagagaaaagggggtgagggaagtgacacaggacctctagcagcagccactcccctgcaactgattatgtacccaccctaatcagtctcttttctacccctggcttttttttttttctcttaaatctttttagaatggcttg

SEQ ID NO: 162069 - DNA, 568 bp, Homo sapiens
acatccttagagtactttgctggaaaggaaggaaataaatccagcctgtttcccagcccatttctcttgctctgctgactacatgagcctctgagatcaggctgggagtgcagtgaatggaaaggagtcctactaccgcctaaacaggctcctggctctctccctgcagtaaagcagaggctgtcaaatttaatgggagaaagaaagaaggaagaaggagatattcatcagctcccctggcagggcaggtgttttcttctcttgcctgggtttattttctcagccacttggtggttttgaaataaagaaactgaagctcagagggggcaataattcacctaaggtcacacagctggcacagggcaggaacaagattcacacacaggtattctcttctgttcatttatccattcaaaatgtsttgagcttctttcaagggacagacactggagacacagtaatgaacaaaactgcaaagtaggctgtgttgagaaagactggcaaggaacaatacacactccatcagtggtgatcaggtctgtaaggaaaagaaaaacacagtaaagtg

SEQ ID NO: 162070 - DNA, 440 bp, Homo sapiens
gcctctgcttgtcagagccagatctgtaccccagcccccaagcccagagccttgtggctagagtcaagttgctatgggtgccagaggcatctgtcattgtgataaagtggcctctctcacatccacctgacagtctcccgccttcagcaaggtctttatataactctgagtggagtgaaaataaagataaatacaaagggaagaaaagaggcctttaaacttgacttttagtttagatttttatattttaaaaattcactcytgaccacacaccattcccctgatttagagttaatgacccaattaatgaggactctggcctttttcagttaaatcaatcagcctcagagataatgaaatgagaaatgtgtcttagtatttaagggacaacaggatttctcagttattttctgcaggttgaaatctacagtgaagactca

SEQ ID NO: 162071 - DNA, 576 bp, Homo sapiens
gggaaacagattttttttaaaaaaatggaactactaacaatgaaaaatataatattagaaataaaaatacactggagaggatcaacaacagattaaagaaaagaagaaaaaattaaaagatacagaagaaaagattagttaatcaaygcatatcaatagaaactaagcaaaatgtagtttagagcaaaaacacattgaaaaaaatatacagattatcagcaacttgtgaagcaatattaagctaacaaatgtgcaactggaaccccaaaagcatagagaatgattggtaggtggggaaggtgtgaggagacagtttaaaaagattgaaaaaatagtggctgaaatgtattcagaagtgataacgaatataaaccttcagatccttaggatctcaaaagactccaagaaaaatgaacatacaagtatacaacagtgcattaaaattacattctaaaaatgatggcaaatggaaatcttaaaagctgcagagaaaaacacatgatatagggaaagccaaagaaataacgataacatcagaaatgatatcaaatccacacaactttgtcagaaactatg

SEQ ID NO: 162072 - DNA, 576 bp, Homo sapiens
gggaaacagattttttttaaaaaaatggaactactaacaatgaaaaatataatattagaaataaaaatacactggagaggatcaacaacagattaaagaaaagaagaaaaaattaaaagatacagaagaaaagattagttaatcaatgcatatcaatagaaactaagcaaaatgtagtttagagcaaaaacacattgaaaaaaatatacagattatcagcaacttgtgaagcaatattaagctaacaaatgtgcaaytggaaccccaaaagcatagagaatgattggtaggtggggaaggtgtgaggagacagtttaaaaagattgaaaaaatagtggctgaaatgtattcagaagtgataacgaatataaaccttcagatccttaggatctcaaaagactccaagaaaaatgaacatacaagtatacaacagtgcattaaaattacattctaaaaatgatggcaaatggaaatcttaaaagctgcagagaaaaacacatgatatagggaaagccaaagaaataacgataacatcagaaatgatatcaaatccacacaactttgtcagaaactatg

SEQ ID NO: 162073 - DNA, 367 bp, Homo sapiens
agattaccataacagatataatggtaatgacaatgtttgaaatattgtgagaatcaccaaaatgtgacagagagacatgaartgagcatgtgctgttggaaaagtggtaccttatgaaacacaaagtattgccacaaatcttttatttgtaaaaaaaaaaatctgcaaagttcaataaagtggaactcaataaaatgaggtatatgcctgtgattatatatagtaataaagataaaagcagataaaaagaaaaccaatgaagaaagtcagtacaattgaaattttgatccttaagaaagtcaactaaattaataaacttctagccaaactcattaggaaaattaaagaatagacgtaaatgaccaat

SEQ ID NO: 162074 - DNA, 367 bp, Homo sapiens
agattaccataacagatataatggtaatgacaatgtttgaaatattgtgagaatcaccaaaatgtgacagagagacatgaagtgagcatgtgctgttggaaaagtggtaccttatgaaacacaaagtattgccacaaatcttttatttgtaaaaaaaaaaatytgcaaagttcaataaagtggaactcaataaaatgaggtatatgcctgtgattatatatagtaataaagataaaagcagataaaaagaaaaccaatgaagaaagtcagtacaattgaaattttgatccttaagaaagtcaactaaattaataaacttctagccaaactcattaggaaaattaaagaatagacgtaaatgaccaat

SEQ ID NO: 162075 - DNA, 607 bp, Homo sapiens
cctcaagaccagtgctattctcttcacgccaaggcaggaagatcactgaagcccagaagttcgaggctaraatgagctatgattgtgccaacgcacttcatcctaggcaacatagcaaaaccctatctctaaaatataaacaagtaaaataaatttaaaaataattgtggcgtgtggcaattattgataatgcctcatagccccaaattcatccctggttgccttccctgtgaaaataaatctaggcccttcacctttatttttttcttttttggctatcatgatgctaaacttatcagtagagggcaatacaaagacatttcaagaaggcagaggcttccctcctggtagtgcactttttccccactgtctattccacgtggttttcaccattgtcaagggcttagagggtacagctttcacagtgtgttttctacagttcttgactcaggaaacaatggcatagtggaagccccagaaaaatctgacctgtgcgctagccctgttaactgctgcccacaaccctgagtgatatgaatgtaaggggtactgtggagctgataatcagcaagcttgtggcatgacctccatcctgtgtagcccagag

SEQ ID NO: 162076 - DNA, 653 bp, Homo sapiens
atgaatgtcacatgaaagagcacttgtcactgtacatgtaagaaattattagcaatgcatgacttcatgcccagagaacactttgagaawcagtgaaaagttctgagtgtgtgaaaatggaaggtcactcacaaatgatattgctcaaactcctagagccaggatctgccaaagatgataatgataataataataaataatgtattcacaggaacaataatataataattcttattgacaataattgtctattattatcattgctattattttagttaacataatttctggggcttcctaagtgtcaggtaccttgctaagaacattagatctttgttcctccaaagaaacccatagcatagatggggaaactaagatttgtgcaatcaagtaagttgtgaccctggattcaaacctacatttttttactttaaattatttcctagggcatagtattctaggtaatcaataaagaatctaaaatgacttcatataatttttgtctatgaattgtacatctccttaactgaaacatgagctcattgacagcatacaatgtgtgaatctggttcattgttgtatccccacagcctaggacagtgttctcagtgaatgaatgaatgtctattattagaatcagcacactaatagga

SEQ ID NO: 162077 - DNA, 538 bp, Homo sapiens
tgacagtaggaccgtaaagaaagggaagaataaaaagaacgttattatttatttttttaacacaaaggaaaccagctggtatgtgagtaatttctttgtgtcttccagtgattcccaaagcccactatccatcaccattaccttgggatgcttttagtaatgcaatttcctaacactcactttttcccactctttcccctgaaaactggattcaataggtttgtgatgtaatcaaggaactggtaactttacaaagctctaccrttggtgtcaatgagcagccagatgtgagaactgttggtctaggtgacccatttcaactccattccagctcagtgatttaagtgacattaattgaagttgaagatattcaaaatattactttccttatgcaatcagcagatgaaactggtctatgtatgagtgttcctcaaaggtacttaagattgatccgatgaagtgatagaagtttaaaaccaaagccttgtaaagataattgatcttccttaccatattattgtgaaagaatgtggcaatc

SEQ ID NO: 162078 - DNA, 633 bp, Homo sapiens
ctactttatgaaccctctctattgcagtaggtagtcaggtctgaattttgaaatccagtgcactctgcttacagctattcattaaggcataggcttgtctcttctcctgggctctaaagatctgagacaatttcctattaaaatttctattcccaatatctaccatacaacctagcaagttatacacttaatagatgtcatttgtataagaatgtagataatcccattaaagaaaaccaaccccattcagattccatcaatgtcagctttgtgtctatctgaaawgagaaaactaccatatgaaacttagtagatattgcattaaatgtagcacatttaggaagtgttcccatataaaactgactagaagcaggtgatttgaaattaaattccataattaaataccatatagcatgctaaagtgttcagtacaatttgccaagggtttttccacagaaagtgatggaaaattctttggtagaaattgatgttgaatgtttagagccttgacagaaagaactccttagcagtcaaaaatgtagaatattcttcgctttctctcagagttctgctacaaaaatctcagttttgtttcagtttttttaaatgacacatataacgtcaattgacaaa

SEQ ID NO: 162079 - DNA, 633 bp, Homo sapiens
ctactttatgaaccctctctattgcagtaggtagtcaggtctgaattttgaaatccagtgcactctgcttacagctattcattaaggcataggcttgtctcttctcctgggctctaaagatctgagacaatttcctattaaaatttctattcccaatatctaccatacaacctagcaagttatacacttaatagatgtcatttgtataagaatgtagataatcccattaaagaaaaccaaccccattcagattccatcaatgtcagctttgtgtctatctgaaatgagaaaactaccatatgaaacttagtagatattgcattaartgtagcacatttaggaagtgttcccatataaaactgactagaagcaggtgatttgaaattaaattccataattaaataccatatagcatgctaaagtgttcagtacaatttgccaagggtttttccacagaaagtgatggaaaattctttggtagaaattgatgttgaatgtttagagccttgacagaaagaactccttagcagtcaaaaatgtagaatattcttcgctttctctcagagttctgctacaaaaatctcagttttgtttcagtttttttaaatgacacatataacgtcaattgacaaa

SEQ ID NO: 162080 - DNA, 633 bp, Homo sapiens
ctactttatgaaccctctctattgcagtaggtagtcaggtctgaattttgaaatccagtgcactctgcttacagctattcattaaggcataggcttgtctcttctcctgggctctaaagatctgagacaatttcctattaaaatttctattcccaatatctaccatacaacctagcaagttatacacttaatagatgtcatttgtataagaatgtagataatcccattaaagaaaaccaaccccattcagattccatcaatgtcagctttgtgtctatctgaaatgagaaaactaccatatgaaacttagtagatattgcattaaatgtagcacatttagraagtgttcccatataaaactgactagaagcaggtgatttgaaattaaattccataattaaataccatatagcatgctaaagtgttcagtacaatttgccaagggtttttccacagaaagtgatggaaaattctttggtagaaattgatgttgaatgtttagagccttgacagaaagaactccttagcagtcaaaaatgtagaatattcttcgctttctctcagagttctgctacaaaaatctcagttttgtttcagtttttttaaatgacacatataacgtcaattgacaaa

SEQ ID NO: 162081 - DNA, 515 bp, Homo sapiens
gataaaatataaagtacatagtaagcctttcagcctgcatatgttggtaatgaagaagaatgctatgttgcatgtaatggagggctggaacattaatgttcaagtgtcaggccactttcattgcttgttccaaaatataaatgagtgatacagaagagagtatagttaaaaaatactgtagtgatagataaccatgtgaaaatcaagaattgctttgacatattaaatataattttaatagcatattaattgttagatcttatgtaattaatagcatcacagggcacctacatatatatttatttgatgctttcatcaaccctattttgtaggcattactcttgttttcagatgaggaggtcaactagtaggctaaatgacttgcctaagaytgcacagacaaaaagcaggagccgtgggttaaggctcagaacttctacttcaagaacatgaccctgtgcttggaatctggtctttgaggccagaagaccaactgagtgtgctcagttgtttaa

SEQ ID NO: 162082 - DNA, 607 bp, Homo sapiens
agttctcttaatagtagccatgaatgctaaaatataaagttaatgtgatacgtgattatttcaattcataggtttggaaactgggactatgaaatatgaggcaactttccaaggccatttttgcatcaagtgctattgtgacattaggctgggtcttcttaagtcacagttgttttcttgcctcctgtcatatagtgtggagttctccatagtatagcatgacaggaagcaagagatctatatttatggagatmtccaaatgtcagtagataacacatgttttgcttatactgacatcaaaaaccctgtctccaaaacaatctcagatgagattctcatgagaacacaatttgtttggagaaattagcatgggaatataagttaaaataaacatttaaaaactgtacgtttattttatttttaaataaaaaacatttcactgttagatctattttcaacagtagaagtatgcacaagtttatagaagaattctagtaacataaattttgtttaccaataatgaagacctttgtctttatgaagattacaagtatcctgtgatttatttaaccagtaactctgtatttaagtaaaaacttgtttattt

SEQ ID NO: 162083 - DNA, 566 bp, Homo sapiens
tgagacttattcactgtcacaagaacagcttgggaaaacccacttccactgatagcagtagctgctccagatgccctgctgctgccatcatgccagctgcagcaaggaagcatcactggagctgcacgatcagtggggccagcaggagctggtgacaaggagggtccccaccccttctgagttggggtaagagctccctgggtgcccttgcagctactcaaactgtggctgcagacccaggtctcctgctccwcagagcaggcagaagccccaccctcctgggtggggctgcagcctcctatgttgtggctgcagatccaagcctccctgtgctcgtagggggccaggagcaggcagaatccctgctcttctgggtgccactgcatccactcaaaccatggctgcagactccggcctcccactccatggaacaggcaggagccctgtcccacttggtgtggctgcagccacctaagctgtggctgcagatccaagcctccctgtgctcttgaggggcctggaggaggcaggagccctgccatctctggtgcagctgcagccaccca

SEQ ID NO: 162084 - DNA, 538 bp, Homo sapiens
ggaaaacccacttccactgatagcagtagctgctccagatgccctgctgctgccatcatgccagctgcagcaaggaagcatcactggagctgcacgatcagtggggccagcaggagctggtgacaaggagggtccccaccccttctgagttggggtaagagctccctgggtgcccttgcagctactcaaactgtggctgcagacccaggtctcctgctccacagagcaggcagaagccccaccctcctgggtggggctgcagcctcctatgttgtggctgcagatccaagcctccctgtgctcgtagggggccaggagcaggcagaatccctgctcttctgggtgccactgcatccactcaaaccatggctgcagactccggcctcccactccatggaacaggcaggagccctgtcccacttggtgtggctgcagccacctaagctgtggctgcagatccaagcctccctgtgctcttgaggggcctggagsaggcaggagccctgccatctctggtgcagctgcagccacccaaacc

SEQ ID NO: 162085 - DNA, 577 bp, Homo sapiens
tgggggcatattagaattatttacagagttgtctaataatttaatatacaaaatatacatcaattgagtgaatgaataatgtttaacatgtcttgatcatctttaccaatacctttttatttatattaacttatgaaattagagtataaaaattccattgaatctaataaaattcaatayactctatgatgcaaaattagtaagtttttctgtgggggcaattttaacattcaaaaagaaagaatgacatttaactcatcagtagctaggaagattgaaaattcccagatttggaaaattcaagattcttaatatccctcatctggtgctctcctttcctgtactggcaaaatggttatttgttagcagttgtgaaaaaagtcataatatgaccataacgtcatagccaattgttgaattatatttacctattttcatatttccccagttttgcacctggccttgggtgttttcattacacaaagtgcaaaatcataatgtctccttgtctttctaattaagaatactagcaaaggaatgagttaggtttttaaaaattttctcttctcaccaataa

SEQ ID NO: 162086 - DNA, 577 bp, Homo sapiens
tgggggcatattagaattatttacagagttgtctaataatttaatatacaaaatatacatcaattgagtgaatgaataatgtttaacatgtcttgatcatctttaccaatacctttttatttatattaacttatgaaattagagtataaaaattccattgaatctaataaaattcaatacactctatgatgcaaaattagtaagtttttctgtgggggcaattttaacattcaaaaagaaagaatgacatttaactcatcagtagctaggaagattgaaaattcccagatttggaaaattcaagattcttaatatccctcatctggtgctctcctttcctgtactggcaaaatggttatttgttagcagttgtgaaaaaagtcataatatgaccataacgtcatagccaattgttgaattatatttacctattttcatatttccscagttttgcacctggccttgggtgttttcattacacaaagtgcaaaatcataatgtctccttgtctttctaattaagaatactagcaaaggaatgagttaggtttttaaaaattttctcttctcaccaataa

SEQ ID NO: 162087 - DNA, 615 bp, Homo sapiens
gttcaaattcactaattgtcaggattttcaaatttttcataaaaatttcaaatattcatgaagttaataacagtgtaatgagcctcgatattcccatcactcaaattcaaygagattttgccacactgactatcctttttcatttattattgttaaatttatgagaactaaatgaaactgagggcatgcaatacttagcggagttcctggtacagagtgaatgcataatatgcagtttctatttaaagttattcatccataaaatagggataatattacctaatacggagtaatttttgaaaaattaaatcccaaaaaagtagaggtggcagttctttttaatttgaaaagtgaaataacatggcacagataattagtatgattaaagaggatcactgttaatcacagaaaaggagaagcaaataatagtatatctctatgcctgcaacaaagaggagagtgttctactcctatgcacataggggaaaagaaaactgacgtgaacacagaaagattggtagttgccaaagataaattacccaaggcctattgttgagtagaattgaccctaagaggcagaacttaataattgtcctcccttttaggatgagtaaa

SEQ ID NO: 162088 - DNA, 565 bp, Homo sapiens
agcaatctgattttaaaatggccaaaggacctgtatagacatttctccaaagaagacatacaaatggccaacaggtacatgaaaaagtgttcaaattcactaattgtcaggattttcaaatttttcataaaaatttcaaatattcatgaagttaataacagtgtaatgagcctcgatattcccatcactcaaattcaacgagattttgccacactgactatcctttttcatttattattgttaaatttatgagaactaaatgaaactgagggcatgcaatacttagmggagttcctggtacagagtgaatgcataatatgcagtttctatttaaagttattcatccataaaatagggataatattacctaatacggagtaatttttgaaaaattaaatcccaaaaaagtagaggtggcagttctttttaatttgaaaagtgaaataacatggcacagataattagtatgattaaagaggatcactgttaatcacagaaaaggagaagcaaataatagtatatctctatgcctgcaacaaagaggagagtgttctactcctatgca

SEQ ID NO: 162089 - DNA, 615 bp, Homo sapiens
gttcaaattcactaattgtcaggattttcaaatttttcataaaaatttcaaatattcatgaagttaataacagtgtaatgagcctcgatattcccatcactcaaattcaacgagattttgccacactgactatcctttttcatttattattgttaaatttatgagaactaaatgaaactgagggcatgcaatacttagcggagttcctggtacagagtgaatgcataatatgcagtttctatttaaagttattcatccataaaatagggataatattacctaatacggagtaatttttgaaaaattaaatcccaaaaaagtagaggtggcagttctttttaatttgaaaagtgaaataacatggcacagataattagtatgattaaagaggatcactgttaatcacagaaaaggagaagcaaataatagtatatctctatgcctgcaacaaagaggagagtgttctactcctaygcacataggggaaaagaaaactgacgtgaacacagaaagattggtagttgccaaagataaattacccaaggcctattgttgagtagaattgaccctaagaggcagaacttaataattgtcctcccttttaggatgagtaaa

SEQ ID NO: 162090 - DNA, 607 bp, Homo sapiens
attgaaatcaccctttgaaaccttctaacccactaaaacaatccctttttcattctattcaagatactctaacctgaaaagtgttttgactatccctatatagagttcatataacctcaacttcaaatgttatgtgtttatcatctagatggtctttattatattatagaaaaaggggacactraaaacataataaatattagtttgaaacgggcagggagaaattgaaaaaagatttttaaaagatgcaatgactgtgtagacaactccaacataccgtttccaaatctaataccataattctgcttttaattagactattcttggatcaatcacaatatatttatttcaagtcagagctaaatacctatgtcctatatgtgttacggtacttgatgtaatggtgttgaggctagaaaatgaaccctaacatgatcacaactttaatgagtgtgagctgaaaaagctgctacttaatgctggtctttctacaagtggaagcttgaagtttgcttctgttaatttgggaaaaaaaaatcttaatttttttaagttaaacaaatgaaaagtaattatccaccaatattattcatgaagaaaactgtta

SEQ ID NO: 162091 - DNA, 619 bp, Homo sapiens
catgaatgtgtgtgtgtgtgttgtgtgtgtgttcataagagaaagagagttttaattctttttctcttctttataatgttaacctgaatttttgtatttaaagttttttcccttcaaatgtctgcattttggcatctaacttcagagacccaggatgagttacatatgatagatccttataacgaaccattagtctcacttcttggaaagaatattggagtttgtgctaggctcaccatgagaggtaaatgcttaccagctgattaacctattgataaaagtggtggtagatgtggctacatggctattgygcagaagcacaagggaaatcttcatggtaatgggatagatctacatcttgattgtgatgctgtctgcacaaatctatatgtgtgataaattagtatagagctatccatataaattttacatgtatcaatggcctggttttgatattgtactatagttatgcaaatataaccattgggagaaacttggtgatgagtacataagacctttgtaactatctttcaaactttttgagaatctataattattttaaaataaaatgttaaaaaacgttcttttctgcatgacaaatgtgctagtcatgccactg

SEQ ID NO: 162092 - DNA, 619 bp, Homo sapiens
catgaatgtgtgtgtgtgtgttgtgtgtgtgttcataagagaaagagagttttaattctttttctcttctttataatgttaacctgaatttttgtatttaaagttttttcccttcaaatgtctgcattttggcatctaacttcagagacccaggatgagttacatatgatagatccttataacgaaccattagtctcacttcttggaaagaatattggagtttgtgctaggctcaccatgagaggtaaatgcttaccagctgattaacctattgataaaagtggtggtagatgtggctacatggctattgcgcagaagcacaagggaaatcttcatggtaatgggatagatctacatcttgattgtgatgctgtctgcacaaatctatatgtgtgataaattagtatagagctatccatataaattttacatgtatcaatggcctggttttgatattgtactatagttatgcaaatataaccattgggagaaacttggtgatgagtacataagacctttgtaactatctttcaaactttttgagaatctataattattttaaaataaaatgttaaaaaacgttcttttctgcatgacaaatrtgctagtcatgccactg

SEQ ID NO: 162093 - DNA, 585 bp, Homo sapiens
tggttaatgtttgttttgcacatggtcaaataatctgctctttcaaatattttccaaataagcttacttggaaaacatattactccattttaggycttgtatctttccacagaaatatgttgaatatgaattcaagtctgaaatcataggtagtactaatgagacagaaatgcaactgattattttttactttttgtttgtttagtgttgctattacctgtgttacctgctgttcaaccacatgcattaatgtttctcagtttgatattcatttattcagtagaaaacagtagaatgtgaaaaggtgcctgtttctatttctgggacattttactattttatttttcattaataacgtgatactttttctctcaatcatttgttttctttgttaaaaaccaagtttaattgtaggaaatcaacctatgacttttgcaccaagaggaagcacaaagaaataatctctgcattttttagattaatttttctttttgtgtgctaggagaagtaaggggaagtttgttgtttaatgaacaagttcaaacaaattcatagacgtaaaacccaaatgaaccttaagagctc

SEQ ID NO: 162094 - DNA, 636 bp, Homo sapiens
taaattttgcccaacttgcaggaaataaatttcttaaatgataataattttgataaaatattattttccagaaataagtgaaggtaagctctccttatttggaatgagaaaattatgttctagaatctgtagctaataagcacacaaataagtgactaataattattcaaaaagtgatatttgttcctttatttacagaagcccatttgaccacattagaatatttttaaataagaagtaggatatagacacatttaccttctgtctctaccaaatcagtaaacttattgagatgcctataaatctactaatacggcatttgagagctgcataattaggaagaatctgatcatcattaaaccacttaatcatttcagtattttaaaagttacatatcatgatggtaatagctcttgttttttgatcacctgttgtatggaggcactgcactakacatttttttctgatcatttgcaatctttgctataatccaacagataaatattattatatccattttataaatgggacagctaaaatgaaataaagtagtttccccaaatcttttagtgtttgactcaaattatttcttctttctattatacaatgaaacctataaaggggtgaattattaat

SEQ ID NO: 162095 - DNA, 541 bp, Homo sapiens
aaaattccaggtagtccccactacaatggggctttgggcaaaaattatgtctttctgattggtgagcccaggtgcctaaagaaggtaacagagtcctggagtttatactagaaatcattcttataggagaaactagaaaagcacgagagacaggtagcaatttttagaagcgggactaacctcagagaagagaggcgagaggaagtttgtctcacaggcattaggacccagggggcaaaggtcaggatagataggatagatgggcaagtctcgcttgggcaacatgcctttgagagttccactcatggccgcaggtcaaccaacttgttgtygggaccctggagctgcatggctttcctctctgtcgaccctcggctcagcccagaagtacaggaaaagcagaagctggttctaggcaaaccaacagtcccaactctgaagagtcgggggttgttagagagccctttcccagaaagcctgacacccatgtctttagtcagtggccatgctagtcacttttaactggccgacagatgcccgg

SEQ ID NO: 162096 - DNA, 436 bp, Homo sapiens
tttgcaaggtcataaactttattttactcagtttgcttaatgttgagtggagtcttggggactaacatgccatctcttaaggagacaggcaggacctctgattttatgtttacagtgaataaaatattaatctcagcaatccattcttctccttcttggtatcaactaattggaaaaccaggtcaaaacattgctrtgaacataggataagaacgaaaggacgtttttggcaaatatggaaaagataaatgacgaactcttcctattccacaccactgctcggagcactctcctgactgaaatacttgaatccaccagatcagtctagttcttctgtgtattatcctggatacacatggatacattttatcacttatttgctcatgcagagctgcacttcttatactactagaacaattaatatctttttggaatt

SEQ ID NO: 162097 - DNA, 608 bp, Homo sapiens
taatacattattttgcaaaaatgtaaagtgctaactcttaactgtctatttttctttaaaaatgtttatattaacatataatgactcttgtttttaaatgaattaaaatacacacacacacatgtacttcagagacaaagtctcactctgtcacctacactggagtgcagtgatgtgatcatagctcattatagtcttgaactcctgggctcaagcagtcctcctaccttggcctcccagagttctaggactgtaggtgtgagccactgtgcctggctctaaaatatttttaaaatttctcagcttctaattcaaaaaatatctatcagctataacccatataaacaaaagctgttattgccctcactaatatttaagagtgtaaaggggttttgataccaaaaaatttgagratctctgatctagataatgtgctagcacaggttaattaaaattgtttgaggtactcaccgcaattttagaacattataacatttttccccatataagcaatgtcacgtaaatgtgtaagtcatccctgggttgctacagatgcttatttacctgtggtatttctgaagtgcctaccattattaactaaaacattt

SEQ ID NO: 162098 - DNA, 607 bp, Homo sapiens
agaataaattaatggaatatcatggcttagcatccttttcatgatgaactgcaaatacatgattttctaatgttgagatatctgacttaactggattgtcagctccttgagggcaaggacttgtgcctgttctgcagcctctcaggaaatatcgaaatgaacacttcagggctctcctcacatggtgcctgccccagactgtctgccgtgctttcctcattcacgtttctctcttcatttttttgagcggtaactattggcttctataatagtagccatcatttcaaactcccccaaaactctgattattggaagcagatgagccaaccccttctggtctgtgaccttaaattaagtgtatacctggyctcttctatagagaaaagcatggcttctgtttttctccatctctgaaagcattttttttttttgcttttgattcaagtatattctgaatagttgataaatggaattccaatctttggataaaaaggtgtattaatgagtctgttgaaacttttttttttggatgagtatcaggacactgggagaactatagcaggcatggggacagcataaatcaggactggacagtttagacaagctc

SEQ ID NO: 162099 - DNA, 477 bp, Homo sapiens
tacctgcaaactaacatgcaaaccatcatcaggaagcatagcaacagwctcccaaagtgggagaatgtgacaaaatgtgaaccgagatacattttaaaacaattgcacttaaaatctttacggagataaaaatcacaaaacacaagtaagtagatttcaaactgacagaaatcgaaaaagtgaaagatgcagtcagtgaaaaatttgcctttgcttagttggtttaaaaagaaataattagtgaaaaagaagcttttcaaacagtgcaaaagaactatgtgatattctagaaagtggtgataaggtgaaagatcaaaacagatcatctgtaagatcccaccaagtagcattttaatacagattgttcctgctttttatgcatatagttttttggtacaaatatggaatcatactctagacttttataactttttcattaacataaactttttttaaattagtaagtcttctataccc

SEQ ID NO: 162100 - DNA, 538 bp, Homo sapiens
tacaggcacgtgccaccatggcaggctaattttgtgtttttagtagaggcagggtttcaccacgttggtcaggctggtctcgaactcctgacctcaggtgatccacctgcttaggcctcccagagtgctggggttacaggcatgagccaccgcacccggccctttgcaggaacttctaacacgacttgctgcttccgcacaatggaggtacacaagtcagtcacacagaaacatgcttatgtatgtagctggctctttggagcaaacctaagctaaaggatatatacttcctggcctaaggcataagcaccacatacattttttttccctttcagaagcaatatttttattttttggaatgaactgtggttasagcatattgtcgtctagactattaggtcaggcaaagatttttttccttcctctgttttatacatgtgaataaagatggaataaacaaagcatgctgttaggtattttgtgcccatgttagcgtaggcaattctagaacagattttttttttctaggatgtttgaa

SEQ ID NO: 162101 - DNA, 527 bp, Homo sapiens
aaaatccacaggagaaagagtgagataagccagaggtaaagaaactattttgcccagggcccctagcctaaggagaagcaactgactttttccccccaagaataatgtggacaaggagcaaagctctcctctgagaaatattagataaattaagagttggataaaaagaaatctggcagaggtaggcctggggaggagtccagcctacatccatatacaaagacactctcctccctgtattcattatcartattttaaaaatcaaatataattcaatttaaccaatatttgactgcatatgtaataaatgcaaggtacttgcccaacagggaattaaagtgaatatgacacacttgacatttccagaaagttagaatttgtttgaaggtaattatgctgttacaatggaatcaaatgtccgtagaattcctactttgttaccaggcaggtaaacaagagcttgttttcccaagcatgtcacatgttgcacctgcaggtgggtggtggaggtgaggcctgagcctagg

SEQ ID NO: 162102 - DNA, 366 bp, Homo sapiens
agtaatctaacatcaaatagaatgcttatatatttgactatttggatggcaatgaaattgacacactctatagatcacatcatttattacatgccatgtaaggaaggtcataaataatgagtaggacattttaaaagagtcaaagtctccagagattcagtttacataaaaagaatccatagggagtaagttcaattttktgagactttggattctataaaaatcattagattctgaattctttgtacaacaccacctaagtcttctggactaaaaaagtataaagcttataaaagctcataaaactagttaaacagtctaaaattaccaagtaaaactacctattcagcattaaacagttttaat

SEQ ID NO: 162103 - DNA, 366 bp, Homo sapiens
agtaatctaacatcaaatagaatgcttatatatttgactatttggatggcaatgaaattgacacactctatagatcacatcatttattacatgccatgtaaggaaggtcataaataatgagtaggacattttaaaagagtcaaagtctccagagattcagtttacataaaaagaatccatagggagtaagttcaattttttgagactttggattctataaaaatcattagattctgaattctttgtacaacaccacctaagtmttctggactaaaaaagtataaagcttataaaagctcataaaactagttaaacagtctaaaattaccaagtaaaactacctattcagcattaaacagttttaat

SEQ ID NO: 162104 - DNA, 366 bp, Homo sapiens
agtaatctaacatcaaatagaatgcttatatatttgactatttggatggcaatgaaattgacacactctatagatcacatcatttattacatgccatgtaaggaaggtcataaataatgagtaggacattttaaaagagtcaaagtctccagagattcagtttacataaaaagaatccatagggagtaagttcaattttttgagactttggattctataaaaatcattagattctgaattctttgtacaacaccacctaagtcttcyggactaaaaaagtataaagcttataaaagctcataaaactagttaaacagtctaaaattaccaagtaaaactacctattcagcattaaacagttttaat

SEQ ID NO: 162105 - DNA, 623 bp, Homo sapiens
ctactaaaaataaaaaaaaaagtggattggaacagcatgaatatttgaggggcctccagaatctctggcccaggctgatttgtgagggtcttgttcagtacggggctagtctgcaaagactaggagaagcggctgttgtctctaatatgcagatatgaacacagagaatcaggaaaaatagagaaggagaaaaatacctttcaaacaaagcaacaagataaatctccataaactgactaataaaatggaggtgtgttatttacctgacagaaaattcaaataactgtcataaagatgctcaccaaggtcaaaagaacaatgcgtgaacaaaatgagaatttcaacaaaaagaagttttgtaaagtaccagacagawttaatggagctgaagaatacaataactgagataaaaaatttattagaggcattaaacagttgactagatccaacagaggaaaggatcaagaaactcaaagacaagtcattgaaaattaatcagccagaggaacaaaaagaaaaaaggaatgtaaaagagtaaagaaaacctaaggaactaatggaacgccatcaagcttttaaatataaacattacggaagtcccagaataaaaacagataaacaaa

SEQ ID NO: 162106 - DNA, 583 bp, Homo sapiens
atgaaatgacaagccacgaagtgagagaaaatatttacaagtacatatttgataaaggacgtttatcaaaaaaatacaaaagacctttaaaaacaacaaaaaggaaacagaaaatgcaattaataagtggacaaaagatttgaatgtacaactcaccttcaaacacaagaaactgcacataagtgtctatagtagttttattcatataygacacaacttggaatcaaccaagatgtccttgaatgggtgaatagataaacaaactgtggaacatcgatacaatgcaatattttcagcaataaaaggaatgagctatcaaaccatgaaaatacatgaaggagcttaaatgcatatttctcagtgaaagacaccagtttgaaagggctgcaaactgcaggattccaacaatatttcattctggaaaagggcaaactatagaaatgtaaaaataaagggcagagagagaaaagtgaataggaagagcccaaaagttgttttgggcagcaaaactattctgcattatccagtaatggtggatatatgacactacaattgacaaaactcatacaacagtataacacaa

SEQ ID NO: 162107 - DNA, 541 bp, Homo sapiens
atatattaagtgcattaaataattaaatgaaaatgttaaattaaaaataagagataatcataatgatgtttatgaaattttacataaaggaggaatttattcatttcaagaaaatgggtaaaatcaaaattattttgatttaaatatatatatatagtcacataagcacacagaaattaaacttctgcatataaatataagccaaagtatcaaatgcaaggtaaatattcaggacagattttagtgcacaaaaaacagaagaaagctgttgcccttaatacataaattagttacaaaatgtagaagtaccactctaaaatccagtagataaatagacaataggctaatgaagaaatgcaartgggagagaaagcaggtgaaatatgtactcatcctctaaattcagaaaaaaattaaaattctataacattttgtacttcccatttagctaatatttaaaaaataattataacccctcctgttctgaaagaacagtcaatcgagtacatgcttatgtaatagttgatctttcaaattggaa

SEQ ID NO: 162108 - DNA, 541 bp, Homo sapiens
atatattaagtgcattaaataattaaatgaaaatgttaaattaaaaataagagataatcataatgatgtttatgaaattttacataaaggaggaatttattcatttcaagaaaatgggtaaaatcaaaattattttgatttaaatatatatatatagtcacataagcacacagaaattaaacttctgcatataaatataagccaaagtatcaaatgcaaggtaaatattcaggacagattttagtgcacaaaaaacagaagaaagctgttgcccttaatacataaattagttacaaaatgtagaagtaccactctaaaatccagtagataaatagacaataggctaatgaagaaatgcaagtgggagagaaagcaggtgaaatatgtactcatcctctaaattcagaaaaaaattaaaattctataacattttgtactkcccatttagctaatatttaaaaaataattataacccctcctgttctgaaagaacagtcaatcgagtacatgcttatgtaatagttgatctttcaaattggaa

SEQ ID NO: 162109 - DNA, 558 bp, Homo sapiens
  misc_feature (1)...(558): n = A,T,C or G
taagcagcggtgtgcttcaagaagaatatattatcagaatttaaatttagaacatacattcaatacatcttcctactgaagttcaaatgtattggttaccatgcaaattaaagttgtattttctccacttagcttgatggtgtaatttacacattttaaacagacagtctcaatgaaactactttagcctgcaatcaatgttctcatggagttataaaacctagacaaaaatcatatggaaatcttaccagttaattagttagttgctaatctggaccaaagaaaaatagcacatcttcaaaaggctaataaaatataatatctagtatttaaacaaaatgaacattggcaaatctctgagagaagtcaataccattttcctttttttttttttttttttttttgagagaaagtmtcactctttcacccagactggagttgcagtggcactgtcttggttcactgcagcctccatctcccgggttcaagcaattttgctgccttagcctctggagtagctgggattaccggtgcctgccaggatgcannnnnnnnnnn

SEQ ID NO: 162110 - DNA, 578 bp, Homo sapiens
acatttgggaatggagaggttggctgtaaaacaggtagagatgaggcaacagcatttcctaacaggacaaaactggttgatatccaaattctggaagtggtgttcaattgactaagcctagcgagattaaaagttgcagactatctaaatacccctttcagaacctgaatgagtaaaagtaataccctgacatatgctttccatgggacatagtatgcttttttttatttctttttttgaaatagtgttatctcctttggcaaaaggaaacatttcagattgaaatccaactagaaaggtacttaaaaaaaaaagggcaaaaactttatttaatcataactaccccccttcagcscagcctgtgattatataataataataaacaggttttgggctcatcaggtagtacccaagacaaagcacattcgtttttgaaattgaagtctttcctctgattataatttttcaatattcctcaatactattagcatgttttccaaattcctagaaaaatctcagcatatcatcatggtccgacataatcttgccaatttctgtgtccagaacctcattttcta

SEQ ID NO: 162111 - DNA, 504 bp, Homo sapiens
aagagacaggagagcttattgtctgtctctgctgtccaccatgttagaatataacaaagagacagccacacacaaaccaggaagtgggtcctcaccagacgcaggttctgctagcatcatgatgatgtactttccaaacttcagaactgtgataaataaatgttagttgttcaagttagcagtctatgataattgcttatatggtctggactaagacaacatctgtgacaactgctagaagaacatatggggaagatacaatgagtgcttataataataggttgctttgatactcaattgtcctggaagagtcaatctagcagaaatgaaaaagatggayataggccttattaggcaaagagaaaagagcctacattgtaagttgaagaaacagtggataaaggaactataaaaacaaatctatgtgccccaagaaatatttagttttcttgttattgataactcaatatcgttgtcattggtagccaactatgaaatactgtc

SEQ ID NO: 162112 - DNA, 504 bp, Homo sapiens
aagagacaggagagcttattgtctgtctctgctgtccaccatgttagaatataacaaagagacagccacacacaaaccaggaagtgggtcctcaccagacgcaggttctgctagcatcatgatgatgtactttccaaacttcagaactgtgataaataaatgttagttgttcaagttagcagtctatgataattgcttatatggtctggactaagacaacatctgtgacaactgctagaagaacatatggggaagatacaatgagtgcttataataataggttgctttgatactcaattgtcctggaagagtcaatctagcagaaatgaaaaagatggatataggccttattaggcaaagagaaaagagcctacattgtaagttgaagaaacagtggataaaggaactataaaaacaaatctawgtgccccaagaaatatttagttttcttgttattgataactcaatatcgttgtcattggtagccaactatgaaatactgtc

SEQ ID NO: 162113 - DNA, 560 bp, Homo sapiens
aatgctttcatttctcttaatacctaagagtggaaatataatgatacattcaaggtgttttaccttttattaatttagcagggtcttgaaagaccgactctgaattttaatcaaatgtatcaatttgtttctttgtgggtcatgcttttgttattgtgactaagaaacatttgcctattataagataataaattttctttcctatatcttcttgtagaattctcacagttttaggtttatatttagttctactatccactttgaattgagttttgtatacagtgcaaggtatagactatctgcatatggatattaagttattgtagaaccatttttggtaagcctatgttttttccactcagttgccttttgacaactttgtcaaaagttagattagagttagcactccatatctgtggatttcacatctgtgaattcaacataaccacagattaaaaaaaaattaaaaaataaaatccrtcagttgcatctgtactaggcagatattcttccttgtcataattccctaagcaatatagtagaaccactattcatataga

SEQ ID NO: 162114 - DNA, 439 bp, Homo sapiens
tcaaatgtgattctacagaaattcatactcaataattttatcagaacactaagcttctgccccatgtagtaaaacctaatgttattttacttcaaaattytaagtttttggtatgtattgaggctaatattgtaaacacgctgtgccataattcctaaactgtaatatggtttaatgtatctactttctacatttaaaacatgtactttgccattgaggaactcagaatattgctgagcatgtattaaatacccatttgtttcctgttttttaaatagttatcattttataattttctcttgtttagtttgaagtttactaggattttttcattgatatgtatgtgtacatatatatatatatacacacacacaagtatatacataacaacatatgtaattgatatatatgtatatgctttatatatgtgtatagacac

SEQ ID NO: 162115 - DNA, 439 bp, Homo sapiens
tcaaatgtgattctacagaaattcatactcaataattttatcagaacactaagcttctgccccatgtagtaaaacctaatgttattttacttcaaaattttaagtttttggtatgtattgaggctaatattgtaaacackctgtgccataattcctaaactgtaatatggtttaatgtatctactttctacatttaaaacatgtactttgccattgaggaactcagaatattgctgagcatgtattaaatacccatttgtttcctgttttttaaatagttatcattttataattttctcttgtttagtttgaagtttactaggattttttcattgatatgtatgtgtacatatatatatatatacacacacacaagtatatacataacaacatatgtaattgatatatatgtatatgctttatatatgtgtatagacac

SEQ ID NO: 162116 - DNA, 439 bp, Homo sapiens
tcaaatgtgattctacagaaattcatactcaataattttatcagaacactaagcttctgccccatgtagtaaaacctaatgttattttacttcaaaattttaagtttttggtatgtattgaggctaatattgtaaacacgctgtgccataattcctaaactgtaatatggtttaatgtatctactttctacatttaaaacatgtactttgccattgaggaactcagaatattgctgagcatgtattaaatacccatttgtttcctgttttttaaatagttatcattttataattttctcttgtttagtttgaagyttactaggattttttcattgatatgtatgtgtacatatatatatatatacacacacacaagtatatacataacaacatatgtaattgatatatatgtatatgctttatatatgtgtatagacac

SEQ ID NO: 162117 - DNA, 446 bp, Homo sapiens
aagaaattgttgaagggaaaagcaactttcaggagagtatgtatggactgctrtttgtataaaattgcaaaaacagaccaaaaaacactatccattcttcatggacatgcactctaggtattaaacatggatgggaagacacacattgacttcagaatagtgggagggaggtggtaactggactggaaaaggggcatataactcgagtgtcagcttgaacattatggctgaatctgtaatgttttcttccttaaactctggagcaaatgcatccaaaagttaccatatttgaattttaactgggaggtacatgaaagtttaataccattatcctctatgcagtcctgtgtgtttgtaatattgagccatattttttaaacacttgactcatcatgaaaggaagcttgcctacatggtaccaatggttatctttaggtagcagaatt

SEQ ID NO: 162118 - DNA, 446 bp, Homo sapiens
aagaaattgttgaagggaaaagcaactttcaggagagtatgtatggactgctgtttgtataaaattgcaaaaacagaccaaaaaacactatccattcttcatggacatgcactctaggtattaaacatggatgggaagacacacattgacttcagaatagtgggagggaggtggtaactggactggaaaaggggcatataactcgagygtcagcttgaacattatggctgaatctgtaatgttttcttccttaaactctggagcaaatgcatccaaaagttaccatatttgaattttaactgggaggtacatgaaagtttaataccattatcctctatgcagtcctgtgtgtttgtaatattgagccatattttttaaacacttgactcatcatgaaaggaagcttgcctacatggtaccaatggttatctttaggtagcagaatt

SEQ ID NO: 162119 - DNA, 446 bp, Homo sapiens
aagaaattgttgaagggaaaagcaactttcaggagagtatgtatggactgctgtttgtataaaattgcaaaaacagaccaaaaaacactatccattcttcatggacatgcactctaggtattaaacatggatgggaagacacacattgacttcagaatagtgggagggaggtggtaactggactggaaaaggggcatataactcgagtgtcagcttgaacattatggctgaatcygtaatgttttcttccttaaactctggagcaaatgcatccaaaagttaccatatttgaattttaactgggaggtacatgaaagtttaataccattatcctctatgcagtcctgtgtgtttgtaatattgagccatattttttaaacacttgactcatcatgaaaggaagcttgcctacatggtaccaatggttatctttaggtagcagaatt

SEQ ID NO: 162120 - DNA, 446 bp, Homo sapiens
aagaaattgttgaagggaaaagcaactttcaggagagtatgtatggactgctgtttgtataaaattgcaaaaacagaccaaaaaacactatccattcttcatggacatgcactctaggtattaaacatggatgggaagacacacattgacttcagaatagtgggagggaggtggtaactggactggaaaaggggcatataactcgagtgtcagcttgaacattatggctgaatctgtaatgttttcttccttaaactctggagcaaatgcatccaaaagttaccatatttgaattttaactgggaggtacatgaaagtttaataccattatcctctatgcagtcctgtgtgtttgtaatattgagccatattttttaaacacttgactcatcatgaaaggaagcttgcctacatggtamcaatggttatctttaggtagcagaatt

SEQ ID NO: 162121 - DNA, 531 bp, Homo sapiens
tgactgcttgtttaatttgccactggtccaagtgacactgaaaaaaagaattgtctcgggacctagtatttttgtaccttaattatcagaaaagatcagcagtaacctygccatcattatgactagaagttgaaatgtggtatttaagagctctacatgataagatcagatatgcctgtttagtgacagcctcttttatgacaaccctctgcaaacaattaccctcaagatggagaacatgagactttttcttaacagttttctctcatttcttaaccataacgccatctttgatcagctggtatagggcagctggaccctactttctaaacccagcatgtcacttttttcctgagagagttttgtcatttttgtcatagcagtgtgaaaatggactaatacattacaatatacaagttacagccttcccatttcccctgtttgatctgactcctattttgcagcttaatttgttttatagaagagaaactaagagagaggaaatacattatatacaggcttctctgatgc

SEQ ID NO: 162122 - DNA, 531 bp, Homo sapiens
tgactgcttgtttaatttgccactggtccaagtgacactgaaaaaaagaattgtctcgggacctagtatttttgtaccttaattatcagaaaagatcagcagtaacctcgccatcattatgactagaagttgaaatgtggtatttaagagctctacatgataagatcagatatgcctgtttagtgacagcctcttytatgacaaccctctgcaaacaattaccctcaagatggagaacatgagactttttcttaacagttttctctcatttcttaaccataacgccatctttgatcagctggtatagggcagctggaccctactttctaaacccagcatgtcacttttttcctgagagagttttgtcatttttgtcatagcagtgtgaaaatggactaatacattacaatatacaagttacagccttcccatttcccctgtttgatctgactcctattttgcagcttaatttgttttatagaagagaaactaagagagaggaaatacattatatacaggcttctctgatgc

SEQ ID NO: 162123 - DNA, 531 bp, Homo sapiens
tgactgcttgtttaatttgccactggtccaagtgacactgaaaaaaagaattgtctcgggacctagtatttttgtaccttaattatcagaaaagatcagcagtaacctcgccatcattatgactagaagttgaaatgtggtatttaagagctctacatgataagatcagatatgcctgtttagtgacagcctcttttatgacaaccctytgcaaacaattaccctcaagatggagaacatgagactttttcttaacagttttctctcatttcttaaccataacgccatctttgatcagctggtatagggcagctggaccctactttctaaacccagcatgtcacttttttcctgagagagttttgtcatttttgtcatagcagtgtgaaaatggactaatacattacaatatacaagttacagccttcccatttcccctgtttgatctgactcctattttgcagcttaatttgttttatagaagagaaactaagagagaggaaatacattatatacaggcttctctgatgc

SEQ ID NO: 162124 - DNA, 456 bp, Homo sapiens
acaactaaaagctagcaaaattaaaaaaatgataaagatagcggtggaaataagtgaaatagagaatagaaaatcaatatcaaaaatcaacaaaacctagtttgttctctgaaaaagatcaaaactgacaaaattttatctagattaagaaaaaaggtaatattcaaattactaaactcaaaaataaaatgggtactttactaacaaatttttggagtaaaaaaggaatgtaggagagtaccataaggaactatacactaaaaaattgaacagcctaaataaaatgaacaaattcctagaaacaaaaatcctactaagactgaatcagaaaagttgaataaacctattcagcaaggagattcagcaggaagattgcatcagtaatcaaaaacccagcaacaaagaaaagcctggaccagatggyttcactgttgaattctacccaatgtttaaagc

SEQ ID NO: 162125 - DNA, 318 bp, Homo sapiens
ggatagaccttccagacagaaaataaacaaagaaacrtcagacttaatctgtactatagaacaaatgaacctaatagatatttacagaaaatttcttccaacagctgcagaatacacatttttctccccagcacatgggttattttaaaggatagaccatatgttaagtaacaagtctaaaaacattccaaaaaattgaagaaatatcaagcattttctctgactacaggggataaaactagaaatcaattaaaaaaggaatttaagaaactatacaaacacatggacattaaacaatatgctcctgaatgattagta

SEQ ID NO: 162126 - DNA, 318 bp, Homo sapiens
ggatagaccttccagacagaaaataaacaaagaaacgtcagacttaatctgtactatagaacaaatgaacctaatagayatttacagaaaatttcttccaacagctgcagaatacacatttttctccccagcacatgggttattttaaaggatagaccatatgttaagtaacaagtctaaaaacattccaaaaaattgaagaaatatcaagcattttctctgactacaggggataaaactagaaatcaattaaaaaaggaatttaagaaactatacaaacacatggacattaaacaatatgctcctgaatgattagta

SEQ ID NO: 162127 - DNA, 318 bp, Homo sapiens
ggatagaccttccagacagaaaataaacaaagaaacgtcagacttaatctgtactatagaacaaatgaacctaatagatatttacagaaaatttcttccaacagctgcagaatacacatttttctccccagcacatgggttattttmaaggatagaccatatgttaagtaacaagtctaaaaacattccaaaaaattgaagaaatatcaagcattttctctgactacaggggataaaactagaaatcaattaaaaaaggaatttaagaaactatacaaacacatggacattaaacaatatgctcctgaatgattagta

SEQ ID NO: 162128 - DNA, 318 bp, Homo sapiens
ggatagaccttccagacagaaaataaacaaagaaacgtcagacttaatctgtactatagaacaaatgaacctaatagatatttacagaaaatttcttccaacagctgcagaatacacatttttctccccagcacatgggttattttaaaggatagaccatatgttaagtaacaagtctaaaaayattccaaaaaattgaagaaatatcaagcattttctctgactacaggggataaaactagaaatcaattaaaaaaggaatttaagaaactatacaaacacatggacattaaacaatatgctcctgaatgattagta

SEQ ID NO: 162129 - DNA, 506 bp, Homo sapiens
acaccccactttagtcattggatagaccttccagacagaaaataaacaaagaaacgtcagacttaatctgtactatagaacaaatgaacctaatagatatttacagaaaatttcttccaacagctgcagaatacacatttttctccccagcacatgggttattttaaaggatagaccatatgttaagtaacaagtctaaaaacattccaaaaaattgaagaaatatcaagcattttctctgactacaggggataaaactagaaatcaattaaaaaaggaatttaagaaactatacaaacacatggacattaaacaatatgctcctgaatgattagtaggtcaataaaaaagttaagaagaaaatagaaaaatttcttgaaacaaatgataatggaaacatarcatagaaaatcctatgcagtatagtaaaagaggtactgttataaaaggaaaatttataactgtaagtgcctacataaaaaacagaaagacttcagatagataac

SEQ ID NO: 162130 - DNA, 620 bp, Homo sapiens
taagctgattacccacaaatacataagtggtaattctctgtttagctctctttcttttccttttgggtggagccctttgaggaatccccttggcctgcatctcatcatttgtgaactttctaagtgtgcgtcgaatgtaaataagagccaagtcctgtagattcctgacagtgattccttacagatttgtagtggtgagggttagatttaattttatatamagtttaaataattgttaagcttatgtaacctgatctgaatttgcacttcctctatgaaaacttcatctatctaataaggaaatcaaatgtttgtagacctgtttaccttactttcgttgcaatcattgttgctgggttgctgtatatatattccgggcaatatatgattgcaataacaatacaaaatattgaataatttagcttttaaaaatcccacaaactttatgaaattttacagccctgctacttttgcttttgaatctcttgccaaaatacatgagtaaaatatctgcttctctcagagagattttaagaacacagcaagtgaattattaaaataggaagtatgtacttaacacaactctttatatggaccctttacattttcagtatttttaa

SEQ ID NO: 162131 - DNA, 591 bp, Homo sapiens
agctgattacccacaaatacataagtggtaattctctgtttagctctctttcttttccttttgggtggagccctttgaggaatccccttggcctgcatctcatcatttgtgaactttctaagtgtgcgtcgaatgtaaataagagccaagtcctgtagattcctgacagtgattccttacagatttgtagtggtgagggttagatttaattttatatacrgtttaaataattgttaagcttatgtaacctgatctgaatttgcacttcctctatgaaaacttcatctatctaataaggaaatcaaatgtttgtagacctgtttaccttactttcgttgcaatcattgttgctgggttgctgtatatatattccgggcaatatatgattgcaataacaatacaaaatattgaataatttagcttttaaaaatcccacaaactttatgaaattttacagccctgctacttttgcttttgaatctcttgccaaaatacatgagtaaaatatctgcttctctcagagagattttaagaacacagcaagtgaattattaaaataggaagtatgtacttaacacaactctttatatg

SEQ ID NO: 162132 - DNA, 570 bp, Homo sapiens
cctggcccagcccaggaaaacaaagctccacctgcacccaggcctctgcaggcagctccttcccagcgcccagcactcacacatcaggaggctgggacaatttggaggagtgggggcaggaaggggggcagcaggaggaccccttcggcattctgttctcttttggtgaggsctttccttgcttagaccctaagcatcctcctttagtgcttcacagattgaatgtaaaattcatcagaggctctcggtagatgcccagccccacactaagccctataagaggaaaatgcactccccaaccagttcataacatagttttcatctcaccagaaggataggtctcaactctgaaaaattggaaaatgcaggaaaatacaaggaaaatttgaaagtgtctataatcctactttattgttggtatttaggtattttcctacatatacagatatgcaaaattatattcaaatggtgtttctgtgtttattttaatctatagaagctggattttctgcccttctaagtagcattgttttttgttttgttttgtttattgcaaggtagagcagtgag

SEQ ID NO: 162133 - DNA, 570 bp, Homo sapiens
cctggcccagcccaggaaaacaaagctccacctgcacccaggcctctgcaggcagctccttcccagcgcccagcactcacacatcaggaggctgggacaatttggaggagtgggggcaggaaggggggcagcaggaggaccccttcggcattctgttctcttttggtgaggccttyccttgcttagaccctaagcatcctcctttagtgcttcacagattgaatgtaaaattcatcagaggctctcggtagatgcccagccccacactaagccctataagaggaaaatgcactccccaaccagttcataacatagttttcatctcaccagaaggataggtctcaactctgaaaaattggaaaatgcaggaaaatacaaggaaaatttgaaagtgtctataatcctactttattgttggtatttaggtattttcctacatatacagatatgcaaaattatattcaaatggtgtttctgtgtttattttaatctatagaagctggattttctgcccttctaagtagcattgttttttgttttgttttgtttattgcaaggtagagcagtgag

SEQ ID NO: 162134 - DNA, 493 bp, Homo sapiens
caacttggccttgagaactcactaagttcttaagccatagtacctctcccgtttccctctgacatgggatgaaattacttgggaatgagcctcctcagtgacatgggacaaacttacatttaaaatgttggtcatcaatgctttttgtttgagatggagtcttgctctgtcaccaggctggagtgcagtggtgctatctcggctcactgcaatctctgcctcctgggtttaagcgattctcttgcttcagcctcccgagtagctgggactacaggtgtgtgccaccacacccagctaatttttgtattatttgtaattgtaatatttgtaattttgcacccatcaccagggctaatttttaaaatgcattttgattttttagtagagatggggtttcaccatgttggctaggatggtcttgaattcttgaccttgtgatctgcccrccttggcctctcaaagtgctgggattacaggcatgagccaccacacc

SEQ ID NO: 162135 - DNA, 581 bp, Homo sapiens
atatggtggaactaacgaatatcttccaccgtacattgtcggccagatttagtgaggagaggatgtgaggttttctttgatgatggtgataccagtagctctcatctcctaagcacctaccaggtgtcagwtcgtggcatgttgttgccttttgtcctcactacaacgccgagggtaggcatcatcgctccatcccgttggctctgaccaggagtctggaagttcctttattcatgtggaaggtggggcctgggtcctcctggttgaactgaacactggccataggtgagagctgtgtgagtggtgtgttgcaccagggaggggtgtggaggggtgagggtgggaggcaagagcgccaggagttggggccctatcggcagagcaagacgcagccccccaggacccataggaaatggagagcctggcatcagcctggccccaggcagacctgcgtccaccagctgagccagttcttggagtctggagaacctgggtttttgtcccctcggtcaagtccctggggctttatagggcatctaccaggggcctgaagcaggcgaggcctggaggaggggagagtg

SEQ ID NO: 162136 - DNA, 581 bp, Homo sapiens
atatggtggaactaacgaatatcttccaccgtacattgtcggccagatttagtgaggagaggatgtgaggttttctttgatgatggtgataccagtagctctcatctcctaagcacctaccaggtgtcagatcgtggcatgttgttgccttttgtcctcactacaacgccgagggtaggcatcatcgctccatcccgttggctctgaccaggagtctggaagttccttyattcatgtggaaggtggggcctgggtcctcctggttgaactgaacactggccataggtgagagctgtgtgagtggtgtgttgcaccagggaggggtgtggaggggtgagggtgggaggcaagagcgccaggagttggggccctatcggcagagcaagacgcagccccccaggacccataggaaatggagagcctggcatcagcctggccccaggcagacctgcgtccaccagctgagccagttcttggagtctggagaacctgggtttttgtcccctcggtcaagtccctggggctttatagggcatctaccaggggcctgaagcaggcgaggcctggaggaggggagagtg

SEQ ID NO: 162137 - DNA, 581 bp, Homo sapiens
atatggtggaactaacgaatatcttccaccgtacattgtcggccagatttagtgaggagaggatgtgaggttttctttgatgatggtgataccagtagctctcatctcctaagcacctaccaggtgtcagatcgtggcatgttgttgccttttgtcctcactacaacgccgagggtaggcatcatcgctccatcccgttggctctgaccaggagtctggaagttcctttattcatgtggaaggtggggcctgggtcctcctggttgaactgaacactggccataggtgagagctgtgtgagtggtgtgttgcaccagggaggggtgtggaggggtgagggtgggaggcaagagcgccaggrgttggggccctatcggcagagcaagacgcagccccccaggacccataggaaatggagagcctggcatcagcctggccccaggcagacctgcgtccaccagctgagccagttcttggagtctggagaacctgggtttttgtcccctcggtcaagtccctggggctttatagggcatctaccaggggcctgaagcaggcgaggcctggaggaggggagagtg

SEQ ID NO: 162138 - DNA, 475 bp, Homo sapiens
agtcagactaacaggatatcaatgtactatgaatgaacattaagttaataatacttttctgccaaattcattcctcatttcagcacttcttgaaattttaaaaaatcgttcagtaagctcgagattgtatattttgaaatatgacttaaaatgcttataaatcatgtatgattggcatatcattgttactatatgtagaatataattcttcagtaaggatcactcaataataatgaatgaagcagtattttcacagtaccaagaaacctgctaatattttcagtagtaattaactcattgttcggtaacaaatggtatgtatggtgtttcttatttaatgtattttattatttatgaatatagaaagtatcagatatagtatgcaatggtttatttttaattttaaaatttatttgaatcctttttgttggtggctgcyaccatagttagaaattaaagttattttcatagtatt

SEQ ID NO: 162139 - DNA, 509 bp, Homo sapiens
ttggtaggaccgatcagaagaaaaaggaaagaaagaagacaaaactgaccaacattaggaatgaaaaagtagacacaactatagaccttacaaacattataaagaaaataagaggacattattaacaattttataccaattaatgtctcaaaaaataaagtttaccacaacagatacaagaaraaatagaaaacttactaaagaaataaaattaataattaaacaaccaaacataaaacaggacttctgagccacacatcaaggtcagaggcaagaaaaattgacatcagttccagtctactctcatgtgctccagctcattcctgtgtcttccagcttgttcttgatctccccaactttacatccatcttcctttctccatggcctgccttgcagatttcacactctaatattaactttcaagacaatagccttacaggtgacttaatcagcaaccacagctatgtaaagtcaagtctctgtaataaatccttatatatattctagtt

SEQ ID NO: 162140 - DNA, 538 bp, Homo sapiens
ataatattatttatctttatatcatcttttagtgtctttttttgtgcacgtattgtaatgcttgtaatacattggtaagtatacataatggaagtatgggctgaacattttttgctgattagagggtcacaatcaaaaagctggtgaccactgmtttgtactgagactgacatgtccagaagtccatccaacttatgaagaagacatgtggatggtggcacagcttggactctgtaattcaagactgtaaaacatttctcactctacgttttatgacctataacacacgattacatgaactagggaaaggattgtgctttagaaagtcaggtaagtgtatttgcatttccattatcaggaaaaactccctccatcctcattcctcaacttctaggtttttcctaggactagatttagggactagatttaacaatctttcaatcaagtttgttttctttgttactttcacctggttcgacatctaagtaaatcaacattgctaatctgttagttttttttttttttttttttttttttt

SEQ ID NO: 162141 - DNA, 538 bp, Homo sapiens
ataatattatttatctttatatcatcttttagtgtctttttttgtgcacgtattgtaatgcttgtaatacattggtaagtatacataatggaagtatgggctgaacattttttgctgattagagggtcacaatcaaaaagctggtgaccactgatttgtwctgagactgacatgtccagaagtccatccaacttatgaagaagacatgtggatggtggcacagcttggactctgtaattcaagactgtaaaacatttctcactctacgttttatgacctataacacacgattacatgaactagggaaaggattgtgctttagaaagtcaggtaagtgtatttgcatttccattatcaggaaaaactccctccatcctcattcctcaacttctaggtttttcctaggactagatttagggactagatttaacaatctttcaatcaagtttgttttctttgttactttcacctggttcgacatctaagtaaatcaacattgctaatctgttagttttttttttttttttttttttttttt

SEQ ID NO: 162142 - DNA, 565 bp, Homo sapiens
tctctcactatcacaagaagagcatragggaaactgcccccatgatccagtcatctcccaccaggtccctcccttgacacgtgaggtttacaattcaagatgagatttgggtgaggacacagaaccaaaccatatcaccaactaaatcagacttgagggtctgggtgaaaagtacttggggcatagagtacctgctccaagatttaaattttccacaagcccagctgatgaaatggcctgctgtaaccctgtgatcagttttacctagtagctgcctaaacaaactgccatgacagtaagactactactgtcactcaccagtcagagctggccagctcccagaagcttctttagtgtcagtgagagttttttctttcaaaacaatatgttacaattgtctttctaataaaacttccaaccttctctttgttctttggacataccgaagaccacctggtctgtgtgtctgccctgaattgtaattgatgcttcccaataaatattttagatttagagatttgtctctatattttatttgactccaacaaagtggatagcagatgga

SEQ ID NO: 162143 - DNA, 448 bp, Homo sapiens
ggatctttttctactcccaaatcaacaacaaatatttttgagtgcccactatgtgccaggctccattctaggtgtttgggatgcatcaatgaacaacgatccctttctcccatagagctcacattccagtgggggaaacatataataaacaccattaataaataatgcagatagggccaggcacagtgactcatgacagtaataccagcactttgggaggcaraggtgggaggattgtttgaggtcaggagtttgagagcagcctggaaaaaatagtgagaccttgcctctacaaaaaaaaaaaaaagttttaagttagccaggtgtagtgtcaggtgcctgtagtcccagctattcatgatgatggcctaatgcaacatttctcaagctggttctgagaaacacacctattctgtcagatattaatagatgttctaaagaagaattc

SEQ ID NO: 162144 - DNA, 448 bp, Homo sapiens
ggatctttttctactcccaaatcaacaacaaatatttttgagtgcccactatgtgccaggctccattctaggtgtttgggatgcatcaatgaacaacgatccctttctcccatagagctcacattccagtgggggaaacatataataaacaccattaataaataatgcagatagggccaggcacagtgactcatgacagtaataccagcactttgggaggcagaggtgggaggattgtttgaggtcaggagtttgagagcagcctggaaaaaatagtgagaccttgcctctacaaaaaaaaaaaaaagttttaagttagccaggtgtagtgtcaggtgcctgtagtcccagctattcatgatgatggcctaatgcaacatttctcaagctggttytgagaaacacacctattctgtcagatattaatagatgttctaaagaagaattc

SEQ ID NO: 162145 - DNA, 541 bp, Homo sapiens
aattgtgggctatgaactgtgttcctttgacttgaattgttgcatcatactaatgaaaataagtcaaaactgctagaataaccactcaaaagacacaggttaaggatggctctctaaatcacagcaggaataatgaaaaggtggttgaaagttaggaaggacttctccatcttaaaaataaaatataagagttaccaactcgtggaaagagctagaagacgtagtgggatagaagaaaagcttttccattaatttaattgaagttgatttgtgttcatcagtagtttatttagactgattctcagcaaacataatgttaaagttaccttgcaaattasaaaactcttggcacaaataaaacagtgcacaatatctcccaagagaagcccagccttggtaaagttcagttggaaaatctaaaccagactaccttccctgcactagactttggtttctgttggtattctgtcactctgccatgcacctaaaataaacaggcatgagtttttgtgtcacgacaacaacaaaaaagacaacttga

SEQ ID NO: 162146 - DNA, 355 bp, Homo sapiens
cagcactttcccagtcaggtcataaacaaggaaaaaacagcctgagtatcacgaaaacactaaaataaggaagaccagcggcaaccgaacattttaaagtaatgaaggtgaaggaagaccaggggcaactgaacattttaaagtaatgaaggtgaattagcttgttggggggaaaaaawgtcgctataaaatacagctttcaattagttggaaaccatgcaagaaatctaaatatgatttctaatgtgaatctaaatattattttgtcagtcttctatattgcagacagttctacacagttaaatgagatattctcaaaaattgaataggaaaaatcaaatcagccatacaataa

SEQ ID NO: 162147 - DNA, 368 bp, Homo sapiens
ttaaaagtataccttcctggattatggtctatagaatgtagggtaatagaaaccttgatgcccctattgtaaatggagaattcaactcaatgtataaatgatttctgtgcttgtagatatcccatcttttaagtttctatttgaatagattggtaattttatttcctgaagtcttctctatttgtcaaatgctgccttatctttgttggttcaggtggatcgatctccaccccacaataggttctaagccccttggaaagatcattatgccgttgatttgcyaaagtattataagtgttctcagagtttcaactcttagtatgttccaggtgcaactttgacagagaactagtaacatagggaaaaaa

SEQ ID NO: 162148 - DNA, 587 bp, Homo sapiens
tgtccttgcctacaatgatcttcctctctcttttgtccaaattaagtcccaatcctcctggttaagtcccaattcacaaggacctccatgaatccatcctgatcatttctgtctccrgggcccctatgcatagtaataatataactaataacaaatgcgataataacagtaacattaacactataaaataacacttcttgagattttattgtgtaccaggtcctgtgtgaaatactttacatgcattatttcatttggtcctgacacaaatccaactcagtagggacttttatgatcatttccattttccagatgcagaaactgagtgtcagagaggaaattacttgctaaaggttacagagctagccagtggcaggctgcatgcttgaacccagccctgcctgaccacacagcctctgccctcgtgtatttactatgctgcctccctgatttctgaccggttcctggagcacttaaagtggagcaactacttcacactcagcatgtgctgttttattgctacgaacacatctttttaggttcaggccctgtttattcaaataaattatcagggccttgagggcaag

SEQ ID NO: 162149 - DNA, 467 bp, Homo sapiens
attaaagattaaaggagataacctggtgaagtacttcgcacagcttctgaaacaccatgctcaataaatgttagttatttctgttataattctaagctttacaatccttagaaatgtatagtagggagctagaacagactttcaatgtyctaaggccaaagggaatggtttgattggctcaaagatttataatcctagtcagtagcagatttaagtattcacgtctatacttaaacctgtatgtgttcagcctattctacctcttggaataagttgtcagaagtacagaatctttaatcggaaaaacctcttaaaggttaacaaaaagaacatatgggtagaaaattatggcagctagaagggaccttgtggtcatctatgaagctgagtccttcattttactattgaggcccagagaggttattaagacatgctcaaagcaaaaatcattagctaaagtgacagac

SEQ ID NO: 162150 - DNA, 626 bp, Homo sapiens
aggcaggtcttgaatgcctgacctcaggtgatccgccccaccttggcctcccaatgtgctgggattacaggcgtgagccaccatgcccggccaggatcaaacttttaaaaaaacttaaattttcatcaaacctatttgagcatagaaccctttctgcagtatttattaaaatcctgtataattattgttttgtagaaaatgccttatctcatatgaagaaactgaagtccagacaggtgagatgactgtcccaaggtcatacaattagttggtgaataaactaaaagcagacctcacttctcaggaccatatcaggtattccttttggtactattgttgtccttcttctacaatacctacactccttaaaggatcacagactagaagaaccacatcttggagaccacctagtccaaagccttcccagaaagcyagggaaatacagtttcagaaaagtaaagcagtttgcccaaagtgacatataaaattcattcttgtagaactagaacatagctcttaattccaacactagtatctttccacaacagcatgctaattcctgcaaagccaacacttttggcctctgaggtaaagaattcacagacaagaggggttttagctattaa

SEQ ID NO: 162151 - DNA, 607 bp, Homo sapiens
tgactggtgtgagatggtatctcattttggttctgatttgcatttctctgatgattagtgatgataagcattttttcatatgtttgtcagccatttatatgtcttcctttgagaagtgtttgttcatgtcctttgcccattttttattggggttgttttttgcttgttgatttaagtttgttatagattgttatagacttcagttattcgacctttgccgggtgcatagtttgcaaatatttttcccattctgtaaattgtctgcttactctattgatagtttcttttgctgtgcacaagctcttcggttgaattaggcccacttgtccatttttgtttttgttgcagttgcttttaggrattacacaaaaattctttcccaaagttgatacgaaaaagggtatttcctaggttctcctctaggatttttatagtttgagatctttaaatctttaatccatgttaagttttgtatatggtgaaaggtaaggatccaattttcattcttctgcatatgactagccagttatcccagcactatttattgaatccttttcccattacttgtttcttagggagtcctttctccattacttatttttgtcag

SEQ ID NO: 162152 - DNA, 569 bp, Homo sapiens
ctatccatgttggcccttctaaagcataatttatccatcctttagtaacaatcaaattttgatttacacttaagtgaactatccatataattacactttcttgttctccattttcctctaatgttaaagacacatttctcccaagtatattttcattataaagcctaaaaaattagacaggtgaaatttctacaccaaagttaaatataaaagtttttcagtttaatatactgctttcatcatttcctttttttctaatatacattatctgcaacatggaaagcaactccatagcttttataagactcctacaataataaacacacatagcattgagtccctttatatttcggttgtatcagacacatttcaatgagggctcagaccattttactcctgctgggacttacgattttacagtgggcatttctacagtggatacagaacttaaaaacaatccaagcaatggygtcagtcatttagtactcaattgccttttgaaatctgagaagtatggggggcacagggcatgaagggaagatggctgcactgggaatggtttgattgac

SEQ ID NO: 162153 - DNA, 578 bp, Homo sapiens
ataaatatagaggatttcactgcattctgtagtgcatgaaaaatgtagcttttattatttatttatttatttatttatttttgagacggagttttgctgttgttgcccaggctggagttcagtgatgtgatctcggctcactgcaacctctgcctcctgggttcaagcgattgtcctgcctcagcctccagaggagctgggactacagtcacgtgccaccacacccggctaattttgtatttttagtagagacagggtttccccatattggctaagatgttctcaatctcctgacctttcgatctgcccacctcggcctcccaaagtgctgggattacaggcatgagccactgtgcctggccaaatgtagctattcttatgcaacatctaactctgcctgasaactaggcacagtccccacgatcatgctaaggttttcaatcacatcataatctctgcaactggacaggaataagaggattcagatgaacccttaagtataaataaatgtcagtatagattcagaaaaaaaaaaaaacccacttaggggtatttgtagtaacaaaaatagtggctac

SEQ ID NO: 162154 - DNA, 468 bp, Homo sapiens
acagcctactgaatatgacagtgttaatgtaacactttgctgggtgagatgtgctcatgaaacatggatgacaaaagaatcctgaagcagttcagtctgtataaagggggttgaaaattactgattaagttaatcttattttacatgtgtagaaactgaagcctattaaagtcactggttggygttcacatgaacgaatcagtagaaccaataatataaactaaatttctacttttggtcatgatggaagaactacatttaccttcccatcttaaacaactagcaaaccagaaaaagtatataaaaaccacagccagacattgatcaataggtagtatagaactgtgacaactgaaagaaggaacacaaacaaaatgattcttaagatcactcttactgcttggaggcagtttccaggccacagcacatggagggggagtccaagcagagtcttgtggtctaccccag

SEQ ID NO: 162155 - DNA, 622 bp, Homo sapiens
ctgggccttttctgattgtttcctgtgactatcttatttttaggaaaaactggtctggttggggatttctgtgattctttagagtttctgtttgattacatggtacctarcacaagtgactccattttggtttagtttgttgggacctagtgcaggagctcacttcagaacaatggcttctcataaattttatttaacacacatttttccacacctttatcacacatcataaatgctactgaagcattttccaaagtgacatcatatacagctagataaacttccttctttttcaaaggaaactgtattgttgttcatcagctttgaactcacaaccaacagcactataactcatttttggatgaagcttacctagcaaagttattttctccataaggcacaagatggcctccttgcaattggaaaaacttgatagcacttcagcattacacttcagggccatttaaacagtgggatcatcaataagaagcaaaacatgagaaaaaggttgcactaagtaaaaaaggacatttgttaatagcataaaagctgaaactagaaatcattgcttccttgttcaacctcagctgaaaattatattttgatgtatttcatataatta

SEQ ID NO: 162156 - DNA, 622 bp, Homo sapiens
ctgggccttttctgattgtttcctgtgactatcttatttttaggaaaaactggtctggttggggatttctgtgattctttagagtttctgtttgattacatggtacctagcacaagtgactccattttggtttagtttgttgggacctagtgcaggagctcacttcagaacaatggcttctcataaattttatttaacacacatttttccacacctttatcacacatcataaatgctactgaagcattttccaaagtgacatcatatacagctagataaacttccttctttttcaaaggaaactgtattgttgttcatcagctttgaactcacaaccaacagcactataactcatttttggatgaagcttacctagcaaagttattttctccataaggcacaagatggcctccttgcaattggaaaaacttgatagcacttcagcattacacttcagggccatttaaacagtgggatcatcaataagaagcaaaacatgagaaaaaggttgcactaagtaaaaaaggacatttgttaatagcataaaagctgaaactagaaatcattgcttccttgttcaacctcagctgaawattatattttgatgtatttcatataatta

SEQ ID NO: 162157 - DNA, 605 bp, Homo sapiens
aaacaaaatgaaacacagcgaaacaataagaagacttactagaatctttttaaaaagtatttgaacttgccttttggtaaggtttacatcctttgcattcatctttgtacactttcatgtgtgattaataagtcttttaacatctctcaagtgaagtctttcagttttctcagtttttcactggtttcctttctgaggaacttctctggtatcagattgcccctaggtgctgtgtaggtgagctcaaggtaatttgtttaaccatggggcttaatcatttgttatttgatagttacatttagactaaggtttttttaatgcttggcaccactgacattttgtgctrgataattcttttgggtaagggctatcctgtacattaaagaatggttagtagcgtctccggcctctaatcagtggaagtcagtgacacacccacacccccaggttgcaacaaccgaagatgtccccagacattgccaaatgtctcttggaggtaacattgctgccagttgagaaccactgtttaaggagccccagagttgagattttaatcctccaaaaactacattcttcatttcagaaatatgtgaaaatcattatgc

SEQ ID NO: 162158 - DNA, 605 bp, Homo sapiens
aaacaaaatgaaacacagcgaaacaataagaagacttactagaatctttttaaaaagtatttgaacttgccttttggtaaggtttacatcctttgcattcatctttgtacactttcatgtgtgattaataagtcttttaacatctctcaagtgaagtctttcagttttctcagtttttcactggtttcctttctgaggaacttctctggtatcagattgcccctaggtgctgtgtaggtgagctcaaggtaatttgtttaaccatggggcttaatcatttgttatttgatagttacatttagactaaggtttttttaatgcttggcaccactgacattttgtgctagataattcttttgggtaagggctatcctgtwcattaaagaatggttagtagcgtctccggcctctaatcagtggaagtcagtgacacacccacacccccaggttgcaacaaccgaagatgtccccagacattgccaaatgtctcttggaggtaacattgctgccagttgagaaccactgtttaaggagccccagagttgagattttaatcctccaaaaactacattcttcatttcagaaatatgtgaaaatcattatgc

SEQ ID NO: 162159 - DNA, 528 bp, Homo sapiens
ccacagaatttggtggtaaaatttcacttggaaataaaatgtatctatctgtatgccatatattaaataataatatttggatgtttttgctcccacaactgcatctttttgtaggaacatttctatactcatcacttttctttgggcttctattccctagatcagagtcaaaaattttgttaacaatctcagaggattcaatctcatggtgccaattatagtagaaaacccagctaactcaattttcctaatgttctaagcaactaaagccttaatrtaaaacgactcttcttggactgtaaaaatgacaaggctatagagccatgctgcttgatactccccttgagcttatatttctatgacataataaggcaggtgaattttctcttgacttaggtatgtattgcattgaaataagtgagaaatgatcaagggttgctgagcttgctgggcttgatattgatcaggtagtacaatttctggctctaatggaataaaaatcctttgaaactcttaaatggagattga

SEQ ID NO: 162160 - DNA, 528 bp, Homo sapiens
ccacagaatttggtggtaaaatttcacttggaaataaaatgtatctatctgtatgccatatattaaataataatatttggatgtttttgctcccacaactgcatctttttgtaggaacatttctatactcatcacttttctttgggcttctattccctagatcagagtcaaaaattttgttaacaatctcagaggattcaatctcatggtgccaattatagtagaaaacccagctaactcaattttcctaatgttctaagcaactaaagccttaatgtaaaacgactcttcttggactgtaaaaatgacaaggctatagagccatgctgcttgatactccccttgagcttatatttctatgacataataaggcaggtgaattttctcttgacttaggtatgtattrcattgaaataagtgagaaatgatcaagggttgctgagcttgctgggcttgatattgatcaggtagtacaatttctggctctaatggaataaaaatcctttgaaactcttaaatggagattga

SEQ ID NO: 162161 - DNA, 455 bp, Homo sapiens
ttgtgcaccggtgccagtggtggtgatatcagcaaaggccctagatgggctgattctcaggccccgcaggggcttatggtgctggtgccaccctgctttcaaaaatggtgccatgatgcaacagcatgcggcctggggtgaagggagtgaatagacctggtggagcacacagtcggcaaatattcaagaagggaatttcaattgactgagaaattcccattaggaaaagaagaatcaaatggaagtaataaaacrttctcacaaaccatcatgaaaaaaattccagctcacaaatcaggaaataaattttaatcaaaataaggatccaggaagaacacataccccaaaagttgaggaataatccccactcaagacagagccaggaagaaagacttccagcccagcagttacctgtcaaagagagaagcctgaacttgggcctctaactcagtttc

SEQ ID NO: 162162 - DNA, 523 bp, Homo sapiens
cccttctgcttcatctacctgacagttatcttggggaacctcaccattctccacgtcatttgtactgatgccactctccatggacccatgtactatttcttgggcatgctagctgtcacagacttaggcctttgcctttccacactgcccactgtgctgggcattttctggtttgataccagagagattggcatccctgcctgtttcactcagctcttcttcatccacaccttgtcttcaatggagtcatcagttctgttatccatgtccattgaccgctmcgtggccgtctgcaacccactgcatgactccaccgtcctgacacctgcatgtattgtcaagatggggctaagctcagtgcttagaagtgctctcctcatcctccccttgccattcctcctgaagcgcttccaatactgccactcccatgtgctggctcatgcttattgtcttcacctggagatcatgaagctggcctgctctagcatcattgtcaatcacatctatgggctctttgttgtgg

SEQ ID NO: 162163 - DNA, 598 bp, Homo sapiens
agactactcttaattgtaaaagtttctcagtcttctttcattgtcttcaattactttggcatttttgaggactactaacaggcagtttgtaaagtgttcctctatcaggatttttctgatgcttttctcattattagagtaggttataagaccatagaggaataataccattttattgcatcatatcaataatacatattagcaacatgacatcactgttgatgatgactttattcatgactagggtagtatttgtcatgtttctccactgtcaacttaatcttttttctttttaaaagtccctcttttcatactgtacttttttaaaggaagtcactttgcaaagcctacactgaaagagtgggaaaccatgaggacagatatctacttgaaattattgtgtgagagatttttccctttcttctaatttactcgatcctttatttatattaataatgacttctggatatttattttataccttggattgtaatccaaacctgaactcatctattttggtaatttttgttttttaattactaattcaatatmtttatttgtacaggtccattcagattttctacttactgaagtcagg

SEQ ID NO: 162164 - DNA, 408 bp, Homo sapiens
catcagaaatgttctagacattaggtaggaaaaattaaagaaaatagataggtttcttcaatcgctcataatacactttattcaagaagtagaaagaaatgaaataagcacaaaagttatctataattgcaaatatkaagtataataaagaataaagaataaacaagtaataaaagagataaaagagagggtcataatacaagcttgggctaggtaatttatgatgaaattaagccaacatttaaagaaaaaagaaaaggaatgccttacacaaaattggtgtcaagcattttaacaaaagagttctgatgtgaaaactcacaggaagaaaagagctctgtaaattcaaaaacgattcagtaggtcaatgtggctggagattaatgaatatctgatgatgttgaacaa

SEQ ID NO: 162165 - DNA, 408 bp, Homo sapiens
catcagaaatgttctagacattaggtaggaaaaattaaagaaaatagataggtttcttcaatcgctcataatacactttattcaagaagtagaaagaaatgaaataagcacaaaagttatctataattgcaaatattaagtataataaagaataaagaataaacmagtaataaaagagataaaagagagggtcataatacaagcttgggctaggtaatttatgatgaaattaagccaacatttaaagaaaaaagaaaaggaatgccttacacaaaattggtgtcaagcattttaacaaaagagttctgatgtgaaaactcacaggaagaaaagagctctgtaaattcaaaaacgattcagtaggtcaatgtggctggagattaatgaatatctgatgatgttgaacaa

SEQ ID NO: 162166 - DNA, 378 bp, Homo sapiens
aatgacaaacctgcacatgaaccctgaacttaaaataaaaggctcaratatactatatgtacatatataaacatactcatacatatatattacatcgatatatactgagtatgtttatatataacatactatatgtataacataaaaatctctatgtatataactaacatactcgtgtttccttttatattgctaatctttttaaaatctttgttgaatattccttcactgtcagatttctaaatgttgccatggataccttaaattttagatctggttttatatctcttatataactacattctttctctaagattttttaattcagcaatgcagcattcaaatctgtctatgcattgataactccactgtacatct

SEQ ID NO: 162167 - DNA, 645 bp, Homo sapiens
gctcagagctttgcaggtcccattatctccagggtgttccaatataaggtgttgcaaagatctccctctggatgttgtgaccacggtacaaaacccaccctcgtaagcaaatggaattcagaagaatgtgaagggagatttgcttacttctgcaggtgtttctgctggtaggtaacattttggaattatggattctgatctgtggctgagaacaatgaaaagagcagaagatgataaaataggggaaagaaaagaaaaccttcttattgagggaagtggataagagagcttactgtaagaatttgttggcataatttcatatacacttgagcaactactaccttcaattgtttcttatacatcttacacaatctttgtgtgaagctctgacatcttttgatacttttgccattctgtgcactagagctcttcacagccaggtagtgatctatcaaatttctttcccttcatgttttctgtgtatttctcactgttccctctcctttagtccttctaacttaatctaaagattagataaatggtcccaacccaggcccatgtttgacacggagaaaaaaccatmattgaagttaccttaaaccattcagaaattatccctctccagtataacacaaccaaattaca

SEQ ID NO: 162168 - DNA, 430 bp, Homo sapiens
gcaatcagtcgcagcatataatctggtacttacgtggtagataattaatgtttgctgacctaaaatattgaatttacttgaatgaatctaatgaagtacatttaaatctttggccacatgttaccattaaattgtacgtactttcaagcctctatgatgcagaaatatagcagatattagtttcactgatttctttgttttctgtgtgcactaagcaaggataaggcccactcagtgaaygagagacatttagtttataatatatcttagcataaaaagttcccagaagaacggcctcaatgaataccactctatttcatccttactctttccttcttctgggaattcctgggctggaaagtatgcatctctgggttggttttcctttctttgctgtgttcctgacagctgtccttgggaatatcaccat

SEQ ID NO: 162169 - DNA, 430 bp, Homo sapiens
gcaatcagtcgcagcatataatctggtacttacgtggtagataattaatgtttgctgacctaaaatattgaatttacttgaatgaatctaatgaagtacatttaaatctttggccacatgttaccattaaattgtacgtactttcaagcctctatgatgcagaaatatagcagatattagtttcactgatttctttgttttctgtgtgcactaagcaaggataaggcccactcagtgaatgagagacatttagtttataatatatcttagcataaaaagttcccagaagaacrgcctcaatgaataccactctatttcatccttactctttccttcttctgggaattcctgggctggaaagtatgcatctctgggttggttttcctttctttgctgtgttcctgacagctgtccttgggaatatcaccat

SEQ ID NO: 162170 - DNA, 586 bp, Homo sapiens
ggttcaaatcctggctccacctttaccatctctgtgactgtggaaaaatcaaataatttctgtgtgtctctgttttcttatttgtaaaataagcatatcaatattagaaatcttgtcagtttgcaggaggaattactgaggttaagggatctaaaaattcagaatgaactagcggaatgtcagcaccgtataaatgttatatgttatactggaaagaaatgtctatgtatttgaatcaactttatcaaactactggagcaacatgtttctccccactcttcatgttcaagttataacctttctccrtatcctgattcactatgtgctagggagaacgataagaataatgagaaaggtaatagatttgcaaatttggcaagcgtaaactgagtaagtttaattaagcacccctcccctcaaacacacacactcttttggtagtaagtctttctaaataagttgtatgtgtttcctcatgctccgccacgtggtaaatcttcccattctgatgagaaatatatgcctgactctgggggttacttacggtgttcactggctctcaagccaaacaaagtcctttacaata

SEQ ID NO: 162171 - DNA, 586 bp, Homo sapiens
ggttcaaatcctggctccacctttaccatctctgtgactgtggaaaaatcaaataatttctgtgtgtctctgttttcttatttgtaaaataagcatatcaatattagaaatcttgtcagtttgcaggaggaattactgaggttaagggatctaaaaattcagaatgaactagcggaatgtcagcaccgtataaatgttatatgttatactggaaagaaatgtctatgtatttgaatcaactttatcaaactactggagcaacatgtttctccccactcttcatgttcaagttataacctttctccgtatcctgattcactatgtgctagggagaacgataagaataatgagaaaggtaatagatttgcaaatttggcaagcrtaaactgagtaagtttaattaagcacccctcccctcaaacacacacactcttttggtagtaagtctttctaaataagttgtatgtgtttcctcatgctccgccacgtggtaaatcttcccattctgatgagaaatatatgcctgactctgggggttacttacggtgttcactggctctcaagccaaacaaagtcctttacaata

SEQ ID NO: 162172 - DNA, 408 bp, Homo sapiens
ttaccatactatattcctaactcttccttttcattttyagtgttgccattttatacacatcatataattttactattaagttttacatcatatagaatattatataaacgatatacaggcatgcactgcaaaatgacatttcagtcaagtacaaatctcatataaaatggtggacatccagcatgctaaggttaatttattattgaagaagaatattattttttataaatttaacatagcctacatatacaatgtttatcaagtctacagtagtatacagttatgtcctaggccctcacatttactcaacacttcacattctttcactcactgactcactcagagcaatttccagtccttcaagttccatttgtggaagtgtcctataagggtgtaccacctttttat

SEQ ID NO: 162173 - DNA, 408 bp, Homo sapiens
ttaccatactatattcctaactcttccttttcattttcagtgttgccattttatacacatcatataattttactattaagttttacatcatatagaatattatataaacgatatacaggcatgcactgcaaaatgacatttcagtcaagtacaaatctcatataaaatggtggacatccagcatgctaaggttaatttattattgaagaagaatattattttttataaatttaacatagcctacatatacaatgtttatcaagtctacagtagtatacagttatgtcctaggccctcacatttactcaacacttcacattctttcacycactgactcactcagagcaatttccagtccttcaagttccatttgtggaagtgtcctataagggtgtaccacctttttat

SEQ ID NO: 162174 - DNA, 647 bp, Homo sapiens
atgtctggcttgtttcacttagcaaaatgtcctccaggttcatttatgttgtcacaaggattcccccctttattatggcagaatagtatcccwttgtgtatatatatgactttttaaaaaccattcttctgtatatgaacatttgtgttgttttcatatattggctattgtaagtaattctgcaatgaacatatggggtgcaaatatctttttgaaatactgattttatttcctgtggatgtatacctagaagtggaattactggattgtatggtagtttcatttttcagtttttctaatatcttcacactgttttcccgaatgactctaccaatttgtattcctatcaacagtgtaaagggttcctttttttccaaacttttgccaactcttcttatgtcttgtcattttgataatggccatcctaatagatatgaggcaatattttgctgtggttttgatttacacttctctgataattaataatattgaaaaccttttcttatgcctgttggtcatttatttctcttctttggacaaaaaatgactatctgataccactctctcctggcctgcaagctttctgctgagaattttgctgataacctcgtagacatttctttgtaagtggcaagtctcttttcgtg

SEQ ID NO: 162175 - DNA, 428 bp, Homo sapiens
gctgctgctgagtctacagtgcaatctgtgattagtgggtgtattatgaggggctaaagcgagtgtggcctctgtcttgtttttggatggactagataataccaggaaattggtcagtagagctggcactgaaataaggtttgtttcaaggtccacagctagctcttcaggtggcaggtatgttaccaggtgtgcagtcaagtctggcttcctctaggtccctgggagggctccctctatgtcattggctatgcayatggcttggctggaatggccctcaactgtcactgagagggattgaaactaaatcacaaggctgcttcaaggtccacagccaaggccaaggtcagcaggcctgcctccagaggcacagatggtcatgcctccctcaatgttcctgggcagacaggattatccctagaatgtgt

SEQ ID NO: 162176 - DNA, 352 bp, Homo sapiens
caaagtgcctgctagctcaaaggaacaatgcctttgactagcaacagctgtagcctgtagccartgacgtcaaggaagctgcaaaaaggctgtgttaacagaagcagggctgttagaggaaggccagagtcaaagaagcacattcttgcattttccaatcttttccaggggaggaatgctgatgggggtggggaggttggatttcaggcactggagtggtggtgtccagcaagggacagggctagtttctcctctcatcttaccttgacctgaacaaactatcctgggggccccctgctgtctagtcgtgctcatcagaaagtctcagtgtaagtagccacacttgaatgtg

SEQ ID NO: 162177 - DNA, 352 bp, Homo sapiens
caaagtgcctgctagctcaaaggaacaatgcctttgactagcaacagctgtagcctgtagccaatgacgtcaaggaagctgcaraaaggctgtgttaacagaagcagggctgttagaggaaggccagagtcaaagaagcacattcttgcattttccaatcttttccaggggaggaatgctgatgggggtggggaggttggatttcaggcactggagtggtggtgtccagcaagggacagggctagtttctcctctcatcttaccttgacctgaacaaactatcctgggggccccctgctgtctagtcgtgctcatcagaaagtctcagtgtaagtagccacacttgaatgtg

SEQ ID NO: 162178 - DNA, 376 bp, Homo sapiens
agatctgctatttaccaattaatcctaaggttccatggcctggaacaattaccaagagctaaagacattaacttggatattgtgtggctatcaagaaaggactctaatttttgaacaaatataccagaaattatgcactcaaatgagtgcagttctcttcaacaggcaaaaagaaattgagtatcaaccctgcttcattggtttcactccctagagagttgcaytggggattttaaggtagaatatagctcagcgggaaagagtcatctatgagcatggtctgccatgaacatggctagggtccatggcaacagaagtggtacataattgcccttcctgggttaatggtaagagcctcgggtttgaagccttgagc

SEQ ID NO: 162179 - DNA, 362 bp, Homo sapiens
aaaatgtagcactagcctagggtgagtgtggatgtatcactatttgtggatgtagaaacaggagtagatgagggtgagtcacttgtcctgcctgccacagascgaatcagtggaagggctaggctttggctcacagcccacacacctagcactgggatgcaccgaggtcaccaccacgcgcctttgtcttccctgcacaccagatgcagccaaacaccaaagcccaggtcagtggcaccggaacaacacatcagtttagaggatttctgatgttattccactttggttattggcagtagagatggttctatctaatgactaagaactggtatgtaggatcatgataacttacaataatgcca

SEQ ID NO: 162180 - DNA, 412 bp, Homo sapiens
tttctacaagaaggaccctctaggtctctgaccccagcctggtttgggaatgaactccctcagattatgaagtgagtcctcaatctgcatactgggcccccggtcccatgtttatggaaggcacaattccattcatttctttcttttatttcttctgaaaatattttacttattcttttgaaaaattgtgtaaaatacacataatataaaatttaccatcttagctrttttaaaatttacagttcaatggtgttaagtttattcacattgttgggcaaccatcaacaccatccatctccagaactttctcatcttctcaaactcaaactctgaccccattaaacactcattccggattccccctcccctagcccctggaacccaccgttctactgtctgtctctgtgaattc

SEQ ID NO: 162181 - DNA, 603 bp, Homo sapiens
ttgtttatcagaatctggagtaaattccacacatataaacatatttatctttagtatctctaacttatgggaaaaaaaagtgatacgtaaaaatcaaagctgtcttgttttttttaatgaaatgaaaatgttcatcctaaaatcactctgtgaatctgcctggagggttgattttttttttctaagtctcatggggatgttttctgaacaaatttttcctttaatgtcagtggtgccctatgtttagattagctttatgagctcatagtrgaacacaaaatagcctcatggggaaaaatatccctgaaaaggagacattaataagccaaataaatccccactgtcctgaggagataagatatgaagaaatagcagaaggctgaatatagattatacaagagacatcaagtacacaaaagactattgtgggaaggaagttacctactattcttcatttaaatgcaattttaggcattgatgtagtaatttcctagagaaaatactgcaaggttgattagagttactgtatcttccaaaagcacctcccttaagtctcaaaacatagattgcattacaaagccagttgaaagggtaacagataaa

SEQ ID NO: 162182 - DNA, 621 bp, Homo sapiens
gtgttaattttcagaagcctgctccctcaaaaaacacattaacatttcttttacagtgttgttacatgtgacttattttgcttatatataaagtaaccagagtttttattcttcttaataagtatttaaaatacatctctaggtattaagtttaagtgttaatttatgacacccttaaaatttttttgtatggcagactcacctgacagcaataatttaaagaccccatcatctaagaagaatgcgtgttcagagatccaagctaaggaacctggaagcagtcagcctggagatttattccttattgatgaggaacatctgaaaccctgkcccatcctgtggaactcagggcttacagtggatcaagtccttttgttttggattaagtgaaggttgccaggtggagggtgctagggggagggtgctgagagaaaatgctatataaactgtgtgttttttacaaatggtagtggttctgctatccagcccattaccactggactacactgtatggtaagtctcctcaacaaactctatgtcttgcttactggttctatgtctcttctcctgcctcttgaacatggtgtcattcctactgaatagtcaataggggtccagcac

SEQ ID NO: 162183 - DNA, 548 bp, Homo sapiens
ttttagtttgctctttaaagatggcttaccttctagaaaatgtagtaggttccaatcctttctttttgaggaatgcccctaaacattcaagaacttcaaagtgattaaacgtgtatcattacwtatcagatcttggaggctatatggtatgagagaaaaaaaattagttttgggtcataatttttttttttttgagacagagtctcgctctgtcacccaggctggagtgcagtggcacaatcttggctcactgcaagctctgcctcccgggttcaagccattctcctgcctcagcctcccgagtagctggaactgtaggcacccaccaccacacctggctaatttttttgtatttttagtagagacagggtttcatcgtgttagccaggatggtctcgatctcctgacctcatgatccacccaccttggcctcccaaagtgctgggattacaggcatgagccaccgtgcccggcagtccagaaattttataccccagttttaacactgtaattaactctttgaaaggcactagaaaagtttgtttttt

SEQ ID NO: 162184 - DNA, 548 bp, Homo sapiens
ttttagtttgctctttaaagatggcttaccttctagaaaatgtagtaggttccaatcctttctttttgaggaatgcccctaaacattcaagaacttcaaagtgattaaacgtgtatcattacttatcagatcttggaggctatatggtatgagagaaaaaaaattagttttgggtcataatttttttttttttgagacagagtctcgctctgtcacccaggctggagwgcagtggcacaatcttggctcactgcaagctctgcctcccgggttcaagccattctcctgcctcagcctcccgagtagctggaactgtaggcacccaccaccacacctggctaatttttttgtatttttagtagagacagggtttcatcgtgttagccaggatggtctcgatctcctgacctcatgatccacccaccttggcctcccaaagtgctgggattacaggcatgagccaccgtgcccggcagtccagaaattttataccccagttttaacactgtaattaactctttgaaaggcactagaaaagtttgtttttt

SEQ ID NO: 162185 - DNA, 571 bp, Homo sapiens
acttcctgactcaaatgaccatcttcttgctgtatcctctcatactgaatggggcaagggagttctctagggtctcttttataagggtattaatcctactcatgaagggtcatcctcaagacttagctcccaaagacaccatcttttacaatcatcacattgtgggttaggatttcaaaatatgacttcgggtggagggcacataaacagtcaatccagaacattgtagaagccctatttccaactttcttcccagtttatataakaagcagacataggacctagagcatggacagatcaactgtgctatcttacacaattgtatcttactcacttcttagaagaacttctctagattacagccagtctggccttgcttcctctctgaatgggtcttttccacctaaatttctcttgaaactattctaccaccacaatttcaattgctagaactaaagagtttattgcattctctttgtgacttcccaacgttttagatacaaggaaagttttagaaaagtccaaagaacagatcttcttttcacttttgcatcccagaacacagccattg

SEQ ID NO: 162186 - DNA, 571 bp, Homo sapiens
acttcctgactcaaatgaccatcttcttgctgtatcctctcatactgaatggggcaagggagttctctagggtctcttttataagggtattaatcctactcatgaagggtcatcctcaagacttagctcccaaagacaccatcttttacaatcatcacattgtgggttaggatttcaaaatatgacttcgggtggagggcacataaacagtcaatccagaacattgtagaagccctatttccaactttcttcccagtttatataataagcaracataggacctagagcatggacagatcaactgtgctatcttacacaattgtatcttactcacttcttagaagaacttctctagattacagccagtctggccttgcttcctctctgaatgggtcttttccacctaaatttctcttgaaactattctaccaccacaatttcaattgctagaactaaagagtttattgcattctctttgtgacttcccaacgttttagatacaaggaaagttttagaaaagtccaaagaacagatcttcttttcacttttgcatcccagaacacagccattg

SEQ ID NO: 162187 - DNA, 571 bp, Homo sapiens
acttcctgactcaaatgaccatcttcttgctgtatcctctcatactgaatggggcaagggagttctctagggtctcttttataagggtattaatcctactcatgaagggtcatcctcaagacttagctcccaaagacaccatcttttacaatcatcacattgtgggttaggatttcaaaatatgacttcgggtggagggcacataaacagtcaatccagaacattgtagaagccctatttccaactttcttcccagtttatataataagcagacrtaggacctagagcatggacagatcaactgtgctatcttacacaattgtatcttactcacttcttagaagaacttctctagattacagccagtctggccttgcttcctctctgaatgggtcttttccacctaaatttctcttgaaactattctaccaccacaatttcaattgctagaactaaagagtttattgcattctctttgtgacttcccaacgttttagatacaaggaaagttttagaaaagtccaaagaacagatcttcttttcacttttgcatcccagaacacagccattg

SEQ ID NO: 162188 - DNA, 409 bp, Homo sapiens
gaattcaaggagaaatttatattatttcatcagaaaaagaatagggacaggacatataacagtgaacttgcagacaataagaagatgaattttgctgacacagtttattcatatacagaaataatagggcatcaatggagaatcaagagtaggtagatgccagataggaaaggactttcaacataatttaaggaatttggactttattattcagtcaattggaagaaatrtgatttctcattatgaggttgatatgcaaaaaggcattataggaatctatactttttaggggtgtgaattaccagtggttgaaaatagaaagaaatatttttttcatatacttgttggctatttgtatgtcttctttcaagaaaagtttattcaggtcctttgcccatttttaaaatcg

SEQ ID NO: 162189 - DNA, 634 bp, Homo sapiens
tcaaaggtttatagaccttttatgtccttggctaattttagttataagtacttttttttttcatagctattgttaacaggattttttttcttgatttcttttttggatagtttattgttaatgtatagaaatactaccaattatcaaatattaatttttgcaccctgcaactttcctgaatttatgtatcaatactaacagtctttggtagaatctttagagattttttatatagaatatcgctagtcactaggaaaacacaaattaaaaccacaatgagatatcactttactcctttcagtatagctattattaaaaagatgaaaggtgagtgttggtgaggatgtgcagaaaagggaaactcttgcacagtgttggtggaatgtgagttagtaacgttattaaggaaaactaaggtgagttcttgagaaacaatagaactaccatatgactcagcaatcttatatctaggtatatatgcaaaggaactgaaatcagcatgtcaaagaggtaactacattcccacgttcattgcagcattattctcaatcrtcaagatatggaatcaatagatgaatggataaataaaatgtagtgtattcacacacacacacacacacacacacacacacac

SEQ ID NO: 162190 - DNA, 611 bp, Homo sapiens
gcttcttgctatgcaaaagagacacacttgatataaacaactatagcttttattttatgtgttaagaatgttgggttgaatgtaataatgtaaaaattgacaggtaatacaatttaaaaatagtaatagttaacattttttactatttaagacctactatgtggcaggtactgtgtgaagcattttacattccttttcttatttaaaattcctccaaaccccatgtggtaggaactatgagtatctcaactttacgaaagaaataataacttaaagaggataagtaatttccttatttaatgtagatacttacgggcaaagccaggatttgaacctcattctgcctggcaccagcgtgtttggacaatctttcttcaggcatggttatactcatgacaaacatgattgcatttattaaaataacattatagaagtccaggaaaaaggtggctccagggcaaatggaaaagaggaaaagatgtwagataaattactaaattgaataccagaggagagatgaggattcgagaacaacttccagtgttttaacatgagataaaaggaggacagtagccccacctcgtggaaatagtaaaaactagagaataaac

SEQ ID NO: 162191 - DNA, 592 bp, Homo sapiens
ggcaaaatttaaaacaatgcaaatggttttcaaagaggattaagtaactatttaatgatgagtaagtagtaggttaaaaaaggaattattttgaataataagaaaaatagagattctaagatacatatttagtgaagaaagtctcaggatcacatgtttgctctcatttcatttttgcaaaacaaacaagaataaaaacaaaagctacacacgtgcgtgcacacacaccacaagacacttgtgaattgaagggggtaatgttaatattcacacaggaaccatcagtgtgatataggagtgtcaagaaaaccaggatctataaccaccttaatttaagggactttatgttctgtattataccttactgwctataataataaaattaaattttccatacttaaagtatctataaaaaataaattgagtaaattgtatacttggatctcaagtccagttcctctagttctctcagaactatctcccttcatttcaaagttcatggattgatttttgtttttcataacatgtaccactgtattttaaatttacacatcaccacggcattcttttttcttgttcttttattattaga

SEQ ID NO: 162192 - DNA, 592 bp, Homo sapiens
ggcaaaatttaaaacaatgcaaatggttttcaaagaggattaagtaactatttaatgatgagtaagtagtaggttaaaaaaggaattattttgaataataagaaaaatagagattctaagatacatatttagtgaagaaagtctcaggatcacatgtttgctctcatttcatttttgcaaaacaaacaagaataaaaacaaaagctacacacgtgcgtgcacacacaccacaagacacttgtgaattgaagggggtaatgttaatattcacacaggaaccatcagtgtgatataggagtgtcaagaaaaccaggatctataaccaccttaatttaagggactttatgttctgtattataccttactgtctataataataaaattaaattttccatacttaaagtatctataaaaaataaattgagtaaattgtatacttgratctcaagtccagttcctctagttctctcagaactatctcccttcatttcaaagttcatggattgatttttgtttttcataacatgtaccactgtattttaaatttacacatcaccacggcattcttttttcttgttcttttattattaga

SEQ ID NO: 162193 - DNA, 497 bp, Homo sapiens
attattaatttacacgagctgttaatttttactttcccagtaataaaaatgagaaacaaaataccaaaaattgttattgtattagagatttggtgttagttccttaagcaagtatcatctgtgcagacatgcatagatcattaatggcttaagaaaaatacaaaagaaaaagaaaaacgccatcacaatgaaggtggtctttgttcttcaggaaggtggcctttgttctttaggaagacatccatgactcattccaggcacattaattatgccgcttttacacaaaagttagttactcttatatgtgagaattgttcacaactagcagtattagtggacatgctggcagtgaattggaaagataatgatagtttttagagtcttattcaaatctgcatatctacaatagtgtaacagtttgggatggccaaagttacagataatttggayaaataaaatacgggcccagcagtaaaataatgactgtatctccagaa

SEQ ID NO: 162194 - DNA, 479 bp, Homo sapiens
ctactgcattatgctaaatttacccacccaccctctggcaaaaataacgtctaattgcatttaactttttagtttgatgagtacttatcttggtgtcttttaattcacctgatgtttctgttgctaacaaaaccaacaaaaacawtgtaaatttggtatactgaaatacaaaataagagtgaaggagaaaacattggtagtgaaatcaactactataaagcagtttggggcaattcagtttagagacaggcattatacctcaaatacccaatgagcatcacgttataaaagcatagctccaaagatgataatttcaaatgaggacccttaagtcacaaagagaggattagctcacattcattatttccaaatttcctcaccaaagcacaaattattaggcatttttgagacatttttatcacaatgacaataaatgtgtttcacaaatagaggagcagactgagatatatgagatattt

SEQ ID NO: 162195 - DNA, 592 bp, Homo sapiens
tattgtgggtctgaaggaattccccaaacctccatgatttagcaggaggtaagggtagtcaccccagcacctggacccatttagattaagtaaattgactaaggctccagaggaaggtgttcaaaactcagactttagttatagattagaagttaatcacttgtgtctttagatgaatgcacacttacacgtagaaatatggcttagaaggtatataagctctggaaaactttgtaattttcagttggtctggtgataatttccaggctttatccctgtacccggttacagaagtaaactcccttctctcccagttcatctgcatcttgttattgggccacgagattaagcagcccaacccttggtttggtccaggaatgatctggyctcagttgaacatatcttgctacaaagaaaggcctattaccaacataggtgtttctcattttgaataactcttttaaaggttaggtttactaatgtcctcttgtttctaccaatttgtcctaatttttcacccatatcctcattcacagcctcattgttcaccccatacctgcagagagaaacgaaatattttctttttttatgc

SEQ ID NO: 162196 - DNA, 544 bp, Homo sapiens
ggtaaaaaggaaaaacgaatggagaggaaaaggacagtcagttggtctcatgcgttggatcttgtttgaaaagctgagtcccatctatatcagagtaaaggtttttgacttcttgaaattttttgagttatcactttgactaaatgaatgaccggtgatccaactttgtggtatcaagtgctttaaacatttgatatttaacaaaccttccaagatcaaaatttcaaattctaaattcaatcctttttaccttattaactttttaagatattaggtcccctgaagtccaaaagagacatttggttaatttgttgtgttaaatcatacagraggaattttcaagtatgaaatggtgtttggttttctttagatcatattcgtatgaatgtgtaattagtatgtgtaacagaattgcatgagattcttgtattctgatatgtctcagcatacgttatcagtaataattataattatgttaaaatttgttatgccacaaaataagcacattttcaccaattgtatcattaaccctgaatgttctaaa

SEQ ID NO: 162197 - DNA, 651 bp, Homo sapiens
ctgatattgctttcataactctgaaatttgactcattttgctaacatacttgatgttaacattttagccttatatatttataaaaatartagtttgaattactgtcccatagaaagaaatgcaagcaatttaaaatatgcttcccctcaactcaaattttgtcattaaaattcaatgaagcttcttcatgatcctataagttatcttaaatactaactgcttactgctcttagcatcttgggaagaaaaccaatggggtattgctgaattttttggaggcatgccattgaaacaattgtaaagatatgttcaaacaagggcctccaaggtcaggtctatgcttattttataaatttgtttcaatgatcatagtctgctctctgggtcatataattgattaaaagattgtctcccatctggcctatgtacctggtaggctgccaccaactaaattgatatcccataatgaaatccataccattttaggatcactatagttaaccataatgtatgatatagtttcaaatagctaggaggaggatattgaacgttcccaacacaaataaatgataaagctttgagataacagatatgctaattaccctcatctaatcactatatattataggtatccaaacattactatgtacc

SEQ ID NO: 162198 - DNA, 651 bp, Homo sapiens
ctgatattgctttcataactctgaaatttgactcattttgctaacatacttgatgttaacattttagccttatatatttataaaaataatagtttgaattactgtcccatagaaagaaatgcaagcaatttaaaatatgcttcccctcaactcaaattttgtcattaaaattcaatgaagcttcttcatgatcctataagttatcttaaatactaactgcttactgctcttagcatcttgggaagaaaaccaatggggtattgctgaattttttggaggcatgccattgaaacaattgtaaagatatgttcaaacaagggcctccaaggtcaggtctatgcttattttataaatttgtttcaatgatcatagtctgctctctgggtcatataattgattaaaagattgtctcccatctggcctatgtacctggtargctgccaccaactaaattgatatcccataatgaaatccataccattttaggatcactatagttaaccataatgtatgatatagtttcaaatagctaggaggaggatattgaacgttcccaacacaaataaatgataaagctttgagataacagatatgctaattaccctcatctaatcactatatattataggtatccaaacattactatgtacc

SEQ ID NO: 162199 - DNA, 541 bp, Homo sapiens
ttaccttacatatagtaagcacctaattaatggtaacaattttgtttatttgtttttgagataagagtctagctctgtgacccaggctggagtggtgcaatctcagctcactgcaacctctgcctcctgggttgaagtgattctcctgcctcagcctcctgagtagctgaaattgcaggcatatgccaccatgcccagctaatttttgtatttttagtagagatgaagcttcaccatgttggccaggctggtctcaaactcctgacctgaggtgatccacycacctaagcctcccaaagtatcgggattacaggcgtgagccaccatgcccagtcaaatgttaacaattattattaaactatctcaacatatgtttcctctacagtaaagataatatgtaccttatggatttcctttaaaaaaataaaatatgtattgtatttaatatggcgcttgacatactaaacaagtatgtttattaatttgatgaaatgttttgagctacataatatctaaaatattagacactataagaataaac

SEQ ID NO: 162200 - DNA, 541 bp, Homo sapiens
ttaccttacatatagtaagcacctaattaatggtaacaattttgtttatttgtttttgagataagagtctagctctgtgacccaggctggagtggtgcaatctcagctcactgcaacctctgcctcctgggttgaagtgattctcctgcctcagcctcctgagtagctgaaattgcaggcatatgccaccatgcccagctaatttttgtatttttagtagagatgaagcttcaccatgttggccaggctggtctcaaactcctgacctgaggtgatccacccacctaagcctcccaaagtatcgggattacaggcgtgagccaccatgcccagtcaaatgttaacaattattattaaactatctcaacatatgtttcctctacagtaaagataatatgtaccttatggatttcctttaaaaaaataaaatatgtattgtatttaatatggmgcttgacatactaaacaagtatgtttattaatttgatgaaatgttttgagctacataatatctaaaatattagacactataagaataaac

SEQ ID NO: 162201 - DNA, 365 bp, Homo sapiens
acatgggaatgtaaatttatggcaagagtaaagtctgctcctacatgctctggtgctactgtctctgagctgataagcaagcattggaaagcagcctatctttaggtgggaaaggcggaggagggaaggtcaacttttgtctttgtaaattgctgtcctgccatcatgcaggcagagggaggggcaggatgcctcctgtattcttcagctcaataatcctcagtattctggagaggaatattttggcttcctttgaaggccaggcaacttgcatttgttgaactcatgttatatgccaagaaatgtacaagatgtttatgccattatcttacttaayccagcaacaaatttatgagagcgaacca

SEQ ID NO: 162202 - DNA, 421 bp, Homo sapiens
tcgaagtctagaaccatatttttagctacctgctcgacmtacatactacaaacaagcatctcaaaccaaacatggctaatggtaaatgctttaactacaagaaaactcccatccctcacctaccatttccttctcaaaccactttttctgtcctctcccatatggttgagctaatcatcatttatcaaagtcacatatgctagaagttgtctaaaataatcttctcttccctctctgccacctcccaaggtcaataagtgactctaactcacacatacattttttagtaagtattttccattttcactatcctcattcagacacttacctcgcaagatcgcaaaaactcctaacttgtttcttcatgctccaattcatctaccaatctgccactctaattttcttttgaaagcccagatct

SEQ ID NO: 162203 - DNA, 421 bp, Homo sapiens
tcgaagtctagaaccatatttttagctacctgctcgacctacatactacaaacaagcatctcaaaccaaacatggctaatggtaaatgctttaactacaagaaaactcccatccctcacctaccatttccttctcaaaccactttttctgtmctctcccatatggttgagctaatcatcatttatcaaagtcacatatgctagaagttgtctaaaataatcttctcttccctctctgccacctcccaaggtcaataagtgactctaactcacacatacattttttagtaagtattttccattttcactatcctcattcagacacttacctcgcaagatcgcaaaaactcctaacttgtttcttcatgctccaattcatctaccaatctgccactctaattttcttttgaaagcccagatct

SEQ ID NO: 162204 - DNA, 396 bp, Homo sapiens
cttgcccagccattccaatttcaattctgtggctgttagaattctacttcagtgaagctatgcggacacatatctagaaagtatgtgtcaggaaatgaaaatctgacacatcctgtcaattctccaagtgtaccttgattgaggaatagaaaatatttggcctagtctacattcgtagaaaataacacccaatacacaaatatctactgtaactatgtatcattgtacgaaaacaagccatgaataatcacatacataagtctatagactgtaaacacgtggtgatacatccttatgcagcatatccatgcactcccaactgcccgatctcactgtgtcctcaggagtcacaagagcatcgttayccctatcattcagagacctaattcaaccctg

SEQ ID NO: 162205 - DNA, 405 bp, Homo sapiens
tacaaaaagagtaactaaatagcaaagaccacaactcttggaaatatatatgataaagctaggtgacagagtatctccataaacttcagaacactagcaacaggggatggccacaagacctgcatgctgttaacacctgtgcaggaagaagcagagggtaagaatagtgtatctaaaagatctgggagcaggtaagctatgaatatgataggtattcattggaaggcacagtgggccggtgtgataacagyggctgaatctggaggaatttcacccttttcaatagtggatgagtgcatggagtccacagtgagaagaactgaaggtggttgaagcaatgtaacccctatgaactctcaagactgaaaagtcagagcatctttccaaggtagggcccccacactg

SEQ ID NO: 162206 - DNA, 578 bp, Homo sapiens
ggaattctaccatacagaaaaaaggagagctgatcttgctaacgtggagggaggggcttgtagttctgcctgccctgtccccagtccctaattgcagtgaccccttaaggcatctctgagcaccatcagcaatgagaagcactcagaataatcagcaaactgccatgaatagaaaaatacttcattaattattttttaatttcaatatcattataatataaaattaaaacttacccatttctactgaacactcttagccatgctttgaggtttggtcctaacaaacataagcaaggcacagtagtaaaagtagacaaaataactgcaaataaaaatgtttccaaygccaacctagaaaaaaaaaaagattactttttaaaaaagtgttaaaggtaaacatacacatacataatctttattatataaataaaatgtgaaatatcttcctatgctttactttgaaaggtaacatgaatgccaccaaaatgatgactataaataattttaccaccaacatgtagctttaaaaaacaatctagcaagtatttcgctttaatgatagatttcagaagtgttaa

SEQ ID NO: 162207 - DNA, 578 bp, Homo sapiens
ggaattctaccatacagaaaaaaggagagctgatcttgctaacgtggagggaggggcttgtagttctgcctgccctgtccccagtccctaattgcagtgaccccttaaggcatctctgagcaccatcagcaatgagaagcactcagaataatcagcaaactgccatgaatagaaaaatacttcattaattattttttaatttcaatatcattataatataaaattaaaacttacccatttctactgaacactcttagccatgctttgaggtttggtcctaacaaacataagcaaggcacagtagtaaaagtagacaaaataactgcaaataaaaatgtttccaatgccaacctagaaaaaaaaaaagattactttttaaaaaagtgttaaaggtaaacatacacatacataatctttattatataaataaaatgtgaaatatcttcctatgctttactttgaaaggtaacatgaatgccaccaaaatgatgactataaataattttaccaccaacatgtagctttaaaaaacaatctagcaagtatttygctttaatgatagatttcagaagtgttaa

SEQ ID NO: 162208 - DNA, 450 bp, Homo sapiens
ttaattttatgttttttttttctttcagtcattcattgaacacactaaatgagccccagtggagtcaatattgaaactgcacaataaccgtgtacactttggatctgtcctctttctaggayggtccatggtcccatgtcactgtgatgacctacttcagagtgctgctggcatcttagaggacaggttttagtaactagcaaagtcatggaccaataggaaggcctgagaggaatgtgtaagaaaagcaatagaagaatggaacttggtgggccatgagtacaaacatctcatttttttaaaacaactaaaaaaggaggcagggcacagggatgagattgatcacttttctggactacacgtgcatgtacttcacagcattgtgctatagactctccaaggatttctttcaatctgataaatgagctattttcctttagcaatctgaat

SEQ ID NO: 162209 - DNA, 459 bp, Homo sapiens
tatgttttttttttctttcagtcattcattgaacacactaaatgagccccagtggagtcaatattgaaactgcacaataaccgtgtacactttggatctgtcctctttctaggacggtccatggtcccatgtcactgtgatgacctacttcagagtgctgctggcatcttagaggacaggttttagtaactagcaaagtcatggaccaataggaaggcctgagaggaatgtgtaagaaaagcaatagaagaatggaacttggtgggccatgagtacaaacatctcatttttttaaaacaactaaaaaaggaggcagggcacagggatgagattgatcacttttctggactacacgtgcaygtacttcacagcattgtgctatagactctccaaggatttctttcaatctgataaatgagctattttcctttagcaatctgaatttggataagaaagctt

SEQ ID NO: 162210 - DNA, 606 bp, Homo sapiens
aagctttattttaaaataagtatatactttttataaacccagtgaatggaataagtattttagtaagaacattctgcggtgcggtcatacagaaaggtacttaaacctatgggtaaagaaatgtttcctctcataacatttctttataacctgagcattaaaaggattatatgtattgtgatacctaaaacattgagtatagcattgtgataaaaattaacactcatagagcaacaagtcaacaagtgtcttttgcccyaacagtatttttaacttaaagttaaaaatgtgaggggttttctactctgtcactgaggcttgttcctgaatttaggaagaataaatgcagatattcttccagcaaaaattgtgaaaggaaatttctacagcattttagcctcttggttcctaaaagagtgagttatcgtttctctctcccgtggtcattaataatgacagatgtacatggtgcagagttcacctacattattgtcagtagcagggctggcaagagaatatttattacaggaggaggagggacagagagacatgatgttgaaacagaagacaagagcagggttcaattgtttttttctgttgaaataa

SEQ ID NO: 162211 - DNA, 606 bp, Homo sapiens
aagctttattttaaaataagtatatactttttataaacccagtgaatggaataagtattttagtaagaacattctgcggtgcggtcatacagaaaggtacttaaacctatgggtaaagaaatgtttcctctcataacatttctttataacctgagcattaaaaggattatatgtattgtgatacctaaaacattgagtatagcattgtgataaaaattaacactcatagagcaacaagtcaacaagtgtcttttgccccaacagtatttttaacttaaagttaaaaatgtgagggkttttctactctgtcactgaggcttgttcctgaatttaggaagaataaatgcagatattcttccagcaaaaattgtgaaaggaaatttctacagcattttagcctcttggttcctaaaagagtgagttatcgtttctctctcccgtggtcattaataatgacagatgtacatggtgcagagttcacctacattattgtcagtagcagggctggcaagagaatatttattacaggaggaggagggacagagagacatgatgttgaaacagaagacaagagcagggttcaattgtttttttctgttgaaataa

SEQ ID NO: 162212 - DNA, 552 bp, Homo sapiens
aagttgtcaagattccaaacagtaggtttttttcctaattaatgcttaaatatattttaaacaacattgcttactgtaaataatctattttgatctagtagaaaatttcacgctattgcaatgcacttataaaaatgtactttgtactagtaaaggtagttttactaacaaagtactactagcactarcgttaataaagccaaattaaccaatactatttaaagctgagtttagtaggtattcattatttatttatttatttttatgtgctatttcttttttttttttaattttactttaagttctgggatacgtgtgcagaacgtgcaggtttgttacacaggtgtacatgtgccatgggggtttgctgcacctattaacctgtcatctaggttttaagacctgcatgcattaggtatttgtcctgatgttctcccttctcttgctccccaccccctaacaggccctggtgtgtgatgtttccctccctgtgtccctgtgttctcattcttcaactcccacttatgagtgagaacatgcagtgtttggttt

SEQ ID NO: 162213 - DNA, 610 bp, Homo sapiens
tgactcaactgggaagagtttcagagaaagtaaaactccaagctcattggatatattcatttgcaaactgtgacagtgcatgttaaagattatattattattttcactgattactccaaacttcaaagttgtgcatgtgtagaaagtgmcagaatgctctccaggttgtgcaagacaacatcatcttatcagctctcaataaggtaaaacatacacttaaacgctgaacactcaaggaattaagaatacaactgccttcaatattaaatctccattgtaatggaaagagacttaaagtctccttgacagagttgacaaatatactttgcaaaacttactttcagtactcacctcaactcttaattcttactgagattctctttacgctgaggcactaccttaggcaagtcctcatatgtgttttatttgatgctcgtaattgtcctgggatgtaagaaatctcccatttatcagtagaagtaagtgagttggaaagggctacagtgacatcacagaattagtaagcaaaggagctagaattcaaattcagatcttactgcttgcacacgaagtgtcagtttggttttgcacatggagacattttaatgaa

SEQ ID NO: 162214 - DNA, 488 bp, Homo sapiens
gttcaaatcatgttatatggccatgaaaaatccagagctttggtttaaaacatgttycattaaccctgctgagtctgtattttctgctttgtcaggttctgccataccttcacatgatcatttctgttaaaagaaattatgatctttaacttttgtatgtatctggattcccctttcatttgaatcatgtcgtgattcaaaaatcttctctttttttttaagcttcctttgctttaacaaggtttcaacaactgggtggtaattcctactgtggtctcattagtatctgtttcagaactggaataattttctctaatttttaatctctatgtgtagttttgcattctggtatattttattgcattcttttattgtaattagacatcgggctaaaggctagacattttctcctccataatttttgggcccttgaatctttgtcaagttatcattgagaatgcagtcacaggaagacacttttgtcctta

SEQ ID NO: 162215 - DNA, 488 bp, Homo sapiens
gttcaaatcatgttatatggccatgaaaaatccagagctttggtttaaaacatgttccattaaccctgctgagtctgtattttctgctttgtcaggttctgccataccttcacatgatcatttctgttaaaagaaattatgatctttaacttttgtatgtatctggattcccctttcatttgaatcatgtcgtgattcaaaaatcttctctttttttttaagcttcctttgctttaacaaggtttcaacaactgggtggtaattcctactgtggtctcattagwatctgtttcagaactggaataattttctctaatttttaatctctatgtgtagttttgcattctggtatattttattgcattcttttattgtaattagacatcgggctaaaggctagacattttctcctccataatttttgggcccttgaatctttgtcaagttatcattgagaatgcagtcacaggaagacacttttgtcctta

SEQ ID NO: 162216 - DNA, 631 bp, Homo sapiens
aaagaagttctgagaataataaatttataaacacactaaagtggagtgttgagcccaactgggaagtggaatggaaacagcagctaacccaaaatgtgtttctgaaaagggtcataatgatggataaaccagaatggagagagccatagagagacaagggcagaagaagcaaaagccattttttatagcagagtttcctraagttgtcagataagaaggacaggatggggaaaaggggaagaaaccaagagaatggactcaagactgaattacagaatgtctacgaaggcactcaatgcccacactcatctctaagcctccttctaccacagcactgttggcctccaggatgcaggtagaaagacaccctccactatactgatctcataactttaaaaaaacttcagccttgctcccagatatatctttatttttccaaattaatatttgtatgctatactaatgcattatctatattataaagcataaaatagaaattcaagatgagaaaaattccaaatagaaagtctaatacaggcctctctcaattagcattagaatccgtttctgaaaaattacatgttccacatgaaaatactaatcatgagcatattctccttatttaactgag

SEQ ID NO: 162217 - DNA, 415 bp, Homo sapiens
ttgccaatgaagcaagaacatttgatatgtcaaaggtcaatttatgactaggaggcaacttgaaagcacagatcactagtcctgagggttcagagaagggaggaagcatggagaatttgggtgacctgagacttcctggaagggtagaactagcactggaccttgaaggttgggtgggatttaagaaggtaaggagtgggcaaaatacaaggtagtggagaaacgattatgcttacttcacaraaaaactgatgacaacttgaaaagctttaagaaacttatttggattaagaccagttgcattggtaattcaatacaatctatacttaacagaatttcaaatgtttattattccagtcttttaatactatccttattggtttgctagggtttccaaaacaaaatattaccacag

SEQ ID NO: 162218 - DNA, 594 bp, Homo sapiens
cacagcatctttgcctaggccaccatcctgaaatgtttccgtctagtttttttttgttgttgtttttttgtttttttgagacagagtctcgctctatcactcaggctggagtgcagtagcgcaatcttggctcactgcctccctgttcaagcgattctcctgcctcagcctcccgagtagctgggactacaggcgtgtgccaccatgcccggctaattttttgtatttttagaagagatggggtttcaccgtgttagctgggatggtttcaatctcctgaccatgtgatccgcctgcctcggtgtcccaaagtgctgggattataggcgtgaaccaacacgcccggcccttctagtagttttatagtttcctgtcttgtgtttaattctttaatccatcttgagttgattttggtatatggtgagagatagggkgtctggttttattattctgcatatggtgatccaatcttcccagcaccatttagcgaagacagtgtctttcccccagtgtatgttcttgttggctttgtctaagatcagttgactgtatatgcgtggctttatttctgggttctctatactgttccattgg

SEQ ID NO: 162219 - DNA, 372 bp, Homo sapiens
actatatttatttatttatatatttttaaaatttattttattatattttttgagacagggtctcactctctcagtcaggctggagtgcaatggcacaatcttggctcactgaaacctctgcctcctgggctcaaatgatgctcccatctcagcctcttgagtagctgggactcgaggcacacaccaccatgacaggctattttttttttttttttttgcatttttggtagagacagtgtttcaccatgttgyccaggctggtcttgaactcctgagctcaagcaatctgcccacctttgcctcccaaagtgctgggtttacaagcatgagccaccacactcagccatttatttttatttaaaaaaaaaaaac

SEQ ID NO: 162220 - DNA, 628 bp, Homo sapiens
cttttctcttccttgtttatgtgtttgctcaaccaggggktttttttttttaatatttatgtgttttcatgatgttaaatatgttctttcagttctttcattttcaggtgtaggactcccttaagcatttcttgtagggctgctctagtggtgataaatcctctcagctttcatttatctgggaaagcatttatgtcattttcatttatcaaggttagtgtggctaggtatagtattcttggctgacaggctttatttttattttcttttagcactttgaatatattatcccattctctcctggcctctaaggttcctgctgagaaactcactattaatatgttggggcagatacttttctcttgctatttttagaattctctctggttttgacttttgacagtttgattataatgtgccctggagaagatctttttttttttttttttactgtatgtatttagggatatctgagcctcctatatctggatgtctaaatctcttcttagacgtgggaagtgtgcatctgttattttgtcaaataggttttccaacactattgttgtctctttgcctctgggacgcgaaaaattttatacttttatggtgtcccatacattatgtagac

SEQ ID NO: 162221 - DNA, 580 bp, Homo sapiens
gactgaaaaatgtgggggttgctttcagtagctgtagctaggtggctgggggcatatgctttgctgaggcctcacagcaaatcacagctgtagaggctgtgggaggtggaatttgtccttaggatgcataaaaatgtgcagcttctcctctacaatggggagggaggaggagaagggtcactgtggcttctgccttggcactggcagctgcaactgtgagaggggaacgtcaatgagcctctagggatgtgaagatgcagtggggagctgttgcgccctggggcaggacatagtctggtccggattgrgttttcaaaatggtgctctactgtagctgcttaggtcttgggggtttgtgggactcagcgagatgtctctctctggagcaatgccattgtacgacctccaggcagctctctttgttagtcttagagcccttgagggttaatggggctgtcccatggctaggactgtgggagtccagggtgggaatgtgaaccactgggagtctctcactctttccctgcattagggagcctctctgggctcctagttaatgctggctcagcaggctgcttca

SEQ ID NO: 162222 - DNA, 434 bp, Homo sapiens
gatcacattgacagcaatggaaacagtagtccgggctgctcacctcagccgcacatgtaagtgtggttaacagactctctaaagggaagaatctatattaatatgcttcttaaatttagaatttttcygaagtttttactgttgtataagttgaaaatacaaatttaagtggagttaaattataccacgttcataatatgacaaagtttatcaaaatcggttttaatacattttttagatgatctcaaatgccatatcattattgttccagcagtcctctacagattcttagtactactaatgttctcttgggcataaagcagtgtctaagatgaatctacatcttatgggtcattatcacaggttggtttgtatggtgcaataagaatattcatgatggaataagttgttataatttttactactgttacagg

SEQ ID NO: 162223 - DNA, 434 bp, Homo sapiens
gatcacattgacagcaatggaaacagtagtccgggctgctcacctcagccgcacatgtaagtgtggttaacagactctctaaagggaagaatctatattaatatgcttcttaaatttagaatttttccgaagtttttactgttgtataagttgaaaatacaaatttaagtggagttaaattataccacgttcatwatatgacaaagtttatcaaaatcggttttaatacattttttagatgatctcaaatgccatatcattattgttccagcagtcctctacagattcttagtactactaatgttctcttgggcataaagcagtgtctaagatgaatctacatcttatgggtcattatcacaggttggtttgtatggtgcaataagaatattcatgatggaataagttgttataatttttactactgttacagg

SEQ ID NO: 162224 - DNA, 580 bp, Homo sapiens
catgtaaaatctagttcctttaaacaatattgcataaatttaaatacatttcaatataatgttgaaggtaagagcaggaaattctagagaaatgttgatatacatatatatgcatgcagtttataaaattatgtttcactgacctttacccacctttttgttgtttctttggactgatactgactttttttttgagatggagttttgctcttgttgcccaggctggagtgcattggcacgatgtcagctcaatgcaacctctgcctcgcaggttcaagcaattctcctgtctcagcctcctgagtagctgggattacaggcgcctgccactacacccractaatttttttatatttttagtagagacggggtttcaccatgttggccaggatggtctcaaactgctggcctcaggtgatccacccgcctcgacctcccaaagtgttgggattataggcatgagccactgcacctggctggactgatactgactttaaatggaactttataactccaccatggaatcagatctcttgagttgtaagacataattataagctgtcatcattaagaatggaaa

SEQ ID NO: 162225 - DNA, 547 bp, Homo sapiens
cttttaaacaaccagatatcatgagaactcactcactattatgagwatagcaccaaagaggaaatatgcccccatgatctaatggcctcccaccaggacccacctctaacaatggggattacaatctgacatgagatttgcctggggacacagaacaaaccatatcaacaagaaatttcagagagcaaaggattaggaggaatagaaaaagagacagtttttggagcctctctcatttcagaagtggcttatgttagtgtcttcaattctgagatggtcttaaatactttcttattaacttcctaaggggaggcaagtttatcattccctcttttggatcattctaggtgccagctaaagtatgactctcatttattttccttgattcagcagcctaattgctctaatttagcatgcaagaaaattaatttggaaatatcaaaagttcttcattttggaaccgttagaactggtcattcttaataagatcttcccatttacacaagcactttcaagtagaagcaccataattatcaaacataaaacc

SEQ ID NO: 162226 - DNA, 547 bp, Homo sapiens
cttttaaacaaccagatatcatgagaactcactcactattatgagaatagcaccaaagaggaaatatgcccccatgatctaatsgcctcccaccaggacccacctctaacaatggggattacaatctgacatgagatttgcctggggacacagaacaaaccatatcaacaagaaatttcagagagcaaaggattaggaggaatagaaaaagagacagtttttggagcctctctcatttcagaagtggcttatgttagtgtcttcaattctgagatggtcttaaatactttcttattaacttcctaaggggaggcaagtttatcattccctcttttggatcattctaggtgccagctaaagtatgactctcatttattttccttgattcagcagcctaattgctctaatttagcatgcaagaaaattaatttggaaatatcaaaagttcttcattttggaaccgttagaactggtcattcttaataagatcttcccatttacacaagcactttcaagtagaagcaccataattatcaaacataaaacc

SEQ ID NO: 162227 - DNA, 429 bp, Homo sapiens
aagttttataaaattatattctaggatgattcatcatttcaagatacatttgtagccctcaacttcccaacaggcyggcctccaaaagtttgtttgtaagttgtttttctggatctggaaaaccatttcccttataaacaatgttctaaattagtagttcttgggctttttgtgtcacgaagccctttgagaatctcttgaaagctatggacacattccctagaaaaattctcatatgcatatatgccccaggtttttcaaagccacatttggtggtttcacagacccaacaatgtcctttctaattaagaaatctgatctcaaatgccaggctagcttaaatactgaaatctataggcacagaactaattaaatagaatttttcactcttgtctggaaacagagctaccatctagaacagcatattaa

SEQ ID NO: 162228 - DNA, 567 bp, Homo sapiens
aaatcctgctctgagccttagagtacaagtcagctgcctaatttcctgctgtgaagactgattttgggttaaggcatccccagatagctgggcaaacatcacttctggctgtgtctgtgaagctgtttccagaagagattaacattggagtcagtagaccrgggaaagaagatctgccctcaccaatgtcagtgggcatcatccagtcccttgagggcctggatagaacaaaaaaacagatgaagggtaaattcttgctttctgtctttgagctggtacatccatcttctcctctcctaagatatcagagctcctggttctctgactttgggactctgggacttataccagcacccccaccccctaatcccttctcaggccttcagcttctgactgggagttacagcattggctcctctggttctcaggcctttgggctcagactgaattatgccactggcttttctggttctccagcttgcagatggcatattgtgggctttctcagcctctataatcatgtggtccaattcccataataaagatcctctcatatatgtctatgaa

SEQ ID NO: 162229 - DNA, 508 bp, Homo sapiens
cgtaaagtggaagctttggtcgttgatgctagctttctgatttttctaatatgtgcatttaaagctataaattttttctctaagcacctccttagatgtatcctataaattttgacttgttgtatttttattttctttcagttaaaaatatctttaatttttcttgtgatttcttttacctatgggctatttagaattatagtctttaatttccaaatatttagggatttttcacatagttgtgttattggtttctaatttcatatagtcagagaatgtatactatatgatttcaatccctttaagtttattgacgcttattttatgtcctagaatatgatgtattttggtgaatgctacatgtacacttgaaaataatgtatattcatcagatgttasatgaagtgtcctataaagatcaattaaatctagttggttgctagtattgttcaagtctatatccttactgtcttctatctagttccataaatttttgagaaaggagtat

SEQ ID NO: 162230 - DNA, 567 bp, Homo sapiens
aaatcctgctctgagccttagagtacaagtcagctgcctaatttcctgctgtgaagactgattttgggttaaggcatccccagatagctgggcaaacatcacttctggctgtgtctgtgaagctgtttccagaagagattaacattggagtcagtagaccggggaaagaagatctgccctcaccaatgtcagtgggcatcatccagtcccttgagggcctggatagaacaaaaaaacagatgaagggtaaattcttgctttctgtctttgagctggtacatccatcttctcctctcctaagatatcagagctcctggttctctgactttgggactctgggacttataccagcacccccaccccctaatcccttctcaggccttcagcttctgactgggagttacagcattggctcctctggttctcaggcctttgggctcagaytgaattatgccactggcttttctggttctccagcttgcagatggcatattgtgggctttctcagcctctataatcatgtggtccaattcccataataaagatcctctcatatatgtctatgaa

SEQ ID NO: 162231 - DNA, 535 bp, Homo sapiens
tgaaggaaagaagttcaaatgattcaaacataacttcagtattattgtatttatatattagagatttgaagaaattgcttaaattctttagtgatgctttattgcatcttatgggggatattattggctatcatggtatctggggaatgacaacattctaaaaggtattcctgacaaacagcaggagtccatgttattgtttcactgaataccagaaaatcctttgattctaaaccaaaaaggcattgatttatcatgaaaataatttcagacatgcattaaaatgggaagagatgaaggtaaatagtgactgcatttggtagtacagctttgaarctggtacacttagttgtcacatggctgtccaatattggcagcggtctactaagtagaacagttgttacagtttcaatggacattcaaccagtttatgggatttacagatcaatgtagttaataatctggaccaagagaacatgttactacaaagaaaattttagaaaaagaatacaaatatagcctttttagtttaaaa

SEQ ID NO: 162232 - DNA, 388 bp, Homo sapiens
ggagtttaatcagtcatttggttaaatggcaagaaagattaaatattttatctgaaaaataatttcagtggccctactgagaactcccctaagcaattctcatataacaaatacaattatccctctctggactaccagatatatacaattttggaaactgcaatraatttcaggtcctgatttataactgctatgggcaaataaaacacatttttaggctttataaaaccatattaataaaaaccatttagtctgacttctctagggagcacagtaactcctgaaatattaaattaaaagaacacatggaggggaaattaagtgagccagatgtcaaaggcaaaacatactcacagttccaaatttagttgagtgtcaattgccaagt

SEQ ID NO: 162233 - DNA, 510 bp, Homo sapiens
agcatacacaaactattttctttccattattccctaaacaatacagtataacaactatttacatattatttacattgtattaggtattataagtaatctagagatgatttaaagtatataggaggatgaacataggttatatgcatatataatgccattttatatcagggacttgagcattcaccaattttggtaaccaaggggttcttgagacccattgctgaaggatattgaggaacaactgtatataatttccttctctgcaatgtgaagatagtaacattacctatctcataggtaaatgagttatgtgattgtcaaaacartgttgcataatgttaaaagaaaaacctgaggctaattaaatttaacagagtttaaccaagcaaagaacgattcgtgaattggacagccacctgagccagagtaggcacataaagactccagtgcagccacatgttggaagaggatttatggacagagaaaggaaagtgatatacagaaaacaaa

SEQ ID NO: 162234 - DNA, 623 bp, Homo sapiens
acagtaaatacagatatgttatataatattatgctacatggttaatttcagggccactgggagtgaatttaaagactactcagattattttatatgtaatgacactttcgtttgaagtagtttatcttratatatgtaattttagtaattcagcttatatttatttcttagtatttaatgtttataaagtgttcataatttgctgtaaatgctataaaataagcaaagaattcattctccactaagtgataataacatatgtatttataataaaattgatttaactaggttgtcattttcatttttccaaataggagtatgactattatgtgaaaaacttatcataacttggtaatattgatgctgctgctgataatgatgatgatgaggaggaggaaggttgagaagggacccacaccttgagcaagctttgcttttcacaatcctctttaattctattaataggacccaaggagaagctcccactcagtcagagtaggcctaccccttccccaacatgatcagtaagttctgaaccatagttcctcaacgtcttctgctcaattttcagaattcggaaaggagccacatacatctaccctttccactaaaactcactgact

SEQ ID NO: 162235 - DNA, 623 bp, Homo sapiens
acagtaaatacagatatgttatataatattatgctacatggttaatttcagggccactgggagtgaatttaaagactactcagattattttatatgtaatgacactttcgtttgaagtagtttatcttgatatatgtaattttagtaattcagcttatatttatttcttagtatttaatgtttataaagtgttcataatttgctgtaaatgctataaaataagcaaagaattcattctccactaagtgataataacatatgtatttataataaaattgatttaactaggttgtcattttcatttttccaaataggagtatgactattatgtgaaaaacttatcataacttggtaatattgatgctgctgctgataatgatgatgatgakgaggaggaaggttgagaagggacccacaccttgagcaagctttgcttttcacaatcctctttaattctattaataggacccaaggagaagctcccactcagtcagagtaggcctaccccttccccaacatgatcagtaagttctgaaccatagttcctcaacgtcttctgctcaattttcagaattcggaaaggagccacatacatctaccctttccactaaaactcactgact

SEQ ID NO: 162236 - DNA, 576 bp, Homo sapiens
cctatctttcttgaaagatagaataatttttcaggccctctgatatgtataaaaccgctmcacacaaccattatagattttgaaaagcaagaggaatacaagaggactttgttcatctgggactagaatttctaaattaaccaaaatgaatcattctctatatttgagtgcagctgattccactggaaatgtattaatgatgagactgattgctgcatttcacaattgtattttgcttgtatttgtaattatggtgtaacagctactttctgtttttttaaatcaagtcatctttaatcaagtccttttttctgcttggggaaatagcacccccaaaagacatgggtgcaggcccatttacttgatgattgttttatgtcattgcttcttagacttttaatgtgcatatgaatcacctgtggatcctttttaatcttcagattctgaaataggtcggggtggaactcaggatcctgcatttctttttttttctttttccttccttccatccttccttcccttttttcttccttcctttctttctttttttcttttttttttttttcctttgagaca

SEQ ID NO: 162237 - DNA, 576 bp, Homo sapiens
cctatctttcttgaaagatagaataatttttcaggccctctgatatgtataaaaccgctccacasaaccattatagattttgaaaagcaagaggaatacaagaggactttgttcatctgggactagaatttctaaattaaccaaaatgaatcattctctatatttgagtgcagctgattccactggaaatgtattaatgatgagactgattgctgcatttcacaattgtattttgcttgtatttgtaattatggtgtaacagctactttctgtttttttaaatcaagtcatctttaatcaagtccttttttctgcttggggaaatagcacccccaaaagacatgggtgcaggcccatttacttgatgattgttttatgtcattgcttcttagacttttaatgtgcatatgaatcacctgtggatcctttttaatcttcagattctgaaataggtcggggtggaactcaggatcctgcatttctttttttttctttttccttccttccatccttccttcccttttttcttccttcctttctttctttttttcttttttttttttttcctttgagaca

SEQ ID NO: 162238 - DNA, 633 bp, Homo sapiens
caggtatccacatatttaaaaaattaaaccatttcgtaayaccataaaccaaaattaactcaaaatgggccacagacataaatgtaagagctaaaacacaaaacttttagaagaaaacataagagaaaaattttagtaaacttgggctaggaaaatgcaaattaagccacaataagataccaatacacagtcactagattgcctaaaatttaagacccacaataccaaatgttggtgatgaagtaaggcaaatgtaactctcatagacatctggtgaaattgtaaaatggtaccatcacttcggaaaacagtttgcagtttcttataaatttaaatatagacctaccatgtgatctggctattctactcctaagtacctaagagaaattaaagaggatatccacataatgacttgtacacaaatgtgcatagcacttttatttgtagtggttaaaaatgaaaacaattgaaatgtccatcaactaagtcaatggaaaagcaatctgtgattatcaatcacaatggaatatgcgttaacaataaaaagaaactatatatgcagcaatatgagtgaattaaaaaaaaaatctttgctaagtaaaagaagcaagactgtccccctgaaaaaatagt

SEQ ID NO: 162239 - DNA, 600 bp, Homo sapiens
taattgtgctcaaaatacacaggttttcgaattcacccggatgtctgacatatgaaagcatactgaaattatattggaaaaattatgattttcagataaaatctgtgactctgaaatctgtgactgttactctcctgtacctaagaatacagagattacataccgatttatagrtaccgttataaaaataatgaatagcttgtttattatttaagaaaatatttattaagcacctatgttgtctgaaatactttcagagataacacaatagatcagtttattttaattagctgagtataaaattggcaatatattactaagtctcaaaaatgtgcatattctctaatgctgcaattctatttctgaaaatttgtcctaggaaatatgacacaattttgtacacaaacttttttgtaacaataatatagccaaaatgtgtaataattgaggattcattctgtaaattttaatacattatgaaattgttatgttctatatattcctaaatttattaaaattcaaattacatatatcatttctaagagaataaattagatatacatcaaaggtttttaacacaactttataaagcaaatagtt

SEQ ID NO: 162240 - DNA, 418 bp, Homo sapiens
gtatatccacagtgctatcagagacccaggcttcctcattcttcctgctttgccatctgtagtgtgtggcttctgtgctcatgtgtgcaagatgactgtttcaccaataggaattgcattttgtttcaggcaggagaaagggagaaagatcatcaaaaaggctaagacagacctacctacatttatttctytctctttctttctttctttctttctttctttctttctttctttctttctttctttctttctttctttcttcctttcctttctttctttttctttctttttcttctttttctttctttcttctttttcttttgttcattctttcattctctctctttccctttctgtcccctccctccctccctcccattttccttccttccttccttccttccttccttccttcatt

SEQ ID NO: 162241 - DNA, 421 bp, Homo sapiens
ccacagtgctatcagagacccaggcttcctcattcttcctgctttgccatctgtagtgtgtggcttctgtgctcatgtgtgcaagatgactgtttcaccaataggaattgcattttgtttcaggcaggagaaagggagaaagatcatcaaaaaggctaagacagacctacctacatttatttctttctctytctttctttctttctttctttctttctttctttctttctttctttctttctttctttctttcttcctttcctttctttctttttctttctttttcttctttttctttctttcttctttttcttttgttcattctttcattctctctctttccctttctgtcccctccctccctccctcccattttccttccttccttccttccttccttccttccttcattccttcctct

SEQ ID NO: 162242 - DNA, 421 bp, Homo sapiens
ccacagtgctatcagagacccaggcttcctcattcttcctgctttgccatctgtagtgtgtggcttctgtgctcatgtgtgcaagatgactgtttcaccaataggaattgcattttgtttcaggcaggagaaagggagaaagatcatcaaaaaggctaagacagacctacctacatttatttctttctctttctttctttctttctttctttctttctttctttctttctttctttctttctttctttctttcttyctttcctttctttctttttctttctttttcttctttttctttctttcttctttttcttttgttcattctttcattctctctctttccctttctgtcccctccctccctccctcccattttccttccttccttccttccttccttccttccttcattccttcctct

SEQ ID NO: 162243 - DNA, 561 bp, Homo sapiens
taaatagatgaaaacagtaagtgagatcaggcagcagatgaagtcagggagaattcaaagaygaagttttggccatgggacacaactgttaagagtaagtctgaaaataaatacaaagaaaattatatacattgagatggcagccctatagaaattcaggaagaggatatacagtaggcaatagaaatacatgggtgtggaactcagcagaggaacctgggctgagagagtagctctggcagagttaggatatagttggcagttgaagctatgacactagatgagattgcttaagaagcatctcaaatgagaagacaaagaacacagagaacataaagatttaagatgtaatcagagaaagacttggatttcaagttcctagagttgaaagtggaggttaacaatttagtgatggatctgtcctgcttagtgtcaggcctctgagcccaggccaggccattgcatcccctgtaacttgcacgtatacatccagatggcctaaagtaactgaagatccacaaaagtaaaaacagccttaactgatgacattccaccattgtg

SEQ ID NO: 162244 - DNA, 505 bp, Homo sapiens
attttctagtggaggataatagataaggaacacataatcatataaatgtaaaatttgttaagatgtcaaaagtgctataaaaaataataaaaggaaataggaaatcatggggcgtagaatgctaytttatatgcagtagtcaaggaagacctttcagttaggtctaactgattgatcaaaggtctaaaggaagtgagtgagtgagtcacataggtatttgtgtaaaaagccttcaggaagaggaaacactaaatgcaagtatatacaaagtcctgaggttggagagttcaaggaaatcagcaaagagcccatgaagtgggagctgagtgagtgatgaggaagtaagagttgaggtcagagaagaagtcaggagggggagatcctgtggactttggctttcactgtgagaaaaacagagaactattaaaagttaggggcagagaaaggatataatctactttgtattttaaaagcttattatgaggaaaatacatggttggggttg

SEQ ID NO: 162245 - DNA, 505 bp, Homo sapiens
attttctagtggaggataatagataaggaacacataatcatataaatgtaaaatttgttaagatgtcaaaagtgctataaaaaataataaaaggaaataggaaatcatggggcgtagaatgctattttatatgcagtagtcaaggaagacctttcagttaggtctaactgatwgatcaaaggtctaaaggaagtgagtgagtgagtcacataggtatttgtgtaaaaagccttcaggaagaggaaacactaaatgcaagtatatacaaagtcctgaggttggagagttcaaggaaatcagcaaagagcccatgaagtgggagctgagtgagtgatgaggaagtaagagttgaggtcagagaagaagtcaggagggggagatcctgtggactttggctttcactgtgagaaaaacagagaactattaaaagttaggggcagagaaaggatataatctactttgtattttaaaagcttattatgaggaaaatacatggttggggttg

SEQ ID NO: 162246 - DNA, 505 bp, Homo sapiens
attttctagtggaggataatagataaggaacacataatcatataaatgtaaaatttgttaagatgtcaaaagtgctataaaaaataataaaaggaaataggaaatcatggggcgtagaatgctattttatatgcagtagtcaaggaagacctttcagttaggtctaactgattgatcwaaggtctaaaggaagtgagtgagtgagtcacataggtatttgtgtaaaaagccttcaggaagaggaaacactaaatgcaagtatatacaaagtcctgaggttggagagttcaaggaaatcagcaaagagcccatgaagtgggagctgagtgagtgatgaggaagtaagagttgaggtcagagaagaagtcaggagggggagatcctgtggactttggctttcactgtgagaaaaacagagaactattaaaagttaggggcagagaaaggatataatctactttgtattttaaaagcttattatgaggaaaatacatggttggggttg

SEQ ID NO: 162247 - DNA, 537 bp, Homo sapiens
  misc_feature (1)...(537): n = A,T,C or G
tccaggttctttaatgggggttggtcaygtcggcatgaccaatcacccatgcggttgatcttaattactcagtatattagtcagggttctccaaagaaacaggacaacaagatgtatatacagaaagatttttttttttaaggaataagctcatgcaattgaggcttggcaagtccaaaatctgatggagtagcccaacaggctggagaattagtgaagagttagttcaaaaacaatctgctgacataattctttctttgctttaccatagacttcacacacacacacacacacacacacacaaacacacacagaattccttcctcatcagggagggtcagtctgttctcttatgaccttcaactgattagataaggcccacccacacattatggaggttaatctgctttactcanagtctactaagttatatgttaatctcatctaaaaaagatcttgacagaaacacccagaataatgttccagcaagtatctgagctctgtgggctcaccaagttgacacataaaattaaccat

SEQ ID NO: 162248 - DNA, 562 bp, Homo sapiens
tacattcagatatagaaaaatgttttaagttataaattaaatgtataaaattaaaattttgattttattacatacattatacagatcacctttaaaaacacaattccttaaaattcagttgttttggcaaaatgacaaagtatggttcataggatttttcttgcaaatcgaaactgataactgttggcaaatgtcagctgttatctttttacctcayttccagtttgggtagaacctaactggagaggtgatgttaaataacagtgtgttcataaaacacaaagtgaagaagagatttggcaaagtgtctagttgatttgaaacaagtagaccagaacatattcagtttaaaaacacttcctgatgcaagtattatccagactgaatttctacactaatcaaattgtttcaagtattcatttcacttggtattgtgtcaaaacagctgaagtgtctgataaattattctttcctagttgtttatgactccaagcatacatataacaaaactgaatttgatctaaccgtttccatttctctttcccatgtgaatgataatgtt

SEQ ID NO: 162249 - DNA, 590 bp, Homo sapiens
ggctttactgctgaattttaccaagcatttaaagagctataccaatcctatccaaactattctgaaaaatagaggaggagggaatacctccaaattcattctacaaggccggtattaacctgataccaaaaccagagaaagacacatgaaaaacagagaactatatccctgatgaacactgatgcaaaaatcctcaacaaaacaccaacaaacttagttcaacaacacattaaaaagatcattcatcatgagcargtgggatttatccctggcctgcaaggacagttcaacatatgcaaatcaatcaatgtgatatatcatgtcaacagaatgaaggttgaaaaccatatgaccatctcaatcgatgctgaaaaaacatttgataaaattcaacatcccttcatgataaaaaccctaaaaaaactggatataaaagcaacatacctcaacataataaaagccatatatgacagacccacagctagtatcatactgaatggggaaaaactgaatgcctttcctctaagatctggaacatgacaaggaggtccactttcaccactcttatttaacatagtactggaatccct

SEQ ID NO: 162250 - DNA, 511 bp, Homo sapiens
  misc_feature (1)...(511): n = A,T,C or G
ttctatatgccaacagtgaacaacctgaaaaagaaataaaaatattaatgccacttacaatagccacagataaaattaaattcctaggaataaacttaactaaagaggtgaaagatctcggcaatgaaaactataaaacattgatacaaagcattgaagaagatataaaaaaagggaagatattctatgttcttggactgaaagaatctatattgttaaaatgcccgtactactcaaagcaatctacagattcaatgcaatccctatcaaaatcccagtgacgtycttcacagaaatagaaaaatccatcctaaaatttacatgggactacaaaagagccagaatagccaaagctatgctgagcagaaagaacanaactggaggaatcacattacttgacttcaaattatactacagagccatagtaaccaaaacagcataaaagcaaacatatagaccattggaacagaagagagaacccagaaacaaatccatatatttacaataaagt

SEQ ID NO: 162251 - DNA, 572 bp, Homo sapiens
acatcacagggcaagagctggagcaagagattcagggaggtaagttctcagacttttaaacaaccagatcccgcatgagctaactgagcaagaactcacttatcaccaaggggatggtgctaatccatttaggagggatccatccccatgatccaatacctccccctagacccttcctccaacattgagaatcacatttcaacatgggatttggaggcgacaaacatccaaaccatatcaacacccccattgaagctggttggacctgcaggaactcatgcaagagatggggggtggggaatgaggggagcttccaagacccctcttacctccctrccagagatgatgcagtcattagcacagaatggaaacataacttgaatcaagctactgattaaacttgggtctggtttcttggctgaggtcaaaatacattcatttccctgtccctagggctcactcaattttataggtcagtccttggcaagccctattgacagaaaagtaagtgaaataaaataactggccctttggaccaaaagttctgttaaacaatatgcaagactcaagct

SEQ ID NO: 162252 - DNA, 623 bp, Homo sapiens
gtgtggataatatagcatatagtcactttagtgttggcaccattatcatattcaatgcactgtgtgttccctctacaaaaggaacaggtagaactgagcccaaaggagctttcttagtcrttctcagggaaaaacattatccccatattcttttgaagtgttcttagatagctttagttcttccagctgatgttactgtgtgttgcatgactgaggttgcaaaggctagcctatatttttaatatctgtccaggttgtcatctagttaacctacttctatctgatgtatagtattctattgcatgaactcacttatatttattatattcccttttttttgtgcgtgttatgacactaccttaggttaggctgggttctgctactatagtaaataaactcccaatttagtaaacccccacattagcggattagccccaaaagacttacacctttttcatttaagtccaaagtagactgataaaggctttcaccaggcattgatttggacatccaggagcactacattttgtagctctgcaatttaaatatgtggttctcgcagtaactgctgaagggaaagtgactcttagttgcctcactccagaagtgataaaaataatatc

SEQ ID NO: 162253 - DNA, 607 bp, Homo sapiens
tagctaactgaatctgacggcatatcaaaaatataatccaccatgatcaagtgagtttcataccaaggatgcagggatggtttaatttacacaagttaataaatgtgatacaccacatgtatgtgttttgttttaaacgggattaaaaacaaaaatcacawgatcatttcaatagatgcaaaaaaaggatttgacaaaatctagtattctttattattaataccctaagcaaaattggcatagatggaacataccttaaggtaataaaagccatgtatgacatgtatgccatctatgacaaacccacagccaattttacactgaacagggaaaagttgaaagtattccccttgagaattggaacaagacaaggatgcccactttcaccacttctattcaatgtattactggaagtcctagccagagcaatcagacaacagaaacaaatcaagggcatccaaattggtaaagaggaagtcaaactctcactgtttgctaataatatgatcacttacttagaaaaccctaaagattcatccaaaaagctcctagaactagtaaatgaattcagaaaagtctcaggatacaaaatcaatgtagacaaatc

SEQ ID NO: 162254 - DNA, 564 bp, Homo sapiens
catgctccttgacccttcccatggaccccctctcctttaccctcccaccaacattagataacatatgagtcaacatacagaaatgtttggctcaaacaatggtcaggaacttggaaatcctggctatttccagttttccgtttagctacattccagttcaaagacacagctatttctcacatcttttgtcttttctctctaagagagggcacacctcttgattgcacacaaaaactgcactctcaaagttacttgaactgtgactctgtgggacactcactcttccaagcacctctcctaagttctatctgacttaaactgagtgttccatgcatctctgtgacctgttatcatcatcttgtctctggttgtttcaaycagaatttctataaatgctccaagatgccatacaactctgcagcccatgctgaaagccaccattcctccagcaaagaggcaaggaccttccagttcacatggccacttaggatagccagctcctagtttccatttccattgttgcagcccctgctggactggaagcttctaggcaagacacagatg

SEQ ID NO: 162255 - DNA, 383 bp, Homo sapiens
ctcctacagttgtaacaaccataaatatctccagaaattgccaaatgtcccctgggggtagggttgccagataaaatacagaaagttcaattagattttaatttcatataataaatttttttktgtgttagtgtttcccaaatattgcatgggacaagtgtgtcccaaatattgccagtgacctattaaaaaaatttgtcgtttatctgaatttcaaatttaactgggtgttgtatctttttatttgctaaagtatgaggcaaattgctccagttgaaaaccagcaatgtagagcaaaagttgttttcagctattttttttaatagctgaggaacctggcttgaggttcctcaggttcttccaagctgagggaagtgcttggt

SEQ ID NO: 162256 - DNA, 588 bp, Homo sapiens
caggcagccattgtttgaccatgagagaagccagatttaaggctggaatgaggaaggcaaagtaaaagaatggagagaacctgagtccttagtgatgtcattctgctgctgaactaactgtccctagagtctctctgcattaagacctcttgttgtatcaaacaatattgtttagaccaggttgaaacttggtttcatatacctccarttgtaaacacctaaatgattgggtggatggtgtatcaatttttaattgtgataccctccacagagcacagcaaaattatgcaaaatattgtggtacccttacttcacataatatagtgggaaacattaatgatgatgatgataatgataacaccagcaacaaagtagacagaagctgcctctggtaaaggattgaagtcaaggtcacaaacatgaaatttgcaaaatcaattgcccctgattttcctgaacagcatctagaagtatataaacgtgggtttgacatattttctatagtcttccagatttagcattatccagtttgaaaacacagagtaagtgtgccagtgacagacttgagagaagctgttaatgagttga

SEQ ID NO: 162257 - DNA, 527 bp, Homo sapiens
tccttttgtagtttcaacaaagcaactgacaggtattcctgataagagaccactgaccacgagagtggttctggccagtctatggaggatgtgcagtgagggtcttcgtgtcctctacttcatcttttgatgtcagagggctgaaaactccacccctggatcatgttaatgctgcatttttttgaacatggatctcatggagcagcatgaagctcaaytgcatgtgtacatatttctttcataaatattcatgattcctcctatagcttcttgaatatgtatatttggccaccttgttcagtataaatcctgtcttattcttcccacccttgaagtgcctgtttctggcttctggccagagactatgcttcccagcctgtcaaaatggtcaccctacaggctgcggccgtttgtgagaaataaagctctcctttccaaattatgaacctcatcattgtttagttgacagaactatgaagagtgaagaaaaaaatatttttcctcccctatgatttctacacaaaggt

SEQ ID NO: 162258 - DNA, 618 bp, Homo sapiens
tgatgcttctaccagccaaaaaaataacaaagaaactcccagaagttaaaggacaggcaaggaacagattctctcccttcacagccctcagaaggaaccaacccagctgacatcttgatctaggacttctagcctcgagaaaataaatatatgttatgtcgagggcataaatatatgttctttaagacactcaatttgtggtactctgttatggcagacctagcaaatggatacaagtggcccagtttttttttttttgtttttttttttttgttttttgagacggagtctaactctgtcacctaggctggagtggagtgtaatggtgcaatcttggctcactgcaacctccacctcctgggttcaagtgattctcctgcctcagcctcctgagtagctgggcttatagccacccgycaccacgccagtctaatttttgtatttttagtagagacagggtttcatcatgttggccaggctggtatcaaactcctgacctcaggtgatccacctgccttgacctcccaatgtgctggaattacaggtgtgagcaaccacgcccagccatggcccattttttaaataacatttaccaataactaaaacaatcttatgtat

SEQ ID NO: 162259 - DNA, 573 bp, Homo sapiens
ctctgcatcttcttttctgaacgcctgtggccagaaaacagcttcaactcagccacataggctcccttctgcctgtcctacaaacttcgattccytgtaataaaatctctatatattttctccttctcctcctcctcttcttctccttcttcctgcttttctttctctgtctccttctctttctcagtctatcaaatgttcttctagttctgcctctttggttgagctctagctaatacagaaccccccacattagctgctatactctaacagctatgcttttcgtgaaagctgagtgaaaactgcaaagttaagtaaaagctactgtaatgtatctgtattatatttatgaccaaaaaatagcattcattggaaaaatagtaacatatagtcattgatttattccacagaaaaattgagtgcccgcctaattctattctctatgttggggatataggaatgattagaacagaaagtgctgttctcatggctttttacaataagagttgaggaaagagactgaatgtaaagaaagaaaatactgaagttacatggtaataagggctagaatga

SEQ ID NO: 162260 - DNA, 573 bp, Homo sapiens
ctctgcatcttcttttctgaacgcctgtggccagaaaacagcttcaactcagccacataggctcccttctgcctgtcctacaaacttcgattccttgtaataaaatctstatatattttctccttctcctcctcctcttcttctccttcttcctgcttttctttctctgtctccttctctttctcagtctatcaaatgttcttctagttctgcctctttggttgagctctagctaatacagaaccccccacattagctgctatactctaacagctatgcttttcgtgaaagctgagtgaaaactgcaaagttaagtaaaagctactgtaatgtatctgtattatatttatgaccaaaaaatagcattcattggaaaaatagtaacatatagtcattgatttattccacagaaaaattgagtgcccgcctaattctattctctatgttggggatataggaatgattagaacagaaagtgctgttctcatggctttttacaataagagttgaggaaagagactgaatgtaaagaaagaaaatactgaagttacatggtaataagggctagaatga

SEQ ID NO: 162261 - DNA, 573 bp, Homo sapiens
ctctgcatcttcttttctgaacgcctgtggccagaaaacagcttcaactcagccacataggctcccttctgcctgtcctacaaacttcgattccttgtaataaaatctctatatattttctccttctcctcctcctcttcttctycttcttcctgcttttctttctctgtctccttctctttctcagtctatcaaatgttcttctagttctgcctctttggttgagctctagctaatacagaaccccccacattagctgctatactctaacagctatgcttttcgtgaaagctgagtgaaaactgcaaagttaagtaaaagctactgtaatgtatctgtattatatttatgaccaaaaaatagcattcattggaaaaatagtaacatatagtcattgatttattccacagaaaaattgagtgcccgcctaattctattctctatgttggggatataggaatgattagaacagaaagtgctgttctcatggctttttacaataagagttgaggaaagagactgaatgtaaagaaagaaaatactgaagttacatggtaataagggctagaatga

SEQ ID NO: 162262 - DNA, 524 bp, Homo sapiens
gacacaaccctttgcagttcaggtttattggtttggagttattgatatctaagaatgaaaggaattctctagtccttgtgatagagctcaggtaagatgaacaagatgtataggagtctccattagtgcggttcttcatagggcttggaggtgatttcaagcatatttgatgctatgatctttcatgtttttaactgtaacatttacattatatattataacctaatacatatatcattttttcatggggcactgtactttgaaatgtcttccttgagatttcctgattcccctgttaactgggactgggtcccagcagtaccatgatccccattgctcaccttttagrtgttctgtgactctctgcacccatgtgggattgatcatatgccccaaattactccaggactcatgcctctggggacgtcctgggatgccatgagtgggcccagattccaaagacaatttaacgaggagatcaatccctctggccaatggagtattttgggaggggctgggattgc

SEQ ID NO: 162263 - DNA, 524 bp, Homo sapiens
gacacaaccctttgcagttcaggtttattggtttggagttattgatatctaagaatgaaaggaattctctagtccttgtgatagagctcaggtaagatgaacaagatgtataggagtctccattagtgcggttcttcatagggcttggaggtgatttcaagcatatttgatgctatgatctttcatgtttttaactgtaacatttacattatatattataacctaatacatatatcattttttcatggggcactgtactttgaaatgtcttccttgagatttcctgattcccctgttaactgggactgggtcccagcagtaccatgatccccattgctcaccttttagatgttctgtgactctctgcacccatgtgggattgatcatatgccccaaattactccaggactcatgcctctggggacgtcctgggatgccatgagtggkcccagattccaaagacaatttaacgaggagatcaatccctctggccaatggagtattttgggaggggctgggattgc

SEQ ID NO: 162264 - DNA, 553 bp, Homo sapiens
attatgtctcaatggagattaatttgcctttttctttttatgaatcaggatgagtaatttatgtgtaactaagaatcatttgaatttcttttacatgtaaaatccttgattactttttcctacttatcccattcactttgttggagtttttcrttttcatacttaggaattctttatgtttgaaatattagttcttggcctatggtaagtcacaaatattatttttccattttatgttatgtcagttgactttactcctgttctttttcttaaaccatgaaaagatgtagtggtgttgtcattgttgtttaagtaaatgaatttcttatcgttcttattgccccagaatttggaaaatagttggggagatttttcccaatcccaggttatgaattgaccaataatattttctaaaacttacatggtttcatgttttttaatttatacatttgattcatttgatatttattctagtgcgcaccgtgtgaagtataaatctaggtttaatttttcaaatggtaatcctattttcccagcaccatttactaaaaaa

SEQ ID NO: 162265 - DNA, 396 bp, Homo sapiens
acgacttaggggtcgagaagaatgcagtcttaaaaaccttgctttttaaagtgcactgttaactgtttaaagaataaaggaaggttccagtgcccttttctccatcggagtgtcagtagattaagcaggataaaccttttgcctgagtgttgctgcaatatttaaaagtacaaatccaatatttctggtccacgtrgatttctatgaatagcttcccagcaaataacgaaaaaaagagagtacgtatgttgtgaagtttgttctgtttattagcaacttcccgcatacttcaactttcaacaattttactctagaggcagagtaaagggatactttctttaggaggtgactcttactggacgaacactcagtgtttccaaaacgtttgtgagatct

SEQ ID NO: 162266 - DNA, 480 bp, Homo sapiens
taagaaatatcagtagggaagtcatggcttagtagggggcagttagatcatcttttgcccactcacaaagaccagaattctgaaaattgcagagcagcatggaattctcacaaaaatattatttaggggctatttttatgtccttgaaatgacactgagaggagagggagccaatccagggaaaagcagacctgcagagcagcmtaacagcatcagtaaacaagagcagggtgtgtgtgggaggctgaataatgaaagaaggcaggatgacacctcctgccacgcaggtaatatgagacaaggacaacgatcgctttgctgccagaagtgacagttgcccaggacttaataaggctgattctgtttacttctgtattgtctctatttttatctttcccttgcttctttttctacccacctgcatccctactccctggacctgccatttaattccacccacccattattagtccccagtgt

SEQ ID NO: 162267 - DNA, 565 bp, Homo sapiens
cttcttactaggaaaacaaaacaaaacagtaatcaaagatcacataagttccctaaagcctacttccactagaggtcactagtggccagttatttattttgtttgcatcattaattgctttgtttcacagacatcaaattcagaattttaggactggtgactcagttctattayataactccactggttagccattaaggctggcaggtcccttgtcattaggatcatcgtccattcattaagctgtccaaatagcatctcactctaccaggagttctggagagccaggagttcgtgtgtcttcttcatctactaacttttaccacatcttacttcttccatttctctatctgtaaccctctcatggaacagaagaagaatggtagcttgtaatttacatatatcaagtttgaggttaccaatgccagcagctccttatcttccttttctgattagcacatggaaccaccatgcctgctctatggcttacatccctgttagctgcgtcccatccttccctcagatccagccccagctattcctctctaggcctctcctaatgacc

SEQ ID NO: 162268 - DNA, 547 bp, Homo sapiens
tcttttattggttgttgttactgcaaagtggtcttgaatctttcagtgctctctccattttaaccctccttcttcaggtgacacagcagcaataaaagactcacttcctaaaccttccacataaccctgctacttgattcagaggccattgtccatgtaaaaggactgaaagagaaattgggactcccagaaatcccaggacaaatttgtatgtcatagaactcccagaaatcccaggacaaatttgtatgtcaaagagaaaattggaactcccagaaattccaggacaaatttgcacgtcataataatccaacctattaaataggttggattaagtgccagtgcaattcaggggaatggagagaaaaaagccaaacttacttcatccacatgcccaacagctccataaatccttgccatctgtccagtgaggtaggggaatctctcaccaatctcaacaaacattggaagaaaacwgttcaaagccactggctcatagactgctatctctatgaggatgtttaggatgatgtcattatgggttgaa

SEQ ID NO: 162269 - DNA, 606 bp, Homo sapiens
ttttaaccctccttcttcaggtgacacagcagcaataaaagactcacttcctaaaccttccacataaccctgctacttgattcagaggccattgtccatgtaaaaggactgaaagagaaattgggactcccagaaatcccaggacaaatttgtatgtcatagaactcccagaaatcccaggacaaatttgtatgtcaaagagaaaattggaactcccagaaattccaggacaaatttgcacgtcataataatccaacctattaaataggttggattaagtgccagtgcaattcaggggaatggagagaaaaaagccaaacttacttcatccacatgcccaacagctccataaatccttgccatctgtccagtgaggtaggggaatctctcaccaatctcaacaaacattggaagaaaactgttcaaagccactggctcatagmctgctatctctatgaggatgtttaggatgatgtcattatgggttgaatccttcaaatgcccaattaggaaaggaatacacttctgaactacctataaagagagaggagaggaggagggaagaaagaaggaagaaagagaaaagttaattaaattggaattaat

SEQ ID NO: 162270 - DNA, 580 bp, Homo sapiens
gaggtagcaaaaattggcttagaactattgaaatatttgccttcagggataaatacatagcccttggacaaagtctctcatgattcactcataagcataaaagagcatttggtttgaaatcaggcacaggatgcaaatggatgcatataatacaattgttaaaaatatgatcaaggaaataatagcaaacaagtctaagaggcaaacacccctgccacagcacaagagtctcctggccctatctcatcaactttttaatcagtgttttaaaatgaagaccagagtggctctgctcataaaatttatgggtgacaagaaccttggaagagctgcagatacactgagatraaaaaacatctaacaagatctttgcatgccaaagcaatgggtgaatctcatgaaagaaaagtgtaaagaattaaaagtaagtacttgcataagacaaaaagcctgctaaacacagagtatggcagaaattgctgaatatactaagacaatttatatttaaaaatttggagatttcaaatataagtcaagagaaatcaaagatgtgattgtgtgattgacaaaaaactgaatt

SEQ ID NO: 162271 - DNA, 539 bp, Homo sapiens
tgattttttttttttttttggkaggccaacttgaattcatgtatctttccatctatttaagcctcaaataagtgaactgaaacaaattttagtttaatagtcatctttactttactttagggtctggtcttattggaaagcacataccagtatgtagcatgcacttcattaccatgcccctcctctgtgccagacctacaaggcagtagacctagtggtagaaacagagacaagatgctttaaaattttttttacaaatgatctcatagcacgtggaaggatgctatggccacttgtttttccttcactacagaccaatagcccgcatctgtgaagaatcaaatagcatgcccctgagtgcagccactgccatcgtgtgtgttaaatcctgtgccctctgccttgtttttctaactagctggaatatgctggccaagcaccagggcgtgttcattacatcctctctgggctcagagtcatggacacttttcaagtaaagaagtgacacacatcttgcccaggttgcatttctgtgacat

SEQ ID NO: 162272 - DNA, 539 bp, Homo sapiens
tgattttttttttttttttgggaggccaacttgaattcatgtatctttccatctatttaagcctcaaataagtgaactgaaacaaattttagtttaatagtcatctttactttactttagggtctggtcttattggaaagcacataccagtatgtagcatgcacttcattaccatgcccctcctctgtgccagacctacaaggcagtagacctagtggtagaaacagagacaagatgctttaaaattttttttacaaatgatctcatagcacgtggaaggatgctatggccacttgtttttccttcactacagaccaatagcycgcatctgtgaagaatcaaatagcatgcccctgagtgcagccactgccatcgtgtgtgttaaatcctgtgccctctgccttgtttttctaactagctggaatatgctggccaagcaccagggcgtgttcattacatcctctctgggctcagagtcatggacacttttcaagtaaagaagtgacacacatcttgcccaggttgcatttctgtgacat

SEQ ID NO: 162273 - DNA, 432 bp, Homo sapiens
tgaggttgaacaaagtgatgccctgctgtcttggttcagctctcatactgtaaacaagtatctattcttttcatggcctctttattgccacatttttcttatcttcatgcttttttttgtttgtttttggtgatttcactgtttaaagtgtcccccaagtatagtactaaagtgctctctagtgttcctaaccacaagaagactgtgatatgcctcatggagaaaatacatatgttggataagttttgttcaggcataaattaccytgctgttggccatgggttcaaatttaatgaatcaacagtatatattaaatagctttaaacagaaacacacatataacaatgttatgtatgaatcagttaacaaaaatgtaaccagaggcttgcaggaaactaaccctgaatttcctctagaagcaatacttcagta

SEQ ID NO: 162274 - DNA, 556 bp, Homo sapiens
ccatacaatcctcataacagctctaggaggtaagtaccattaagatccccaccttatagatttttttttaaactaacataacaaaaatgttgaggacattgcctaaggtcatgtggcttgtaaatggtaggaatggatttgaacttaggcaggcagcccagaccaagtgtactctttcaaccttaaatccacattacctctcagtaaaattctgcaaatcacgtagagcttcatcaatagaggaatggatataaaggaatataggaatggatataaaaaatgcactatattcataacatgaaatgctatcagcaactaaaaggatagcgatctatttatctatctacctatcatctatctatcatctatgcatccatccgtatgtagctatattattcatgtacatatgaatagctttcaaagcatagttgaaaatttkttcaatgtaaaaaatatttatatatgaatataaattatttataaatgaatgcctctcaaaacagaaagatttcatttctttttgaagctcaaaaattctgacgcaatgattttgctt

SEQ ID NO: 162275 - DNA, 595 bp, Homo sapiens
tcttgcacttaagcatccctgcctccccagtcactagaaacaaaaacagaactgataaatctttaatccattcctgcagttccatccattttccagactcaggggtcaatctgaccactgggcagagaaaataggtactccataacctaacctgatatcccactattaagtcagtcgtgttgaaagctctgatgctattctttgrcgataaatcatgcgtctatatagcagttcctctcagtaggtctctggcctatccatcctagagttcttaacatcacggaagtatcagaaccatagcccatagccagtatcctctgacgacttccctgaatgcctttgtctagattgtctcccctcccagtgaatttaattgggcctgatctgactggatcattactgatacgatgagctttgagacctctctgagaggctggctgctcccttccccagaggttagtgctcagctttagaagtcagggcacgtgcttggttggaacacacaaaattgtttggacccactaaggctaactcacaccaaaggatttccaaaaggctggtacataaccaggcatgccagtgcactcaaccccag

SEQ ID NO: 162276 - DNA, 420 bp, Homo sapiens
ctgtactttgaattaggtacttccacatagtggctagagcacagatagagatcgcttttgtaataaaagatcctcttcatgtgcacctaccaccaccaattggaagtactaaactccagtagtttgatgtcttgaatggaaccagctggatgctcattttcrttgccctgcaagactggattaatttgctagctacaaaccactacttctattgagtacttactatttagcaattgtactgtgtaaacaccgtatatgtaatatcatttttaactttcataatagtcccgagcaggaggtgttgttatcccaattttagagatggcagaacagagatttagagagagaaaatactttgccaatctctcatcttgataagaccaagatccaaatgacacggaagccttcaagctctaaagc

SEQ ID NO: 162277 - DNA, 268 bp, Homo sapiens
atgggacctccaaaacatctaaatgtgaaaaacagacccactgcattaatttggawaattggtctgactgtgaacttcacatggtggactcacaaaactgaaaatataatagagcaggaaagtatttagagcctgacatcatcatgtgagattagagatgggaagtgatggggtttttcggcactacagcaaactccagctgtaacaattttctgttgctataactaataggacagtaaacatcttgtgcatgaagctctctctacat

SEQ ID NO: 162278 - DNA, 501 bp, Homo sapiens
gcattgttagtcccagcctgtgttggtttacacctgtaccgtgttagcattggtgtcttattcgcaggcgtcattagctccattatagagatgagcgcattcagattcctrtaggttgcatgactggctccgagtcacaagactggcccctggggctcctgactcccagcatagcactcctctcactgaatcttcctgcctctctcccccaggcaatctctggggcccctggatccctgctgaggtgcccatggtcccctccatccccacagggcagcctgtgtagtgctgggtagggcccaggcctgtcccacggaagacatggccccatctaggttccgcactcagttggaggtaaggtaagcacttggtggcagtttcattttctctttgttgtttttttttttcttctggattctgctgacctaaaatgagccccagaggtgaggaatggaaagagggaggagatgtgggcatgagtggatcaggctaggggatggg

SEQ ID NO: 162279 - DNA, 530 bp, Homo sapiens
ctgggcaatggttcgagaccgtgcctctacaaaaataaataaataaataataaaaaattagctgagtgtggtggtgtgcacctgtagtcccagctactcaggaggccaaggctggagaatagcttgatcccaggagtttgagactgcagtgagatgactgtgtcactgcactccagcctgggtgatgacaggatgacagagcaggaccctgtctccaaacaaaaaaaaaaaaaaaaagagagagagagagaagtgaatctacactgaacctaaaagatctaaatattttttcaatattttgaaataaaatcttcatacacagtacaaggaaaatgttggaaagggacaggcagaaaaacactgagagaaaaatagacattctgattttgccaaaaccatctatgctaaatataggtaacggcaaaaggatccagctagctatgagataactaacacaatctttaagtgraaatgccactaagtgctgctgcatttgtctagaagctgcctcaagtttgacagtgtctgat

SEQ ID NO: 162280 - DNA, 530 bp, Homo sapiens
gcttgtgtgtcccctccgtcccagtcacagagcaccctgcaggttcagctagagcccagagccctgaaacccataacagtgctattctctatggaagaatactatgtccaggaagccaggggacacaggagagcaactcaagaaagatgcggtactcaagaggataaaagtctaagagaaggcactagaagaggggagacagaggaaggcaatgacaatggaaaacccttaagaggttctattcgagaaggcagacrccagtgggcagatgtgtgcactggggtccaaggtgaagagacttgcctgtagcaagggcccagtggactctcacagtggagcagcatgcaaacaagcaggttcagaagcaatcatggatgaggaccaggaaaccagaccacaggacactaaagggagatatggtatggatggcaggggggctcctctcaccctgaggtcaggatagccaacatgcccctctcacagaagcctttaagagagtcaccagctaaccaggcaaaagttgtatttct

SEQ ID NO: 162281 - DNA, 562 bp, Homo sapiens
tgaatccaatttgttttattaatgtaaaaagtgtttaattagcctcggactttttttttcaaactgaactttacatggaggcacaatgtgtacaaaggaagccaccctggctttagatagaggtaggggatcttagcctccyccttacccaaagtgcctttgtggacttgcttgaataatgatccctaaatatcagtccgaataggcttcaaaagaatcactttggaagcatgttaagaatggagactcctgggccccaccctagatctactgaatcaaactctgaaagtaggactcctgagcctttatttcatgttctccctatgactaaggggctgctttgtgggcaggcacagaggactcttcagtgagtactacttgtgaaactgacttagtaacaaaataaagggacattgataccacttgcacctgaatgaaattctattcagaactattgttttaacaggtatcctgctctccaaactggaccatggatccagagatcatccggttatctccagatttggaataaaagatctccctgcagagttggaagccagaa

SEQ ID NO: 162282 - DNA, 557 bp, Homo sapiens
ggtacaagttaggattttttttctttaccagtggcttattgacttgcagtgtattaatctagattgttctttctactcgggttgagacatatccccacccaaacaaaaggtgatattagacaaagattgtctaattgtgtttagaaacgtttttgtttgaagtaatatgcaaacaatttggacttaggtgttttagatatagaaacttaggaaasaaggctgttaatttgataaagtgtgtgaaacactgaaacatctaacaaatattttattaaacatataccaggcagaatagaaaacatgtacctttcctactcttgattttgaactagagaatgctctggatggatttttaaaaattggtactcttttacttttttctaaaattcatttagattatgggttagaaagaagtaactttcttgtaccagaattcagtctaccaatcttagatttataaagccagagtctatgatgttagatacataatggttgaatgaataagctttccacaattatatatcctttaatttgttgttctggtaaaggaagcattc

SEQ ID NO: 162283 - DNA, 591 bp, Homo sapiens
tgatttcaaaattggcactcacttatcaatatagaaataacaccaccaaaatactaaaaatatttattgaaattttaatacctttcaaaagatttacaaaacctggacaaaaattgcttatagctgacttaagcaccctgactgcttgaccagggataatagagattattgagattagtggctctcaagtttgagtatgttatcacaattagttggaagccttattaragcacagattaacagatcctactctggtggttttgatttttataggtgtcaggtggacttcataattgacattgctaacaagctcccaggtgatcctgatgctgatgttgctaggattacaccagtaagaaccactggatccttgctctactccaagtctagtccctgaagtagtaacatcagtatcagctctcaatacctacctcagacatactgaatcagaatgtgtattttaacacaatccccaaatgattcatttgcatattaaagttggagaagtgctcttgcatctctaacaagcttcaggtgatgctaatgcagctagaccacgccattttgagtagcaaagaggtagaacagtag

SEQ ID NO: 162284 - DNA, 589 bp, Homo sapiens
aagtattagaaaattattagaaaaatctatggattaatccaatgaatggaagattgatatatatttttccatttttttagtacagcaatttttgtgtaatttttatgtattagaatatcatttaaaggtatatattgtccaaaaacaattaaaaataaaaagcaaacaagcaaaaaacccctgtaagttacaatataagaagagaatgtcaactttaagttctgtgttctagattatatttctgtctgaaaatggttttcttcagagactgtcagaccaccactgaaataatgagttgcattcaattagcttttattacatttgtaatgaagcatgaataaaaatgtgaaagctggtagtgaaaaaataactgttgtgaacayactttatacttccttcacccttgtagttcttgtaaaataagtaatactacaatgatactgtagtatcattgatgttatattcataagttactcaatacttgatatatatgatatctttaatattacatatttattatgtaataattatagtcaaacatttaatgaaagaataagtgttggactgaacaagtaagtataatgtatta

SEQ ID NO: 162285 - DNA, 446 bp, Homo sapiens
taaatggctaagtgatcaagggccctggataatgagtaaccacaatttatctgcatcacaggaaaaattccactgaggcacctttaaataagcatttatcataaaacaaaatatgccaggctagagaacctatggaaataggcagtctcatttaaatttatcaagattgagtaatcctacctaggactttaaaatttttaccccaaatcttgggcatgtgactgaatgacawttactcagcagccagagagaagaaaacgtagttttggtcatttttatcttactttgaagtagtaattaactcctttgtctttccccatgtcctaaacaaaatccacctaacctgccaaactcacctaaagatatcagttagaagaaagggttggtgatgtgtgttgtcacagcaaccttgatttcaatgattacagaggggctgggtacaatct

SEQ ID NO: 162286 - DNA, 446 bp, Homo sapiens
taaatggctaagtgatcaagggccctggataatgagtaaccacaatttatctgcatcacaggaaaaattccactgaggcacctttaaataagcatttatcataaaacaaaatatgccaggctagagaacctatggaaataggcagtctcatttaaatttatcaagattgagtaatcctacctaggactttaaaatttttaccccaaatcttgggcatgtgactgaatgacatttactcagcagccagagagaagaaaacrtagttttggtcatttttatcttactttgaagtagtaattaactcctttgtctttccccatgtcctaaacaaaatccacctaacctgccaaactcacctaaagatatcagttagaagaaagggttggtgatgtgtgttgtcacagcaaccttgatttcaatgattacagaggggctgggtacaatct

SEQ ID NO: 162287 - DNA, 568 bp, Homo sapiens
cattggctggcttggaacatatgcctattgtttgagaccaagtgctttggccaggaggcattttaccaattggcatccccaccgggtctaacacatartgggtggaaagggaggaggcacttcctccaaaggagaggaatgctgcttacactggcaggcaggagagcctagcaaatcaaaaccacgtcaaaccacagcattaatttgttaaacctctgcaatgccacatgcctctcattaatacttaatatgtctgagagtgcatctctatttggtagcagaaactggagagctgccacagaagagtgatctcctgggcttgctcctccagctgaagacacagtatccgtggagacccatggtgagagtacagccagaaccccaaagttttgtgtagaggttctggaaagcctggagccccacaactatcccagaagggctgggagttaaaccagaaggacatctgttttgctatgaaaacaatgcatttgggggaacaaggaaggtatcaacgtgagaagttgcccatcacacttaaaattctatgtctttggccaggcacagtgtc

SEQ ID NO: 162288 - DNA, 616 bp, Homo sapiens
tctttcccactagaaaagtcccaaaagctggaacttttcctacttcatttactgttttaaaaccagctcctatggcagtgcctggcacagagtgggcactcagatattagttgaatgactgagtgatggcatgagtacccactggagtgtcccttcccatcacaatcatgcatgaccctctgtggtcacaaagccctggtctcactggtaccaaaagctggatgccctggccagggtggctggggacaggaggcctgagttgagaatgactggatgagccagtgaggggctaaggtgttttttgastcctctcatgggattctggcctaggaaggacttagtttcctcactgctcatctgggttggaatgagaggaaaggggttactgagtcccacgtgcagaaggacctccccacagggaggactgttactcagggaggtctggatcactctgggagcgggccccaccatggtaattcactgcccggggaggctgtgtcaggctgtggaaaggaacaggtttcagagccagaccactgagtcctgccaggatatttcatgttgtaattcactgtgcagggtggagccccaacaccagatctacacctactgtctg

SEQ ID NO: 162289 - DNA, 609 bp, Homo sapiens
gttgatatggtttggatgtttgttccttccaagtctcatgttgaaacgtgatttccaaggttggaggtagggcctggtgggaggtgattagatcatggggatggatccctcatgaatggcttaataccatccccttggtgatgtgtgaattcttgctcagttagttcccatgagatctggttgtttaaaagagtctgggacctctcccttctctctctttctccctctcgtcatctgacatttctgctcctgcttcaccttcctccatgattgtaagcttcccgaggccctcaccargagcagatactggtgccatgcttcttgtacagcctgcagaaccacaagccaaataaacctcttttccatgtaaattaccaagcctcaggtatttataacaatgcgagaacagactaacaggtggtgagtagtcctgggtcatcacacatccacacagtgagcatcggacatgaggtggagtgagtgcccaaacggtgggtgtgccccagccccagtggtctcagtctgagaaggcctttgacttttcaaggaccagagagtcacttcaggtaataaagggttaactttaaggacataagctcaggagcccag

SEQ ID NO: 162290 - DNA, 609 bp, Homo sapiens
gttgatatggtttggatgtttgttccttccaagtctcatgttgaaacgtgatttccaaggttggaggtagggcctggtgggaggtgattagatcatggggatggatccctcatgaatggcttaataccatccccttggtgatgtgtgaattcttgctcagttagttcccatgagatctggttgtttaaaagagtctgggacctctcccttctctctctttctccctctcgtcatctgacatttctgctcctgcttcaccttcctccatgattgtaagcttcccgaggccctcaccaagagcagatactggtgccatgcttcttgtacagcctgcagaaccacaagccaaataaacctcttttcyatgtaaattaccaagcctcaggtatttataacaatgcgagaacagactaacaggtggtgagtagtcctgggtcatcacacatccacacagtgagcatcggacatgaggtggagtgagtgcccaaacggtgggtgtgccccagccccagtggtctcagtctgagaaggcctttgacttttcaaggaccagagagtcacttcaggtaataaagggttaactttaaggacataagctcaggagcccag

SEQ ID NO: 162291 - DNA, 616 bp, Homo sapiens
tctttcccactagaaaagtcccaaaagctggaacttttcctacttcatttactgttttaaaaccagctcctatggcagtgcctggcacagagtgggcactcagatattagttgaatgactgagtgatggcatgagtacccactggagtgtcccttcccatcacaatcatgcatgaccctctgtggtcacaaagccctggtctcactggtaccaaaagctggatgccctggccagggtggctggggacaggaggcctgagttgagaatgactggatgagccagtgaggggctaaggtgttttttgagtcctctcatgggattctggcctaggaaggacttagtttcctcactgctcatctgggttggaatgagaggaaaggggttactgagtcccacgtgcagaaggacctccccacagggaggactgttactcagggaggtctggatcactctgggagcgggccccaccatggtaattcactgcccggggaggctgtgtcaggctgtggaaaggaacaggtttcmgagccagaccactgagtcctgccaggatatttcatgttgtaattcactgtgcagggtggagccccaacaccagatctacacctactgtctg

SEQ ID NO: 162292 - DNA, 514 bp, Homo sapiens
caggctagggggaaggggtgggggcaggtctgcgagccagaggtgactagtgatgggttgtaacaactgcatttcatacagcaccctccagctttcatgacacccacacgcagttctttcttgatatccacagcatgccagagaggtatagagtactgccatgcccaatttaaagataaggaaagggggctctggggtgggaccctcagggtctctgacaacagtgctcccactcatgcccctggatgtggccgtctcactagcactcagacccaatagcagatgtgccaagctctgtgacagattctttacatgagccatctcatttaatcttagaacagctctgtgagattagagtcaccactgtttttataaggtaagaaatatgaggcttataaaggtaaagtagtccaggcrcagtggttcatgcctgtaatcccagcactttgggaggctgaagtgggaggattgcttgagctcgcacgtttgacaccagcttgggcaacatagcaag

SEQ ID NO: 162293 - DNA, 626 bp, Homo sapiens
acctggacaggcatctgagcatgcgttcttgtgtattctgctggcgtgtgtgggtctccacctcactctgcctggcctccctcccagtggacagacactggtagcccayggcctggcccaggattctcaggggctctggggcgctgctcacccttgggtgctggcacccatttgaagcaaggagaagccaatcgttgctgtcctccagccctcctcccgcctgctgggctcctctcctttgtccttctctccagtgccctcgtgctgtcccaggctgtgctggtgcaggtgccttcctgactgccttagctctttcactcctctctcctccctggccatgtatcccatagcctgtcccctcccagccaccctcctcaatgctcagactgtcagagggcacagattcaaggtgcagggagtctcaagtctggagaattttgagttcaggttgttcctttgctcaacaaacagcaattagaaacctcatgggtgccaggccctgggagaacgaagaggtcctcagtgtgccccgagttctcaacacttaaaaaggcttatggactttgggtgagcttgtagaataactgtgtgaggtcaccctgcttctgccaggctgctggccagtg

SEQ ID NO: 162294 - DNA, 626 bp, Homo sapiens
acctggacaggcatctgagcatgcgttcttgtgtattctgctggcgtgtgtgggtctccacctcactctgcctggcctccctcccagtggacagacactggtagcccatggcctggcccaggattctcaggggctctggggcgctgctcacccttgggtgctggcacccatttgaagcaaggagaagccaatcgttgctrtcctccagccctcctcccgcctgctgggctcctctcctttgtccttctctccagtgccctcgtgctgtcccaggctgtgctggtgcaggtgccttcctgactgccttagctctttcactcctctctcctccctggccatgtatcccatagcctgtcccctcccagccaccctcctcaatgctcagactgtcagagggcacagattcaaggtgcagggagtctcaagtctggagaattttgagttcaggttgttcctttgctcaacaaacagcaattagaaacctcatgggtgccaggccctgggagaacgaagaggtcctcagtgtgccccgagttctcaacacttaaaaaggcttatggactttgggtgagcttgtagaataactgtgtgaggtcaccctgcttctgccaggctgctggccagtg

SEQ ID NO: 162295 - DNA, 626 bp, Homo sapiens
acctggacaggcatctgagcatgcgttcttgtgtattctgctggcgtgtgtgggtctccacctcactctgcctggcctccctcccagtggacagacactggtagcccatggcctggcccaggattctcaggggctctggggcgctgctcacccttgggtgctggcacccatttgaagcaaggagaagccaatcgttgctgtcctccagccctcctcccgcctgctgggctcctctcctttgtccttctctccagtgccctcgtgctgtcccaggctgtgctggtgcaggtgccttcctgactgccttagctctttcactcctctctcctccctggccatgtatcccatagcctgtcccctcccagccaccctcctcaatgctcagactgtcagagggcacagattcaaggtgcagggagtctcaagtctggagaattttgagttcaggttgttcctttgctcaacaaacagcaattagaaacctcatgggtgccaggccctgggagaacgaagaggtcctcagygtgccccgagttctcaacacttaaaaaggcttatggactttgggtgagcttgtagaataactgtgtgaggtcaccctgcttctgccaggctgctggccagtg

SEQ ID NO: 162296 - DNA, 626 bp, Homo sapiens
acctggacaggcatctgagcatgcgttcttgtgtattctgctggcgtgtgtgggtctccacctcactctgcctggcctccctcccagtggacagacactggtagcccatggcctggcccaggattctcaggggctctggggcgctgctcacccttgggtgctggcacccatttgaagcaaggagaagccaatcgttgctgtcctccagccctcctcccgcctgctgggctcctctcctttgtccttctctccagtgccctcgtgctgtcccaggctgtgctggtgcaggtgccttcctgactgccttagctctttcactcctctctcctccctggccatgtatcccatagcctgtcccctcccagccaccctcctcaatgctcagactgtcagagggcacagattcaaggtgcagggagtctcaagtctggagaattttgagttcaggttgttcctttgctcaacaaacagcaattagaaacctcatgggtgccaggccctgggagaacgaagaggtcctcagtgtkccccgagttctcaacacttaaaaaggcttatggactttgggtgagcttgtagaataactgtgtgaggtcaccctgcttctgccaggctgctggccagtg

SEQ ID NO: 162297 - DNA, 311 bp, Homo sapiens
tgtcttgagtctgaggctccctgcagttcccggggactaagtgcttggctgatgaatggatgaccatgataatcagattactggagaccaggctgctgatgtgtaaaaacaagcctgggcccgtgagtagaargggggcagaaaggggacaacctgtgaccctctggaagcctcagtgtgcacgctgtgacccagggtcccccagcatgtaaggggtcactgggaggccactgactgttcagggaatacgtgagtgctctcccaagtccttttgtagtgtgcgaggttttcttctgaccagacctggagct

SEQ ID NO: 162298 - DNA, 311 bp, Homo sapiens
tgtcttgagtctgaggctccctgcagttcccggggactaagtgcttggctgatgaatggatgaccatgataatcagattactggagaccaggctgctgatgtgtaaaaacaagcctgggcccgtgagtagaaggggggcagaaaggggacaacctgtgaccctctggaagcctcagtgtgcackctgtgacccagggtcccccagcatgtaaggggtcactgggaggccactgactgttcagggaatacgtgagtgctctcccaagtccttttgtagtgtgcgaggttttcttctgaccagacctggagct

SEQ ID NO: 162299 - DNA, 311 bp, Homo sapiens
tgtcttgagtctgaggctccctgcagttcccggggactaagtgcttggctgatgaatggatgaccatgataatcagattactggagaccaggctgctgatgtgtaaaaacaagcctgggcccgtgagtagaaggggggcagaaaggggacaacctgtgaccctctggaagcctcagtgtgcacgctgtgacccagggtcccccagcatgtaaggggtcactgggaggccactgactgytcagggaatacgtgagtgctctcccaagtccttttgtagtgtgcgaggttttcttctgaccagacctggagct

SEQ ID NO: 162300 - DNA, 361 bp, Homo sapiens
ggcctgagggtctggccatttttgactagaggcagtatctgtgttggaatagcctgaagaccctgtcttagcctattttawgctgctgtaaaagaatatcacaaaccaggtaatttataaagaatagagacttatttcttacagttctggaggctgggaagtccaagttcaagggctggcttcttgccagggccttcttgctgtgtcatcccacggtggaaggtagaaggacaagagagaataagagagcaagaggagggttggacttttttttaaataagaaacccactcctacaataatgaacccattcctgaaataacatgaatctattaatgagaacaaagccttcattacttaatc

SEQ ID NO: 162301 - DNA, 603 bp, Homo sapiens
cataaaatcccatgcactctgactcagtaattgaagttcttgaaatgtatcttggggaaataatctaaaggattattatggaaataaaggggccaggtgtggtggctcatgcctgtaatcccagtgctttgggaggccaaggtgggtgaatcacctgaggtcaggagttcaagaccagcctgaccaacaaggtgaaaccctgtctctactaaaaatacaaaaattagccaggcatggtgtcaggtgcctgtagtcctagctactcgggaggctgagacaggagacttgcttgaacctgggaggtggaggttgcagtgagccragatcatgccgctgtactccagcctgggtaacagaatgagactccatctaaaaaaagaaagaaagaaagaaagaaaggatcagtttatgtccatgaaactgtttgttttaatgaaattggaagcaacctaaatagtaaataacaggggcatcattaagttttggcttgtctacttgctagaatatgatacagtcactgaaaataagatttatgaagagtgttccatatctgaggaaaagcatgaaaaatgaaggcaatgataatttgtatatataatttta

SEQ ID NO: 162302 - DNA, 603 bp, Homo sapiens
cataaaatcccatgcactctgactcagtaattgaagttcttgaaatgtatcttggggaaataatctaaaggattattatggaaataaaggggccaggtgtggtggctcatgcctgtaatcccagtgctttgggaggccaaggtgggtgaatcacctgaggtcaggagttcaagaccagcctgaccaacaaggtgaaaccctgtctctactaaaaatacaaaaattagccaggcatggtgtcaggtgcctgtagtcctagctactcgggaggctgagacaggagacttgcttgaacctgggaggtggaggttgcagtgagccgagatcrtgccgctgtactccagcctgggtaacagaatgagactccatctaaaaaaagaaagaaagaaagaaagaaaggatcagtttatgtccatgaaactgtttgttttaatgaaattggaagcaacctaaatagtaaataacaggggcatcattaagttttggcttgtctacttgctagaatatgatacagtcactgaaaataagatttatgaagagtgttccatatctgaggaaaagcatgaaaaatgaaggcaatgataatttgtatatataatttta

SEQ ID NO: 162303 - DNA, 603 bp, Homo sapiens
cataaaatcccatgcactctgactcagtaattgaagttcttgaaatgtatcttggggaaataatctaaaggattattatggaaataaaggggccaggtgtggtggctcatgcctgtaatcccagtgctttgggaggccaaggtgggtgaatcacctgaggtcaggagttcaagaccagcctgaccaacaaggtgaaaccctgtctctactaaaaatacaaaaattagccaggcatggtgtcaggtgcctgtagtcctagctactcgggaggctgagacaggagacttgcttgaacctgggaggtggaggttgcagtgagccgagatcatgccgctgtactccagcctgggtaacagaatgagactccatctaaaraaagaaagaaagaaagaaagaaaggatcagtttatgtccatgaaactgtttgttttaatgaaattggaagcaacctaaatagtaaataacaggggcatcattaagttttggcttgtctacttgctagaatatgatacagtcactgaaaataagatttatgaagagtgttccatatctgaggaaaagcatgaaaaatgaaggcaatgataatttgtatatataatttta

SEQ ID NO: 162304 - DNA, 581 bp, Homo sapiens
agatcatctgacgtcatctcctaatgtcttggtgaagcaggtattacaacactgccctgtctgcttacaggattgctgagaacatctgataaggatgatgggcatgggagcttcccatgacctctgcagaggcacaccgttctgggcctgtgccccgctggcttttctgcagccctttccttcctgccctggcctgattctccctgttcttcaggctccctaagctgcaggcttttctccttcatcatttccttgtaatggtgatatgatgtcagtatgattatcctcatttttgtagatgaggaaactgaggccagacaggtcatataacttgcccaaggtcacacagccaagatgaaatggagctgggatttccccgctcctgtgcactcctctaccacagtgctgtgcctgctgtagttggtgtcaggcctgtgggtgcaaactggtacaacaaacgtctgccctctaggaactcttggtctggtcagcagatagagtggatrctcggaccaagtcatcctagcagcacattgagtgcaggggacccagagtgaggagctctgcagcctgacgagatc

SEQ ID NO: 162305 - DNA, 582 bp, Homo sapiens
ttggaatgggagtgcaggatcagctagtggggtgagcactaaactgggcaagacagagcagaggtggtatcctcccacccaggagtcaggagtgggtgggggccaaggccacgcagcagtgaaggccccaccagggggcgcacggtgaaagcagacagagtgggtgatgtcaatggacaggttacatagcgaaaattaagtctggcctgagtgctgtgcaggtaaagaagctggtggtgagaagacaagagcaaggtggtacagtcaagagtggacagagaagaccaccccatcccctgccctggatcctcaagtatgtggttcacagcttccacagtggccgttgagatgcctaatctgagatggagcctggcctctcttctcattggagagatgctggacgttttttttttttgtttgtttgtttgttttkttttttttttttgagacaaggtctccctctatcgcccagcctggagtgcagtgacatgatcacaaattactgcagcctcaaattcctgtgctcaagtgatcctcccaccttagcctcccctatagctgggactacaggtgtgtaccacc

SEQ ID NO: 162306 - DNA, 605 bp, Homo sapiens
aggaaataataaaagatgcaaagatatttgtgcagagatgctgatcatgttaattggtaaaatggtgaactttagaaaaaatttaaaacccctccatatgaaattggttacagaaatatattacctccatatgatggtgtggctgagactgcttcctggttgctcaatctccattctcctcttctttgttgttaacaagactctatattaytggagccagcaacgtgcttattaataatactgtatttcacagctttcctttcagacaaagatgaccaatgagataagagcagaagtccttgggtgggacttccaagtgtctggattactgcctggatccagctgccttgatcactgatatgatggctgaaactccagcagtcatttggggaccatgagagaaaagccaggagaattgtagtgactgcaattctgacattcttgaaccactgtaacaaagccaacaactgcctccttccagatgtctcattatatgagaaaaaaataataaaccattatatgcttatgctagtcaaactctgttaatagcagccaaacacaattcctaactgacacagatgaaacattttgcaaccatttaaaat

SEQ ID NO: 162307 - DNA, 567 bp, Homo sapiens
agatctaactttttgatgtggacatttagtgctataaatttaactcttaacactgccttagctgtgtcccagagagtctggtatgttgtatctttgttctcattagtttgaaaaaacttcttgatttctgtcttaatttaattatttatccaaagtcattcaggaacatgttgtttaatttccatgtaattgcatggttttgagcrattttcttagtcttgacttctatttttattgtaccgtggtctgagggtgtttgatatgactttggttcttttgcatttgctgaggattgttttatgtccaattatgtggttgattttagagtatgtgccatgtggtgatgagaagaatgtatattctgttggttttgggtacagagttctgtagaggtctattagatccatttggtccaatgttgagttcagatcctgaatatctttgctaatttcctgcctccatgatctaatactgtcagtaaagcactgaagtctcctactactattgtgtgggagtctatgtctctttataggtctctaagaacttgctttatgaatctgggtgctt

SEQ ID NO: 162308 - DNA, 559 bp, Homo sapiens
ccagcagtcctgggcatgagctttcagcaaccagagcatggccccttgatattgcagcaatgttgcccttgaacagaacctaatccctggctgaggtcagccagcaactgaaaaagttggcccactctgctgaccttgcaagaattgctgcagtccccacacccttcacacctgacagtcttgcagattactcttccttccttttccaccacccctcaggctcttagcaccaattcttttcctcccatcaacactgctttgaggaaaaaagctagttaattcattcactctaaggtttatatgactcatatgttcctatttgttaaaatatctacatttccaaagggcgcaaactatcctttaaattgccttcgttcattgcaccgtctttgaagtctaattcattgcaaacaaatgaatttgtcgatgcctrtatagctctatatgacacaatgatacagtactttattaatcattacagaatacaggaagcctcagagtttactttcctcctatgcagaaaagtgccctaaaaaacatcaaggaaacatcatcacca

SEQ ID NO: 162309 - DNA, 578 bp, Homo sapiens
ggtattttaaacagaaagggacttaatacaggaattaaacacctctataatcattaaaagggctagaggagctgtaatgaggagactgctactggcaacattacgtgcatgaatatgaagctagagctttgatccagggatcagaaatatttcactaatacttcaactgcttctcgacacctatgaaggcagtgaccagacagggactcacggtttgacctccatcccagcaccacactgtttctccatcctagcaccacactgttaatatacctagaggtatattaaccatacctagcctggagagtatggagtcagtgaaggagtatataaagatgtacagagccttgtggcatgaaaatgtagctggacatattcagataaaaactggaaaactagaaagggagtcagtgagtaaccttaggatgctctgtttcccaagagcgctgtataygtatgttttctctctctctctctttctctctctctctctcttactctctctgcccctctctcccctccccaccaccccccaagagctctataacataaacaatcaaggaagggtctcacacgtc

SEQ ID NO: 162310 - DNA, 561 bp, Homo sapiens
cgtgtcaattacagttgcatatgaccaggaactatgtttatttttattttccacatcaacctgctctttgtcagctataaaaaatatttctgcccaggtgcggtggctcacgcctataatcccagcactttgggaggccgaggcgggcggaacacgaggtcgagatggagacaatcctggccaatgtggtgaaaccccatctctagtaaaaatacgaaaattagctgggcgtggtggcacgcgcctgtagtcccagctactcaggaggatgaggaaggagaatcgcttgaacccgggaggtgcaggttgcagtgagccgagatctcgccgctgcactccagcctggcracagagcgagactccgtctcaaaaaaaaagaaaaaactttctaaattccctctcatcacccaaaatgcaaaatagttgttagagattttcaaacaaactgaagtctggttaggttgtcgttggtaatgacaggcagattttcatagatgttgaattttctgaagtatgattatttgctttccgttgcaatattgacagtttcccaaacatgtt

SEQ ID NO: 162311 - DNA, 487 bp, Homo sapiens
tttacttaagcagcctcgtactgttggacayttgttatgtccaagtattttgttactacaagcaatgctgtaatgcacactaagaagaaacatatcccttgaaactggttctacttttaatattttcaagcgttctttctgccattcccatcattataaattaagtttcacccactcacttgctgagcatctagttttcctctttgtctggaactttatgtatgtccccaaatggaaatgacaagaaatatttaaaccccaattggtttaaaaattaggtatctaccttatttagggacagttttatttataataattctaaatgtctgtgaaatttttaaaaggattgtatctgcatgatccagtttcttgatgtatgtattgccgtagtttatgcagtgatgcatctatttacagagtgtgtaacactcaggacatatatgtagagcattgttgatcagtgtgtggccttgggatcaagaggaag

SEQ ID NO: 162312 - DNA, 366 bp, Homo sapiens
ccgccacccccaagagagaatggcttaaacaacattttttcatcctgtagctataggaaaaacctgttactgttttctaaccccagtcttattttctctttacccacatagatgtaatgggagatagtgtccctttgctaaaaaaccttcattttggctaggcagggtggcttacacctgtaatcacagcactttgggaggcccaggagggtgaatcatttgaggtcaggagtttgagaccagcctggccaatatggtgagactttatctctactaaaaatatcaaaaaaaktgctaggcctggtggcacatgcctgtagtcccagttactcaggaggctgaggcaggagaatcacttgaacccaa

SEQ ID NO: 162313 - DNA, 501 bp, Homo sapiens
catattctcagcaagattcaataaattatagccataggtatttttaatgaaaatcaggcaatttctccaatctgtattctgcttatggtattacatgcatgcaccactcacacaatcatctggtaaacagatagacacttaccatggctgataagaattaaattatgaccagaactaatgaggccaaatacaagaaagtcaccttttaaaattgaacttacaaaagcctttttccacattacattgacaatkccttcttcaaaatctacctcatagctcacactataaatatggccatccaagatcatttgagactgaaaaactaagtttacttattccaaagcaataagaaaatgtatatattctttttcagtcaagagtttgggcttttgtgataactgaaatatattaggtagcagaatgtagtcaccaaaatatattttgatcttctgaataaatgactttgttcctaggaaaattctcagtggaagcccaaagcta

SEQ ID NO: 162314 - DNA, 439 bp, Homo sapiens
caggcccacctggatcatacaggctaatctccccacttcaagattctcagtcataacctctaatgtttcttatgccacgtaaggtaacatattcacaggttccagggttgaggacgyggacatctcttaggggccactattcagcctaccccatgcatggaaacataagttttacgattacgcttattcctttgtgccctttttctttcatttagataaaatgcacatgtggtaaacagataaatcttaaaggtagaatttatgaacgtttacattttgaacccctctaaccacccctcaagtcaagatgagaacatttacagctccttacacccctccccatcaataccctcctctacccggaggtcatccctagccttatgcttattttcattcattacttttgcctgttcttggagtcataggaacagaatcatac

SEQ ID NO: 162315 - DNA, 410 bp, Homo sapiens
ggccgccttagctccctctcccctgaagcctacactagactctaagattagagcactccaataccaagtaagtacaggtacctgtctcgagagagcccacccaaccctgggagaagggtggtttccccaaatgcttagtgcatgacagtcctcggctgttcgctctgcactttctaccgtggggcagctccagagatcacctgacttgccagttcccagaaggcagagtcagcaaagggccttctcaggagacccaagtggcagtgagacaggaaaatagggtctgcaggcaggggaacataaggctgattcacacttgagstatgacaggggctatcctctccatagggcatacgccaagtaaatgacttcataactttacttcatcctcttcatttacatagggcata

SEQ ID NO: 162316 - DNA, 535 bp, Homo sapiens
agcagggaagtgttttgttagaagttggtttgtttcctgctgtctttaatacccagcacaatgtcaggcatatagtaaatgatsagtaaatacattgtccatctacccatccatccatccagaaaatattacctgaatagccaccatgtggcctggtagagtactgagatttgaatgtggaggtaagctttatgaaagtgattttggcatgggtttaaaggatgggttggaatggataattactggagatgaggaaacaagtgaggggcactgtaactatccagaggtaaaacagggagtgtttaagcaagtgccaactcaaagtgggtggaaaggaaggaaggaattgtgtcaaaaatatctctaacccagctatgtgatttgacccttgactcagttcaggctgtgaaggagatgaaggtgagcagggctgcttctagattttgagtctaggtaactgaaagactagtgttgtcaaaacaagatctcttttcatgggaaaattgatatgtcaactttgtacctactgagcctg

SEQ ID NO: 162317 - DNA, 620 bp, Homo sapiens
acatgtatacatatgtaactaacctgcacattgtgcacatgtaccctaaaacttaaagtataataataataataatagaaaagaaaactgcaaacaattgcttcctttgaacataaaaatcaggacttccagcttcagggggaaaaagtgatcatgttctttcttctttgtctattacgtgtaatacaggacttgcaatgaaaagtttataacatctctaaaggatttattgatgtgatgcaaataacatatatgatcaattgtctttttggttgcccattatttgttccagcattgagtgactggttgtgtttgagcaggctctgcatttatcaggggctgcttttagtttgggcaattataatgtagtctgtgcagggaaacaagattgggtattagcttcctcagtttatctttaaacatctatgctcacagcctttcatatctttttgtttcctctcctcctcttttatttatatgtctttttatttttgtrtatgtatgcatgtgtgtgtttataaagctataggcatagatctatgcaccaaacccttaagaatatactataaagaaaatttgtaaacattttcagaccatgaattcaaatgtacaaagcacgt

SEQ ID NO: 162318 - DNA, 547 bp, Homo sapiens
gttataaaatactatttataaataataaaattatctgtctatcatctatcatctatctccccttaaggaccctaaacaccaaaatacctggctccatcttaaaaattamcgacataccctatttgtatttatgttgtagtaatacttaggagtatcttaatcctcatatagaaattcagctactaatactacaacaggtaaaagagagtagcaaagtaatgtctacatttagatatgatgcatttttctcttaatatctttcatttaatgggatccaaagtacacttaccagaacaactaaagttacttttctcctctattcaagaaattgctcgagaacttttagaatctcttatttgtttctcatattagactatgggctgggccacatgggtttagatccttagtataactcattcagtttttttgggtcaagtgtgtgtattctttgaaggggaacagataccttcatacaaattggcttacataaataaataagagattcataattgaagtgaaagatcatttatattcagagagagcaggg

SEQ ID NO: 162319 - DNA, 424 bp, Homo sapiens
ctccaggtctgttttcagacatagtgaggagcctggagttttccagaggttttccaagctgctgaggaatgacaccaagcagcaaacccacagagggaagagggagagtcaattatttgagttcycaggaaggtatgagaacatgccatggggatatgaaaccaaacatggctatacaattggaagcaaaattcaatttaaaaaatgaagaaagtgatacagtttggctttgcatccccacacaaatctcatgggaggtgattggatcatgggggcaggttcctccatgctgttctcataatagtgagttctcacgagagcccgctgtttggtaagtgtctggcatttctcctttctctctctctctcttctctcccgatgcatgtaagacatgccttgctctcccttcaccttccatcatgaa

SEQ ID NO: 162320 - DNA, 572 bp, Homo sapiens
taatcggttttctgtaaagtcagtcttttccctccctccttcacagggccccactgtgcaactcctctccctggagtattggtccatgctctttctcaagccccacgtgacccagctgcacctgtgaacaccagctatgggcaccagctgtgtggtcttgtctcctgggctctgcagtgcaaatggtsccccctctgtcagctttacatccctggtgccagcctgggaatcctccttcttcatgaaattgctgtgagtgtttcacccaggatgttaactaagctgggtagagggagagcaacgtaaactttgtttaactttccctgtggcttattggtaaaagttcagctctggagcaaaaatcacttctaaggacggatagagtttatttcacaaacttctagaaattgccaaaactgtttcacatccctttcgagttggactgggggctaacagaaccttaacaggaaaaatccatgaatgttatccttaaaataatgctccacatgccattaaaacccatcttgctacaaatgcagactatttttaagggtatctcaatgtttaaaata

SEQ ID NO: 162321 - DNA, 444 bp, Homo sapiens
ttggtccatgctctttctcaagccccacgtgacccagctgcacctgtgaacaccagctatgggcaccagctgtgtggtcttgtctcctgggctctgcagtgcaaatggtgccccctctgtcagctttacatccctggtgccagcctgggaatcctccttcttcatgaaattgctgtgagtgtttcacccaggatgttaamtaagctgggtagagggagagcaacgtaaactttgtttaactttccctgtggcttattggtaaaagttcagctctggagcaaaaatcacttctaaggacggatagagtttatttcacaaacttctagaaattgccaaaactgtttcacatccctttcgagttggactgggggctaacagaaccttaacaggaaaaatccatgaatgttatccttaaaataatgctccacatgccattaaaaccca

SEQ ID NO: 162322 - DNA, 569 bp, Homo sapiens
ctcagtcagtagtgggagagatggctggacctggagagagatggccggaccttgaaggagatggcgggacttcggggaagataacctgcccttcccatcctctctccagctctcctctctgctgagagcagttttcattgctcagttaaattctccactttcactatccttcagttgtctgtgtgacctcattcttcttgaatgcaagacaagagtttgggactcaccaagtgtgggtacccaaaaaggctgtcacactggctcattgccctccccggcagaggacagctgactcatgcaatgaggcaaggagccaactgagctgccaacacgctgccatccagaaayggcagaactaaaagagcaccgtaacacctcctcttgggcttcagggccacaggcatccccacctaggtgccaccgcaggccctgcaggaccagccagctggaccctgcacttgctcgctcacgtgctgcctcctgcaagggggtgagtgtggcaggccagctaaaccacacatccctgtcacgggtccagcaaaaaggccgaagatatttttgtattatta

SEQ ID NO: 162323 - DNA, 310 bp, Homo sapiens
caaactaagtcttatcagctcttcctccaaaatataggatcgcttttcctatcatcactgcctttacccttagctatctcaccatcaactcttgatactcttatccaggcttgggggctccccttatagtcttcaggtggcagtcaaggtgaacttcttaaaaaaaaatcagatcagatctcctccaaatattctccaaatggcttatggaaattcagattctaaaaagattgaaacttcagatatggctatccagtttccttcaytggcagataggtttcctcatgaacaaatttcaatattcagtgat

SEQ ID NO: 162324 - DNA, 386 bp, Homo sapiens
tatgttttagaaattttaattaatttgacatattttaaactcatttaacctaaaactttctattgtgacataagatagttgctatcagtatcctcattttgcaggtggataagcagttacatatcgtaagtgacagmggtggattttgaatccatgaattctagttccacagtcaacaatatctggaataaatagtttataaatattattaagtattgttattgttataaccagtaacaataatatattcactaaacatcacctttctcatgaagctttacttgataataccttttgagagtaatttcttcagttttaatcccctagtacttctttttaggaaatatttacccactgctcttttttatctgctataaactaggttt

SEQ ID NO: 162325 - DNA, 559 bp, Homo sapiens
caacaccacctcttgcccccactttcctctgccaggcttgggttccaaagtctagcaatataattgcttgtttccgcctcccaatttgccatactcacctgataatatcccggcttagttgaacccaattctctgcccttaccagagcaactgaaagtggctggagaaaaacacacaaccgcatgatgctgtctcacatccaactcatgaccacaaactccaagtaggtcctggagttgcccccacgattctataattttttctgtccagccattttcccattcacaacttctcacttctcaaatctcctcattctcagttcatgacattaactcttatttcacttagaaaatagaagtaatcagaagagaactacatcttcttcctaaactcagtgcttgccctcaccccccaccacacacagcgaccrccatctcttgcctagactggaataacctaacggccttctaactgttctaccagcttttgcatttgccattcccacaacctacaaaccattccctacgcagcagccagaaaagtcctttggaaagtaaac

SEQ ID NO: 162326 - DNA, 584 bp, Homo sapiens
gacatctgttgtgtgtttgttcaggagccatcattccttctttttgtgatggtttcttgaattttcatgtaaactgtcccacttctacagtccaaactaggactgtaaatgaaggtattcwgtcggccctaggccagataggatagtgaccaaatgtgagcaactggaccctgttccccaggaatctgaatcttgaggaaagtgacacagagacagaaaattgttggtgttgatgcatgatagaagaaaagagaatgataattaatgctggccttttggttctctgaactgtcctttttacctttcccttaagaagtctggcttttttcttttcttttgtttctttttatatccccattttctttccaaatatatcctttcctctactctttcctgtctttctcattaatttagccagagcccattttctgtgcccacaacaaataaaaacattttctgtgcccacaatcaaacaaaaaagtcacatacctttgataagaagacatgacttttttgttttttaatctaacatcaaatttacctaacggcaattcttctggcaagagattctttttttttttttt

SEQ ID NO: 162327 - DNA, 468 bp, Homo sapiens
cctgttgccatagtcatagttacatttttttccattttatcatgtgtgtgcttttttttctccttgacctatttctgggatgtattttaaaaatggaaagaaaattcaagttgatgtgataacagcatctggtttcccaaattaaacaagttacctttattacctttatatttccaccttattttcctttaaattattagtaatagaagtmttttggtatatgtttggattttaaaatttaggtgaatatattttgaatcacatttctaaaatcaagttgatattcctgaagtaatttatccattgaagttgctgagtatgagtctatttctgatattagaagtaaaaaagatatagaaaatggtatctaaatattttaattagacaaatacttatgaaaagatttagcaaaaatatttgtgaaacctattttcagtggttttaatttttgcttcaaggaacttttaa

SEQ ID NO: 162328 - DNA, 590 bp, Homo sapiens
gtttttataattgtttttgttgttattttgctactcttgggaaccaaaaattagatttacattcaagtatcacttaataatggggatatgggccaggcacrgtggctcacgcctgtaatcctagcactttgggaggccgaggcgggtggattgcctgagttcaggagttcgagaacagcctgggcaacagggtgaaaccccgtctctactaaaatacaaaaaattagctgggcatggcagtgtgcgcctgtagtcccagctaccagggaggctgaggcaggagaattgcttgaacccgggaggcggaggttgcagtgagccgagattatgccactgcactccaccctgggcgacagagcgagactccatctccaaaaaaaataaaataaaataaataaataaataatggggatatgttctgggaaatgcatccttaggaaattttgttgtcataaaaatgtcagagtataccaacacaaacctaggtagtatagcctagtgcacgtataggcgatgtgatagagcctattgttcttaggctacaaacctgtacagcatgttatgtactgaatacttcaggcacttgtaac

SEQ ID NO: 162329 - DNA, 320 bp, Homo sapiens
gactatggtcatatatggtccatcactgaccaaaagtccttatgtggtacacaactatactttaacatcttatagttgtatatcattttacataatagaaaagatatataatcttatttaatttgcatagtgatctggtgatatggaaatgattacacccattttatcgtaaaaaayaggttcagagaggttagattcctggcttaaagccaaagacccaacagcgcagagccagaaccaatgtattgtgatgacagggaaaagaaatctttccctttataccagtttacaatccaacatgggtcaatatctgctatggg

SEQ ID NO: 162330 - DNA, 599 bp, Homo sapiens
ccattttaaccttctcctagcttctcttggagatcatctttttctcaccctctgtgcaactattcttggtgtagttaaaacatgaatgttcccccatccattcacttttgcatgctaagttattccartcccattctatgtcttatttttcacagctgactcatctttgtgctgtcatagtttagtacaactatttggtagctagagaaatttagattctaatcttaggtctcccactttttgtctggctataagccttagacacaattacagaggcccagcttcctcattctaaactagagtcaacacagtttattttgaagattaaatgaggtaatgggttgaatatgctacagacacctaataaatactagtgctcttcaccttccttgttttctgaaccgcttatttggtgttttttgacccagtacactagcccctgctttttccatactgagaagtgagaaaaaataattcaacaatacatacagttttttagtttcactagtgatgaaatccatattaaagtcatacactatattgtgaagaattggaaatattgatcaatcctttatttattagagtaatgggataataat

SEQ ID NO: 162331 - DNA, 599 bp, Homo sapiens
ccattttaaccttctcctagcttctcttggagatcatctttttctcaccctctgtgcaactattcttggtgtagttaaaacatgaatgttcccccatccattcacttttgcatgctaagttattccagtcccattctatgtcttatttttcacagctgactcatctttgtgctgtcatagtttagtacaactatttggtagctagagaaatttagattctaatcttaggtctcccactttttgtctggctataagccttagacacaattacagaggcccagcttcctcattctaaactagagtcaayacagtttattttgaagattaaatgaggtaatgggttgaatatgctacagacacctaataaatactagtgctcttcaccttccttgttttctgaaccgcttatttggtgttttttgacccagtacactagcccctgctttttccatactgagaagtgagaaaaaataattcaacaatacatacagttttttagtttcactagtgatgaaatccatattaaagtcatacactatattgtgaagaattggaaatattgatcaatcctttatttattagagtaatgggataataat

SEQ ID NO: 162332 - DNA, 536 bp, Homo sapiens
gtagagggatttctctccagtaagttttattccaccggccattgattctggcaaactgcatagaatcagcctaaaatcaagatttgtttttatctatccccttcacctatatgccactgtgctcctgctgctgttgtggccaacattaagtacaagcaggtgtctaggatcacagtgctgcctgagctaattcgttaggggctagagagtcactcatttaaaatcttggaaaggggagaacagctataaaatctttcatgtccttcttaaatctttcagcttccttagcataatgtcagtgactaaatagttaattctgagactctggaataatccctcattccattaaaataatcccccattctcttaagagacagtctagaatgcagcagttgaagaaaccccaaatccacccaacatgaattttctagctgagagggggcagaattaaatgtttcagaggacagatggaagacctttatttccttgaacattttawtcataagacaagataatttgatatcagatttgaattc

SEQ ID NO: 162333 - DNA, 602 bp, Homo sapiens
taatcttgtcttctcactttatttcattaagttgatcttcaatcactgatctcccttcttccacttgatcgattaggctactgatacttgtgtacacttcacaaaattctcatggtgtgtttttcagctccatcaggtcatttatgttcttctccaaactggttattctagttagcaattcatctaacttttttcaaggttcttagyttctttgcattggattagaacatactcctttagctcctttattacccaccttctgaaggctacttctgtcaattcgtcaaactcattctctgtccagttttgttctgttgcttgcgaggagttatgatcctttggaggaaaagaggcattctggtttttggaattttcagcctttttgcgctggtttctccccatctttgtggatttatctacctttgttctttgatgttggtgaccttcagatggggtctttgagtggtcatgccattcctttctgtttgttagttttccttctaacattcaggcccctctgctgcaggtctgctggagtttgctggaggcccactcctgaccctgttttcctgggtatcaccagcagaggctgtagaacagca

SEQ ID NO: 162334 - DNA, 579 bp, Homo sapiens
tgctggcagcgagaattccaagccagcagatcttagtttgctgggctccttggaggtgggacctgccgagccagaacacttggctccctggcttcagcacctctttccagaggagtgaacggttctatctgcctggcgttccaggtgccactggcatatggaaaacaacaacaacaacaaaaactcctgcagataatatggtgtctgccccaacagctgcccagttttgtgcttgaaactgagggccctggtggggtaggcaccagagggaatctcctggtctgcgggttgcaaagaagacagtgggacaagtgcagcgtctgaactggagtgtgcatggttcctcaggctcatttcctcacggcttcccttgggtrggagagaaaattccccaaccccttgagcttcctgggtgaggcgatgccccagcctgcttcagctcaccctccgtgggctgcactcactgtccaaccagtctcaatgtgattaactgggtacctcagttgataatgcagaagtcacccgccttctgcgtcaatctcactgggagctgcagaaaggagctgttcctattcggcc

SEQ ID NO: 162335 - DNA, 579 bp, Homo sapiens
tgctggcagcgagaattccaagccagcagatcttagtttgctgggctccttggaggtgggacctgccgagccagaacacttggctccctggcttcagcacctctttccagaggagtgaacggttctatctgcctggcgttccaggtgccactggcatatggaaaacaacaacaacaacaaaaactcctgcagataatatggtgtctgccccaacagctgcccagttttgtgcttgaaactgagggccctggtggggtaggcaccagagggaatctcctggtctgcgggttgcaaagaagacagtgggacaagtgcagcgtctgaactggagtgtgcatggttcctcaggctcatttcctcacggcttcccttgggtaggagagaaaattccccaaccccttgagcttcctgggtgaggcgatgccccagcctgcttcagctcaccctccgtgggctgcactcactgtccaaccagtctcaatgtgattaactgggtacctcagttgataatgcagaagtcacccgccttctgcgtcaatctcactgggagctgcagaaargagctgttcctattcggcc

SEQ ID NO: 162336 - DNA, 614 bp, Homo sapiens
attctcccatgtagtagatgctcaktaaatagttgctaaatgaataaatgagtggatggctaatatacatgcatggctacctcaccatctttttttgtatacaaagcatgccctttgtgcagttctgctatactgaggtaaatcctttttaattcctcctatctgattctctcccacagtaatgtattggaatccaggaaaaactgcaatccttggaatgtactttaatctagctcttcagacttcctctgatcctgcttactgtatttcacttggggaattaagttatctgaattcagtgcaacattgcaagtctctccctgtttgtgtttggaagttgtagtctctgaatgaatgtaggaacactaggataatcccacaaagtagcaattccagaggaaaaaaaaatagcccctcattttcctggtttgtacaaaacaattatttgagccagaagccatttgactgaagaagaatttagatttttttatcttttctcagatgggaagaattgcttatcttcttgaaacaaagcatgagtaagatatcaaatacatttctcaattaatggaaaatctactctggttctaagaaaagattaacaattataatgt

SEQ ID NO: 162337 - DNA, 559 bp, Homo sapiens
agttgctaggaaagcaaatttagttgtggcactccctgccagcactatttatttcatgttgcttcctttgctgacactggtacatgtcctggggacaataaccttggtgtcatcactgtgtgcctgcttgtgttgactccttctcgtcctataataaattctcaatatacaagtttgagatgctttctgagagatttggcattaaaactttctttcttgaggcctgagaaataaaagggaaaatacaccatggctcccttccaccaggctgacgtaggaagtccagtgccaactccttccagaaaggtgccactcaattcctgcatctccacagaacctccatagctgctgcatgcctcttcgtggaaggaaaggcaaactacgggactatttacacttcaggatccctgatttccctatatcacttcaggatactccaagatgacagcaattctttcctaccacactggttttataggttttaggtaaccaactggatggtgagacagatttgactttgctgacatcaaacwctttgtcacagctttctctccaaaaa

SEQ ID NO: 162338 - DNA, 395 bp, Homo sapiens
tcaaggtctcaagctcatttgagataatgactattgtattgtatgacaaaacacacttttctatacagataaattcttatgtaattcaacactcatggacaagatgtaatcattacaaatataattatacagagagaaaaaaaattattcacagaatttttattgaagaagtgaaggtgaaattaacctcttttagctgaatacaatacatttcaagaataagtggttaattttctggaaatgatgaatttgaggtagcagttayattattctgtgtaattgttgtactatgttgtatctgtctacacagagtatagaacctattgaatttctatgtctaacttgaagtgctaatgtaggactatatttttcaaaaagtataaattgttaactca

SEQ ID NO: 162339 - DNA, 506 bp, Homo sapiens
ctagtaatgacaactgagaggttttctatggaaaacctgtttcagtccaaatcaggkttatagtatttacagtgacatgattagttgtatttaacagactgttagtatctcatttaagagactgcttgtatctcattaattgtactttcctcagctccacgcatttatagcaaatcaatatttaatttcacaacaatcttttaggcacaattatctcaaatatttgaaagactttttcatgaataaaatggataattttaaatcttgcttctgttgtacagaataattgacaacccaacggcctaaggtagttagcaaatgtgagtcccacagtaaaagccaaaaatgcaattctcaccgtgccaggcactgtgcttgacaagtgaaggtgaaaggtaaataagaaatggttcttccctcagagggccctagtctagtgagagacagccaaatgaacaatttcataaagctatgctagagggaaggataagatgctaagggagcca

SEQ ID NO: 162340 - DNA, 466 bp, Homo sapiens
gtcttctctctgaagtatactttcaagtagtaactgatttagcaagctcttacacaattagatcaaaygtgcgcttcagtcttctgcctttctgcactgccacacattcctgtctagtggatttttttttttaggcgtggatttttaagaagtgagattttgttgtagttatttagccagtgtcttattttagtgttttctggttttccactgtttgtagcttgttttaaattgaaatctaatttccttttatatctggactgaggacccatggctatttgtaaaatggattaaatttaggtgttttaatcaagtgtaggaatgataaacttgaatccagggcaggcccgaacttttttttttttcatattccctttgttactccacaaacaaccagagctgtcacgtgtaaaaatggtgatcctataataattcttatatttaccacactcttagttgcataatc

SEQ ID NO: 162341 - DNA, 181 bp, Homo sapiens
gcattgcaggtcccagtgcttggtctggttaatgcacagagctgattatttaggggggatgwcttgtagcaactcacaaaagactgaggcatataaattagaaagccactgtagtaatttacaatgaaaaatattactgttaactggaccagacatttgcatcagtctggccagtgaattc

SEQ ID NO: 162342 - DNA, 478 bp, Homo sapiens
aggggaaataccagatgcttataaaaccatcagatttcttaagaactctctcactatcacaagaacaacatgggggaaactgctcccatgatttaattacctctacctggtcctgcccttgacatgtggggattattacaattcaaggtgagatctgggtggggacacagagccaaaccatatcagcatcctaatctggctccagttstcaataggaatagtttgaggttctgcctatttagtatgatgttggctgtgggtctgtcataaatggctattattttgaggtatgttcctttgatggttttaacaggaagggacgttggattttatcaaaagcttttctccatctattgaggtgatcatgtggttttcacttttgattctgtttatgtgatgattcacatttattgatgtgtatatgttaaaatagctttgcatcccagtagtagaatctagttgattgcgattgattaac

SEQ ID NO: 162343 - DNA, 579 bp, Homo sapiens
aagctggggcatgtgtggtatctagggctgcacggggaaatctggaactgggatttgtgggtgccactcttatgctagtgaagacctgaaggctgtgttcacaattatctgcctggacttcaaggctgtggaatgtggtctggctggggcgcaggcctgaaacatgggactgtcagggctcaacctggagcctatgactgaagagaccatcatgaaagctggatctgtagagtccaacatcatgctagagtggaccttgaggctaggcacatgagtggtgactttgtgacagggggggctatgatgtctggactggaggctgggttgatagctcctggctctcatagggatttcttagctcttgtgagggtatttttgagtatgaacagttgttcarattgattcttctataagggtacaaatacttgaaaattttgttttgccttcctattgatgtcattaacttctgaaataaaattcccgtacatatacagatttgtattatacctcattatatcatgttatattccataaaatattataggccacatataattttatacaaagtaataattctac

SEQ ID NO: 162344 - DNA, 622 bp, Homo sapiens
atctaaaaatgtacagtttacaagaaaaaactaaggaaggatttttttaaaaaatgaaaataaatcagcccccaaaattaaaaactaaatttaaatataaatactagttatataaaaacattaaccaaaaaacaaagacatggaaagcaagaaagcaaaaatatacaaaataattaacaaaaacatataaataaaatcatgaaataacaaaaatcatgacagaatactttctatatctgtacgcaaatatgttgtatacttaggtaaggaggaaattttcctagtaacctacagtaagtaaaaacaatcctgagacacagagttgaaatagatgggtttcactggagaatagtgaaaggtaaagaagaaaaaaacaaaacaaacaaacaaaaaaacatcctaccaaaattagaaccagagttaggtggttccacaggggcggtctataaaatggttaatatttatttgtgcaattgctacataagttgttcatataacttatgtagttatatccttcacttcataaaagtgaaggaagayttccaaattacttcttatgagacagatatatcattaaatggtgaatggtggtagcagaaaacaaaacaaacaaaaaacaaat

SEQ ID NO: 162345 - DNA, 549 bp, Homo sapiens
tgtactaccgtcttcataccattcatcatacttctttattgcttccctgcatgagcctctattaggttacacttttcatgaggcagctacagcgtctaccttgttttccattgtgtccctattatgtaatcgagtgcctgctatgctgtatttataactgggaacaytttaattaaagtgttgtattaataaacctgtagtaccattcaggatcccttacatacaccattaatgctccatataccatacacattaatatgttacatactgggtaaaactatatatgattaagtggtaggttcataggaagtgttataggtgttacaggtcaaaataaatctctgtgaatgggagagtcgtggaagacttgctgggattaggaggaagttgaatagtatcatgaacaaaaagaaagaaataggtaaaagaagatagtggggcattccacacagtggcatgtacatttgtgatgtgatgaacaaatcgtaattaaatgcaatcaaaattttgactttgtgtattgattgggtaggaaaaattatgttgaga

SEQ ID NO: 162346 - DNA, 587 bp, Homo sapiens
cagcgtctaccttgttttccattgtgtccctattatgtaatcgagtgcctgctatgctgtatttataactgggaacattttaattaaagtgttgtattaataaacctgtagtaccattcaggatcccttacatacaccattaatgctccatataccatacacattaatatgttacatackgggtaaaactatatatgattaagtggtaggttcataggaagtgttataggtgttacaggtcaaaataaatctctgtgaatgggagagtcgtggaagacttgctgggattaggaggaagttgaatagtatcatgaacaaaaagaaagaaataggtaaaagaagatagtggggcattccacacagtggcatgtacatttgtgatgtgatgaacaaatcgtaattaaatgcaatcaaaattttgactttgtgtattgattgggtaggaaaaattatgttgagaagaagcaggtaagaagattgaaaaggaaaagtgttattatgaagggatgtgagtgctgggctctagagcctcagtgttcttctgtggacattggagttccatttacctccagtgattattgagcagg

SEQ ID NO: 162347 - DNA, 562 bp, Homo sapiens
aaggaacagaaaagagtagaaattcaagttctgaggatctaacatttttcatttactttttaattgatacataataattgtacatatttatggggtacaatgtgatgtctccatatatttatgcattgtataatgatcaaatcagggtaatcagtataactatcacctcaaaagcatattgtttctctgtggtgagaccattccaaatcctaccttgtagttgttttgagatatacagtatacctatcttgtagttgttttgagatatacaatatatacagtaggtatatacaatatacgtatcttgtagttgttttgagttatacaataccttatgggagtactcagagtgtggaatgttttatctctctgagaaggggtaggatamaaaagttgggcaaccagttgatggagtcttggagtaactctgaatgattacagcttctatggcatttgcactggtgtgtgaagatgttgttaactaactttcacatattaaataaaattttaacaaatcatgttgagcaatgtgatcagagactaaagaggtaaagaaaagagg

SEQ ID NO: 162348 - DNA, 578 bp, Homo sapiens
aacctcatgaaccaatctctgctagctgcaaacttttcttctgaagttttcccacttctcccagccctyatataattgagtagagttagggccttgctctgaattaggtgttccttaagagaatgttgtggctggtttgattctacccaagccacctaaacttcccctgtatcagcaataaggctgttttgccttcttatcatttgtgtgcttactggagtagcactttaaatttccttcaagaacttttgttttgcattcataacttggctgtgtggcatcagaggcctagctttcatcctctctctccttttgacatgtcttcctcactaagcttaatcatttatagcttttgatttaaagtgagagacatactactctttctttcacttgaacacttagagcccagtgtagggttaatattcacctagtttcaatactgttgtgtcttagggaatagggaaacctgaggagagggagagagatgagagaatggcccgtccattgagcagtgagaacacagacatttattaattaagctccctattctatatgggtgcatttcatggcaccccaaa

SEQ ID NO: 162349 - DNA, 578 bp, Homo sapiens
aacctcatgaaccaatctctgctagctgcaaacttttcttctgaagttttcccacttctcccagcccttatataattragtagagttagggccttgctctgaattaggtgttccttaagagaatgttgtggctggtttgattctacccaagccacctaaacttcccctgtatcagcaataaggctgttttgccttcttatcatttgtgtgcttactggagtagcactttaaatttccttcaagaacttttgttttgcattcataacttggctgtgtggcatcagaggcctagctttcatcctctctctccttttgacatgtcttcctcactaagcttaatcatttatagcttttgatttaaagtgagagacatactactctttctttcacttgaacacttagagcccagtgtagggttaatattcacctagtttcaatactgttgtgtcttagggaatagggaaacctgaggagagggagagagatgagagaatggcccgtccattgagcagtgagaacacagacatttattaattaagctccctattctatatgggtgcatttcatggcaccccaaa

SEQ ID NO: 162350 - DNA, 578 bp, Homo sapiens
aacctcatgaaccaatctctgctagctgcaaacttttcttctgaagttttcccacttctcccagcccttatataattgagtagagttagggccttgctctgaattaggtgttccttaagagaatgttgtggctggtttgattctacccaagccacctaaacttcccctgtatcagcaataaggctgttttgccttcttatcatttgtgtgcttactggagtagcactttaaatttccttcaagaacttttgttttgcattcataacttggctgtgtggcatcagaggcctagctttcatcctctctctccttttgacatgtcttcctcactaagcttaatcatttatagcttttgatttaaagtgagrgacatactactctttctttcacttgaacacttagagcccagtgtagggttaatattcacctagtttcaatactgttgtgtcttagggaatagggaaacctgaggagagggagagagatgagagaatggcccgtccattgagcagtgagaacacagacatttattaattaagctccctattctatatgggtgcatttcatggcaccccaaa

SEQ ID NO: 162351 - DNA, 578 bp, Homo sapiens
aacctcatgaaccaatctctgctagctgcaaacttttcttctgaagttttcccacttctcccagcccttatataattgagtagagttagggccttgctctgaattaggtgttccttaagagaatgttgtggctggtttgattctacccaagccacctaaacttcccctgtatcagcaataaggctgttttgccttcttatcatttgtgtgcttactggagtagcactttaaatttccttcaagaacttttgttttgcattcataacttggctgtgtggcatcagaggcctagctttcatcctctctctccttttgacatgtcttcctcactaagcttaatcatttatagcttttgatttaaagtgagagacatactactctttctttcacttgaacacttagagsccagtgtagggttaatattcacctagtttcaatactgttgtgtcttagggaatagggaaacctgaggagagggagagagatgagagaatggcccgtccattgagcagtgagaacacagacatttattaattaagctccctattctatatgggtgcatttcatggcaccccaaa

SEQ ID NO: 162352 - DNA, 576 bp, Homo sapiens
tatatgcatatatatacacacataatattttgaataaggtgtgtatatatacatagtaaatatatatatatatttacgcaagaaagctatatgtatacatagtatatatgtgtatatatgtgtgtatatatactatatatgatatatacactgtatacatatacatatacatatattcacatatatacagacatatgtgtctatagatacatatatatatacagacacatatgtgtctatagatacatatatatatacagacacatatgtgtctatagatacatatatwtacagacacatatgtgtctatagatacatatatatatacagacacacacgtgtgtgtatgtgtgtgtatgatttttctctctctctcacaatgtcaaacagtccctctcctatagcagctggtattaaaaggtgaacccttgtattacaaacctgcctctctccagagttttgctctgtaaatgttgcctgccttgtttgtgggggctatacaactacactgcaccagcagcagcagcaccatagccatcactatcatcattgtcattatcatcatcattctttccc

SEQ ID NO: 162353 - DNA, 617 bp, Homo sapiens
ctggagacaatagtatctacacatttagagtgggggcaatgggaatgaagaaattcagacatattcaaaaaatgctcataattgcttggggaagaggaagtaatggacagaaggagacagagcatttgaaataagaagataaagtatactagtgttaaaagtatggatacattaatttcaygggatgcttgtggctgaaattctatacccaaattaacatgttggaactgagagagacaataatttcctttattatgatatgaaactagttttccttaaaactgacaccaaaagcagatattaacaatgaggcttctttattatttaatgaaaactagaagtaaaaaacaaacactagaattttttttttaatgactgataaaaaggtgtttataactgctccctatgatagacatttgcagcatgaattagaaagtggggcctggggagacaggagtctgacaaaagtagctgcagaaattagctgtgtgtaacaaaattcaaccccacatcctggtggtagagggaaatccaaagaaatcaatcaaaaatgttatttaattttagaaaaggggacagtgataaaatgacatcattagtaaagaaaaactacaaat

SEQ ID NO: 162354 - DNA, 649 bp, Homo sapiens
ctgggggatcccaaagcttgagaactgaggccacttcccacaatgtgctaaactctatttagcaaaatcttgaaaactcctctttagaaagaacaatattcccggggaggaaaagctatttgctttgcccaaatgagaccagaaaattcagagaattgttactatagtttactatgttatcactgaaaaagactggggggcttttttttttaatagaagatctcctgaaatataattatctggtttcgtgttccattacaccttcctcatcctttagaagtamctttcactcataagaccccatggctgagtaatgaatatcccatagttttactcaaacttaagaggagcatgtattcatgacatcattcttagcattttatcagaagagctaaattcctagagttaaatggaataggaaggaaagggattaacctctgctgctggcatagtacagtcacgatgctaatgtctcaatatgaaaaagctgaattgcagcaatatctgaaatcacagagaaagtcctgtgagctttgaaggaaaaaatgtaaagaaataaaatgtaaaaagccaaagcaagattgggactctatttttcatttagacatgcttagtagaagaatcatgtattgcaagagctcacaaatta

SEQ ID NO: 162355 - DNA, 403 bp, Homo sapiens
tttagttccttgatttgctttttttatgaattattaactatattgggaatgttgcttttgaaaattttaataatmatttccttcctagagagaaatgtagtgtttttctcctattctcatatcatgaagtagtatacaatgaaatggtaacaaataactgaagcctatgtctaagtaaggtaaaatttttttttcttttgtagattgtctgtaagaagctaggtaaagacaaaggaagagacaaatcaaattgaataatagcaaattcaagagttttggtaaggaaagtttatcaatatagcagacacaaatgtttgcaactgaagatacaggcaaaattgtccatcatatattcctacctttaaaactcaaactcatttccaaagtcataagttattccttt

SEQ ID NO: 162356 - DNA, 457 bp, Homo sapiens
agtggaataggatgcagggacaagtctccaaagcaagtaatgagttaaatcaaatgtcctcatcccttggccaaaacttgtagcagacaagaagtgctggatcagtaactaaaggccagccctggaacatatttttaatctaataaggataaataatttctgaatcatgaggctgaggtgttccatacctctatgccatagctagtattayagcttaggaactagagtatatcttagtgtacagaggaagccattagtgggaggcaatatggatatgatgaaagagcataggctttggggtcagaaaggcctggattcaaatgcctattccagcctttgataactgtatgacaattgtcgaatctcttaacatccaggcttttctttgcttttctataatatggaattaataatttctacctcaaaatattaaatgaactaatatgtttgcatctgc

SEQ ID NO: 162357 - DNA, 573 bp, Homo sapiens
tcctggacaaccttttacaagtcatttacattaacagacagtatttattgtcatgttgttctgggaacatatcagttttcataaagttagctctggtgcaatacagtaagagcagatgcttaggcaaccttggggcactcaggatcctctgaaacaagtgaagttttgaaaaggctgcttgtaccttagggaagcctggggtaaaggcccagacttctggggtgacccagaggtgcctcgtatactcacaacatctgtgcatgtcattacatggccacytgtcaccctggaaaacttctgaaaagtccacattgtctggcttactttgtggaaaaaaaatagcctggctactaaggctaagacttcccattttcatttgtaaatgatttctctttatttgatgttgttccatttttaacaaatctattaggactaggataatgaaccatgagggttattgacaataactttgcccataggaaaagcggatagtatgttagaaacaggcttatttaaaaacagaaataaattgatcaggttaatcaaatgtgaaattcagaaggttatgctagt

SEQ ID NO: 162358 - DNA, 420 bp, Homo sapiens
ctagaaggagaatactgaatgttcccaaaaaaaaggcataagtaattgagatgatggatatgctaattactctgatttgatcactatacattatatgttttaaaatatcactatgttgcccatgartatgtataattattatgttaattaaaaattttttaagccatgtgctgtggctcatacctgtaatcccagctactcgggaggctgaggcaggaggatcacttgaggctaagggttgaagaccagccagggcaacatagcaagaaccacctctaaataaataaatgaataattttaaaaataaataatcaacagagtaaaaaaattaaaattaaatattttttttaaaaagtaaaaagtcaaagaaaaggcagaagaaatcattaatttaattagtttgaaaaactgttggcaata

SEQ ID NO: 162359 - DNA, 478 bp, Homo sapiens
gggataaaagactacaagttaagtttagtgtatattgctctggagatgggtgcaccaaaatctcacaaatctccactaaagaacttactcatctaaccaaatatcacctgttccccaaaaacctatggaaataaaaattttwtaaaaaaagcttaatttttgtctttggttgggtgcagtggctcaggcctgtaatcacagcactttgggaggctgaggaaggcagattgcctaagcttaggagtttgagacaagcctgggcaacatggcaaaaccccatctctacaaaaaatacaaaaattatctgggcatggtggcatgcgcctgtgatcccagctacttgggggctgagacaggagggttgcttgggcccaggtggttgaggctgcagtgagctctgttcatgccacttcactctggcttatgtgaaaaagtgagaccctgtctaaaaaaaaattaaaataaaaattaaaaaaca

SEQ ID NO: 162360 - DNA, 478 bp, Homo sapiens
gggataaaagactacaagttaagtttagtgtatattgctctggagatgggtgcaccaaaatctcacaaatctccactaaagaacttactcatctaaccaaatatcacctgttccccaaaaacctatggaaataaaaatttttwaaaaaaagcttaatttttgtctttggttgggtgcagtggctcaggcctgtaatcacagcactttgggaggctgaggaaggcagattgcctaagcttaggagtttgagacaagcctgggcaacatggcaaaaccccatctctacaaaaaatacaaaaattatctgggcatggtggcatgcgcctgtgatcccagctacttgggggctgagacaggagggttgcttgggcccaggtggttgaggctgcagtgagctctgttcatgccacttcactctggcttatgtgaaaaagtgagaccctgtctaaaaaaaaattaaaataaaaattaaaaaaca

SEQ ID NO: 162361 - DNA, 478 bp, Homo sapiens
gggataaaagactacaagttaagtttagtgtatattgctctggagatgggtgcaccaaaatctcacaaatctccactaaagaacttactcatctaaccaaatatcacctgttccccaaaaacctatggaaataaaaattttttaaaaaaagcttaatttttgtctttggttgggtgcagtggctcaggcctgtaatcacagmactttgggaggctgaggaaggcagattgcctaagcttaggagtttgagacaagcctgggcaacatggcaaaaccccatctctacaaaaaatacaaaaattatctgggcatggtggcatgcgcctgtgatcccagctacttgggggctgagacaggagggttgcttgggcccaggtggttgaggctgcagtgagctctgttcatgccacttcactctggcttatgtgaaaaagtgagaccctgtctaaaaaaaaattaaaataaaaattaaaaaaca

SEQ ID NO: 162362 - DNA, 608 bp, Homo sapiens
tggtatggaatcaagaaaaaaaaaagaaatttgaatatagaatatatatgccaaacaagtattatctttaaaatatccttgaaaagctacattcattactcaaaatgtcttggggggtcccctctgaaattgtcttcagggcttggcatggtggctcatgcttacaatttcagcactttgggaagccaaggcaggtggatcacttgagcccaggagttcaagaccagcctgggcaacatagtgagaccttgtctctagtaaaaaaaagaaagaaattgtcttcaggatcaatgctaaaaacattgaacacttactatatactaatataagtcactgctaaaggctagtcatacaaaactgaaggcacttaaaccaaaaacttagtagttctagtagctatactaaaaratagaagtcaacacaaagtactattagagctcagagagattaacttacaatttggaaaacagagaaactgtcattatatagatctctaaagataagtaggaattcagcaggaatgatgaaggccacattaaaacttctgcaaaaagggggtaataaatataaatcaatgggaataaggaaaggctattccataaggaaca

SEQ ID NO: 162363 - DNA, 576 bp, Homo sapiens
cagtaaatggaaatttctccagaggtcctcttcagtaaaggaactaaaggaaaggaaagcagattgtgagaggacttttaattctcacctaattactaattaggacttctaattactgccgatagccctcagatgtttcttagggtctctttctaggcatacayataaccatcttcccacattggatccctatcacaccttgacaataatatgataatgttccggactcccaagttctaatctgcaataaaaacactactttttctaattaaaaaatagtgcatactcattacatttagaaaaactaaaaacattaaatataatgaagaaatcacttcttatacaaaacccttatgattttgctgcatttacttacatcccttttaaagtgataatgttcataattacacataaacttacaagcagttttaatttttaatgggactcctctatagaaattttagtgtacagtttccttcaattaatatttactataagcatattaccagtgaatgctaaatatgctttaaaggtataacctttaaatgactttataatattctgtcataatgaagc

SEQ ID NO: 162364 - DNA, 576 bp, Homo sapiens
cagtaaatggaaatttctccagaggtcctcttcagtaaaggaactaaaggaaaggaaagcagattgtgagaggacttttaattctcacctaattactaattaggacttctaattactgccgatagccctcagatgtttcttagggtctctttctaggcatacacataaccatcttcccacattggrtccctatcacaccttgacaataatatgataatgttccggactcccaagttctaatctgcaataaaaacactactttttctaattaaaaaatagtgcatactcattacatttagaaaaactaaaaacattaaatataatgaagaaatcacttcttatacaaaacccttatgattttgctgcatttacttacatcccttttaaagtgataatgttcataattacacataaacttacaagcagttttaatttttaatgggactcctctatagaaattttagtgtacagtttccttcaattaatatttactataagcatattaccagtgaatgctaaatatgctttaaaggtataacctttaaatgactttataatattctgtcataatgaagc

SEQ ID NO: 162365 - DNA, 576 bp, Homo sapiens
cagtaaatggaaatttctccagaggtcctcttcagtaaaggaactaaaggaaaggaaagcagattgtgagaggacttttaattctcacctaattactaattaggacttctaattactgccgatagccctcagatgtttcttagggtctctttctaggcatacacataaccatcttcccacattggatccctatcacaccttgacaataatatgataatgttccggactcccaagttctaatctgcaataaaaacactactttttctaattaaaaaatagtgcatactcattacatttagaaaaactaaaaacattaaatataatgaagaaatcacttcttatacaaaacccttatgattttgctgcatttacttacatcccttttaaagtgataatgttcataattacacataaacttacaagcagttttaatttttaatgggactcctctayagaaattttagtgtacagtttccttcaattaatatttactataagcatattaccagtgaatgctaaatatgctttaaaggtataacctttaaatgactttataatattctgtcataatgaagc

SEQ ID NO: 162366 - DNA, 551 bp, Homo sapiens
gctatgcattgctgagtctatcattcatttaaatatttggtttctaataaaaattatgctgtcaacatcaactgtttttcttcatttatttaaaatctaaaaataatttaatattttaacatttaaatattttgctgtaaaatttaaaccatttaaactatttaaattaaattatttaattttattgttgaaacatttaaatttttaatatatttttgacttactataaagcagtatttgttcacatasagaacacaatgaaaaaattgaaaaaccaaaacataactttttagtaagcctaaggctgttactcaaatacaggcatacctcattttattgtgtcttgctttattgtgctttacagatactgttgggattggttttttgttttttgtttttttttaaattgaaggtttgtggcaaccctgcattagcaagtctatcagctctcagtgccatttttctaacagtatgtgctcccttcatgtctcaacgtcacattttggtaattttctcaatatttcagacttttccattattattattatatc

SEQ ID NO: 162367 - DNA, 551 bp, Homo sapiens
gctatgcattgctgagtctatcattcatttaaatatttggtttctaataaaaattatgctgtcaacatcaactgtttttcttcatttatttaaaatctaaaaataatttaatattttaacatttaaatattttgctgtaaaatttaaaccatttaaactatttaaattaaattatttaattttattgttgaaacatttaaatttttaatatatttttgacttactataaagcagtatttgttcacatagagaacacaatgaaaaaattgaaaaaccaaaacataactttttagtaagcctaaggctgttactcaaatacaggcatacctcattttattgtgtcttgctttattgtgctttacagatactgttgggattggttttttgttttttgtttttttttaaattgaaggtttgtggcaaccctgcattagcaagtctatcagctctcagtgccatttttctaacagtatgtgctcccttyatgtctcaacgtcacattttggtaattttctcaatatttcagacttttccattattattattatatc

SEQ ID NO: 162368 - DNA, 489 bp, Homo sapiens
ttaaccatcttatattcccaccagtaatgcacgagggtttcaacttctttacctcctagccagcacttattttccattttttgtattatagccaacctggtaggtgtgaagtggttctctcattgtgtgtttccctaaactagtgatggtcagggtcttttcatgtgtttgttaaccatttgtatatctactttgaagaaatatctatttatgtctcctgcccattttcttaaattgggttgtttttgttgttgttgttgtttttgagtttaaagagttctttatatcttttggatattaattmtttatcagatatatgatttgcaaatattttctcccattgagtagattgccttttaatgaaggtcatttatcaattttttccttgtttgcacttttgatgtcatatccatgcaatcactgccaatgcaatcaagatttcctatagtgttttcttctaataattttatattttttaactaagtttag

SEQ ID NO: 162369 - DNA, 451 bp, Homo sapiens
tttaaggtggccagcaaaatacttgtttgctggagtttcaggtgcagtctaaaagtgcatcctaaggaaggaggcggcattcctttttctacctataataagccagagagttttagagatgccagttttggagactctaggaattataggcaactgaactactgcaagagcttcctaactattaatctgcttccactgttcctctttccaatctattcttaaaaktaacataagtttcctcaagtatgaatcagattgtgtcacttccttatttacagcctctcatggcacaccaagatcattcataagccaatatagttatagtataatcttctgccactctcaccaccacttaccatattatattatgggctatcgctcaaacaggaaattctttcatgttaatctattgattttcgcacatctaaatagaatgtactactcctaaagc

SEQ ID NO: 162370 - DNA, 571 bp, Homo sapiens
ctttgatgacttacctatcatgacatttcatgtttaacatgggactcaaaccagaagtggggttttcatgtaagaatcccctcccctagtcatgatcttmccatattttgtgattctttggaagtggaagataatgttgttagcatatgcttgagggtgataatatggatgtaaggaacaagaaaaaatgtgttttctaaaatatggctcctagagggacttcaaaagtatgctttctcagcatccaaatttgtttgacttatttgaaactttaaaatacttccctgttagctcaaaccctgattggtcaggctttgtttttgcattgaaattagcttttctagaatagtaagattcacttaacccttttatagaaacaggtactaagctaagtactttactcattttaactaatttaatcctcagaataatattataaaataagtactatcatttttctcacttttcacatgcaaaaactcaggaacacagagggtaagtggcttgcttaaggtcacatagctagtaagcagcagatatttggaacctaggaagtctagtgccagagtcc

SEQ ID NO: 162371 - DNA, 571 bp, Homo sapiens
ctttgatgacttacctatcatgacatttcatgtttaacatgggactcaaaccagaagtggggttttcatgtaagaatcccctcccctagtcatgatcttaccatattttgtgattctttggaagtggaagataatgttgttagcatatgcttgagggtgataatatggatgtaaggaacaagaaaaaatgtgttttctaaaatatggctcctagagggacttcaaaagtatgctttctcagcatccaaatttgtttgacttatttgaaactttaaaatacttccctgttagctcaaaccctgattggtcaggctttgtttttgcattgaaattagcttttctagaatagtaagattcacttaacccttttatagaaacaggtacyaagctaagtactttactcattttaactaatttaatcctcagaataatattataaaataagtactatcatttttctcacttttcacatgcaaaaactcaggaacacagagggtaagtggcttgcttaaggtcacatagctagtaagcagcagatatttggaacctaggaagtctagtgccagagtcc

SEQ ID NO: 162372 - DNA, 560 bp, Homo sapiens
gaatgaatggtaaaaatcatggtttatctcctctgtaaagttctgattaattggaaaaaggatttgtgaggctagccttaaactgtagcaaatctgttgtattttgtgctatgaatttgtctttctgtatctttctgtcagaaagaggggtaccttaggatagaacaggggcttagggccccataagccctctgttcaagacagcmcagcaaactggtcagttatgtccttgggagcttgaccttgtaaccacgtggcactactttctcttggtctctgccatctggaggacagaaatttgggggttcatgaaatagtcagccctaaaaattatcttgctaaaagacttcacaagctcaaaattggctgctctagactccttctgggaagagcattggaaactgcccaatgctgtagctcagcagctaaagttttgccattttacgggggcagcctaggttcaatttctggcttagggaatgagtcctttctgggttgatacctgcatgacatttaccatttgttaattttcttcccctccaaaaaccatgttgaattgt

SEQ ID NO: 162373 - DNA, 597 bp, Homo sapiens
tttaggagtcaggcagctggaggctacaagattctgaccctccctaaactgctcctaagagcagtgcttgagatattttgcagaacctgcacttgatggatctgctggtaccacccagatcaatacactggctcatctgatcttgtgacccccacccaggaactgactgaaaacaggatgacaggtctgactccctgtgatttcatccttgaccaatcagtactcctggctcactggcttccccccacccaccaagttatccataaaagctctgctccccgaatgctcagggagattgatttgagtaataatccgtgtgaattattctttctctttgcaattcccctgtctccatgaattggctctgtttaagcagcaggcaaggtgaaccccttgggtggttacaaatttccatgtggaattctgcatccaagcagattccaaacacagcctatgtgagygtacatgaaacttccctgggttccagcaacactctctgggaaatggaggtgctgtagcctcaaagggagccaagcgtggtcctagtgcttcgggcccagggagaggtgagagctgctgtcccctgagccgggggcg

SEQ ID NO: 162374 - DNA, 465 bp, Homo sapiens
tctagtttttatgtgaaaatatttccttcttcaccatagacctcaaygtgctcccaaatatccctttacagagtctagaagaacagagtttccaaacagttaagtaaaaagaaaggtttaactctgtgagatgaatggacacatcacaaatcagtttctaagaaagctcctttcagttttaatgtggggaaatttcctttttcaccatacacctcaaagcactcccaaatagccctttgcagattctacaaaaacagtgtctccaaacagctcaatcaaacgaaaggttcaattctgtgagaggaatgaatgcatccaaagaaagcttctgtctagtttgcatcagaagatgcatcctttgtcacaaaaggcctcaaggtaaacccaaatatcccctcacagattctacaaacactgtgtttccaatctgctcaaacaaaagaaagtttaaacactgtgagatga

SEQ ID NO: 162375 - DNA, 586 bp, Homo sapiens
ttctttatatattctggataagtccctatcatacatatatgatatacatcaatttgtattttatgtacaaaagatttacaaatacattctttcattctctgggttgtctttttactttcttaatggtgtcctttaagatgtaaattttttaatttagtaaagtccagtttatctatttttttgggtcaattaggcttttgatgtcataggaaakaaaccatagcctgatcgaatgtcatgaagatttaccctatgttttctactaacagttatagatttagctcttatattttggcctatgatgtattgtgagttcatttttttttgtttatgccatgagaacgggatccaactctgttcttttgtaggtggataaccaatagttctagcatcctttctttttgaaaaagtttaattaaaaatttaagatccataaattaagaaatcaacactttagcatttccctttcaatgcagttacatgattgccttttccatttgttcaaatatttttttccttttcttagttgacatgtaataattgtacatgttaatgggatatagtgtgatatttccatacatgtata

SEQ ID NO: 162376 - DNA, 531 bp, Homo sapiens
aatgctcccactttgtgtcttactcccttctcccccaagagtcattctggccatttgctttgtcttcccctagaaaacagaatgctggctattctttaataaacktgtggttgcttgtgaatgcatgacatgtatttttaccttagagaaaacctaaatgtctcatatgttaatttttggacaaactttaaagttgactcatgaagaggattctcagtattcacatctttactttatgttctttacaaatgtctccaatttaaattaacagctcctcagaatcactgtccttaaactctggggacaaaattcttacttttcaaaaatgtcagattcttcaagagttataattcatacctttgccccagatacttgagaaaaagaatttctttttattttttaaaacaaaaattcttattagaaacccaggcacagaaactcatcatgtgtcagtgatagaacacttagggtgttgaaatacttgctatctgtatttaagtttgttgaagaatgctttgcacatggggacag

SEQ ID NO: 162377 - DNA, 530 bp, Homo sapiens
aatgctcccactttgtgtcttactcccttctcccccaagagtcattctggccatttgctttgtcttcccctagaaaacagaatgctggctattctttaataaacttgtggttgcttgtgaatgcatgacatgtatttttaccttagagaaaacctaaatgtctcayatgttaatttttggacaaactttaaagttgactcatgaagaggattctcagtattcacatctttactttatgttctttacaaatgtctccaatttaaattaacagctcctcagaatcactgtccttaaactctggggacaaaattcttacttttcaaaaatgtcagattcttcaagagttataattcatacctttgccccagatacttgagaaaaagaatttctttttattttttaaaacaaaaattcttattagaaacccaggcacagaaactcatcatgtgtcagtgatagaacacttagggtgttgaaatacttgctatctgtatttaagtttgttgaagaatgctttgcacatggggaca

SEQ ID NO: 162378 - DNA, 561 bp, Homo sapiens
gtgggcacgtccagggagaatctacatgtccatgatatccctgagccatgtggttcatcccaggtcagggtgtcatgcaaagacataacagactcatgacccaaggaaatacagtgaactcaaaccccttgttcatatatgtgaaagctcaggaatataggagaggctcagtaatactacacagcctcccttcaattccttgtcccttctgcttaccttgccccatcctccccctgcagtcccttgtcctccctcctcccctagaatatcaggcttttccctccccaaatgtcccctctatccctttctctggccctttatgatgtagatttacaaggcattctttccctatttagagaggctttctccctggagtgggtaagaagagaaaaaaaaacccctataattctgggattctcttctgtgaggtgaagagaagagggggctgggcaaaagctaaatkcccaatcaatcacacaagattgacatgagcctctctgcactgttgtatgcccttgttttgtgggcaaaagggaaaattgttatacagggaagtagttt

SEQ ID NO: 162379 - DNA, 561 bp, Homo sapiens
gtgggcacgtccagggagaatctacatgtccatgatatccctgagccatgtggttcatcccaggtcagggtgtcatgcaaagacataacagactcatgacccaaggaaatacagtgaactcaaaccccttgttcatatatgtgaaagctcaggaatataggagaggctcagtaatactacacagcctcccttcaattccttgtcccttctgcttaccttgccccatcctccccctgcagtcccttgtcctccctcctcccctagaatatcaggcttttccctccccaaatgtcccctctatccctttctctggccctttatgatgtagatttacaaggcattctttccctatttagagaggctttctccctggagtgggtaagaagagaaaaaaaaacccctataattctgggattctcttctgtgaggtgaagagaagagggggctgggcaaaagctaaattcccaatcaatcacacaagattgacatgagcctctctgcactgttgtatgccctwgttttgtgggcaaaagggaaaattgttatacagggaagtagttt

SEQ ID NO: 162380 - DNA, 610 bp, Homo sapiens
aacactagttgtttcacctgtgtttagttatatccacaaaggaaggttttttatctctttgagagttgaagactaggcagtattcctattttccttctgacattgtggctttaaaaatttttgaacagccaattgagagaaaaccacaacttatttcaaattagtgctataaaatatttctgtcattcaagttaatgatagcaaaggtcaactttacggcctcactcaaaaaggagtgtaatggagatatagacatacacattaccttcagcactatgggtttcttctatttgccccctgaaaataagtaagtatgccagcttgtctattgccaacttggccttaccaccagccttytaaggtctcttccactttgcggaggagatgttagggactacattcctgaatccgctgtcctgtatgtgtaattctggcttagagttggccaagaagaagcacgtgtgtaagatctggatgatgaaagagaaggagaagcctttattcccttgaggtagttgcagccagacatgtgggcagagatttcacagcaggctcctggtgagcccatgagaaacgtgctttatgaatgcagacagagagagttggtggg

SEQ ID NO: 162381 - DNA, 476 bp, Homo sapiens
ggcaacatatctctaatatcttcctccattgtcacatggccttatctttctccctggtctctgtgtcttcttctcttagaaggacaccagtcatattggattgtggtccaccctaatgacttcattgtaattacacctgcaaagaccctgtttccaaataatgtcacatccacaggtrctgagaattagggcttcgtatcttttgcctgcatttatagtcccagttacttgggaggctgaggcaggagtatcatttgagatcaggaattcaagaccagcctgggcaacatagtaaaaccccatctcaaacaaaatataccttttgcagggaggtcacaattcagcccataacatctttatcccatctttgacctcttttccaagaaaactgctttttaacagttacctgttctcaattcctctagaaattactcactcctgtgcatctcatatatttaaatccctaatactggatt

SEQ ID NO: 162382 - DNA, 476 bp, Homo sapiens
ggcaacatatctctaatatcttcctccattgtcacatggccttatctttctccctggtctctgtgtcttcttctcttagaaggacaccagtcatattggattgtggtccaccctaatgacttcattgtaattacacctgcaaagaccctgtttccaaataatgtcacatccacaggtgctgagaattagggcttcgtatcttttgcctgcatttatagtcccagttacttgggaggctgaggcaggagtatcatttgagatcaggaattcaagaccagcctgggcaacatagtaaaaccccatctcaaacaaaatataccttttgcagggaggtcacaattcagcccataacatctttatcccatctttgacctcttttccaagaaaactgctttttaacagttacctgttctcaattcctctagaaattactcactcctgtgcatctcatrtatttaaatccctaatactggatt

SEQ ID NO: 162383 - DNA, 537 bp, Homo sapiens
aaaaaaaaaaaaagcatcacagacacctattgtaggccaggtcttactaggggaacagtagatagttccttccttcaaggaacagagtcttggagagaacgccagctcttacggttattgaagtgaataatactgaggacacaacagtcagcatgcttctaggacacctccaggaatataaactcgtgtttatgtctaaggtaaatctgttgccacgtatgcgtgtgtaagtaatacagactattaaaaggtatttgtctgacccagttatatcatcsacatcacggtcaactttctaccaagatgactgtgggaaaaaatgtattaatatatgtggactatttccttacctctagaatttctctagttatatctttagcattttgttcattactggctaatgtacaagtttacttctgttccagctggtcattagtgatctatactcaatatgagaaaacaacatgatttgtttaatatctatcaactgatctgacataaagagtaacagattttctctttatatataagaatacc

SEQ ID NO: 162384 - DNA, 569 bp, Homo sapiens
agctctctttttcaggactataatctagagctgtcttttcagagaaatcatcccatttgcttatggagagcaccagagtacatagagtaggtcccaactgtgacctgaagaccctggggatgggggcggaggaggaggtagaaagtacaatggaattattaaaaccagtacacaaacctgtctgtgcgacaaacattatcrggaacctgagtaaaactaaaagtataactatagttacatggaccagctatgaaatattttaacattaagaaagaaaaacatacccaaaaagataagactacaccatagtgtgttacacaaaatatagctacatacttctttgtcaagcagttaataaacgtacttttccctctgaacattcatattttaggaaccattcatttaacttcctgtgctttgaaaagatgtatgatgtctttacatcttcaactagcttataaataccttgagtttagaagttttgagtttagaaatattatgtttactgacccccataaatagttcttgaaatattcattttaatgcttcttaatcctctaccctagcca

SEQ ID NO: 162385 - DNA, 381 bp, Homo sapiens
taagatcatgtcatctgcaaacaatgtggacaatttcacttcttccctttcaatttgggcaccttttttccttgcctgactgctctggctaggactcccagtattatgttgaatagaagtggcaagagtaggcattcttgccttgactctaatcttaragaaaaagctttcagtttttcatcattgagtatgaggttggctgtgggctaaccacatatcaccttaattataatatgttgaagtaatttctttctgtttctagtttgttgagagtttttatcatcaaaggatgttgaattttgtcaattgatttttcagcatctattgagatgatcatatgatttttatcttttattctgttaatgtggtgctaattggttt

SEQ ID NO: 162386 - DNA, 444 bp, Homo sapiens
gaattcattttttagttctaacagttttttttttaaatggagtctttagaattttcaaatatataagatcatgtcatctgcaaacaatgtggacaatttcacttcttccctttcaatttgggcaccttttttccttgcctgactgctctggctaggactcccagtattatgttgaatagaagtggcaagagtaggcattcttgccttgactctaatcttagagaaaaagctttcagtttttcatcattgagtatgaggttggctgtgggctaaccacatatcaccttaattataatatgttgaagtaatttctttctrtttctagtttgttgagagtttttatcatcaaaggatgttgaattttgtcaattgatttttcagcatctattgagatgatcatatgatttttatcttttattctgttaatgtggtgctaattggttt

SEQ ID NO: 162387 - DNA, 619 bp, Homo sapiens
tgtgttttagttattgacttgaggttttcttctttttaacatataaattttctagtatactattttaattttcttgtttctcttactatatctttattttcttagtggttgccttagagattacaattaacatcttaacttaaaataatctagtttggattaataccaayttaccgtcaattatatgtaaaactgcttcaatatagcttcattccctttctcctcctttgtgttattattgtcatagaaattatatctttatgacattttgggctggatgataaaagaaaaaaatttcaattaaaaaagtatatatttataaattataagcctatcaaacagcttgtcatcattgctttgcattcgtcttttaaattagaaagagttacaagcaaaaatgtgtttatattgtcttttatatttacaaatgcagttacttgtactggtactctttattttttcatgtggatttgagttactgtccagcatcctttcatttcccccggaaggtttccccttactatctgctgtggagcaagatctgctagtgataagattccctcagtttatctgaggatgtcttaatttctcctttgtttttaactggtggttttgctgg

SEQ ID NO: 162388 - DNA, 564 bp, Homo sapiens
aattgatcataaattttatgatctcaaaaattgaaaggaaayaaagttagaaaataccctccttagcagtaaatatcctgcatggttagcaaaatatagcaaaacagcagtctctctacttcttaagatgcagagcatttttatgtattcatagtactgcagggagatttgcacttttcagatgctattagcacatcttcacatctccaagaataacttcagatctgggatgttgcacatacttcccattttcttttgtaacaaatttttccttcaataaccccaatgattgggttattgagcaatgtaaaccaaatttctcctataaaaacttaactggcagcaagctttacttaaaagtaactttcagggaaattagttgggaactgatttattgttttgttttgtgtgtgtttttaatcttctgaagcaatgtttacatgaaaatcagaaaattagtaccttcatcaagaggtaattcagagagctttacaaataaacctaagattctcattgattacaaaagaaggctttgtacctccagagcccttaaatgttcagagg

SEQ ID NO: 162389 - DNA, 561 bp, Homo sapiens
gaattcaaatagaggctttctgaactccagggcccacacttaatctttattctgcattcctcccagggagccttcatgtgcacagcatggcactgactgcagaagtgtgcctagtattgccatagtcaaagggcacatcatgcactcagcttagaaaaagggacagttcccaaagagggggaaaaaaaagggacagttccttaaaaaaaaaatactttgtccccaacattccttataaaagtcaatttaatgaatttctcagactattattttagatccatcactcagtaacccttgtccatctatatccktactcctcttcccacctccagctccagatttcctgaacttttgtttctgctgcctgttcttgtcagaaactgtgcaaccttggttctgtgggtatgtgaatgtcaggttggcagggtgcagctgtgtggttccagatgaccagaagccacaagcggttgctgcttctctcttgggattggttggggagtgaagggcagaccgacggatgccttggttgtttttgtgtgtgggtatcatggggcttcaaac

SEQ ID NO: 162390 - DNA, 619 bp, Homo sapiens
ccgggaccggctgatccatgtgctggatgccgggcgggagtacagcctacagcagacgctggacgaacactcatcctccatcactgctgtyaagtttgcaggtgcgggcagggtgaatgagacacatcctgccactctcacccctgctgccatctgcctcccacctccatgagaagggtctgcccattgtgggggagtgttggacagcagctgggaggcctggagctggttgggaagataggtggaacagagactctcagtgctgggacttgagccaaccaggttggactgaggataaggagacaggaaaacctgggtttccaggtttaatttagttggttttccctggcatgtagagtagcttgatgggggatctcatggagggaaggtgggaggcaggctgctcccatgtggtgagaacagtgggaacagctgggcttccctccttcatagccagtgatgggcaagtccgcatgatcagctgtggagcagacaagagcatctacttccgcactgcgcagaaggtgagggcgctgggctttcctgagaggggcgggacagggcggggtctgccattccctgcctaaggttacaagaggtgaagggaggcgcaagtagg

SEQ ID NO: 162391 - DNA, 605 bp, Homo sapiens
gcattacttataaggggcagtttattcaatgatagtttattttattctctagagtatggacttcactaacagggaacagtcaaggcatacatctattaataaactgcaatatgagaatgaaaggctccgaaatgatcttgcaaaacttcatgtcaatggaaaatcaacctggactaatcaaaacacctatgaagaaacaggaagatatgcctatcaaagccaaataaaagtggaamaaaatgaagagaggtatgctggctccattatataagggcataagtttaaaaacatgtaattaaaatttatttttaaagaattcaaattataactttatacgctttctcttctgtggtttaaaatttataatgataatgcagtagatgagtagataatgtaggctagatacattgctttataagaaattgtgtcgatttgaaatgcgtggagtgttacagtggattttagtttgttagtcatctcagatctttttggaagctgaggtggtatacaaaacatacagataagtaattttacttttgatgtcatgggaacagagaaaactagattttaataggtatattgttcaaacaaaatagaaaatgtag

SEQ ID NO: 162392 - DNA, 625 bp, Homo sapiens
ttattacatctaaacctcagtttcatgaaagatatttatttaatcccaaacagcccatacttttaggaccttttttgtaaaactttaggataaattggtttgttacatgttttcttattcatttgcttagtcaacaaaccaaaattcaaaatctcaatgttattgttttcagtctcattttctaacctatgttttagcacaaacaaattccatgctgtatgactttcactgaaatagtggggttttttaagtcaagaaaatctggatttgagtccaaaatctaaagacatcacttcctagcaatttattctgatttaaaaagtaaataattagaygaataattgaacttttaaatcttagtctcctcatctgtggatagtatccagcgtattagggttattttgaagatcagattagtttaataataataatacctaatctttactaaacatttactatgtgccaggcattgttttctaagtgttttacatatattaatcattcaactctcataacaacccttttataagtgagaaaattaaaatcacagagagataaagttacctgctcaagatcacacaactagtaactggaggagcttaggagatggtgtaaattgaaagca

SEQ ID NO: 162393 - DNA, 541 bp, Homo sapiens
acttctttttaaaatatcttcttcccaccttctcaatatattcatatttttgttaaataaatgtttacattatcatgactatttaaatgttattcatagtcaaatcatatattatactatattacattttatactatattaaatttccttggaataaatatctctttttcaatttgcctaaactttctatgtattgatsattaatttgtttcctgattcactgctggaagcataaatctcctcagtattttagaaccctgggtgttccttcaatttcatcctcatgaagatgtgtctcctagggccttctgtcctgctcttgtctgttctgggtgctgtttgggtctcctgctcagctgtgatcctggaatctctcttcaccatcatcctgaaatccttctttttcctgtgttgctttccttgttttctggatccaatgtcttcctccttcctgttttcatttttccctttgttttagtgaagcacatcctcaagtagtttcctgggaagggagttatcagggttaaatttttttagaccg

SEQ ID NO: 162394 - DNA, 538 bp, Homo sapiens
  misc_feature (1)...(538): n = A,T,C or G
nnnnnnnnnatacagcattgcccttccccacttctttttaaaatatcttcttcccaccttctcaatatattcatatttttgttaaataaatgtttacattatcatgactatttaaatgttattcatagtcaaatcatatattatactatattacattttatactatattaaatttccttggaataaatatctctttttcaatttgcctaaactttctatgtattgatgattaatttgtttcctgattcactgctggaagcataaatctcctcagtattttagaaccctgggtgttccttcaatttcatcctcatraagatgtgtctcctagggccttctgtcctgctcttgtctgttctgggtgctgtttgggtctcctgctcagctgtgatcctggaatctctcttcaccatcatcctgaaatccttctttttcctgtgttgctttccttgttttctggatccaatgtcttcctccttcctgttttcatttttccctttgttttagtgaagcacatcctcaagtagtttcctgggaa

SEQ ID NO: 162395 - DNA, 538 bp, Homo sapiens
  misc_feature (1)...(538): n = A,T,C or G
nnnnnnnnnatacagcattgcccttccccacttctttttaaaatatcttcttcccaccttctcaatatattcatatttttgttaaataaatgtttacattatcatgactatttaaatgttattcatagtcaaatcatatattatactatattacattttatactatattaaatttccttggaataaatatctctttttcaatttgcctaaactttctatgtattgatgattaatttgtttcctgattcactgctggaagcataaatctcctcagtattttagaaccctgggtgttccttcaatttcatcctcatgaagatgtgtctcctagggccttctgtcctgctcttgtctgttctgggtgctgtttgggtctcctgctcagctgtgatcctggaatctctcttcaccatcatcctgaaatccttctttttcytgtgttgctttccttgttttctggatccaatgtcttcctccttcctgttttcatttttccctttgttttagtgaagcacatcctcaagtagtttcctgggaa

SEQ ID NO: 162396 - DNA, 419 bp, Homo sapiens
gttagaaataaaaagaagtagtgaggagagaaaattggttcctatttccagagcatggactctatccaatcagcacacactccaccactggakgtgggaaaagaaggagcaggaaacacttccagagcaaagtagacctctgcagagcctggacgagcagacccactgagcaatgacctcatctaggtaaaactgggttataccaattaagaacagaggccatatagaagagacaagagacaactattaaaaattgctcacggccaggtgcagtggcccatgcctgtaatcccaacactctgggaggcggaggtaggcaatttacttcagcccaggagtttgagaccagcctgggcaacatggtgaaaccctgtctctaccaaaaaaaaaaaaagttagctgggcatggttgcatatgc

SEQ ID NO: 162397 - DNA, 566 bp, Homo sapiens
aggaattctgacttgtagagaaccaagctgggaaaccgggccaggagcagggagaggccggtgagcctgggttstgcaagtgcaagcctttatttaaagttttaatattttgtctatcatgggttttttttctttgcgattacattcaattttaaaactatttcattcattcaggattagcgttacttaacagttgctcctgagactagtgcgttagtcccttcaccctagtcctggccttggtggaagtctaaaatttacattttattccagctttctgtccaaaagagcaacccctgcaagtgtaggatgaggagctcagtccagcagcagctaacactgcactccttgcgcacctgctgtgtgctagagggaggggcggaggcgggaggtgggaggcagggggcgggggggtctttctctttttctcttcctctgcttctcaaattcacagtaggggcaaagattgacaaactcactcacattaccaccaccgcgagtttccaaaaaagaaaaaagaaagaaagatactaacttttttagatggtatctctaagaaatagtgt

SEQ ID NO: 162398 - DNA, 580 bp, Homo sapiens
gaattctgacttgtagagaaccaagctgggaaaccgggccaggagcagggagaggccggtgagcctgggttctgcragtgcaagcctttatttaaagttttaatattttgtctatcatgggttttttttctttgcgattacattcaattttaaaactatttcattcattcaggattagcgttacttaacagttgctcctgagactagtgcgttagtcccttcaccctagtcctggccttggtggaagtctaaaatttacattttattccagctttctgtccaaaagagcaacccctgcaagtgtaggatgaggagctcagtccagcagcagctaacactgcactccttgcgcacctgctgtgtgctagagggaggggcggaggcgggaggtgggaggcagggggcgggggggtctttctctttttctcttcctctgcttctcaaattcacagtaggggcaaagattgacaaactcactcacattaccaccaccgcgagtttccaaaaaagaaaaaagaaagaaagatactaacttttttagatggtatctctaagaaatagtgtattaatcttccctttg

SEQ ID NO: 162399 - DNA, 566 bp, Homo sapiens
aggaattctgacttgtagagaaccaagctgggaaaccgggccaggagcagggagaggccggtgagcctgggttctgcaagtgcaagcctttatttaaagttttaatattttgtctatcatgggttttttttctttgcgattacattcaattttaaaactatttcattcattcaggattagcgttacttaacagttgctcctgagactagtgcgttagtcccttcaccctagtcctggccttggtggaagtctaaaatttacrttttattccagctttctgtccaaaagagcaacccctgcaagtgtaggatgaggagctcagtccagcagcagctaacactgcactccttgcgcacctgctgtgtgctagagggaggggcggaggcgggaggtgggaggcagggggcgggggggtctttctctttttctcttcctctgcttctcaaattcacagtaggggcaaagattgacaaactcactcacattaccaccaccgcgagtttccaaaaaagaaaaaagaaagaaagatactaacttttttagatggtatctctaagaaatagtgt

SEQ ID NO: 162400 - DNA, 586 bp, Homo sapiens
ccgggccaggagcagggagaggccggtgagcctgggttctgcaagtgcaagcctttatttaaagttttaatattttgtctatcatgggttttttttctttgcgattacattcaattttaaaactatttcattcattcaggattagcgttacttaacagttgctcctgagactagtgcgttagtcccttcaccctagtcctggccttggtggaagtctaaaatttacattttattccagctttctgtccaaaagagcaacccctgcaagtgtaggatgaggagctcagtccagcagcagctaacactgcactccttgcgcacctgctgtgtgctagagggaggggcggaggcgggaggygggaggcagggggcgggggggtctttctctttttctcttcctctgcttctcaaattcacagtaggggcaaagattgacaaactcactcacattaccaccaccgcgagtttccaaaaaagaaaaaagaaagaaagatactaacttttttagatggtatctctaagaaatagtgtattaatcttccctttggaaagacaactttgaaaggctttttcattaaaatgaatt

SEQ ID NO: 162401 - DNA, 510 bp, Homo sapiens
ccgcatgttctcacttatgagtgggagcaaaacactgagtacatatggacacaaagaagggaacaacaggcactggggcctayttgagggtaaagggagggaagacggtgacaactgagaaactacctatctagtactgtgcttattacctgggtggcaaaataatgtgtacaccaaacccccatgatgtgtaatctacctaacaaatcagcacatgtaccccgaaactaaaataaaagttaaaaaataataacaataatcaccctttaaacctatctttcaacatttaaagtttgcaaaggcaaagttttattcacctatggaacatggtttactaactgagcaactctgggcaagtactctcttggcctcttaagtggggataataacagggcatgcctccaaatcttcctgtgaacattaagtgaatggatacgtactggacactcagaaaaatgcttgggttgtagtgatatttaagtgccattataatggcagcattgtatgaac

SEQ ID NO: 162402 - DNA, 510 bp, Homo sapiens
ccgcatgttctcacttatgagtgggagcaaaacactgagtacatatggacacaaagaagggaacaacaggcactggggcctatttgagggtaaagggagggaagacggtgacaactgagaaactacctatctagtactgtgcttattacctgggtggcaaaataatgtgtacaccaaacccccatgatgtgtaatytacctaacaaatcagcacatgtaccccgaaactaaaataaaagttaaaaaataataacaataatcaccctttaaacctatctttcaacatttaaagtttgcaaaggcaaagttttattcacctatggaacatggtttactaactgagcaactctgggcaagtactctcttggcctcttaagtggggataataacagggcatgcctccaaatcttcctgtgaacattaagtgaatggatacgtactggacactcagaaaaatgcttgggttgtagtgatatttaagtgccattataatggcagcattgtatgaac

SEQ ID NO: 162403 - DNA, 510 bp, Homo sapiens
ccgcatgttctcacttatgagtgggagcaaaacactgagtacatatggacacaaagaagggaacaacaggcactggggcctatttgagggtaaagggagggaagacggtgacaactgagaaactacctatctagtactgtgcttattacctgggtggcaaaataatgtgtacaccaaacccccatgatgtgtaatctacctaacaaatcagcacatgtaccccgaamctaaaataaaagttaaaaaataataacaataatcaccctttaaacctatctttcaacatttaaagtttgcaaaggcaaagttttattcacctatggaacatggtttactaactgagcaactctgggcaagtactctcttggcctcttaagtggggataataacagggcatgcctccaaatcttcctgtgaacattaagtgaatggatacgtactggacactcagaaaaatgcttgggttgtagtgatatttaagtgccattataatggcagcattgtatgaac

SEQ ID NO: 162404 - DNA, 522 bp, Homo sapiens
caaattgctggagctcaatgtgaacaactctaaaagttaaaaacttcaagtgggtacactcattgaaggtctccatacttttgtgaattatgcctccagaaactctactaggttctcagtgaatgttggaaaaaatgtcctcatgcttctggcaggaggaaggggaaaggaaccatttggaaacatgctggagtattcagttmtttttcacaagacctgcaccaggagaaactattttactagagcctaatctgctggggttttatcagagcctactatacgtgacagaaggaaaatactcaactggctgtagccttccacatgcacaaaagggaataaataactccatctccttctggcctttcatgtgggggaagagaaacactcagctacaatcccttttagatttccacatggaaaaagggaaatatacaacttcatcctcccttcagccattatgtctcatctaaagtcagggaggaactgagaagcactgatgaagttcacagtcaaggggcacag

SEQ ID NO: 162405 - DNA, 522 bp, Homo sapiens
caaattgctggagctcaatgtgaacaactctaaaagttaaaaacttcaagtgggtacactcattgaaggtctccatacttttgtgaattatgcctccagaaactctactaggttctcagtgaatgttggaaaaaatgtcctcatgcttctggcaggaggaaggggaaaggaaccatttggaaacatgctggagtattcagttatttttcacaagacctgcaccaggagaaactattttactagagcctaatctgctggggttttatcagagcctactataygtgacagaaggaaaatactcaactggctgtagccttccacatgcacaaaagggaataaataactccatctccttctggcctttcatgtgggggaagagaaacactcagctacaatcccttttagatttccacatggaaaaagggaaatatacaacttcatcctcccttcagccattatgtctcatctaaagtcagggaggaactgagaagcactgatgaagttcacagtcaaggggcacag

SEQ ID NO: 162406 - DNA, 522 bp, Homo sapiens
caaattgctggagctcaatgtgaacaactctaaaagttaaaaacttcaagtgggtacactcattgaaggtctccatacttttgtgaattatgcctccagaaactctactaggttctcagtgaatgttggaaaaaatgtcctcatgcttctggcaggaggaaggggaaaggaaccatttggaaacatgctggagtattcagttatttttcacaagacctgcaccaggagaaactattttactagagcctaatctgctggggttttatcagagcctactatacgtgacagaaggaaaatactcaactggctgtagccttccacatgcacaaaagggaataaataactccatctccttctggcctttcatgtgggggaagagaaacactcarctacaatcccttttagatttccacatggaaaaagggaaatatacaacttcatcctcccttcagccattatgtctcatctaaagtcagggaggaactgagaagcactgatgaagttcacagtcaaggggcacag

SEQ ID NO: 162407 - DNA, 597 bp, Homo sapiens
tagtaaatagacaacatgcaagaacagatgaattatgtaaacagagagatggggatacaaagaaaaaaatcaaaaaagaagtgctagagatcaaagacattgtaatagacataaagaagggctttgatgggytcattaatagactggacatagccaaaaaagaatctttgagtttgatgatatgacaatagaaatttccaaaactaaagagcaaggaaaaaaatactcagtaaaaacagaatagaatatcaaagaactgtaacaaaactacaaaaggagttaatatatatattgggaattttaaaaggacaggaaagagagaaaaaaatggaagcaatatttgaaacaataatgactgaaaattccttccaaactagtgtcagacaccaaaccagagatcaagaaagctcagagtacaccaaacaggatacatgaaaagaaaaattacacctaggcatttcatattcaacttcagaaaatcaaaaataagaaaaaaaagtcttgaaagaagccagagaggaaaaataccttacatataaaggagcaaaaataagaattacttcttaaattttcttagaaaccatgcaagcaagaaga

SEQ ID NO: 162408 - DNA, 597 bp, Homo sapiens
tagtaaatagacaacatgcaagaacagatgaattatgtaaacagagagatggggatacaaagaaaaaaatcaaaaaagaagtgctagagatcaaagacattgtaatagacataaagaagggctttgatgggctcattaatagactggacatagccaaaaaagaatctttgagtttgatgatatgacaatagaaatttccaaaactaaagrgcaaggaaaaaaatactcagtaaaaacagaatagaatatcaaagaactgtaacaaaactacaaaaggagttaatatatatattgggaattttaaaaggacaggaaagagagaaaaaaatggaagcaatatttgaaacaataatgactgaaaattccttccaaactagtgtcagacaccaaaccagagatcaagaaagctcagagtacaccaaacaggatacatgaaaagaaaaattacacctaggcatttcatattcaacttcagaaaatcaaaaataagaaaaaaaagtcttgaaagaagccagagaggaaaaataccttacatataaaggagcaaaaataagaattacttcttaaattttcttagaaaccatgcaagcaagaaga

SEQ ID NO: 162409 - DNA, 513 bp, Homo sapiens
tatatcaatagtcatcttaactgtcaatggtctaaaacacaccaattaaaatacagagactgtcatagtaaatcaaaaaacaagacccagctgtctacaagaagctcattttaaatttgaagactcatagagataaaaattaaggggatggaaaagatactgaggtaaattataaagggtggtcatagcctcccttaaaggagaacaaacttgctaaatagatggagagaataaactacccgacagtgcacaaaccacatcatgggctcaggrttagaacatcctgcagcaaggaggtagaaaaatagaagggagaattcccaaattcacacaagcacagaaacccatgattagtgtccttggactgacctatattcactataatagtaaaagaaaaacacccctgggtggagatttaagatgctaatgatacatgcaatgtaagtcctagcgtgcacaaccacagcacctgtgcagccaggggactacccataacatactcatcagaacacc

SEQ ID NO: 162410 - DNA, 513 bp, Homo sapiens
tatatcaatagtcatcttaactgtcaatggtctaaaacacaccaattaaaatacagagactgtcatagtaaatcaaaaaacaagacccagctgtctacaagaagctcattttaaatttgaagactcatagagataaaaattaaggggatggaaaagatactgaggtaaattataaagggtggtcatagcctcccttaaaggagaacaaacttgctaaatagatggagagaataaactacccgacagtgcacaaaccacatcatgggctcagggttagaacatcctgcagcaaggaggtagaaaaatagaagggagaattcccaaattcacacaagcacagaaacccatgattagtgtccttggactgacctatattcactataatagtaaaagaaaaacacccctgggtggagatttaagatgctaatgatacatgcaatgtaagtcctagcrtgcacaaccacagcacctgtgcagccaggggactacccataacatactcatcagaacacc

SEQ ID NO: 162411 - DNA, 513 bp, Homo sapiens
tatatcaatagtcatcttaactgtcaatggtctaaaacacaccaattaaaatacagagactgtcatagtaaatcaaaaaacaagacccagctgtctacaagaagctcattttaaatttgaagactcatagagataaaaattaaggggatggaaaagatactgaggtaaattataaagggtggtcatagcctcccttaaaggagaacaaacttgctaaatagatggagagaataaactacccgacagtgcacaaaccacatcatgggctcagggttagaacatcctgcagcaaggaggtagaaaaatagaagggagaattcccaaattcacacaagcacagaaacccatgattagtgtccttggactgacctatattcactataatagtaaaagaaaaacacccctgggtggagatttaagatgctaatgatacatgcaatgtaagtcctagcgtgyacaaccacagcacctgtgcagccaggggactacccataacatactcatcagaacacc

SEQ ID NO: 162412 - DNA, 398 bp, Homo sapiens
tgcacacattcataaatttgtctgactcctaacgagagtaccttgtcaagggtaatatggcttatgtgttagaaatataatttaaaattaataaaataccaattttatcacattatggtaatgtttactgctttcctgaagtgtttgagattttcctgtagaatgtacttggagcatgtacagttatacaatgaaagtaataaactattaaatcaaaaaatattttagaaacactcagtatatgaacctcttgctctagcgtaatctatktatatgttttacatccggtgttagaacataggcatttttcttacagaaattctcaaataaggacaaaacatccccctaatatgtagtagaatgtttactgcggcactgtttgtaataataatttctaa

SEQ ID NO: 162413 - DNA, 277 bp, Homo sapiens
gagcaattacatcttacaggagtgtgagctttggggtcagctggctttgggtgagactccagttttgatgctgacacttgactgtgggcrgttaactaagtcccactgagctggtttcgaacccgtaaaatgtaaagtgtaggcactgctttatggggttactgtagcgagaggggctggtcctgaggcaacctggggatagttcctagcaagtgctcaggaataatatcactttcccccatgactccaaaatcccaggatctttagtcttacctga

SEQ ID NO: 162414 - DNA, 277 bp, Homo sapiens
gagcaattacatcttacaggagtgtgagctttggggtcagctggctttgggtgagactccagttttgatgctgacacttgactgtgggcggttaactaagtcccactgagctggtttcgaacccrtaaaatgtaaagtgtaggcactgctttatggggttactgtagcgagaggggctggtcctgaggcaacctggggatagttcctagcaagtgctcaggaataatatcactttcccccatgactccaaaatcccaggatctttagtcttacctga

SEQ ID NO: 162415 - DNA, 277 bp, Homo sapiens
gagcaattacatcttacaggagtgtgagctttggggtcagctggctttgggtgagactccagttttgatgctgacacttgactgtgggcggttaactaagtcccactgagctggtttcgaacccgtaaaatgtaaagtgtaggcactgctttatggggttactgtagygagaggggctggtcctgaggcaacctggggatagttcctagcaagtgctcaggaataatatcactttcccccatgactccaaaatcccaggatctttagtcttacctga

SEQ ID NO: 162416 - DNA, 467 bp, Homo sapiens
gattacaaggttgataggatattgtgttcaagccctagataaatccaamcaactaatctttgagagagaagtacgtagtatggaagcatgtaactgtaattattttgagaaatgctaaacctcaaaataaaaaatgtgtttttttgcacttgtcataattgaaagtttgtttttcctctctttttggtaacattctatcactctcgcctgcaaccaaaatgaccctcaccctggcagccagcactgggattccatcctcatcgagctccttgacacgaaggtcagcttcaccgtgggcaagcataatcatcatttgcagacaaaaggagaacccagttatttgatcttgattatcagatgtgacaattatctctcaaatattacagattttatgtcataaattgctctggggcactgcaacctagcaagtcctcctgagaggcccatctagcctgctgcccaggcca

SEQ ID NO: 162417 - DNA, 467 bp, Homo sapiens
gattacaaggttgataggatattgtgttcaagccctagataaatccaaacaactaatctttgagagagaagtacgtagtatggaagcatgtaactgtaattattttgagaaatgctaaacctcaaaataaaaaatgtgtttttttgcacttgtcataattgaaagtttgtttttcctctctttttggtaacattctatcacyctcgcctgcaaccaaaatgaccctcaccctggcagccagcactgggattccatcctcatcgagctccttgacacgaaggtcagcttcaccgtgggcaagcataatcatcatttgcagacaaaaggagaacccagttatttgatcttgattatcagatgtgacaattatctctcaaatattacagattttatgtcataaattgctctggggcactgcaacctagcaagtcctcctgagaggcccatctagcctgctgcccaggcca

SEQ ID NO: 162418 - DNA, 467 bp, Homo sapiens
gattacaaggttgataggatattgtgttcaagccctagataaatccaaacaactaatctttgagagagaagtacgtagtatggaagcatgtaactgtaattattttgagaaatgctaaacctcaaaataaaaaatgtgtttttttgcacttgtcataattgaaagtttgtttttcctctctttttggtaacattctatcactctcgcctgcaaccaaaatgaccctcaccctggcagccagcactgggattccatcctcatcgagctccttgacacgaaggtcagcttcaccgtgggcaagcayaatcatcatttgcagacaaaaggagaacccagttatttgatcttgattatcagatgtgacaattatctctcaaatattacagattttatgtcataaattgctctggggcactgcaacctagcaagtcctcctgagaggcccatctagcctgctgcccaggcca

SEQ ID NO: 162419 - DNA, 467 bp, Homo sapiens
gattacaaggttgataggatattgtgttcaagccctagataaatccaaacaactaatctttgagagagaagtacgtagtatggaagcatgtaactgtaattattttgagaaatgctaaacctcaaaataaaaaatgtgtttttttgcacttgtcataattgaaagtttgtttttcctctctttttggtaacattctatcactctcgcctgcaaccaaaatgaccctcaccctggcagccagcactgggattccatcctcatcgagctccttgacacgaaggtcagcttcaccgtgggcaagcataatcatcatttgcagacaaaaggagaacccagttatttgatcttgattatcagatgtgacaattatctctcaaatattacagattttatgtcataaattgctctggggcactrcaacctagcaagtcctcctgagaggcccatctagcctgctgcccaggcca

SEQ ID NO: 162420 - DNA, 628 bp, Homo sapiens
ctagtgtaacagtaaatacaaatggaacataaraaaaaagtaataattctccctgatggaaaaagggaaagagatctccaccaccaccaccaccatttcctcagaatattttcttttagaaacataaattctttctctgcttcttagggatatagcaattttttaaagaaaaaagataagtctcttgcaggttttacaatgtaggaatgtgtttctcaagggtctggaactatctctgagatagaatcaccaaggaggattgtacctcatcccctcatctttataaaccaaaaataaaactcatagccaccccctacacccctcacaaacatctgaatggacccctcctctgccagggcaccctaaatttaacctgaaagactggtttaggccatgatggtgagacagccaggtgggagagggtccccagtgaaactgcaaccagcccacactggaaggaatgcaccttggggtggagccacagaagtttgcactgtttgcagagggaggagcctggccccacctcttcctgtgtggaaactgggattcaatctgcaaggcaggaagcacaccagcagagactctgactttgcagagggtccctgttcccccttttttttccttttca

SEQ ID NO: 162421 - DNA, 628 bp, Homo sapiens
ctagtgtaacagtaaatacaaatggaacataagaaaaaagtaataattctccctgatggaaaaagggaaagagatctccaccaccaccaccaccatttcctcagaatattttctttyagaaacataaattctttctctgcttcttagggatatagcaattttttaaagaaaaaagataagtctcttgcaggttttacaatgtaggaatgtgtttctcaagggtctggaactatctctgagatagaatcaccaaggaggattgtacctcatcccctcatctttataaaccaaaaataaaactcatagccaccccctacacccctcacaaacatctgaatggacccctcctctgccagggcaccctaaatttaacctgaaagactggtttaggccatgatggtgagacagccaggtgggagagggtccccagtgaaactgcaaccagcccacactggaaggaatgcaccttggggtggagccacagaagtttgcactgtttgcagagggaggagcctggccccacctcttcctgtgtggaaactgggattcaatctgcaaggcaggaagcacaccagcagagactctgactttgcagagggtccctgttcccccttttttttccttttca

SEQ ID NO: 162422 - DNA, 628 bp, Homo sapiens
ctagtgtaacagtaaatacaaatggaacataagaaaaaagtaataattctccctgatggaaaaagggaaagagatctccaccaccaccaccaccatttcctcagaatattttcttttagaaacataaattctttctctgcttcttagggatatagcaattttttaaagaaaaaagataagtctcttgcaggttttacaatgtaggaatgtgtttctcaagggtctggaactatctctgagatagaatcaccaaggaggattgtacctcatcccctcatctttataaaccaaaaataaaactcatagccaccccctmcacccctcacaaacatctgaatggacccctcctctgccagggcaccctaaatttaacctgaaagactggtttaggccatgatggtgagacagccaggtgggagagggtccccagtgaaactgcaaccagcccacactggaaggaatgcaccttggggtggagccacagaagtttgcactgtttgcagagggaggagcctggccccacctcttcctgtgtggaaactgggattcaatctgcaaggcaggaagcacaccagcagagactctgactttgcagagggtccctgttcccccttttttttccttttca

SEQ ID NO: 162423 - DNA, 586 bp, Homo sapiens
gggcactacagaacagaatgtggggagggtgacaatgatgtgatgacttcttaacactgagcaaagaagcaaaaaacaagttgtctttctacaatgttgatccctaagagtgatttccctttatagattgcaatataattccagttgcattgttattattttacaaagaactcccacagaaaaaactttctggaggttttcccctatatacacacctacattctctgccatgctcacacygttggcaaagtatggtgcatccagccacagaccatcaaggggcttgataattgcctcctccatataccttctgaggtcggtcaggtttataaccattcgtgtaacacaattcatccttataactgggcctatggccttgtggcttgtcaccttttccaagcaggtgcttgtcatcttggttgctcagaggtttgctgtggcatcttccctcacctgaggccgggctggcctccaccatgttgcaaccagaagagcccacttccgtggggacagatcttccgtgctctccacagccacgtcacgctgccgctgtgcaaatgatgccaactgtaaatcccagaaaact

SEQ ID NO: 162424 - DNA, 586 bp, Homo sapiens
gggcactacagaacagaatgtggggagggtgacaatgatgtgatgacttcttaacactgagcaaagaagcaaaaaacaagttgtctttctacaatgttgatccctaagagtgatttccctttatagattgcaatataattccagttgcattgttattattttacaaagaactcccacagaaaaaactttctggaggttttcccctatatacacacctacattctctgccatgctcacactgttggcaaagtatggtgcatccagccacagaccatcaaggggcttgataattgcctcctccatataccttctgaggtcggtcaggtttataaccattcgtgtaacacaattcatccttataactgggcctatggccttgtggcttgtcaccttttccaagcaggtgcttgtcatcttggttgctcagaggtttgctgtggcatcttccctcacctgmggccgggctggcctccaccatgttgcaaccagaagagcccacttccgtggggacagatcttccgtgctctccacagccacgtcacgctgccgctgtgcaaatgatgccaactgtaaatcccagaaaact

SEQ ID NO: 162425 - DNA, 586 bp, Homo sapiens
gggcactacagaacagaatgtggggagggtgacaatgatgtgatgacttcttaacactgagcaaagaagcaaaaaacaagttgtctttctacaatgttgatccctaagagtgatttccctttatagattgcaatataattccagttgcattgttattattttacaaagaactcccacagaaaaaactttctggaggttttcccctatatacacacctacattctctgccatgctcacactgttggcaaagtatggtgcatccagccacagaccatcaaggggcttgataattgcctcctccatataccttctgaggtcggtcaggtttataaccattcgtgtaacacaattcatccttataactgggcctatggccttgtggcttgtcaccttttccaagcaggtgcttgtcatcttggttgctcagaggtttgctgtggcatcttccctcacctgaggccgggctggcctccaccatgttgcaaccagaagagcccacttccgtggggacagakcttccgtgctctccacagccacgtcacgctgccgctgtgcaaatgatgccaactgtaaatcccagaaaact

SEQ ID NO: 162426 - DNA, 545 bp, Homo sapiens
agtagtgggttccttatcataagcccttttgctcttgctctctcactatgtgatgccccctgccatgttgttaggcagcaagaaggccttctccagaggccagcatcatgctcttggcattcctaggcctcagagctaaatacatttattttctttataaatcactcagtctgtggtattctgttatagcaacaaaaatattaagacactcttcctatttcccctactctccttcctccaccctctttcttacacacaaaatgttactgaaataccaggagttcaatctaggttctgttacttgcacacagaaagccaatcactkagacaatgaatattgccaaggaagaaggctttaattgcatgctacagctaaggatatgggatatcagtctcaattccatctcctcaaccagccgaaattaggggattatatagcaaggaagaaatgtaactatgagcaggaaaacaggaactagggagggctaaggaagcaatcatgacaaataaggaatctggcatctggcatctcattgtctcgacac

SEQ ID NO: 162427 - DNA, 533 bp, Homo sapiens
aataaggaatctggcatctggcatctcattgtctcgacacagtggtctgatgaatttcacttctttgatactttttgagagagctgagagtccatttcctgaggaagaaactcagagaaaacaaatgtaagtttcaagcttcaagaccagaaggatttgtttctatgtttatatttttaaaatctgtctgtggatctattgggtgcatttcaaaaacacatacagaggaaatcccaggcactgtgctagaattgggaatacaatggtgagttcaaagaggaataattttcctattctcatgaagctaatagtrtaggatagagaaagtaaacactaatcaaagaaccacacaagcataagattgcaactacaactaaaaaccataaccattcagttaagctaaggaggccaccattgtcacccttctcttaacctttaataatgtattttacaggtaaaatccttaagtaagtcatatttggttgggaagatcaaagaaatcacccagtctcccacatccgaaattgtgcagt

SEQ ID NO: 162428 - DNA, 533 bp, Homo sapiens
aataaggaatctggcatctggcatctcattgtctcgacacagtggtctgatgaatttcacttctttgatactttttgagagagctgagagtccatttcctgaggaagaaactcagagaaaacaaatgtaagtttcaagcttcaagaccagaaggatttgtttctatgtttatatttttaaaatctgtctgtggatctattgggtgcatttcaaaaacacatacagaggaaatcccaggcactgtgctagaattgggaatacaatggtgagttcaaagaggaataattttcctattctcatgaagctaatagtgtaggatagagaaagyaaacactaatcaaagaaccacacaagcataagattgcaactacaactaaaaaccataaccattcagttaagctaaggaggccaccattgtcacccttctcttaacctttaataatgtattttacaggtaaaatccttaagtaagtcatatttggttgggaagatcaaagaaatcacccagtctcccacatccgaaattgtgcagt

SEQ ID NO: 162429 - DNA, 516 bp, Homo sapiens
tccatattattcctcttgttttrcctttctctcactttttctacaagcaccattttgaagaaagcctcatcaactttattaatttgatttgtgatcatttgaagacacagaaaattttcttctgcaaaatataaagtcttctttcatctgctctcgtgatccttttattcttctgccaagtgatgtacattaattgaccaactgagttatgcatgcatttactttttcacagatctttgttatgcctctactagttctatgctagggatatggtatgacattgaacaggatcaatatggtccctgctttcacagagcccacacctaatgtgtggatagtcagaacacagttacacaaacacaagtgggaaataattataacatctgatagatctgaagtcagtagaaaaggtattgaaatggagaaatagaaaggggcctcgctttgataatgaaatcagagacagtttccctgcaacttccttagagggcaaaagccatgtcctttccttctcct

SEQ ID NO: 162430 - DNA, 516 bp, Homo sapiens
tccatattattcctcttgttttacctttctctcactttttctacaagcaccattttgaagaaagcctcatcaactttattaattwgatttgtgatcatttgaagacacagaaaattttcttctgcaaaatataaagtcttctttcatctgctctcgtgatccttttattcttctgccaagtgatgtacattaattgaccaactgagttatgcatgcatttactttttcacagatctttgttatgcctctactagttctatgctagggatatggtatgacattgaacaggatcaatatggtccctgctttcacagagcccacacctaatgtgtggatagtcagaacacagttacacaaacacaagtgggaaataattataacatctgatagatctgaagtcagtagaaaaggtattgaaatggagaaatagaaaggggcctcgctttgataatgaaatcagagacagtttccctgcaacttccttagagggcaaaagccatgtcctttccttctcct

SEQ ID NO: 162431 - DNA, 516 bp, Homo sapiens
tccatattattcctcttgttttacctttctctcactttttctacaagcaccattttgaagaaagcctcatcaactttattaatttkatttgtgatcatttgaagacacagaaaattttcttctgcaaaatataaagtcttctttcatctgctctcgtgatccttttattcttctgccaagtgatgtacattaattgaccaactgagttatgcatgcatttactttttcacagatctttgttatgcctctactagttctatgctagggatatggtatgacattgaacaggatcaatatggtccctgctttcacagagcccacacctaatgtgtggatagtcagaacacagttacacaaacacaagtgggaaataattataacatctgatagatctgaagtcagtagaaaaggtattgaaatggagaaatagaaaggggcctcgctttgataatgaaatcagagacagtttccctgcaacttccttagagggcaaaagccatgtcctttccttctcct

SEQ ID NO: 162432 - DNA, 516 bp, Homo sapiens
tccatattattcctcttgttttacctttctctcactttttctacaagcaccattttgaagaaagcctcatcaactttattaatttgatttgtgatcatttgaagacacagaaaattttcttctgcaaaatataaagtcttctttcatctgctctcgtgatccttttattcttctgccaagtgatgtacattaattgaycaactgagttatgcatgcatttactttttcacagatctttgttatgcctctactagttctatgctagggatatggtatgacattgaacaggatcaatatggtccctgctttcacagagcccacacctaatgtgtggatagtcagaacacagttacacaaacacaagtgggaaataattataacatctgatagatctgaagtcagtagaaaaggtattgaaatggagaaatagaaaggggcctcgctttgataatgaaatcagagacagtttccctgcaacttccttagagggcaaaagccatgtcctttccttctcct

SEQ ID NO: 162433 - DNA, 582 bp, Homo sapiens
agcccagccatatcagaatgacatctaccatgcatcagtcctcgtgtgtcttcagcrcctctttcacatgtctgtgtccttagagcttgctggaaccatctttgcttgtctctgtgtgttctgagtctgtgactatttggctctaggagtcttctcaacaaagtacaatttctgttgtctttttccaaaagactttatgaataaaatgaaaatatgagtaatataaaatcaaaatatattttgatttctcatttcaaaattatctacctctgtagtttaatagaactcaattattggccccagaagataatttttttccctaaagtattttctaaataataaccagtagttgacctacatcctttatatatgtcacatagaagatctccacagtacattcttcaaattcagctcagataatccatggaatgctcaagttccctgtaacaaattgagctcctatagctctgtggacttataattgactaataaaagtaagacttgtttgctaatgataaagataatttgtaaaaaataaatcattttagtttgaccatgagacgcacacatccattatcatta

SEQ ID NO: 162434 - DNA, 582 bp, Homo sapiens
agcccagccatatcagaatgacatctaccatgcatcagtcctcgtgtgtcttcagcgcctctttcacatgtctgtgtccttagagcttgctggaaccatctttgcttgtctctgtgtrttctgagtctgtgactatttggctctaggagtcttctcaacaaagtacaatttctgttgtctttttccaaaagactttatgaataaaatgaaaatatgagtaatataaaatcaaaatatattttgatttctcatttcaaaattatctacctctgtagtttaatagaactcaattattggccccagaagataatttttttccctaaagtattttctaaataataaccagtagttgacctacatcctttatatatgtcacatagaagatctccacagtacattcttcaaattcagctcagataatccatggaatgctcaagttccctgtaacaaattgagctcctatagctctgtggacttataattgactaataaaagtaagacttgtttgctaatgataaagataatttgtaaaaaataaatcattttagtttgaccatgagacgcacacatccattatcatta

SEQ ID NO: 162435 - DNA, 531 bp, Homo sapiens
tcttcagcgcctctttcacatgtctgtgtccttagagcttgctggaaccatctttgcttgtctctgtgtgttctgagtctgtgactatttggctctaggagtcttctcaacaaagtacaatttctgttgtctttttccaaaaractttatgaataaaatgaaaatatgagtaatataaaatcaaaatatattttgatttctcatttcaaaattatctacctctgtagtttaatagaactcaattattggccccagaagataatttttttccctaaagtattttctaaataataaccagtagttgacctacatcctttatatatgtcacatagaagatctccacagtacattcttcaaattcagctcagataatccatggaatgctcaagttccctgtaacaaattgagctcctatagctctgtggacttataattgactaataaaagtaagacttgtttgctaatgataaagataatttgtaaaaaataaatcattttagtttgaccatgagacgcacacatccattatca

SEQ ID NO: 162436 - DNA, 531 bp, Homo sapiens
tcttcagcgcctctttcacatgtctgtgtccttagagcttgctggaaccatctttgcttgtctctgtgtgttctgagtctgtgactatttggctctaggagtcttctcaacaaagtacaatttctgttgtctttttccaaaagactttatgaataaaatgaaaatatgagtaatataaaatcaaaatatattttgatttctcatttcaaaattatctacctctgtagtttaatagaactcaattattggccccagaagataatttttttccctaaagtattttctaaataataaccagtagttgacctacatcctttatatatrtcacatagaagatctccacagtacattcttcaaattcagctcagataatccatggaatgctcaagttccctgtaacaaattgagctcctatagctctgtggacttataattgactaataaaagtaagacttgtttgctaatgataaagataatttgtaaaaaataaatcattttagtttgaccatgagacgcacacatccattatca

SEQ ID NO: 162437 - DNA, 528 bp, Homo sapiens
agctaaagttattcaaatacattcaaactacacagaccccttataaattactagtatcatggtaggaaggaaaatatataagaagaaaaatacatcctggaactcattatcaaaattattggtgtatagtctatactagcatagagtagctttctcaacctgctatgtaaaattgccagcaagaaaaaaaagtgcaagaataaggtctatgactgaagtggctcggtgtcatgattccctattctagcattctcagaaggatcccacccgttagacatgcagaaactgcagcccatccaaatgtgatctgtttaatcaataatcaacagttcatattgaagacagtatttttgctatatgtgcttgtcataatgaaggacggtgtacaaagaacaagttgaaccagaygaacactttaattttgatgccaaaatcaatcactttttgtcataacaccaggcatagataatggttgatccagtgcacactgtctgtattaccccataatttcctgcagcagacatgtta

SEQ ID NO: 162438 - DNA, 608 bp, Homo sapiens
tgaattctgcatttctaactgaggtatccagattccctcattgggactgactaggcagttggtgtgacccatggagagcaaggaaaagcagagttgggtgacagttcacccaagagctacacagggcaaagagacctccctcctccagccaagggaggcagtgagggattgtgctacccacccrgggaactgtgctttacccacagatttttgcaaaccccagaacaggtaatccctttgtgagtccacaccaccagggccttgggtcccaagcacaaagctgtgcagacccatagcaggggctccagctggcagccacttgggcaggtactgagctgtaggagtttctgcatactctggtggctcgcagaaatccagtgaagcaggagatccatcaactcccatgagaagggggctgaagccagggagccaagcagacccactcccacagaaccccacaagctaagacccactagcatggaatccccactggccagcacagcacctggagtctgcctaagaagaccaagttcctggggggaagggtgaccgccattactgcgggtctagccggtggttttcccccgccagtgctagggagactgggt

SEQ ID NO: 162439 - DNA, 596 bp, Homo sapiens
caaccacactctttgcaacaatgtcctaacaatattactattagcaaaaatcccctaagaccagcattcttgacaacagccctcttggcccttagaagcaatgactttagcaaccaacrttgagccataaaaataaagccttggtaataatgctcttagcattgaccttagtaaaatggtcttagcaacagtctttagcaagagtgactctagaaatgtccccttcccaacaatgccctttgaagaaaatacctgtaacaacaatgcctttagtcacaatgccttcagcaaaaatgtcccttgccaacattaacaccctaggaacaatgatctgagaaacagtgtccttaacaataatatacaaaaacattctaagcaatagtaccctaagcaacaatatacttagcagtaataccctcagtaacaatactcttagcaacacgagatttaggatcagtgctggtagaaacagcatcatgagaaacactagcaatagtaataatgcctttagccacaatgaccttcaacagttctcttatgaacatcacccataactacaatggctccaggaacaatgcacttagaaataacttcct

SEQ ID NO: 162440 - DNA, 596 bp, Homo sapiens
caaccacactctttgcaacaatgtcctaacaatattactattagcaaaaatcccctaagaccagcattcttgacaacagccctcttggcccttagaagcaatgactttagcaaccaacgktgagccataaaaataaagccttggtaataatgctcttagcattgaccttagtaaaatggtcttagcaacagtctttagcaagagtgactctagaaatgtccccttcccaacaatgccctttgaagaaaatacctgtaacaacaatgcctttagtcacaatgccttcagcaaaaatgtcccttgccaacattaacaccctaggaacaatgatctgagaaacagtgtccttaacaataatatacaaaaacattctaagcaatagtaccctaagcaacaatatacttagcagtaataccctcagtaacaatactcttagcaacacgagatttaggatcagtgctggtagaaacagcatcatgagaaacactagcaatagtaataatgcctttagccacaatgaccttcaacagttctcttatgaacatcacccataactacaatggctccaggaacaatgcacttagaaataacttcct

SEQ ID NO: 162441 - DNA, 596 bp, Homo sapiens
caaccacactctttgcaacaatgtcctaacaatattactattagcaaaaatcccctaagaccagcattcttgacaacagccctcttggcccttagaagcaatgactttagcaaccaacgttgagccataaaaataaagccttggtaataatgctsttagcattgaccttagtaaaatggtcttagcaacagtctttagcaagagtgactctagaaatgtccccttcccaacaatgccctttgaagaaaatacctgtaacaacaatgcctttagtcacaatgccttcagcaaaaatgtcccttgccaacattaacaccctaggaacaatgatctgagaaacagtgtccttaacaataatatacaaaaacattctaagcaatagtaccctaagcaacaatatacttagcagtaataccctcagtaacaatactcttagcaacacgagatttaggatcagtgctggtagaaacagcatcatgagaaacactagcaatagtaataatgcctttagccacaatgaccttcaacagttctcttatgaacatcacccataactacaatggctccaggaacaatgcacttagaaataacttcct

SEQ ID NO: 162442 - DNA, 596 bp, Homo sapiens
caaccacactctttgcaacaatgtcctaacaatattactattagcaaaaatcccctaagaccagcattcttgacaacagccctcttggcccttagaagcaatgactttagcaaccaacgttgagccataaaaataaagccttggtaataatgctcttagcattgaccttagtaaaatggtcttagcaacagtctttagcaagagtgactctagaaatgtccccttcccaacaatgccctttgaagaaaatacctgtaacaacaatgcctttagtcacaatgccttcagcaaaaatgtcccttgccaacattaacaccctaggaacaatgatctkagaaacagtgtccttaacaataatatacaaaaacattctaagcaatagtaccctaagcaacaatatacttagcagtaataccctcagtaacaatactcttagcaacacgagatttaggatcagtgctggtagaaacagcatcatgagaaacactagcaatagtaataatgcctttagccacaatgaccttcaacagttctcttatgaacatcacccataactacaatggctccaggaacaatgcacttagaaataacttcct

SEQ ID NO: 162443 - DNA, 597 bp, Homo sapiens
aatttcttttttaatgctgaatattatttccattgtatgtctataccacatttgctttatgaatttatctgttaatggacattaatgttgtttctacatctgagctattacgaatagtgttgcaatgaacataggaatggtaatattacttcaagatcctgatttcaattcttttggataaatactcagaagtgggattattggagcaatataatggctctgtttttaactttttgaagaccgttcrtacttttttcccatagtaaatgcaccatcgtgtattcccacaaacaatgtacacaggttccatttctccacatcccttccaacacttgtctttttttttttttaataataatcatcctgacaggtgtgaggaaatatttcattgtggttttgatttacatttttctgatgattagtaacactgagcatcttttcatatacctgtgggtatttctcttctttggaaaaatgtctattcaagtcctttgctcatttaaaaaatcagattgttagttttatctactgagttgtttgagttcctaacgtattttggaaattaatctttttcccagtgttttgttatagaagctt

SEQ ID NO: 162444 - DNA, 597 bp, Homo sapiens
aatttcttttttaatgctgaatattatttccattgtatgtctataccacatttgctttatgaatttatctgttaatggacattaatgttgtttctacatctgagctattacgaatagtgttgcaatgaacataggaatggtaatattacttcaagatcctgatttcaattcttttggataaatactcagaagtgggattattggagcaatataatggctctgtttttaactttttgaagaccgttcgtacttttttcccatagtaaatgcaccatcgtgtattcccacaaacaatgtacamaggttccatttctccacatcccttccaacacttgtctttttttttttttaataataatcatcctgacaggtgtgaggaaatatttcattgtggttttgatttacatttttctgatgattagtaacactgagcatcttttcatatacctgtgggtatttctcttctttggaaaaatgtctattcaagtcctttgctcatttaaaaaatcagattgttagttttatctactgagttgtttgagttcctaacgtattttggaaattaatctttttcccagtgttttgttatagaagctt

SEQ ID NO: 162445 - DNA, 556 bp, Homo sapiens
agggtgcaaagtgttgttcctgggtgtatgtgtgagggtgttgccaaagaagactgacatttgaatcagtggactagaagaggcagacccaccctcaatctgggtgggcaccatctaatcagctgccagcacagctaaaataaagcaggcaggagaatgtggaaggactagactggctgagtgttctggccttcattttctcccatgctgtatgcttcctggctttgaacattggactccaagttctttggcttttggacttttggacttacaccagtggtttgrcaggggctcttgggccttcagccacagactgaaggctgcactgtcggcttccctatttttgagatttgggaattcagactggcttccttgctcctcagcttgcagatggcctattttgggacttcaccttgtgacagtgtatactccttaataaactccctttcacatatacatttatcctattagtcctgtccctctagagaaccctaatacaccccacctttccagacctaaccagtgtatgtcttacatgtactgattcatgtcttat

SEQ ID NO: 162446 - DNA, 497 bp, Homo sapiens
aaggttacagcataggctctattgctaaaagttttcttaaatttttaggccttctgaagtcaagtaaastactatgctatatatcttcttgagctatcactcctcccagagatattttactggaagatgcccaaatgattagattagcctttttcaaaagtcagtatgactgttaaaagtcatatactcactgagcctctaaaggcaaaaatattatttaaagttcttgaatagacaatgacttgaatatattttgtctaatagaaggattcattttcaactctagatgcaaaaaaattccctttaaacaacatgttaacagattagcaatataatccattggagagattgtcgggaaatacatatttatatactgctgaagaaaatatttctatatacaacatctatgaaaagtaaatttggaatacctgaaaaaaacagcaacccttcttttaaggctatccaggcaaaattctaaagtggcatatgcaaaaggc

SEQ ID NO: 162447 - DNA, 497 bp, Homo sapiens
aaggttacagcataggctctattgctaaaagttttcttaaatttttaggccttctgaagtcaagtaaagtactatgctatatatcttcttgagctatcactcctcccagagatattttactggaagatgcccaaatgattagattagcctttttcaaaagtcagtatgactgttaaaastcatatactcactgagcctctaaaggcaaaaatattatttaaagttcttgaatagacaatgacttgaatatattttgtctaatagaaggattcattttcaactctagatgcaaaaaaattccctttaaacaacatgttaacagattagcaatataatccattggagagattgtcgggaaatacatatttatatactgctgaagaaaatatttctatatacaacatctatgaaaagtaaatttggaatacctgaaaaaaacagcaacccttcttttaaggctatccaggcaaaattctaaagtggcatatgcaaaaggc

SEQ ID NO: 162448 - DNA, 497 bp, Homo sapiens
aaggttacagcataggctctattgctaaaagttttcttaaatttttaggccttctgaagtcaagtaaagtactatgctatatatcttcttgagctatcactcctcccagagatattttactggaagatgcccaaatgattagattagcctttttcaaaagtcagtatgactgttaaaagtcatatacycactgagcctctaaaggcaaaaatattatttaaagttcttgaatagacaatgacttgaatatattttgtctaatagaaggattcattttcaactctagatgcaaaaaaattccctttaaacaacatgttaacagattagcaatataatccattggagagattgtcgggaaatacatatttatatactgctgaagaaaatatttctatatacaacatctatgaaaagtaaatttggaatacctgaaaaaaacagcaacccttcttttaaggctatccaggcaaaattctaaagtggcatatgcaaaaggc

SEQ ID NO: 162449 - DNA, 497 bp, Homo sapiens
aaggttacagcataggctctattgctaaaagttttcttaaatttttaggccttctgaagtcaagtaaagtactatgctatatatcttcttgagctatcactcctcccagagatattttactggaagatgcccaaatgattagattagcctttttcaaaagtcagtatgactgttaaaagtcatatactcactgagcctctaaaggcaaaaatattatttaaagttcttgaatagacaatgacttgaatatattttgtctaatagaaggattcattttcaactctagatgcaaaaaaattccctttaaacaacatgttaacagattagcaatataatccattggagagattgtcgggaaatacatatttatatrctgctgaagaaaatatttctatatacaacatctatgaaaagtaaatttggaatacctgaaaaaaacagcaacccttcttttaaggctatccaggcaaaattctaaagtggcatatgcaaaaggc

SEQ ID NO: 162450 - DNA, 517 bp, Homo sapiens
tttcatgttactggaccactttccaacttaaaaataaaaaaaaaatcaagatacagagaaaaaagatgcaaagaactttccaactttaaaatttaaaaaagtcaagatacagagaacaaagtaggaattctgggaagattttcttcgaagagwactgttatcagatatgatttcttttcttatcacctctaccatattacattcgaattccaagcacagtaaaggcagctttgatgatattactcagcgtccttgatttaacatataaaagtgatggttttttttaatacctgagaaagctaaaggccctacatttcctacatctattaatgaaaagattggatgattccatttgccaaggactaggagtcagttgcagaacaggaaaaagagaaatcattgtccaagaggtcttaagccagaagaccttaacaaccagagaaccggaaaagtggacaatcagataaatgagggcagaggaggtccaaacagaaaagcatccacaagcccacaaagc

SEQ ID NO: 162451 - DNA, 414 bp, Homo sapiens
catgttccaggcagcagaaaagagggcaatgaaaatgataaatgtcccccatttaaggaccttcccaagagtctcaggtatcaacattatggacattarattactaattttagctgcaagggaagcagggaactggagtactttagctgggctgatctgaatacaattgtttttctgctattctgaatatttattaaagtcttaactccttactaggtctatttctcttttaacaattgggtccacaattgattcttcaggatgtttattgtgtttgaggaatagctaaagagtcatcatggtggttgaagagaagcagtcagtccatatgctcatgcttttactaaacttgaggtcttccctgacttctatgcagatgtcccttatgtaactgttcacaaggtatcccacaag

SEQ ID NO: 162452 - DNA, 636 bp, Homo sapiens
tgtgtattatatacaagacaccattttatgtggtatatggaatgtaagggrgtcgatattccaatgtgggggcataaaacatatgctttatcagcgagattgtgaaataactagggggctgtctaaggggattcagtgaaagcagagaatgtcatgtcactaatgctccatgaggataatgccatttaacagaagattggaggaacagattacacagggagtggagagagtggtcatttcaaaccagcattgtaagtaaaagggcatgaaagtaggaaggagtgaaagagatctgcaaggaaggcagaaatagccattgttatatttctaccttctctctggaagctttgattaatcaatgtaataagctactctttttcttagcatcactttaaacccaacctaaagagaaaacagataataatatgagagctagcataattaactccaccagtagcaatgtcttcaaatgcaagatacgaaatcatcccattaaacatttctggggaaagcaaaagtgaaatttaaaaaactgaaccagaaatacttttctgggagttgtaagatattgacaaaaaagaatttctatgtatatcaaaaggacttaagcctgaaaatgctaatgtaatatctact

SEQ ID NO: 162453 - DNA, 605 bp, Homo sapiens
gagctaaactttgtgtgaacttacgtgctagagggaacacacatacacatctcgtagtgtagatggagtgtgatgcaagctgagacaatgagtggatctctggtctctccaatgttaatacaggaagaagctaatgaattgggggccccaggggactggggctaaaccaacttagtcacataaacttctgttgactaaataaaataaaattaagctttaaaaaattaaggttagttttattcagaagtctttctgaggattacagactgaggcctgtagcctgggagcagttctrtcagactgctccaagacagtcttttaaatcacagtttatatactggtggtgaagattcagtatgtgcaaaagcatatcaaagtttgggtataagagtacatctggttatagattatgaaagaacattcaattatagattggagaagcataatcactattgctgtcagacattatcttatgtgtaagaagaggccaggccaaggtcatttgtcttttaaggaatgcagtgactcagatcagagatgagatgcagggggccgagtgctctatcctgttttatctgcaaagaattcttcagaagaactgcgtt

SEQ ID NO: 162454 - DNA, 394 bp, Homo sapiens
gtgagacttatttacttttatgagaacatcatgggaaagacctakccccatgattcaaatacctcccactgggtccctcccatgacacatgggaattatgaaatctacaattcaagatgagatttgggtggggacacagccaaaccatatcataggagtttttcagattgtggagattaaccccttattagatatatagcttgcaaatattttctctcattctgtacattgccttttcactctgttgattatttcctttgctttacagaagcttttagtttgatgtagtctcacttgttcatttttatttttgttgactttacttttggtgtcatatccatgaaatcactgccatgaccaatgtgatactaagagggaagtttattgtgataaa

SEQ ID NO: 162455 - DNA, 380 bp, Homo sapiens
accttgcttccccaatcagtctattaccattattgtccaatcacatttctacatagctgtctatacttcgttgaacctaagcataaaaacagataatttcccctgtatttttgggtcttcattctgaaggctcccgtgtatacacgttaaataaattggtacatgccctttctcctattaatccatckgcctcctgtcagtgatttttggtgaaccttcagagggccaaggggaaagctctccattggtccctacaccagcttgtctttagaacttctccatttctagcaataatggcaactgcaacaatttgacttgacaacctagaagtataaagaagtcctcatactgccccaatatccttggtctctaagtcctgt

SEQ ID NO: 162456 - DNA, 380 bp, Homo sapiens
accttgcttccccaatcagtctattaccattattgtccaatcacatttctacatagctgtctatacttcgttgaacctaagcataaaaacagataatttcccctgtatttttgggtcttcattctgaaggctcccgtgtatacacgttaaataaattggtacatgccctttctcctattaatccatctgcctcctgtcagtgatttttggtgaaccttcagagggccaaggggaaagctctccattggtccctacaccagcttgtctttagaacttctccatttctagcaataatggcaactgcaacaatytgacttgacaacctagaagtataaagaagtcctcatactgccccaatatccttggtctctaagtcctgt

SEQ ID NO: 162457 - DNA, 543 bp, Homo sapiens
  misc_feature (1)...(543): n = A,T,C or G
tattgttaattttcttaagtgtgaaatgctattatggctatggaaaaaatctttgattataatttgtttgtttatttgcttgttttttgagacaggagtctcactctgttgcccagactgaagtgtggtggcatgatcacggctcactgcagccttgacctctggggactcgggtgatcctcccacctcagcttccctgagtagcagggactacaagagtacatcatcacatccagctaatattctttgtattttttttcgtagagacagggttttgcaatgctggccaggctggtctcaaattccnaaggctcaagtgagccacccgcctcagcctcccaaggtgctgggattacaggaatgagcygcctggcctagaatttgcatagccatattttagttaggtcacattatagaactctctaatcttttagtaaacagaggctattactgctctataatgtccacttttatatttttatagacaataaatataaaatacatataaacattaatataaaattaattttcaattaaatatct

SEQ ID NO: 162458 - DNA, 435 bp, Homo sapiens
  misc_feature (1)...(435): n = A,T,C or G
agggggggagagagagagaaagagagagacagagaggggaagagagagagagagaaaaggggggagagagagagaaagagagagacagagaggggmagagagagagagagagagagagaatgttttcctctttttataaagccgccaattctatcagaatagaaccccacacacttataccctcatttaaacttattaggcatctgtaagttctacctccaaatacagtcacattatggcttcaacatatgaactttggaatgacacaattcagtccatagcgggagagagccatctgatagaattaaagggagcagtgtctcgcagttacataagactgggaatagtgaatgttcccacaaaccagactggaagattcataatttacaggtcattggatagagtacannnnnnnnnnnnnnnnnnnnnnnnnnn

SEQ ID NO: 162459 - DNA, 435 bp, Homo sapiens
  misc_feature (1)...(435): n = A,T,C or G
agggggggagagagagagaaagagagagacagagaggggaagagagagagagagaaaaggggggagagagagagaaagagagagacagagaggggcagagagagagagagagagaragaatgttttcctctttttataaagccgccaattctatcagaatagaaccccacacacttataccctcatttaaacttattaggcatctgtaagttctacctccaaatacagtcacattatggcttcaacatatgaactttggaatgacacaattcagtccatagcgggagagagccatctgatagaattaaagggagcagtgtctcgcagttacataagactgggaatagtgaatgttcccacaaaccagactggaagattcataatttacaggtcattggatagagtacannnnnnnnnnnnnnnnnnnnnnnnnnn

SEQ ID NO: 162460 - DNA, 614 bp, Homo sapiens
ctttgacaattttgaataaaagcagtatggacatttttgtgcaaacatatgttttcatttctggttatatggctaactttataagaagttgtcatactgttttcaaaagtgcttgagccatttcacattcccaccagcagtgcattaaagttctagttgctccatatcttcatcaacactgcattttaaggcatctcaatttgagccttcttagtggacatgtagtgttaactccttataatttgcatctccttagatgactaatggttttgagcatttttttcatgtaaaatcccattagaaaacaacccaaagatttgaatgaacacttcgccaatgagtatactgtagtccctcattatcagcacaggataacttccaagagtccccatacaaaccgtccctcagtgtccatgggagatttgctctaggcaccctgtggctagtaaaatctgcaaatgttcaagtcatttatataaaatagcacagtatttgcatataacctatgcactttctctcatatactttaaattatctctaggctacttataatacctaatatataataaatgctatggtaatagttgttgcttrgtatagattatgaaaaaaat

SEQ ID NO: 162461 - DNA, 388 bp, Homo sapiens
gatgtttccacaaactaaagtgtgtactatcaacattattatttaaatagctagtgaaaccatcaaaatcttaccacatttacatgttgcaccaggaatcatctctgctttcctccytgcaactcagtatttttgacacaatgtgaattagtgcacaggaagcctcagtgtttcctggagggttgcccgcagctcactggcctcagagaaagtcataatgtgtgtacaaacttctctggaataacttgagcttattacatataacttctggtaggtcatttgccccctccgctctccaaaagaaaacctcaggcctcttaaattaactacaagcctttttgggactgagccattattttacacagcaaggttgtcagaaaaaaaatag

SEQ ID NO: 162462 - DNA, 384 bp, Homo sapiens
tattacctaaagagactgacatctcacagtctgttcctgtctaagaatttacatatgaatgcctaaacagagttattccctaatgaaataaaggaaactggattcatctgagggattctgtgatgtcttgggctctagggcataacactttaacccctccttcttaactatggctgaccttcagcccttccctaacatatattctcataaagttttcaaactgtaggtatttacccattaacaagtgaataaatcactttagtacagagcactggtatttttcaataaaatcaaaccgaccaggaaataatasagtgcattgctcaacatgatgataaatattttgtaaaatatatcaaatatattttaaaatattattttatc

SEQ ID NO: 162463 - DNA, 519 bp, Homo sapiens
ccttgttatccctagcgaaatacaagtttacagacagctgagggctacaactctaaaaataaatcaacaacaataaccctatgaagaagaactgttggcataagtaatccaaataagcataataaatattctcaagcagggaatggaagacattactattgttagtagtgctaagaagaaagaaaaagaacaaggtcaaatgtgagatgtgaaaagcatgataggtgaataaagaacactagttagtaaaacaaattagtgagctggaatacaagactgaggaaatttcccaaaatgcarcaggaaaagataatgatgagacatgtaaaagaaaataagacttgtggagattagaaatcaaaatgaaaacatatagagaatagaggaatagatggagatttttaaaaatactaatgaagaaatatttgataaaataaggaaaataaaatcacccaatttaaagaaagctgaaagtggtccatacagagcaaaaaacactagacaaaaaacctcacccct

SEQ ID NO: 162464 - DNA, 381 bp, Homo sapiens
gaaaacaatgcatgggagaatatcttttttaaaggaagatatagatcagtggtccccagtctttttggcaccaggaaccagttttgcggaagacagtttttccacagacttggtgatgccggatggtttcaggatgaaactctttcacctcagatcatcaggcattagattctcataaggagtgtgcaacctggattgcttgcatgtgtagttcgcaatagggtttgcggtcctatgagaatctaatgtcttcastgatctgacagaaggctgagctcaggtggtaatgttcactagcccaccactcacctcctgccgtgtggcctggttcctaacaggtcacaaaccaacccatactggtccacagcctggagttgagga

SEQ ID NO: 162465 - DNA, 381 bp, Homo sapiens
gaaaacaatgcatgggagaatatcttttttaaaggaagatatagatcagtggtccccagtctttttggcaccaggaaccagttttgcggaagacagtttttccacagacttggtgatgccggatggtttcaggatgaaactctttcacctcagatcatcaggcattagattctcataaggagtgtgcaacctggattgcttgcatgtgtagttcgcaatagggtttgcggtcctatgagaatctaatgtcttcagtgatctgacagaaggctgagctcaggtggtaatgttcactagcccaccactcacctcctgccgtgtggcytggttcctaacaggtcacaaaccaacccatactggtccacagcctggagttgagga

SEQ ID NO: 162466 - DNA, 535 bp, Homo sapiens
atattgcatattcatggcacagacatgtggaacaagytcgatgtacaaacctcctagaaatttcatcatcaccttgcatgaaaactaccctgtgaatcatgggataccagcatttaagtgctattctatgaaccatccttttgccttcagcttccaagattttttggtaaaccccttagcattcaagccttttggcaaaagaatcacagaacttgaattgcaaattagttgtcataattctggatgctgcagttagctcagatacaataatatatacctacgagacattaaatcttagatacattaaaatttacatcaagtgattccaaaaatgagtataaataattcaactttaacattaaatcttagttagcatcagataaactggcctatcttgggaaataaccactgaagtcctctagaggcactgttgtgtcagagggttgaaagtatcaaatccaaaatcagaaggtattccaagttcagcttcgctttgtattagctattaagacctggaacaccttagttaactttc

SEQ ID NO: 162467 - DNA, 314 bp, Homo sapiens
tgtgttccatgcatactcttccttacctccattatggaatagcagactgatttcatcttgacagtccaggtcaatcagcccagccaacactgtaaatcccttcttatcctgttgactttaggataggagcagcccaaagtgtccaggtggaaatcttaacttccagtttaatggaamctttgttgtgtttcctagtggcagcattcctccctctggaactaagacctctaggccaggagaacataatgtcagggaaacaggaagcaaacatttgctagtggattactagcggtgatggtgagtggtgtcacttc

SEQ ID NO: 162468 - DNA, 560 bp, Homo sapiens
aattgtaaagaatcaataccttacagactattttctctgatcttaatgcaataaaattagaaaatattaattaaaaattgctaaaaatcaaattttagaaaataaaatattaattcataactctttagttaattagagatcaygaggaatattgtaaagtaaaaattaaatagttcatgccagtatctgtgggatgaagctaatacagtacttagaggggaaaatataccttaaatgcatgtatcagaaatcaagaaaagttgaaaacaaatgagctaagcatttatttcagtaagttgaagggtaagcaatagagctcaaccacaaaaatacaaataataaaataatcatgatgaagacagactcatatctcaatgaagaacaaagaggtaaagtgaaagagaaagtgagaaaggagttaccaaaaagtacaaagtgtaaaaagcaaaaattttttaaatattatttttaaaacacatgcatacatttgaaaatctacataaaactgataaattttcagacaccctaaaatgaaaaattggtgcaagaaaaaataggaa

SEQ ID NO: 162469 - DNA, 570 bp, Homo sapiens
actaaaagcgtaagtaaatacttaaatatttgatagttttctttaacctggttcacaatgtcttacacattttatccaaagaaataaagccagtgaaattaaggttttatttgtcttctaagtcttttctagttcatactaaaatattattaaaatctaaaatgtcagaaggcctagccagagcaatcaagcaaaaaaataaataaataaaaggcatcgaaattagaaaagagaaagtcaaattatctctgcttgctgataacatgatcttatacctagaaaaccctaaagactcctccaaaagactcacagacttgataaatgacttcagtgaatttttgggtaataaaatctatgtatgaaaattagcagcatttctatacaccaataatattcaagctgagaaccaaatcaagaactcaatcccatttatgctacacacacacacacacacacacacacacacacacaaattacytaggaaaacatttaaccaaggatatgaaagctctctccaaggagaactacaaaacactgatgaaagatatcatagacaacacaagcaaatgg

SEQ ID NO: 162470 - DNA, 576 bp, Homo sapiens
aattagcagcatttctatacaccaataatattcaagctgagaaccaaatcaagaactcaatcccatttatgctacacacacacacacacacacacacacacacacacaaattacctaggaaaacatttaaccaaggatatgaaagctctctccaaggagaactacaaaacactgatgaaagatatcatagacaacacaagcaaatggaaaaatatcccaagctcatggattggaagaattaatcttgttaaaatgaccatactgcctaaagcaatatacacattcaatgcaattcctatcatattcccaaggtcttttttcacagaattaggaaaaaacctattytaaaattcatatggaactgaaaaagagccagaatagccaaagcaatcctagacagaaagaactaggctggaggcaccatattacctgacttcaaattatactacaagctacaaggctatagtaaccaaaagagcatggtattagttgaaaaaaaaaaaaaagacacatagacacatagaccaatggaacagaatagagaaccagtaaataaagccacatagctaccacaaa

SEQ ID NO: 162471 - DNA, 566 bp, Homo sapiens
gaataaatggggaggtattccatgttcacagataggaaggctcaatattgctaggatgtcacttcttcacaatttgatctattgattcaatgcaatcccagtcaaaatcacaagttactttgtggatattgacaaattgattccaaagtttgtatggaaaggtaaatggcttagaaatgccaatgcaatactgaagaagaacaaagtcagaggacttacccaactttaagacttactataaagctacagtaataaagacactgtagtattcttgaaacaatagacaaatagatcaatggaacagtatagaatgtccagaaatagacccacacaaatatagttagctgattcttgacaaaggagcagagacaacttaatagagaaaaaatagtcttttcagcaaatgttgctgaaataactagacatccacatgtaaaacaatgaatctaaacacagaccttatactgttcacaaaaattaactcaagatgartcagcccactgggtgcagtggtgcttgcttgtactcccagctactcaaaagactgaggtgggaagatggtttga

SEQ ID NO: 162472 - DNA, 584 bp, Homo sapiens
actgggcttaagcaatcctcccacctcactttcccaagtagctggaactacaggagtaggccacatgctcgattaagttttgtattttttgtagagatgggtctyactatgttgcccaggctggtcttgaactcctgggctcaagctatcctccttccttagactcccaaagtgctggaatgggccactgcgcctggctcagttctttaatcttcagattaaaacttccagccatgcagtaaactttttcttagtggaaaacattatatgctgtctcattcctagattgtaaactctttgaaggaagagacttctttcttgaaacattaccagatcttgtctatatactgagactcaaattctgcctctctcttgggtcctgaaatggacacactggataccacccaaaagtttatgcatggcagacttatgctaaacaatctaaattagcattcaggatctttttactacacctcaattcaaccacttgtaattatgtatttatttttttttttattccactgagctaggcactgctggagctaaaaagatgagtaagacccagttatgcctcccaggagcac

SEQ ID NO: 162473 - DNA, 645 bp, Homo sapiens
catactatttttcattgctgtattcctagcatctacaatagcatctgacttatagtaagtgctcaacagatattgatgcctggaatttgctttaaaatacccaagaaaagaaaatacacagttagataaatagataaagagaaaaaataagagtggctattagttgataattattgtttcttggcaatgaatacacaggcgttcaatatactatcctctcaaaatttttcacaataaaaagctttgtacaaaaggtttattttaaatttactcctcactgagggagggagtagtaagagagactattcttctttcctcttccttctcccagtggtattctgaaaatacaatttaacatcttcctcagtggagcagaaaatcaatarcgttgctctggtgctctaaagcccatcctccagccagtcgtcctccggtgacccaaagtgacttagctgccaactcttctgcaagattagtggtgcaattaacaatccttgaagaattaggccagcatttcttgtcagacactacataggtatacttcgaatgaatgtaatctgagaaactaagagtgattagtgattccccccggccccacctcccgccccgctttcaataaggcatgaaacagtggccaggaggagc

SEQ ID NO: 162474 - DNA, 558 bp, Homo sapiens
aatatactatcctctcaaaatttttcacaataaaaagctttgtacaaaaggtttattttaaatttactcctcactgagggagggagtagtaagagagactattcttctttcctcttccttctcccagtggtattctgaaaatacaatttaacatcttcctcagtggagcagaaaatcaataacgttgctctggtgctctaaagcccatcctccagccagtcgtcctccggtgacccaaagtgacttagctgccaactcytctgcaagattagtggtgcaattaacaatccttgaagaattaggccagcatttcttgtcagacactacataggtatacttcgaatgaatgtaatctgagaaactaagagtgattagtgattccccccggccccacctcccgccccgctttcaataaggcatgaaacagtggccaggaggagcctgtgtgaaagtcctcagctcttcccaaaagagaggatgggttgttgactcatggagggggcggggtgggggcagggaagagaaaccagcagttcctttttctctgctgctcctgtg

SEQ ID NO: 162475 - DNA, 558 bp, Homo sapiens
cggtgttaaaaagaatcatggctgctagctagacayatgtcattctacattgggccaaacccataagatgtgtaacaccaagagtgaaccctaatggaaactgtggacattgggtgataatgatgtgtccatgatggttcatcagttgtagtataagtatcgctatggtataggatgccattagtcaggggaggatgagttggggagagtacattgaaagaaaaaagaaacacgatcaaatatgtaggctaactgcttatggtgtgatggttctcaaattagtttagtgaaaacatctcgaaccccaaagaaagttttgaaaatgtgaggtggtgtcatgcctgagagtttcctaggcactggtgtatttctcttagcctggtgctttaccaacttcagaagtccctcaaggccttctgctccatgtccaggatggctctagcactgcatccctaaccttagaggctaccattaaagtctagtgcagtcattcatgcatccatcatctactgagtgcctcctctgtgcagaggcttgtggccagatgctagaaccaca

SEQ ID NO: 162476 - DNA, 410 bp, Homo sapiens
ggggccttggtcagcataatattttggtgtgataatcagtagggattttgtcatatttttcacggaaagaaaataaaagatgtctatggcattagttttgctgttgaaaactagactaaataaatttgacatgacttgctcttggtgaatccttgttggctcctgataaatatatttcttttttaaattgccacaaattgtgttttattctcyattaaagatttttccaggtttactagtttgtagtttttggtacccacaacattctttttagaaaattaatacattatttgcctgaattaaaccttctggcatttcttattaagaggcaagttggagtcataaaatgtatttactttttcatggaattgaaaggaaacgtcctaggcaagttcattaagaatccaaag

SEQ ID NO: 162477 - DNA, 410 bp, Homo sapiens
ggggccttggtcagcataatattttggtgtgataatcagtagggattttgtcatatttttcacggaaagaaaataaaagatgtctatggcattagttttgctgttgaaaactagactaaataaatttgacatgacttgctcttggtgaatccttgttggctcctgataaatatatttcttttttaaattgccacaaattgtgttttattctccattaaagatttttccaggtttactagtttgtagtttttggtacccacaacattctttttagaaaattaatacattatttgcctgaattaaaccttctggcatttcttattaagaggcaagttggagtcataaaatgtatttactttttcatggaattgaaaggaaaygtcctaggcaagttcattaagaatccaaag

SEQ ID NO: 162478 - DNA, 524 bp, Homo sapiens
ctcacagggttgaatcttaggggtaggaggtcaaaggtgcagttaagaggtggcagagaggcgaagaggacagcagaactgtgaagctgtgagtaatcatgggagggaaatgtaacacatggtcttggacccactaagaattggacattgttgtggcattgccagctcatctcttgggcattgagaaaaccttactccagcaatgttattccgtaattgccctgatgactagagggttatgactttccctttttgaaagtttgtgttttgagtaatctgtttagaaactccacccatagggcactggtggtggcaagacattggcttttgggggacataatttakatcaccaagtccccatttgacatttcaatcatattcttgcctttaaggttctgggtgtatctgtatcttcacatggtgaaggaattataaagcgattttgtgtcccctctgtgggcacaggatgttgcagaaataaagctgatagaaatagtcacatgagttgaccagatggcatcatc

SEQ ID NO: 162479 - DNA, 449 bp, Homo sapiens
taacagtgggtttactgcatttgggaagtagaatcattcactttagaaaaataactataatcatggcrgatgaaataaaaagagatttttgaattgtttgtgtaagcccaaatgttgaagttaactgtttttgtgaggttttccacttgtttgcttttgtttttgcatatagagaagtagaaatgttgcctggctttcttctgagtctgggtaaagctcgagggaggggtataatggagggaactaatgcgaattgagctagacttggtgcagtcatatgcaagatctcagttcatatcacaaacgcccttagaaggagattcagctattcttgttttccagataaggaaagtgaggatcgaaaggcctcagacatgatcacatccagtcgaagcctgagacctgtggcccctgactctttagaatccctttcatcagactataaaatt

SEQ ID NO: 162480 - DNA, 451 bp, Homo sapiens
taacagtgggtttactgcatttgggaagtagaatcattcactttagaaaaataactataatcatggcggatgaaataaaaagagatttttgaattgtttgtgtaagcccaaatgttgaagttaactgtttttgtgaggttttccacttgtttgcttttgtttttgcatatagagaagtagaaatgttgcctggctttcttctgagtctgggtaaagctcgagggaggggtataatggagggaactaatgcgaattgagctagacttggtgcagtcatatgcaagatctcagttcatatcacaaacgcccttagaaggagattcagctattcttgttttccagataaggaaagtgaggatygaaaggcctcagacatgatcacatccagtcgaagcctgagacctgtggcccctgactctttagaatccctttcatcagactataaaatttc

SEQ ID NO: 162481 - DNA, 586 bp, Homo sapiens
aataggttttaaagcaaaaataagtcattcaaaagggagggggaagcatatcaacctagaggaacagggtggtcaaagacaaaaaaggtggagaatccaggcatggtggctcacacctgtaatcccaacactttgggaggccaaggcaggcagattgcttgaattcaagagtttgagaccagcctagccaaaatggtaaaaccttgtctctacaaaaaatacaaaaactagccaggggtgatggcagacacctgtgaacccaggtactctggaggctgaggtaagagaatgacttgagcctggcaggaataggttgtaatgagccaaaattgcaccactgcactccaacctgggcaaaagagcaagaccctgtctaaaaaaaaaaaaaaaaaaaaaaaaaaaaaaaagggagggtggcaggaggtgggacarataaatcacagtttgtgaaaagccataaaataattcagcatggctaaagagtaaaaagagcagttagtaaaaagcaaaaggtaaggtagaaaaagattaatccaaagaaggcatgaccaaccaggtttcaaatgcaggacttatgaattctgcc

SEQ ID NO: 162482 - DNA, 586 bp, Homo sapiens
aataggttttaaagcaaaaataagtcattcaaaagggagggggaagcatatcaacctagaggaacagggtggtcaaagacaaaaaaggtggagaatccaggcatggtggctcacacctgtaatcccaacactttgggaggccaaggcaggcagattgcttgaattcaagagtttgagaccagcctagccaaaatggtaaaaccttgtctctacaaaaaatacaaaaactagccaggggtgatggcagacacctgtgaacccaggtactctggaggctgaggtaagagaatgacttgagcctggcaggaataggttgtaatgagccaaaattgcaccactgcactccaacctgggcaaaagagcaagaccctgtctaaaaaaaaaaaaaaaaaaaaaaaaaaaaaaaagggagggtggcaggaggtgggacaaataaaycacagtttgtgaaaagccataaaataattcagcatggctaaagagtaaaaagagcagttagtaaaaagcaaaaggtaaggtagaaaaagattaatccaaagaaggcatgaccaaccaggtttcaaatgcaggacttatgaattctgcc

SEQ ID NO: 162483 - DNA, 578 bp, Homo sapiens
cttattggtagacctaaatctgctgtgttcgccatctcacctacatgagtatctatgtgtagcattctgcatattcatcttttccaccttctggaggttttgtctttttataggcagcatgtgaataacaatggggccaaactggggaccagaaggggccattttctagttctgaacatagataagcatcactaacttttccctcctggcagtaatggcctcaaaagttccaacttaggagaaaaaggcaaaaccgtctgccaaagtgtgtgaaaagttagagcaaaccttggttttrccaagaacctgtgtccctcttatggaaattcacactttcacacttttagacaaatattaaatgtgtgacattctattacgtacagtgcctggcacatctagacacgcagcacactttagcccccttctttcttcttctaactccaagttctaaactagaaaaagccccacttgagtctgagatttgctttttgaactagtttatttcagattgtaatcatgctatctagggttgtgacagtgtttgctatttctagggcactttgacctgattctttttg

SEQ ID NO: 162484 - DNA, 578 bp, Homo sapiens
tgatgttgttgttgttgtttctttttccccagcttctcaggccaaaatactggatcatcttgggcactgttctctcctgcccaccctttcccatatgcagagtgttgtcacttctctctgcttccactgctaactccctggtccaagccgctgcaccacttttcgtgattattgccacagtctcctcactggttccctgcccccactcttgctctgaactatccagttaaaacctgaattagatcatctcatcctcatctcagagctttctcgtggctcctctgccctctcaggaaaaaatctaaattctagatgacctaaaaatcccttgtctcttactgtttatctgacctcatttactaccacctttttctttgatcattctgttccagccacactggcctccttaccactcctcaaatatgccaagcacagcccccaccccccagggctttgaactggctgatcccccttcctggaatgccttwccccaaatatcaacttagccaactccctcctctcctccaagtgtctgtttaaacatggcttcagtaggagctgtcttaacatcctattaa

SEQ ID NO: 162485 - DNA, 363 bp, Homo sapiens
ccagcagccaagaagtccagcaaggagggaagaggagaaggaggtctgtgtgcttcacccaaaactccagcacggaggatgytgctgagccaaaacccaggagatgaaactgctgggggcagaggagctggggaggtctgggaaatacaaacagcagcaaatctccccactttatcttcatagccaccaccccttacaccatatggctccccctctcagcaatgcagttgagcaacggtctcagccataccatagtggtgagggtttcatgatttgcctaatgagaggtcttactggcaaatttcatactaagagttggatgttgaaatttgactgtggggccacgtgcggtggctcatgcct

SEQ ID NO: 162486 - DNA, 381 bp, Homo sapiens
cagcagccaagaagtccagcaaggagggaagaggagaaggaggtctgtgtgcttcacccaaaactccagcacggaggatgctgctgagccaaaacccaggagatgaaactgctgggggcagaggagctggggaggtctgggaaatacaaacagcagcaaatctccccactttatcttcatagccaccaccccttacaccatatggctccccctctcagcaatgcagttgagcaacggtctcagccataccatagtggtgagggtttcatgatttgcctaatgagaggtcttactggcaaatttcatactaagagttggatgttgaaatttgactgtggggccacgtgyggtggctcatgcctgtaatcccagcacattggg

SEQ ID NO: 162487 - DNA, 516 bp, Homo sapiens
aaaggggaagatgacacagtgtcttccacctaaagactttctcctccccacagccatggttctgcgatttacattaagggctgtagcaggttggagtaaatggagcaggtttgcaattagttttcaaagtacttatctcattaaagtaaatgaattattgatttagrgacactcatgcttttagtgagtggcgtggtgccatcctcactctgggcttcagctcccggagccggtggccggcacaagcaaacttgctatgtgtagggaatttttttttaattttaatatttccttctcgttatttagctttgtaattaaagtggattcacatgagaaaggaagggtcggtttatgggaatagaagccccagagacaagcgtgcctccctgcaggaaggagcagagctaagagggagtgatgaggctcttgacctccacagctgatgaaggttgagcaaggcgggggtgcacacctggcggggctgggagggtttacaatgggctggggcttccctac

SEQ ID NO: 162488 - DNA, 516 bp, Homo sapiens
aaaggggaagatgacacagtgtcttccacctaaagactttctcctccccacagccatggttctgcgatttacattaagggctgtagcaggttggagtaaatggagcaggtttgcaattagttttcaaagtacttatctcattaaagtaaatgaattattgatttagggacactcatgcttttagtgagtggcgtggtgccatcctcactctgggcttcagctcccggagccggtggccggcacaagcaaacttgctatgtgtagggaatttttttttaattttaatatttccttctcgttatttagctttgtaattaaagtggattcacatgagaaaggaagggtcggtttatgggaatagaagccccagagacaagcgtgcctccctgcaggaaggagcagagctaagagggagtgatgaggytcttgacctccacagctgatgaaggttgagcaaggcgggggtgcacacctggcggggctgggagggtttacaatgggctggggcttccctac

SEQ ID NO: 162489 - DNA, 516 bp, Homo sapiens
aaaggggaagatgacacagtgtcttccacctaaagactttctcctccccacagccatggttctgcgatttacattaagggctgtagcaggttggagtaaatggagcaggtttgcaattagttttcaaagtacttatctcattaaagtaaatgaattattgatttagggacactcatgcttttagtgagtggcgtggtgccatcctcactctgggcttcagctcccggagccggtggccggcacaagcaaacttgctatgtgtagggaatttttttttaattttaatatttccttctcgttatttagctttgtaattaaagtggattcacatgagaaaggaagggtcggtttatgggaatagaagccccagagacaagcgtgcctccctgcaggaaggagcagagctaagagggagtgatgaggctcttgacctccacagctgatgaaggttgagcaaggcgggggygcacacctggcggggctgggagggtttacaatgggctggggcttccctac

SEQ ID NO: 162490 - DNA, 479 bp, Homo sapiens
gcaacacgcagtccacgcttggtacatacccaaaaatacatcatcatttcggaaccgcggctccacrgcaggctcccggggaggaggggaggagacccaatcagggaagcggccgctggcggcaggttggtgggggtaggggcttggtcccccaacgctggcactcagtttagctgtcacttgcagctgtcttaggaagtgcggctctcctctctgcctcccgctcgctcctgctcactccaggtcctctctccctctccctgtgtctctgcctctcgctttatttccccaggttgctcagctccgtgcctgctctccgctcgcccatcgatggggtcctgcccggcactgccctgtcgcagtcactcctgctgcctggatctctgttcagagttgaactacagcgtcctgattccagcgctcatcaagcaggggacccaggggagggtgtgtgtgtgtgtgtgtcggggggacacaaa

SEQ ID NO: 162491 - DNA, 548 bp, Homo sapiens
tagtggtttagttttatgtttagtaaatatgtgaacttggataagtttcttctcttcccttcccttcccttttttgaaacagggtctcactttattgcccaagctggaatgcagtggtacaatcatagctcactgctgcctcgaactcctgggctcaagtgatcctcctaccttagcgtcctgagtrgctaggactgcaagtatgcactaccatgcctggctaattttttaaaaaatagtttttgtagagatgggggtctcactatgttgcccaggctggtcttgaactcctggcttcaagcaatcttcccaccttggcctcccaaagtgctgggattatagacatgagccactgcacccagccagtaagtttcttttctggtttttgtttccacattaactagaggttaatgataataaatatctctcaatgttgttagggcattcagtggattagtgcatgtagtgtctggcacttagtaatgcttattttatttagggctatcgtttttttagaataatagaatctgtcctttgtggaacaggac

SEQ ID NO: 162492 - DNA, 499 bp, Homo sapiens
ttcacagggaagaaagagtagttgtttgaaataaaagcaaagaaaaacaacaaaacaatacacacacacatacacacaccccaaaacataaaacaaatttttttttcctgtgggrcccaagatcttgaacactaaaaagtggttagaattaaaatatttgtaaagtactagtgaaacaatgatagtgtcattgattactgtttaaaaagttgagcgcagattgaatttattatcaaagaaactgtttggactgctccaaaataaatcaatgtgcttccaactttaccttaggtagaacatggtctgataaaaaaatttttcccatattgtgtggagtgaaatccttgatctaaagcatgttagggttgctacattagtttctttattctagtttcagtaagtattttaaggtgattgagaaaagaagatctctgtgagattaaaaacctgctgtgtagcccaaggaatgtaacgttaaataaaatgtcagaaagaattc

SEQ ID NO: 162493 - DNA, 510 bp, Homo sapiens
tattacagactgttttctgactacaatgaaattaaattggaaataaataataaaaagatatctgtaaaaatccccaaatatttggacattgagtaatacatttttaaataaccaataaatcagttaactaataataaggaaaatcagaatatattttgaagtgaatgagcataaagacacagcatgacaaaatttgggggatgcagctaaagcatccttaaaacaatttagaattttgaatgtgtatattagaaaataagaaagttctcaaatcagtgatgtacattgccatctaaagaagttagacaaagcagttgaaataaacataaaagtaataaagaaatcagtaaaatagaaaacagataaaccatrgagaaaattaataaagctaaaatatgtctcattccaaacatcaataaaattaaaaatacttttaactagaccagttaagcacacacacacacacacacacacacacacacacacacacacacaaagcacaaattacaa

SEQ ID NO: 162494 - DNA, 510 bp, Homo sapiens
tattacagactgttttctgactacaatgaaattaaattggaaataaataataaaaagatatctgtaaaaatccccaaatatttggacattgagtaatacatttttaaataaccaataaatcagttaactaataataaggaaaatcagaatatattttgaagtgaatgagcataaagacacagcatgacaaaatttgggggatgcagctaaagcatccttaaaacaatttagaattttgaatgtgtatattagaaaataagaaagttctcaaatcagtgatgtacattgccatctaaagaagttagacaaagcagttgaaataaacataaaagtaataaagaaatcagtaaaatagaaaacagataaaccatggagaaaattaataaagctaaaatrtgtctcattccaaacatcaataaaattaaaaatacttttaactagaccagttaagcacacacacacacacacacacacacacacacacacacacacacaaagcacaaattacaa

SEQ ID NO: 162495 - DNA, 551 bp, Homo sapiens
tttctactaatatttacttaatggttggctttgattttcaataagcacatgttgttataattgcctgatcccatttatgtacaatcataacctcagaggttgaccacacacaggtagaagaggtgaaatgggagatgtactccatcctgccttctgagacacagttcctatcagcctggccccatgctgtaattcttccattaggttcacctaaaagacaaatwgtcttcagaagaccacataaaaagcagaagctgaagttgagacatataacatatcaagcaaaaattatctaaaattctgtgaatacacttataagggaggaaatgattgcattttgcttgtaatccctgaacagccaggtggtattgtcaggtatgcacagctatttagggaacaattagagggaaacagagatgatgaaagtcagaggggtactcttaagtcagagcttttctgcacttaggaatttcctaccacttgaaattgtttccaattcatttctaaattcagattccaatttcatgcttttctggagccatgtgaagtgt

SEQ ID NO: 162496 - DNA, 551 bp, Homo sapiens
tttctactaatatttacttaatggttggctttgattttcaataagcacatgttgttataattgcctgatcccatttatgtacaatcataacctcagaggttgaccacacacaggtagaagaggtgaaatgggagatgtactccatcctgccttctgagacacagttcctatcagcctggccccatgctgtaattcttccattaggttcacctaaaagacaaatagtcttcagaagaccacataaaaagcagaagckgaagttgagacatataacatatcaagcaaaaattatctaaaattctgtgaatacacttataagggaggaaatgattgcattttgcttgtaatccctgaacagccaggtggtattgtcaggtatgcacagctatttagggaacaattagagggaaacagagatgatgaaagtcagaggggtactcttaagtcagagcttttctgcacttaggaatttcctaccacttgaaattgtttccaattcatttctaaattcagattccaatttcatgcttttctggagccatgtgaagtgt

SEQ ID NO: 162497 - DNA, 551 bp, Homo sapiens
tttctactaatatttacttaatggttggctttgattttcaataagcacatgttgttataattgcctgatcccatttatgtacaatcataacctcagaggttgaccacacacaggtagaagaggtgaaatgggagatgtactccatcctgccttctgagacacagttcctatcagcctggccccatgctgtaattcttccattaggttcacctaaaagacaaatagtcttcagaagaccacataaaaagcagaagctgaagttgagacatataacatatyaagcaaaaattatctaaaattctgtgaatacacttataagggaggaaatgattgcattttgcttgtaatccctgaacagccaggtggtattgtcaggtatgcacagctatttagggaacaattagagggaaacagagatgatgaaagtcagaggggtactcttaagtcagagcttttctgcacttaggaatttcctaccacttgaaattgtttccaattcatttctaaattcagattccaatttcatgcttttctggagccatgtgaagtgt

SEQ ID NO: 162498 - DNA, 571 bp, Homo sapiens
ccagttatacttagaaaatggtcacaaaaggaaaaatactgtactactactctgttccataaccattaaaatgtttaaaattttctcattttgttaaaaaagkaaaagagtgatcagttttaataaacttctttggtctaaaagggaggccaaacaaaaacatttggaaacaaaaggatgctgacagtatttagtattttagaatgcttcaaaggcatcccatgaaaagatttgaaatttgaaactcctggtacttcccataacgtttacaaattttattattagaatgcagaaatagattagtggataggatcatatacattttaaattaaacttgatttttcaaacattcaattttgttttttgatatagtataagtaatatgatcaagaaaaaaataaataaattttatgaaatataatgagcacatgattcctgaggagaaactctctatatattattggtgacgccttgattttttatatgcagtcccagtttttcatatgcaatagttcaaaaactttttagatcatgttattgtgtcttgtatcaattatctttctttgaatgt

SEQ ID NO: 162499 - DNA, 362 bp, Homo sapiens
agctgcctcacttttatagcagctgtgtgagactatgattataaaaacatgccatgtaaaggtatcaatctgctacaaattttcctgacagaatttgtggaatattcttcatttccaagaccattaccagaaaataaaagcctgagattcaacactgtcaatccaatcatctggttagacttataccttggtctaacagtttactgaaaattaccaccaggaaaacccaatcatctccaaataagtgacattattttacactaaatttagcaaactaatctaactatacatggggkgaacacttaattgtctacctacatttgcaatacataaaaagacaacagttttctatatatgtgaaa

SEQ ID NO: 162500 - DNA, 579 bp, Homo sapiens
ggcacaagatccagtctcttgtgatctgtgagccttgactgagaaacatctgagagggcactctgctttatttccccatttagagtctttggtggatgttaaacaatccctgatagtggctgtggatgttacagacccagagggaaggaatagtggaatttatcaatttcccaatgaacagataaagaataaatattcttactactggaggaatgtgatttcttcttaaacaaagttggaggaaaactaaaagaaacaatcacaaactcaaaagccccatacttcgtgcaatgtaatttgatctaccatttctgtggaagatctctgaaaatcctgctccattctcagagaccttacaggattctcagtctctgcaataaaaacgtaatctaaaaaaatttgacttttgctaatcaaatatcgagcccttttatatgccaatatgatctgctktatttgcatttaactagcacttaaaaaggaaatgctagatattaagagagaaagagtcctcaggaacaaggatcctgaacaaacacacttgggcttaagtagtcacagttttctaagcatcacaaa

SEQ ID NO: 162501 - DNA, 398 bp, Homo sapiens
gagatctcgaatggctccgggtttcagacttcaccgattgctcgtgtcactccttaagccgagtgctatttgaggggcctgtgcagggcgggggggtggtcccagagcctggaaccatgcgtgtgttgcagtagacacatttactaagagtacagagagattctgtgggtctggagctcagaatcctcacagataactgaggcttcagcaagtgcacccactcaagaagtgtatggaatgagggagacggcagccacggcatgttcctaggtaccccacacttcagatgccagtggaggcgrcacagcccaagaggcccacgggccagggagtgcatggccttgaaggcagtgatcgcgggtccccagagaagccaagaggagaaagtgaagcaccct

SEQ ID NO: 162502 - DNA, 394 bp, Homo sapiens
tgccttttctgatcattgcaaagtcattattacaaacattcgacattttgtgtatgaagacccaggggaaactttaaataataataatwattattattattattatttgagatggagtctcactctgtagcccaagctggagtgcagtggcatgctttcggctcactgcaacctctgcctccagggctcgtgattctcgtgcctcagcctcctgagtagctgggattacaggcacctgccaccatgcccagctaattttttgtattctagtagaggcagggtttcgccatgttgctcagggtagtcttgaactcttaagctcaggtgatccacccacctcggcctcccaaagtgctgggattacaggtatgagccactgcacccaggcaaaaat

SEQ ID NO: 162503 - DNA, 506 bp, Homo sapiens
gatctttctgttggacagtggctactttggaccttcctttggtagcttgagcatgccacgctctttcctgattctcacctctgcctggtactccgttccctacgacaaccctcattctgcttctttccatttgcaatggctgattcattcttgtcttttagcttaactcacttccttatataaggctttaaacatgccgttcattaagtatgtcacccctacctcccctccagtaattctctaactgaacttggtttccttcataagacttaacacaatgtgtaactrtttattgcacataattattttatttgggtatttaacttctaaatgcctctcctccccagcacacagcatgagccccacggggacagggatcacatctgtcacattcacctctgcatgcccagcacctagaacagtgagtgcagtgactgcctgaatatatatatatataaatatatatttttcatgtatatatatattcatgcatataccatgtatat

SEQ ID NO: 162504 - DNA, 578 bp, Homo sapiens
cctggctaacacggcgaaatctcatctctactaaaaatacaaaaacttagccgggcatggtggtgggcgcctgtagtcccagctactcaggaggctgaggcaggagaatggtgtgaacccaggaggcggagcttgyagtgagccgagatcgtgccactgcaccccagcctgggcaacagagcaagaccccgtctcaagaaaaaagaaaaaaaaagcagaaacagaggctcactgggcttaagtaaagtttaagtaacttgcaagatttactgcaaaaagaagttaaaaaaaaaaagatcaaattgactccaaaaaaaacctcgattttcattttactttctgcatctaaatatctctttccaggaaataaaggttgtacttctatacaacaagctggggataccctcttgcaagatgccacttgcaggaaagagaagcagcagccttgtttcaacaagattcaggaaagtaaggaacttggtgcagaaagatgaataacaagagaatccaaatcataccatttttaacagtctgctgaactctaccaaggcacagcaagaacaagcgaggctgataaa

SEQ ID NO: 162505 - DNA, 497 bp, Homo sapiens
cagtaagcaccaaatgaacacttttcagataaattaaataactgcagaatagtcataatgacagtgttttttttaaaacaatatttaataattgcttactctgtgccagtacttttcagccaggggcaatttgccccccttgccgcggagacatttggcaatgtctggagacacttttggagtcacaaatcaggggagagatgctgctggtacatagtaggttcggaaagctgcaaaatgtcatacagttcacaagacagcctccctgccccccataargaaggattctccagcccccaaaatctagcgcttataaatcactatttattttcacagctactctttttttttttttttttccagttgaggaaactgggccctgagacattaacttgcccaaaagatcacagtgggcaacattctagagcacagtggaagccgacaggtaaataagtagatgggtagagtgcaacagacaggcagacagattgagacaa

SEQ ID NO: 162506 - DNA, 656 bp, Homo sapiens
aaaaaaaaaaaaaaaaaaaaccaaaccaacaacagagacacatttccaggggatttcttccaggtaccacctgtgggaagttgtccctgacactccaggacagacacactcccagtaggcaatgcctgttaggcaggtaggatgctatactagactggcctgctgtgtcccacttcctcactagctactagagggcaggacccataggtctacacccatgaggtagacactcaataattatcaagtctacaaacacacggttacggatagaggaagggagtaaatatagtattaggtgagtgagtccttggcctgcggttggcctcagctttctctactttgccaaagaaataatatccagctttctttacttgtctgataatgtttgtaaaaagatccagaagctcaaaggtattaactgtcacccccctccccrcaaaaaaaggcattcttggaatgagcttttatttcagaaaagaaaccaatttatgtagtgtcatcataaaataatgcatagagatgatgaactgacgatgatatagtgataagaattcttgtttcatttataatataaaccttaattcctgccctcccccaaaatgagttaacttacaattaaaacacatgtatatagaacaccaaagtgcagattaagc

SEQ ID NO: 162507 - DNA, 523 bp, Homo sapiens
tgtatttccaaacacctcgccagccttcttctctgtaaactgcaaatcccttgttctaatattctacaagagaaatatacagacacaactactgtaccacggaccatttcaaatctctgcatrtgctaagcgagaaaatggttgagaacaatagaagactttttgcagtaagtccttatcctcaaacttttgcctgaactgtagaaacctgatatgcaataaatgtcctggtcttgagccagataaactccattacagtgagaaacatcatacagagactgatttatgtgtccttcatgtctgtccaggaaatatttagccaatatgtagtatttacaatgtatgagagattttagggaaaaaaaggcaaatggattgttcgaatcttggtaggaaaggctaatgctactgaagcaaataaaaaataaaaaataaaacccaactgctgagttcagtcacaacatgcaagtgatcatccatctaacaacagtttgcttttaggaagaatagataaaccagtcac

SEQ ID NO: 162508 - DNA, 602 bp, Homo sapiens
aatggaacactatttggccataaaaagaaaaagcaatgaaatcttgttatttgcagtgacctggatggaataaaaggtcattatcttaagtgaaataagccagacacggcaaaacaartactacatgttctcactcatatgtgggagttaaaaaggctgatctcatggaggtaaagagtagaatgatagatacccaaggctgggaaaggtatgtgggtagaggggatgaagacaggttggttaatgggtacaaacacccagttagacagaaggaataaatcctagtgtttgagagcagagcagggtgactagttaacaacaaggcattgtatatttcaaaattgttacaagagaggacttgaaaagctcccaacacatagaaacgatacatactcaaggtaatagtccaaacaccttcactagatcatttacacattctatgcaggtaatgaagtatcacatgtaccccataaatatgtaaaatactatgtatcaattaaaaagttggcacaagttaaaaaaacacaaaggaacagaagaaatatttgacgtaataatgactgagaattttcccaaatcaattacaagacaccataccacag

SEQ ID NO: 162509 - DNA, 602 bp, Homo sapiens
aatggaacactatttggccataaaaagaaaaagcaatgaaatcttgttatttgcagtgacctggatggaataaaaggtcattatcttaagtgaaataagccagacacggcaaaacaaatactacatgttctcactcatatgtgggagttaaaaaggctgatctcatggaggtaaagagtagaatgatagatacccaaggctgggaaaggtatgtgggtagaggggatgaagacaggttggttaatgggtacaaacacccagttagacagaaggaataaatcctagtgtttgagagcagagcagggtgactagttaacaacaaggcattgtatatttcaaaattgttacaagagaggacttgaaaagctcccaacacatagaaacgatacatactcaaggtaatagtccaaacaccttcactagatcatttacacattctatgcaggtaatgaagtatcacatgtaccccataaatatgtaaaatactatgtatcaattaaaaagttggcacaagttaaaaaaacacaaaggaacagaagaaatatttgamgtaataatgactgagaattttcccaaatcaattacaagacaccataccacag

SEQ ID NO: 162510 - DNA, 489 bp, Homo sapiens
cattatctaatgatgacaccatgatatgaaaaccatcatgcaattagaggcagagatcagaatcaagatccattgattctaactagggagaagacattttaaagcacttgagaggggtgcacaatgagtgacacaatgaacatgacacaaatgatttctgcacataagtactggggccagaaccttaaaaggaacttctctgacctgctgctacttctaccaactttcttcaatccagagctgataaaaaacaaaacaaaacaaaaacaaagatatgcaaatttctaatgtctgcttttctastcaccaggcaccaagctctgcaaaaataaacccagtaatcaggtacgctgagttggggcaccctctgggtgtcctatgtaaggatactgagccatccagacattatgttgctgggctttctctctttaccatctctcaggagagtgtagacctccaggatgggaaatagcacaaggaaccagcaat

SEQ ID NO: 162511 - DNA, 613 bp, Homo sapiens
aatcatacactcttacattaaagtaggaacccatgttacgacacttactttactcatgaagaaactgagactcacagattagcatccatgactgactaaagtacaatttataatagcagatctgagagtagaactcatttttttcatctctatgcaattcattcaacaatcaatcagtaaatatttatagaaagtaatatgtattgggctctgggaaactcatctattattacaagaatcagaaagctaaaatgtaagcaaatatatttggaagataattacgtattaaaatatgtactatgcaggaagctaacaaggtaatttgtaaaaagtgcgattaacaggagaagttgtggtgatgcagacctactgaataatgggagacattttccctaaggagatgacatttgatgggagaacygaaaagcaaaaagtagtcaaccacaaaaatttctgggagaggtacattctacatcaaaggaacaggaaatacaagggttcaaggttaagaaagaacatggggacttcaagaaacagaagagaaattaatataactggcatattgtgatgggggcatagtagaagatgaaaatggagaagcaggcatgagcca

SEQ ID NO: 162512 - DNA, 553 bp, Homo sapiens
ggaagctatcttatgcaaatatgatgaatcttttaaattctgagttcaatgcagtctacagctaaactcaaatcccggctcatactaaccttggtccttgggcatgtttatgcttcagttttctcatctgtacatgggttaataacaatactcagcttgacagtaaccatactgcacagtgcctaacacatgtaagtgctcaattaacgtccatttctactttctgaaaatatatggtattagtgtgcaaaaagttgggctacataactcaaatctcctttgtatcttargtaagaccgcttctttctctggattgtttcttctagtcaaatgcacaggaatttagttgatctcccaagttattttggaccttaaattctgttttattcttgttcattttctatgtagtttagatttagttcattggactgatttatgttctgtgttcttttaaaattcaggaagatgtgtataggatagatagagcaaatatataaacactcaatttcatttactttaatataaaaactaacaagtttctcattagttataa

SEQ ID NO: 162513 - DNA, 523 bp, Homo sapiens
ctttcaacagccagaagaaaggctttctaacaaaacaaatcttcaatttttacacatttttaaggcacctgttcttcatcaaactacattgaaatttaaacagaaaggaattttatgtttgaaagtaaactcgtcccattctctgggattctgatgttttcctggggccrtagtaagggaagccaaaaatggcattagggcattccctctaaaaaagtatcttgcctaaatccaactactgcataatctctccccagccactggagtaccttgagagccttttgcgctgagtgggtctagaaaaccagcaggatggaaagctagggtcttgagaaggtgagcacaatctgtcctgcctatgaactcctccggaaccatgggtaaaggtcatgcttccatccatgggtaacatctatgatggttgctgggacacagaggaaaaaaaggaaggttgagaagtggtatgtcctttttctctttccttccaccctaggccacactgaaaagagaaaggggactgagg

SEQ ID NO: 162514 - DNA, 428 bp, Homo sapiens
tgagccataattttgccactacacaccagtttgggtgacaaagtgagaccctctgtcaaaaaaaaaagctgtggatttcaggcaygttaaagtatattcacctggttatgcaaaaggcttctagaggttttacatcttgtaaaactaatactcaatacccactaagtaacaactgcccattttaccctctctccagcccttggcaaatatctttcagctttctgtttttatgagtttggctatttaacttatctcaggtaaatgaagtaatgtagtattcatcattttgttactggtttatttcatgtgacatagtattttcaaagtttatcttaaaatgtgacaaaattttctcttttaaggctgaatgatattccatgtatgtgtatgttaaattttttgatgtatttataaatcaagggacatat

SEQ ID NO: 162515 - DNA, 401 bp, Homo sapiens
aaggtgtgaggaacagttgaagtctttatcacattcttcgcatttgtagggtttctctccagtatgaattmtcttatgttccacaaggtttgaggaccggttgaagcctttgtcacattcttcacgtttgtagtgtttctctccagcatgaattttcttatgtgtaataaagattgaggactgtttaaaagctttgccacattcttcacctttgtagattttctctccagtatgaattttcttatgtttactagactgagaatcagctgaaggatttaccacattcttcacatttttagggattctctccagtatgaattttcttatgataactaacagttgaggatgacttaaaagctttgccacattcttcacatttgtagggtttctctccagtatga

SEQ ID NO: 162516 - DNA, 473 bp, Homo sapiens
agacttattcatgagacatttgcatgccagaggatggaaaataagtctgactaaaatttagggaccttctagctcagtaaaatttccaggggtccagtggtccagggcctgtcaagatattccttctaaggtaaaaggtaagttgctgcatttggcccatcctacaaccaagaaagaggcacaatgtctagtgggcctatttgggttttggaggcaacctattcctcatttgggtgtgttactctggcccatttattgagtgacccaaaaagctgccagttctgagtgtggtccagaaaagaagaaggctctgcaacaggtccaggctgctgtgcaagctgctctgccacttgggccatattacccaggagatccaatggatcttgaggtgtcggtgaaaaataaagatgctatttgcagcytttgcaagccttctcaggtgaatcacagcagaggcctctagagtttttttc

SEQ ID NO: 162517 - DNA, 473 bp, Homo sapiens
agacttattcatgagacatttgcatgccagaggatggaaaataagtctgactaaaatttagggaccttctagctcagtaaaatttccaggggtccagtggtccagggcctgtcaagatattccttctaaggtaaaaggtaagttgctgcatttggcccatcctacaaccaagaaagaggcacaatgtctagtgggcctatttgggttttggaggcaacctattcctcatttgggtgtgttactctggcccatttattgagtgacccaaaaagctgccagttctgagtgtggtccagaaaagaagaaggctctgcaacaggtccaggctgctgtgcaagctgctctgccacttgggccatattacccaggagatccaatggatcttgaggtgtcggtgaaaaataaagatgctatttgcagccttkgcaagccttctcaggtgaatcacagcagaggcctctagagtttttttc

SEQ ID NO: 162518 - DNA, 569 bp, Homo sapiens
tagacgttattatttatatgggtaaaaatctatccataataaactggttgttcaatattcacactgagattttagagtagatttcaccacattcagaattgcttttatgagaaattgtcaaagttttgttgccatatttccgtttaagctcaggggagtttgacagaaaacaagaaccatcatacttttaaagaaccacatgtaacagcaatgtgctgttgacttcaagcaatccgtgagcactatttctctttattaktaaaacaaatttatttgaaggtacatattgtatataagacaaaattatttgggatataaaaatttaaactcgttagtctaactgccaattcttccattataatttttctagaaatgggctgttaaagatgttattcattgggaaaaacttcatctaaaattaaatatttttacttgggcactgaattttatattagcatatatggttcacaccgtacaataaccaattcaatacctgctctgtttcaactcaatcaggaatttttgaataagtccaactaattgaatatataactaggaatacataaatt

SEQ ID NO: 162519 - DNA, 569 bp, Homo sapiens
tagacgttattatttatatgggtaaaaatctatccataataaactggttgttcaatattcacactgagattttagagtagatttcaccacattcagaattgcttttatgagaaattgtcaaagttttgttgccatatttccgtttaagctcaggggagtttgacagaaaacaagaaccatcatacttttaaagaaccacatgtaacagcaatgtgctgttgacttcaagcaatccgtgagcactatttctctttattattaaaacaaatttatttgaaggtacatattgtatataagacaaaattatttgggatataaaaatttaaactcrttagtctaactgccaattcttccattataatttttctagaaatgggctgttaaagatgttattcattgggaaaaacttcatctaaaattaaatatttttacttgggcactgaattttatattagcatatatggttcacaccgtacaataaccaattcaatacctgctctgtttcaactcaatcaggaatttttgaataagtccaactaattgaatatataactaggaatacataaatt

SEQ ID NO: 162520 - DNA, 569 bp, Homo sapiens
tagacgttattatttatatgggtaaaaatctatccataataaactggttgttcaatattcacactgagattttagagtagatttcaccacattcagaattgcttttatgagaaattgtcaaagttttgttgccatatttccgtttaagctcaggggagtttgacagaaaacaagaaccatcatacttttaaagaaccacatgtaacagcaatgtgctgttgacttcaagcaatccgtgagcactatttctctttattattaaaacaaatttatttgaaggtacatattgtatataagacaaaattatttgggatataaaaatttaaactcgttagtctaactgccaattcttccattataatttttctagaaatgggctgttaaagatgttattcattgggaaaaacttcatctaaaattaaatatttttacttgggcactgaattttatattagcatatatggttcacaccgtacaataaccaattcaatacctgctctgtttcaactcaatcaggaatktttgaataagtccaactaattgaatatataactaggaatacataaatt

SEQ ID NO: 162521 - DNA, 718 bp, Homo sapiens
aggtggatatttattgatgtttttactttatctgatgatttgttggataaattttacaaagaaatcctgagatcaattggaatgaaggtgtttgaagactcttaatacacattataaaagtagtttctcagaaagtttacattcataccttacgtatataccataaattcatcagttttgatttttcattttagagttcaagcatgctaaatatggctacttatgcattttaatgtgtatatacattatcaagccttattgtttgcttattggccgcatttttagagtttgcttatgaatttgtatgttttttcacattaaaatgaagctaagacwttttaaatattttcaggctttgtcattgaattttgttaaggtgattttaatacacatttttaattatatctttttaaaagtaatcatattttagagagtttggaaatttctgcaatgttcataattatcctttaccatgggggaaaaaactggcagtatcacactgggaaaatattatcataaaagacgtcgcttaaaattcataaaaggtgtttaacatcattgaccattagggaaatacaaatcaaaactacaatgagatacgatttcaaatccatgaatgactataatgactttttaaaaagaaaataaaaagtgtttggaaggatatgtagaaattggaatcctttgcacgtcgctgataggaatgtatagtgttgca

SEQ ID NO: 162522 - DNA, 718 bp, Homo sapiens
aggtggatatttattgatgtttttactttatctgatgatttgttggataaattttacaaagaaatcctgagatcaattggaatgaaggtgtttgaagactcttaatacacattataaaagtagtttctcagaaagtttacattcataccttacgtatataccataaattcatcagttttgatttttcattttagagttcaagcatgctaaatatggctacttatgcattttaatgtgtatatacattatcaagccttattgtttgcttattggccgcatttttagagtttgcttatgaatttgtatgttttttcacattaaaatgaagctaagacattttaaatattttcaggctttgtcattgaattttgttaaggtgattttaatacacatttttaattatatctttttaaaagtaatcatattttagaragtttggaaatttctgcaatgttcataattatcctttaccatgggggaaaaaactggcagtatcacactgggaaaatattatcataaaagacgtcgcttaaaattcataaaaggtgtttaacatcattgaccattagggaaatacaaatcaaaactacaatgagatacgatttcaaatccatgaatgactataatgactttttaaaaagaaaataaaaagtgtttggaaggatatgtagaaattggaatcctttgcacgtcgctgataggaatgtatagtgttgca

SEQ ID NO: 162523 - DNA, 718 bp, Homo sapiens
aggtggatatttattgatgtttttactttatctgatgatttgttggataaattttacaaagaaatcctgagatcaattggaatgaaggtgtttgaagactcttaatacacattataaaagtagtttctcagaaagtttacattcataccttacgtatataccataaattcatcagttttgatttttcattttagagttcaagcatgctaaatatggctacttatgcattttaatgtgtatatacattatcaagccttattgtttgcttattggccgcatttttagagtttgcttatgaatttgtatgttttttcacattaaaatgaagctaagacattttaaatattttcaggctttgtcattgaattttgttaaggtgattttaatacacatttttaattatatctttttaaaagtaatcatattttagagagtttggaaatttctgcaatgttcataattatcctttaccatgggggaaaaaactggcagtatcacactgggaaaatattatcataaaagacstcgcttaaaattcataaaaggtgtttaacatcattgaccattagggaaatacaaatcaaaactacaatgagatacgatttcaaatccatgaatgactataatgactttttaaaaagaaaataaaaagtgtttggaaggatatgtagaaattggaatcctttgcacgtcgctgataggaatgtatagtgttgca

SEQ ID NO: 162524 - DNA, 626 bp, Homo sapiens
attcatctatttgtgtatttttgagctagtaagaataatcgtaagtattactatgatggaattgtatattattttgctatcaggtagtataaatcccctgcatttgctatttttgttcatattttattttactatttacaaacttttattattccctttatggccgattaatcagaaaatttcctccaattatttccctccttgaaactacagccattgtaaaatgactttgcgccttcttaatttaagattttggagcttatttttctatttcttgactctaggattactttgtgacttgctttggccaccagaatgaaacagatataaaaatgtgccaattcagagcctcagaatcaggcggacttgcacattacagcctgcttttttctccttttttgaacgtgaaaacaaggctttttctagcrtcacaaatgataagagagcacatatagcagagccaagatattttagctgatggatgccatcccagacaattgccaaaatcagtcaagctcagactagaaagggagaagctctcagaaaacacaataaatgtttgcttgtttaggttactaatgaatagggtagtttgttgaggtcctcacaaaattaaaaattaattt

SEQ ID NO: 162525 - DNA, 589 bp, Homo sapiens
taaatagtggaagacagatgtgaaagtacaatgcaggttctctggttacaaattccactttttcttaaacataaaaagttacctcatctagatgtgtctctctgtatcaagctctccaaattaataaagtaattatctattagcctagttttaccttatattaataaaaaaatgtggagggggagtgtgtgaagttaatatttttgaaaatatattttaataacggaatttaacatgtaaaatataaaatccagcacagatactgtaacaacaaaagctctatttatgacattagggcsgaataaaacaaaataataataggaagggactataatttgatatatatacacatagatttatatatctaaatttaaaatgatgcagtaaaagttctagaagtagttaagtaaagatggaaatgatcaaaattacgtttaatgttaataaaaataatactttcaagttatagaagatactgtaacaacaaaagctgtgtttatgagattatggaggaataaaacataaaataatgataggaaggaactataattttaaatatatacatagatttatatataaatttaaaata

SEQ ID NO: 162526 - DNA, 589 bp, Homo sapiens
taaatagtggaagacagatgtgaaagtacaatgcaggttctctggttacaaattccactttttcttaaacataaaaagttacctcatctagatgtgtctctctgtatcaagctctccaaattaataaagtaattatctattagcctagttttaccttatattaataaaaaaatgtggagggggagtgtgtgaagttaatatttttgaaaatatattttaataacggaatttaacatgtaaaatataaaatccagcacagatactgtaacaacaaaagctctatttatgacattagggcggaataaaacaaaataataataggaagggactataatttgatatatatacacatagatttatatatctaaatttaaaatgatgcagtaaaagttctagaagtagttaagtaaagatggaaatgatcaaaattacgtttaatgttaataaaaataatacyttcaagttatagaagatactgtaacaacaaaagctgtgtttatgagattatggaggaataaaacataaaataatgataggaaggaactataattttaaatatatacatagatttatatataaatttaaaata

SEQ ID NO: 162527 - DNA, 313 bp, Homo sapiens
taataaaaaacaaggtaaggctgagcactgatacagctaagagtagttagacacatgctatctaaatgtaatgtgttatcttgagtgggattctaaaagggaaaaggaacattatgtaaaaattaagaattctgaatagagtatggacttcayttattagtaatatatcaatatttattcattagttattacaaatataccaggctaatgtttgatgctagcaatagaaattactgtagtattttcacaaatttgtataaatattaatttatttttaaataatattttgaagaaatattgcacaaaatggaaa

SEQ ID NO: 162528 - DNA, 546 bp, Homo sapiens
atatgacaaagcaaggtactttaacacccccaaaagatcacacgagcccaccagcaatggatccaaaccaagaagaaatctctgcatttccagaaaaagaattcagaaggtcaattattaagctactcaaggaggaaccagagaaacataaataccaacttaaagaaatttaaaaaaaatgatggaggatatggatggaaaagtatccagagaaataaatagcatgaataaaaacatcacaatttctggaaataaagtacatttagagaaatgcaaaatacaccrgaaagtcccagcaatagagttgaacaagtagaagaaaggacttaagagcttgaagaaaaggcgttcaaattaaccaaatccaacaaagacaaataaataaattaaaaacaatgaacaaaacttccaggaagtttgggactgtgttaaatgaccaaatataaggataattagccttccttagggagaagagaaatctaaaagtttggaaaacatatttgaaggaataattgaggaaaacttccctggtcttgctagagatct

SEQ ID NO: 162529 - DNA, 569 bp, Homo sapiens
tagacgttattatttatatgggtaaaaatctatccataataaaytggttgttcaatattcacactgagattttagagtagatttcaccacattcagaattgcttttatgagaaattgtcaaagttttgttgccatatttccgtttaagctcaggggagtttgacagaaaacaagaaccatcatacttttaaagaaccacatgtaacagcaatgtgctgttgacttcaagcaatccgtgagcactatttctctttattattaaaacaaatttatttgaaggtacatattgtatataagacaaaattatttgggatataaaaatttaaactcgttagtctaactgccaattcttccattataatttttctagaaatgggctgttaaagatgttattcattgggaaaaacttcatctaaaattaaatatttttacttgggcactgaattttatattagcatatatggttcacaccgtacaataaccaattcaatacctgctctgtttcaactcaatcaggaatttttgaataagtccaactaattgaatatataactaggaatacataaatt

SEQ ID NO: 162530 - DNA, 321 bp, Homo sapiens
ctacttttttctgaagatattttctttttcaccataggcctcaaagcgctcccaaatatcccttcacagattctttaaaaccagtgttgccaaactgctcamtcaaaagaaacgtttaactgtgtgagacgaatggactcattccaaggagtttctcagaaagcttctttctatttttttatctgaagatattccatttttcatcataggcctcaaagtgcctcctactgtcccttctcagattctaaaaacacactgtggacaaactgcttaatcaaaagagaggtttaactctgtgagatgtatgtacacatcacaaag

SEQ ID NO: 162531 - DNA, 542 bp, Homo sapiens
tatcctacacatcagaaagcagtttctcataacgtttcttttcactttttatctgaagatactttctttttctccataggcttttctgcactacctaaattcacttcacagattttgcaaaaaaggtgttttcaaactgctcagtcaaaagaaatgtttaaagctgcaagatgaatgctcacatcacaaagcaatttctcaataacttttttctagtgtttatccgaagatatttgatttatcaccataggtttgaaggtgctcccaaatatagcttcacagattctacaaaaacagtgtttccaaactgatcaatcaaaagaaaattttaactctgtgagaggaaatcatacatcacaaagtagtttctgagataacttctgtctaattcgtctctgaagatacttccttttccacattaggcctcactgcacttcaaaatatccctttgcagattctacaaacacagtgtttcctaactgtccttgtgaaagaaggacttaaatctgtgasatgaatgcacatagcagaaagcattttct

SEQ ID NO: 162532 - DNA, 539 bp, Homo sapiens
acatgcttcacaagataatgagatatcacaaggtaaatggaggcagggcgggatcacagaaccacaggaccrgggcaaaattacaattgctaaagaagtttcaggcacacactgtcattgataacatcttatcaggagacagggtttgagacagggtttgatcagacaactggtctgatcaaaatttattaggcaggaatttcctcatcctaataagcctgggagggctgcaggagacgggggcttatttcacccctgcagctgcaaccataaaagatggccacccacaaagcagccatttcagaggcctaccctcagggaagcattctctttctcaggggtgttccttgctgagaaaaagaattcagcgatatttcttccatttgcttttgaaagaagagaagtaagttctgccagacttactggtggtcagtgtttaaggttatctcttttgctccctgaacctgcagttatcctcttcttttttcacggtgcccagatttcgtattgttcaaacacacaagctctacaaacaattt

SEQ ID NO: 162533 - DNA, 539 bp, Homo sapiens
acatgcttcacaagataatgagatatcacaaggtaaatggaggcagggcgggatcacagaaccacaggaccggggcaaaattacaattgctaaagaagtttcaggcacacactgtcattgataacatcttatcaggagacagggtttgagacagggtttgatcagacaactggtctgatcaaaatttattaggcaggaatttcctcatcctaataagcctgggagggctgcaggagacgggggcttatttcacccctgcagctgcaaccataaaagatggccacccacaaagcagccatttcagaggcctaccctcagggaagcattctctttctcaggggtgttccttgctgagaaaaagaattcagcgatatttcttccatttgcttttgaaagaagagaagtaagttctgccagacttactggtggtcagtgtttaaggttatctctyttgctccctgaacctgcagttatcctcttcttttttcacggtgcccagatttcgtattgttcaaacacacaagctctacaaacaattt

SEQ ID NO: 162534 - DNA, 426 bp, Homo sapiens
ttctttctagtatttatctaaagatatttgcctaggtctcaatgcattcccaaatatcattttgtagattagacataaacagtgtttccaaactgctcaatcaaaggaaaggtttaattctgtgagatgaatgcattcatcacaaagccatttctcagaaagcttcctttaatttttttcttaacatatttcctatttcacaataggcctcaatgcactaccaaatatcccatcacagattytgccaaccagtgtttccaaactactcaatcaaattaaggtttaactctgtgagatgaatgcacagatcacaaagcagtttctcagaaaagttctttgcagattttctctgaaaatattttgtttttcaccatgggcctcaaagtgaacacatatatccctttgtttatactagaaaaaccatgt

SEQ ID NO: 162535 - DNA, 588 bp, Homo sapiens
ataaataaataaataaataaataagtgcacaatcaaaatagaggtttaactctgtgagaaatatccacacatcacaaagtggtttcagagaaagcttctttctagtatttatctaaagatatttgcctaggtctcaatgcattcccaaatatcattttgtagattagacataaacagtgtttccaaactgctcaatcaaaggaaaggtttaattctgtgagatgaatgcattcatcacaaagccatttctcagaaagcttcctttaatttttttcttaacatatttcctatttcacaataggcctcaatgcactaccaaatatcccatcacagattctgccaaccagtgtttccaaactactcaatcaaattaaggtttaactctgtgagatgaatgcacagatcacaaagcagtttctcagaaaagttctttgcagattttctctgaaaatatttygtttttcaccatgggcctcaaagtgaacacatatatccctttgtttatactagaaaaaccatgtttccagactgcacaatcaaaagaaaggtttaactcagggagatgaatgcactggtcaccaagcagtt

SEQ ID NO: 162536 - DNA, 312 bp, Homo sapiens
ttctttctagtttttatctgaagatatttctttttccaccataggactcaaagagtgcacaaatattccttcacggatcctaacaaaacagtgtttccaaagtgctcaatcaaaagagagttttaactgttacagatgaatgagcacatcatraagcagtttcccagaaagattcttttaatttttatctgaagatatttcgtttttcaccataggcctcaaatcactccaaaatattccttctcagattgtaaaaaaatcatgtttcctaacttctcaatcaaaaaagggttaactctatgaaattagtgt

SEQ ID NO: 162537 - DNA, 485 bp, Homo sapiens
aaatagacagaagcattctcagaaactgcttagtgatgtgtgcattcaaatcacagagttgaaccttccttttgagagagcagttttgaaagagtctttttgtagtatctgcaagtggatattaggagcgatttgaggcctaagatggaaaaggaaatatctccacatacaaactagacaggatcattctcagaaatttctttgtgatatgtgccttccactcacagacttgaaccttttttttgatagagcagcrttgaaacaccctgtttgtagaatctgcaagtgttcatttggagcgattttttgtctatggtggaaaaagaaatatcttcatattaaaactagacagaagcattttcagaaacaactttgtggtctgtgtgttcaattcacagacttgaacctttcttttgatagagcagttttgaaacacggcttttgtagtctctgcttgtggatatttggaggtctttgaggaattc

SEQ ID NO: 162538 - DNA, 474 bp, Homo sapiens
gcattcatccaatagagttaaacctttcttttgattgaggagtttggaaacactgctttggtagaatctgcaaagggatatttgggagtgcatttaggcctatggtgtaaaagaaaatatcttcagacaaaaaccaggaagaagcattctcagaaacagctttgagatgttttcattcttctcacagagttamacccttcttattattgagctgtttgcaaacactgtttttgcagaatctcagaagggttatttagaaatgctttgaggcctatggtggaaaaggaaatatctgcagaaaaaaactaaaaagaagctttctcagaaacctctttgtgttgtgtgcattcttctaacagagttaaagctttcttacgattgaacagtttggaaacactgtttttgtagaatctgtgaagggatacatatgggagtgcattgaggtctattgtgaaaacggaaatatcttcaagg

SEQ ID NO: 162539 - DNA, 598 bp, Homo sapiens
tctgggctttgcctacaggggctttgtgatataaatttccgctgatcaaacgggtgatgttacccttgtcaaggttctgcttacaggggctttgtgacatatctctgcactgatcaccccagggaggaaacacttgtctacactctgcctacaggaggcttaacgacttatcgctacactgattactaggtgatgtaacacttgtctaggctatgtctacacaggaattttcacatatctctacactgatcacctaagtgatgtaacccttgtataggttcagcctactgtggatttctcacatacctatgcactgatcactgaggtgatgtaaataacttccaggctttctgtacaggggacattgtgatatatctctgcactcagcacccaaatgttgcaaatcgtctctaggctccgcagggagggcgattgtaacatgtttctgaactgatcatccaggagmtgtaactattctccaggctttgacgaaagagcgtcggaaggtgttgggagagccttagccagaatttcctggacgggcaggggcacagaaatgccagcaggctcccttgcacatcagctggggtgcgcaatg

SEQ ID NO: 162540 - DNA, 598 bp, Homo sapiens
tctgggctttgcctacaggggctttgtgatataaatttccgctgatcaaacgggtgatgttacccttgtcaaggttctgcttacaggggctttgtgacatatctctgcactgatcaccccagggaggaaacacttgtctacactctgcctacaggaggcttaacgacttatcgctacactgattactaggtgatgtaacacttgtctaggctatgtctacacaggaattttcacatatctctacactgatcacctaagtgatgtaacccttgtataggttcagcctactgtggatttctcacatacctatgcactgatcactgaggtgatgtaaataacttccaggctttctgtacaggggacattgtgatatatctctgcactcagcacccaaatgttgcaaatcgtctctaggctccgcagggagggcgattgtaacatgtttctgaactgatcatccaggagatgtaactattctccasgctttgacgaaagagcgtcggaaggtgttgggagagccttagccagaatttcctggacgggcaggggcacagaaatgccagcaggctcccttgcacatcagctggggtgcgcaatg

SEQ ID NO: 162541 - DNA, 598 bp, Homo sapiens
tctgggctttgcctacaggggctttgtgatataaatttccgctgatcaaacgggtgatgttacccttgtcaaggttctgcttacaggggctttgtgacatatctctgcactgatcaccccagggaggaaacacttgtctacactctgcctacaggaggcttaacgacttatcgctacactgattactaggtgatgtaacacttgtctaggctatgtctacacaggaattttcacatatctctacactgatcacctaagtgatgtaacccttgtataggttcagcctactgtggatttctcacatacctatgcactgatcactgaggtgatgtaaataacttccaggctttctgtacaggggacattgtgatatatctctgcactcagcacccaaatgttgcaaatcgtctctaggctccgcagggagggcgattgtaacatgtttctgaactgatcatccaggagatgtaactattctccaggctttgacgaaagagcgtcggaaggtgttgggagagcctyagccagaatttcctggacgggcaggggcacagaaatgccagcaggctcccttgcacatcagctggggtgcgcaatg

SEQ ID NO: 162542 - DNA, 598 bp, Homo sapiens
tctgggctttgcctacaggggctttgtgatataaatttccgctgatcaaacgggtgatgttacccttgtcaaggttctgcttacaggggctttgtgacatatctctgcactgatcaccccagggaggaaacacttgtctacactctgcctacaggaggcttaacgacttatcgctacactgattactaggtgatgtaacacttgtctaggctatgtctacacaggaattttcacatatctctacactgatcacctaagtgatgtaacccttgtataggttcagcctactgtggatttctcacatacctatgcactgatcactgaggtgatgtaaataacttccaggctttctgtacaggggacattgtgatatatctctgcactcagcacccaaatgttgcaaatcgtctctaggctccgcagggagggcgattgtaacatgtttctgaactgatcatccaggagatgtaactattctccaggctttgacgaaagagcgtcggaaggtgttgggagagccttagccagaatttcctggacgggcaggggcacagaaatgccagcrggctcccttgcacatcagctggggtgcgcaatg

SEQ ID NO: 162543 - DNA, 570 bp, Homo sapiens
ccttgcttttgattgatcagcttggcaatggtgtttttgtagaatctgtgaagggatgtatgggatcactttgagagacctgtggtgaaaaatgaaatatctgcagataaaaactagaaagaagctttctgggaaattgcttcgtgatgtgtgcattcttctcacagrgttaaaacttccttttgcttgagcagttttgtaacactgtttatgtgaaatctgcaaagggaaatttgggagtgcattgaggcttattttgaaaaaggaaataccttcagataaacactagaaagaagctttctcagaaaccactttgtgatgtgtgcattcttctcagagttatacctttcttttgattgagccgttttgaaacactgtttatgtgaaatctgcaaacggaaatttgggagagcattgaggcttatttcggaaaaggaaatatcttcagataaatactagaaagaagtgttctcagaagctgcatggcaaagtgtgcattcttatcagagcattaaacctttcttttgattgagcagtttggaaacactttttttgtagaatctgcgaagg

SEQ ID NO: 162544 - DNA, 570 bp, Homo sapiens
ccttgcttttgattgatcagcttggcaatggtgtttttgtagaatctgtgaagggatgtatgggatcactttgagagacctgtggtgaaaaatgaaatatctgcagataaaaactagaaagaagctttctgggaaattgcttcgtgatgtgtgcattcttctcacagagttaaaacttccttttgcttgagcagttttgtaacactgtttatgtgaaatctgcaaagggaaatttgggagtgcattgaggcttattttgaaaaaggaaataccttcagataaacactagaaagaagctttctcagaaaccactttgtgatgtgtgcattcttctcagagttatacctttmttttgattgagccgttttgaaacactgtttatgtgaaatctgcaaacggaaatttgggagagcattgaggcttatttcggaaaaggaaatatcttcagataaatactagaaagaagtgttctcagaagctgcatggcaaagtgtgcattcttatcagagcattaaacctttcttttgattgagcagtttggaaacactttttttgtagaatctgcgaagg

SEQ ID NO: 162545 - DNA, 542 bp, Homo sapiens
gagaaactgctttgtgatgagtrcttttgtgtcacagagataaacctttcttttaattgagcagttcagaaacactgttttagtagaatctgtaaggggatattgggcagtgcattgatgcctatggtgaaaaatgaaatatcttctgataaaaactagaaagaagctttctgagaaactgctttgtgatgagtgcattcatctcacagggtgaaaactttctttaatttagcgctttgacaccagtgattttgtacaatctgagaacagatatttgggagcacttggaggcctatggtgaataatgaatctgctttgagatttgtgtattcttctcaatgagttaaacttttgtgttgattgagcagtgtggaaacactgtttttttagaatatgtgaagggatattggggagcactttgacgtctatgtcaaaaaaggaaatatcttcagataaatactagaaagaagctttctcacaaactgtgttttgatgtgtgcattcttctcacagagttcaacctcacttttgattgagcagtt

SEQ ID NO: 162546 - DNA, 407 bp, Homo sapiens
tttttgtataatctacaagtgttctttggagtgctttgttgcctatgttggaaaaagaartatcttcacataaaaactagacagaagcattctcagaaactcctttgtgatgggtgtgttcaattcacattgttgaaccttgcttttgatacagcagtgttgaaacaaacattttgtagaatctgcaagtgttcatttcaaatgctttgtggcctatgttggaaaaagtgatatcttcacctaaaaaatagacagaagcattctcaggaactgctttgtaatatgtgcattcaactcacagagttgaaccttccttttgagagagcggttttgaaagagtctttttgtagtatctgcaagtggatatttggagcgatttgaggtctaagaaggaaaaggaaatacct

SEQ ID NO: 162547 - DNA, 407 bp, Homo sapiens
tttttgtataatctacaagtgttctttggagtgctttgttgcctatgttggaaaaagaaatatcttcacataaaaactagacagaagcattctcagaaactcctttgtgatgggtgtgttcaattcacattgttgaaccttgyttttgatacagcagtgttgaaacaaacattttgtagaatctgcaagtgttcatttcaaatgctttgtggcctatgttggaaaaagtgatatcttcacctaaaaaatagacagaagcattctcaggaactgctttgtaatatgtgcattcaactcacagagttgaaccttccttttgagagagcggttttgaaagagtctttttgtagtatctgcaagtggatatttggagcgatttgaggtctaagaaggaaaaggaaatacct

SEQ ID NO: 162548 - DNA, 407 bp, Homo sapiens
tttttgtataatctacaagtgttctttggagtgctttgttgcctatgttggaaaaagaaatatcttcacataaaaactagacagaagcattctcagaaactcctttgtgatgggtgtgttcaattcacattgttgaaccttgcttttgatacagcagtgttkaaacaaacattttgtagaatctgcaagtgttcatttcaaatgctttgtggcctatgttggaaaaagtgatatcttcacctaaaaaatagacagaagcattctcaggaactgctttgtaatatgtgcattcaactcacagagttgaaccttccttttgagagagcggttttgaaagagtctttttgtagtatctgcaagtggatatttggagcgatttgaggtctaagaaggaaaaggaaatacct

SEQ ID NO: 162549 - DNA, 407 bp, Homo sapiens
tttttgtataatctacaagtgttctttggagtgctttgttgcctatgttggaaaaagaaatatcttcacataaaaactagacagaagcattctcagaaactcctttgtgatgggtgtgttcaattcacattgttgaaccttgcttttgatacagcagtgttgaaacaaacattttgtagaatctgcaagtgttcatttcaaatgctttgtggcctatgttggaaaaagtgatatcttcacctaaaaaatagacagaagcattctcaggaactgctttgtaatatgtgcattcaactcacagagttgaaccttccttttgagagagcggttttgaaagagtctttttgtagtatctgcaagtggatatttrgagcgatttgaggtctaagaaggaaaaggaaatacct

SEQ ID NO: 162550 - DNA, 417 bp, Homo sapiens
ttctcagaaacgtcttgtgatgtgtgccttcacctaacagagtggaaccgttcttttgatagagcagttttgaatcagtcttttggtaggacctgcaagttttcatttggagcgctttgaagccyatggtggaaaagggaatatcttcacaaaaaactaggcagaagccttctcaggaacttcattgagatgtgtgcattcaactaacagagttgaaactgtcttttgacagagcaggaatgaagcactccttttgtaatatctgattgtgtatatttggaactctttgagttattcgttggaaacgggtatcttcacataaaaagtagacccaagcattctcagaaggttctttgtgatgtgtgcgttcaactcacagacttgaaactttcttttgatagagcagtgttgaaacac

SEQ ID NO: 162551 - DNA, 417 bp, Homo sapiens
ttctcagaaacgtcttgtgatgtgtgccttcacctaacagagtggaaccgttcttttgatagagcagttttgaatcagtcttttggtaggacctgcaagttttcatttggagcgctttgaagcctatggtggaaaagggaatatcttcacaaaaaactaggcagaagccttctcaggaacttcattgagatgtgtgcattcaactaacagagttgaaactgtcttttgacagagcaggaatgaagcactccttttgtaatatctgattgtgtatatttggaactctttgagttattcgttggaaacgggtaycttcacataaaaagtagacccaagcattctcagaaggttctttgtgatgtgtgcgttcaactcacagacttgaaactttcttttgatagagcagtgttgaaacac

SEQ ID NO: 162552 - DNA, 411 bp, Homo sapiens
ttgtattcattttaaaggtccatggctatcctcttcccactcttttatgccgaaattttgactctagccattataaatataccttcctggtgactccatactttgtgaatatgtctttagccttagagttaggtctcttggcatttattccttagagtagargttttctctcattttagtaaaatgattttaaattaaatttaagaagtacttactatgtgccaggtgttatgttaaatacctttctctctgagagttcatagtttatgtaggaaaagactgataataaactaactattaaaacacagcagaggtgttctagaggcatgtatgtgatatcctgagaggatggggagggctccatcctgaagtcggtagtagaagacaacttctctatcgaatgaatgtgat

SEQ ID NO: 162553 - DNA, 411 bp, Homo sapiens
ttgtattcattttaaaggtccatggctatcctcttcccactcttttatgccgaaattttgactctagccattataaatataccttcctggtgactccatactttgtgaatatgtctttagccttagagttaggtctcttggcatttattccttagagtagaagttttctctcattttagtaaaatgattttaaattaaatttaagaagtacttactatgtgccaggtgttatgttaaatacctttctctctgagagttcatagtttatgtaggaaaagaytgataataaactaactattaaaacacagcagaggtgttctagaggcatgtatgtgatatcctgagaggatggggagggctccatcctgaagtcggtagtagaagacaacttctctatcgaatgaatgtgat

SEQ ID NO: 162554 - DNA, 548 bp, Homo sapiens
ctacttccctgattactgcaggcaacagttaccaaaggtgacaacagtgattatctttaaagcttctcatatcagttttctactgcctgctgcctaaccacgaatgtcacctattttaagtttttttttaaacatcagcattttacaactgcatatccatatctgtgtcaagatagacaaaattataacattttgtatttactaacctcagaggcttaacacacaaagaattatttcttgattaaacaaaattctgttaggcagaacacagaattctccaagaaaccctccaagaaagctttcttcttgtggtkccataggattgaaattgcttctctattctggccctggacctcaactcataacccccactccacatctaaggaggaagagaaagcaggagggtcatgttgcttaggaagtttctaagttaaggagtgacttacatcctctgagaaaactgcatactgtagagtgtttctccatactctctcacagaacacttctgacaccagatgtgcaagtttttccctcaccaacaccagctg

SEQ ID NO: 162555 - DNA, 276 bp, Homo sapiens
ttgaaaattaaactgagttcatatgaagcttttcactcacagcttgcttcccccaccccaaatgcttctttttrtgtataaaagttatacaactccatgtaaaaatttcagacaagacagaaagttatcaagagaaaagtggaaatctctaatgtcactgcttggatccacacaaaaaagttatattctttaacttaagaaaataaacatacatgaagcagcataaaaatgcagtaacatggcacatactatttataacaactttccacatgtcaa

SEQ ID NO: 162556 - DNA, 474 bp, Homo sapiens
atgaattaaattttctttttgcatttcgcggtgatccagctatgaaaatatgttcatgaaatgtaaactgccaggagattagataaataccatagattgagggaaggaagataaaggaaccctccaagatattttgwtgctcttgttttctgtggaacaaggaatggcaaaaagaggaagaacatgcttcaacactccccaggggagggcagtcagagtcttatcgtcagagagggggaaatgaggattgcagatgttttcttaaattctcttcttcagcattgttacaaccaaagaaagcaaatcctgtgatttaatttcagatatatatttggtgctgggacatatcagtgtcccttaggctgatatctgggacaggctgataggaagaactcaaattgtgttcaaatctggtttcactactttccagctgtgagatcctgaacaaatcatgtaaactcttcatgccttagt

SEQ ID NO: 162557 - DNA, 469 bp, Homo sapiens
tgaattcccttaaaatctccctgaatccatggtctccatggtaagtcttcacgatctgaaaagaaaagtcctgtttcccttctgactttatataacatgtattaaatgatttttctgttyttttttttttttaagtaatacatgctcactgtagaaaatgcagagaagttatgtagagctctttgtccaagtctggtgggttttttctgaaattttaaattaaggtctctgtacataaatctctgttcttcatttaaatcagctgacactaaactgactttaaagtcagaccactagatcttggattcaaggcagcaactgaggcccctctttgggttgaattatgcattgtaggctattcagaagaaggtcaaaagtgcaagcccgaggagatagggaggcccccaaaggagggtgattgtgctgccccagatagctctcaccctgagcagcaccatctccagaaata

SEQ ID NO: 162558 - DNA, 601 bp, Homo sapiens
aagctgaactcttgaagaatttctatagatatgtgattattttggatcttgggtgttatgaatgatgtggtatgacgtatgacattgtgaatatatggcatgacacaatgtatctctcaggggaataatattgaaattatttataaaataatttcttctaacctaattccattgttttcttgttctgtttggttgttaattccagggttcctctgtgaattttctgaaaygttttaggttgaacctgaagcactgttactctgtacgttttatgagattcaactgaatatgtctagttcttgacagctaattatttctatacacaggttcctaattattattaggcttcatcctgtctcaagggttttttctcctaaatggaaatttgtgtttatgtaataacaccatactagttatttaatggactattgtctgtcaacattgcctgttttgctgaatgttgggtctgtacttaccacttccacagaggtttcatttttggctttttttgaggggttagattattctctgtcttgaaggaaataattatgtttataatgacaggaacagaaccttttcttaggtgagttactttcctagg

SEQ ID NO: 162559 - DNA, 594 bp, Homo sapiens
cgcctgatcattggatctttagatgactccaatgttttgcttttataagcattgctgctacaaacttcttaaaacatattttaaatttttcttgacttagaatttttccttagacatagaattacttaatgaagagtctaaaaaattttaacgtctaccaaattgctctccagaaggctttttcaatttattctcccacagcattattattgttattttctaatttaattttgtacttgaagaatttttattttactgaagctttatgcatgggagagatttcctcccttttgcaacaaattacatttcctctttttatattgtttgttcatgtaactttaacattttttctaatggaaattatcaatttttaaaatgaactcttcatatattaagcctagtaaccctttagataactcattttatcacatgctagaggctcgtataaaaacacgcaaacttggtttcaatttacgaaaaactgctggctactttatcttttctcctttgctgtttttcagtaatggaggaatgagctataaacrcaccttaggggacttatagtttctcttttttcttcaagaggttatgaac

SEQ ID NO: 162560 - DNA, 601 bp, Homo sapiens
gagatttcctcccttttgcaacaaattacatttcctctttttatattgtttgttcatgtaactttaacattttttctaatggaaattatcaatttttaaaatgaactcttcatatattaagcctagtaaccctttagataactcattttatcacatgctagaggctcgtataaaaacacgcaaacttggtttcaatttacgaaaaactgctggctactttatcttttctcctttgctgtttttcagtaatggaggaatgagctataaacgcaccttaggggacttatagtttctcttttttcttcaagaggttatgaacaaagttttcctagaaagtttgtttatcagttttgcttagaggagtgagtgtagtgtatagtttattgggagaaggtgatgcaacattttaggactgagagacaatggtggaatgggggcaaggagagtagctggcagagaagaaaaggtgaatctttttagatatttggaaatgaaatggctgggtgtcagagtggagacggaggggtgtgatggggtcaaatctcragattgggaaattgttaaatgagactataacatataaaatagttaaatgacaatg

SEQ ID NO: 162561 - DNA, 529 bp, Homo sapiens
tcattctctccactgaggctgcccaggccctcagctgggattgcagcgtctgggccaggtatcccatgacatcctgttcttgtctctaccatcctctccacacatggtatcacaactattgcttacrattctgtcttctccattgaaagttaaagcctgtgcctgtgcctcattcacctttgtattacagtgcccactacagcaactggcacacaataagtatgtgataaatattgattaatacatgaatgaatgaaccaacaattaagccacctctaagtttgttaagagtgagaaggtctaaaattcttccaaaagtcttttgtcccagagcagtagctttttatccaggaggatgccttacataaagcaaattaaatcagataggagagaaatgtatgtacttttctccttttcttgccggacatttaaaaggggttggattaataatgtccttcagtatttactgggatatttaaaagacgccctcccaaaatattttaaagctccaattatacaataatgaaag

SEQ ID NO: 162562 - DNA, 643 bp, Homo sapiens
agtcagcagtctaaaaactgttattcccctagcagcacacttccaaatacatggagtatttctacaggcttaagcagcagaaagctgcaagcctggaaaaaattctccattcagcctcctttcacagactaaggagcagaagtgatactaaacagaaaacgtaaatcacctgtaaggtaatacgmcccaaatgatgccttaaagtgttgaaggtacataaacagtttctttacaaaagagctttgtccggacttaactatgaatggggatgttagttcttgcttcctctgaataaattacagcttgtagtaagagtgctacataatagtgaatgtcttcctctgaaaagatgcatatactttttaaacttttagttgaaagccatttgacatcctacctcttaagaaactactaaatatgtaattcttcacaactaacaggttattagcagaaaaaaatatatatgataaatatgcatttcagcagcccagaaaagcgtaggacaattaattaaacttcctctactgctcacatcgaaggatgctaaaagcatttcaaaagatggcatttcacagtcttgttggatgaagattttctacctcactgatcccactgagagagaaaaagagaaagtatcatgaaa

SEQ ID NO: 162563 - DNA, 605 bp, Homo sapiens
ctttacttctttctgaagaacttttaaaaaacacttcttacaggtcagaactactggtaatgaattcctcattttttgtttgcctgataaagtctttatttctctttcactttgaagtgaatttctctggatatagaatcctagactgctgggattttttctttcaatactttaaatattttacttcactttcttcttgtttgcatagtttgtttttcccctctctggctgcttttaaggttttccttcatctttggctttcygtagtgtgaatttgacatacccaggtatagatttcttggtatttaccctacttggtgttctctgagtttcttggatttgtggtttggtgtctccttaatcttgaaaaattattggtcattattatttcaaatattttttcagttccattatctctttcttctccttttggtattccagtatgtgtatgttatattttttgaaaatgttccatagtttagatatcctgttctattttcttttcactctttttttctctttgcatctcattttgggaagtttctactgacattatcttcaagctcactaattccttcctcagctttgtccaatctattgatgag

SEQ ID NO: 162564 - DNA, 600 bp, Homo sapiens
tgaggctgcctttgtctctgaggaagcagaatgagtaagtaaataaatacaatacagtgagctaacaacgatggcaaaattatgaatactgtactaggagaccatgcacaaggaagagacaaagtcagctggcagtgttagggaaattcttcctaaacaagaatatatttggtggatgaaataayattgttagttggagaaacgggtgtcatatccaggatcaatttccatgtggatagaagcatagacatgaaaatgtgaatcttttcttgagaataattgcagctctgttttgtgagagctgtgggcagtgggaagaggtacaagatgaaaatgggtttgggccatattatgaaggacctgctatgctgttcccaggagtatggcttaagatgctaaaagcaatgggaaaatattcaagatttccagtaggagtatgatatgatctattttagaaagttatgtaatatatggaattggtggtagagttaggaagatgtagaaaaaaatctacgttttgggacaaaaaaacgagggtctaaacaaaagcagttctgagacattttagagtaaaggcatagtgatccttttgttctaagg

SEQ ID NO: 162565 - DNA, 548 bp, Homo sapiens
atacatcagagagtaagatcacagggaatattgctgcctgtacaaattagaaaggcagacaggcaagtaaagagaattgtaatttattagaggagaaatccatgaacagaaacctccatgggaacatgtgcctgggtaggaaaacytaaactgtgattggtggatttttggaaactcagtgtgaataactctgagggttaaaaatcaggggatggactcagtcataggaggaaccccacacagtaaatatcagagaaaaatccccttatgcttccagcaggaggaggggaaaggaaccactttgaaatatgccagagcatcctgttcttctagtcaaggcctgccctccaagataaactattattagactctaagctgctgtgactttctcagagactaccctacctcggagaagaaaaatatccagttccagcctgctacatctttccacgtggaggaagaaagatacccaattttagctcactctagccatttggccccacctaagaggggacaaatcttgctatttactagtgaaattcacaacc

SEQ ID NO: 162566 - DNA, 548 bp, Homo sapiens
atacatcagagagtaagatcacagggaatattgctgcctgtacaaattagaaaggcagacaggcaagtaaagagaattgtaatttattagaggagaaatccatgaacagaaacctccatgggaacatgtgcctgggtaggaaaacctaaactgtgattggtggatttttggaaactcagtgtgaataactctgagggttaaaaatcaggggatggactcagtcataggaggaaccccacacagtaaatatcagagaaaaatccccttatgcttccagcaggaggaggggaaaggaaccactttgaaatatgccagagcatcctgttcttctagtcaaggcctgccctccaagataaactattattagactctaagctgctgtgactttctcagagactaccctacctcggagaagaaaaatatccagttccagcctgctacatctttccacgtggaggaagaaagatacccaattttagctcactctagccatttggccccacytaagaggggacaaatcttgctatttactagtgaaattcacaacc

SEQ ID NO: 162567 - DNA, 400 bp, Homo sapiens
agatctctggctaaccttcaactaggatgcattccacaatggggagatcaatagcccacagtcacccagaacagatttcaagatttttaatacaactgaccctttacacataaaatgctcacatctttaactcrgaatgctgctgattccaactatttcatttctgcttactgattacttggaggaaagcatggtggtagaagaggtgaagataagtgtgaatgaaaacaagccccaggcaattttctcaaataactacacatatacactgcaaaatcctatgaagtctattacatatattcttttccacacaattggctgaccacaatacattccttttctccctcatgataaatatgttttatcatagcacagaatgcctccaatgtgaaccttgctt

SEQ ID NO: 162568 - DNA, 606 bp, Homo sapiens
gatgtttacttaaatataaaaagacagctattctccatcaagaaaacacaggaatgggatgcagtttttattatagcagtgcgggaacygtagtttttacaaaatggtaaaagtgagattttgaggcatactgatctagtagtagcagagtagcagcttgagtctactgaatggctgcctaatccaagtttttatttttctcagttataaccacctctgccatgccagctggaagccaatagtctgattcctcccagtcctccagtatttattatcccggaatctgtactccctctttttcctccaaagggcacatttttaactgacatattcctggaaatatactaggtcaatttagctgagaatgtgccaaatatacaggaaattctagttctatcataggacaatttcttaaatgatggtatggttcaattttcattgtcacttatacttaaattatgagttacctgtacaaaaaaaaaagtctctgttatctagtaatctaaattcacaattttctatcttttctcactcccttaacaactaaacaggatcatcatctgcaattaagtatccttaatgtacctgcgttctgaagcagggtca

SEQ ID NO: 162569 - DNA, 488 bp, Homo sapiens
catggctccacgtgaccttttcgaggatcccatggtggttttatcttgattaaaatggttctgttcacaggaggggaagggctgtgccatcatcctccaaaagaaggtggaaaaggcaaaagatggaaagaagataccactttctcgtggaaaggcgggaggagaagagaaggagtgagcacaacagagaggcatgttggagaatgagggagagacagagagaaggaaataaagagaaaagccagaggctcaggaaatggcagggaaagtgatctaactaattgtatgaagagacattctgtccatttcttcttagtgcaaggcaagaaggaggcactatcaatcccagtttgcagatggggaaactgagtcccagtgtaaattaccrtgcccaagttcactgggatcatgtgtagccaaaccaagattcagtcttaagtttgctagacttcagactctgccctttccataagagaaggaacacctgt

SEQ ID NO: 162570 - DNA, 416 bp, Homo sapiens
gagatctgagacaaagctgccctccctccagtctcagcatctcttcctggaatgctgctaactcctgccatacaacctgttcattctgcttctgatctcagcttaaacgctgcttctttccagaagccctccctgatctacaaagattcccatgttttgtgttcctcatgtagcacttaagtttgtcactgtctatatgtgactatttgattgtcttcccaactgtggactccacagggtgtgttttgcttattgatgaacctcagtcctagcaaacagcaggtattcaaatatttgttgttgaatgaatggtgtagttttagaaaaattaagtctggcagtatgcagagaagatgragtggaggcggcgaggaggctgttgcactggtagatggaactacagtggggctgaggaa

SEQ ID NO: 162571 - DNA, 419 bp, Homo sapiens
ccccgtgcctccctgccggacaggcccaggagttgccatggggaccacactagcctaggggcaagggagaggagggaggagggaggagkcagaagcagctatgaggggcacaggggcggtgctcagggaagggtaagcctaggagcggatcggggatgggctgcctcaaggagctgggctctgaaggcctcagagggtctggaaacagggaagagggctaaactcatcacctttactctgctggctgtgactctagaacccagcttccccatctgtgcaatggactggtgatactccttggctctgggggctgctgtgaggactggagttgagctctcagcaccagaacagtgcctgccttgccacagacatcttgcaagtgggagctgctaactctcttggacggctcctccctggtg

SEQ ID NO: 162572 - DNA, 557 bp, Homo sapiens
ctgtgaaaaaaaaagccaggtgcaggttctctatggaatactacaagttgtgtttttaaagaggtattaatgcaacacctccctaaactcaaatatgcctcgattatctttkgaaagacagaggaaactggtaacagaggttgcctctaggatgagaagggaaagtgagatcaagttcaagagaaacttactttttactgttcatttgctattttgtccttttgggcttttaaaaaaattattattatttttttaaagccacatgcatctattaccttcccccttaaaactggaaataagaaactttttgtaaatcacctctctctggagaattccttgggtccccagctgtgttggctgccgaggcctccaaggcctctcacacatccccgtgctccagtgagaacctcactggttgtggcctgtggtttagggtggactgggagctctgcagggggaaagtgagggtctgactcacgtctgcatgggctgggcccaaagcggctgctcagtaaatgagtgctgaatgaatgaatgaatgaacgaatgaaaaaaag

SEQ ID NO: 162573 - DNA, 543 bp, Homo sapiens
gtggggggcaccgaggggaggtctgcccagagcttggctgttctgctctgggaagcagaggtacttctgtgcccacttcttgcttgtctgcataccccagcctctcagagaggccaagagcctgtcgagggacacacagaaaagagccagcagccctagagagggcagaagcttcaaacaaggacctctcctcctaccacgcttcttcttcaaacacttctcaactttcacaggaccttcccctccaggaggccctccaggctgccccagcccacgcagagccccagcttcagagctcctaccagctctgccaggaagtgagaaccacaggcctcccctcactgactcctcgtctcctctacccgccagcagaggcgctctcagggtttgctcttcatccttccctcctgtctccctgcagcacggacagcacaagctgcagatagatagatgcgcgagtctgcatgaggaccaggtgtcaggctgggctgagaagcagcagccagggtccaagkggggcagatgatgcccaggttttcgcct

SEQ ID NO: 162574 - DNA, 604 bp, Homo sapiens
ggtcagtgacctgtctaaggtccctctaccctgggcctaagtggcatgtctgggcctggaacccacattcagttgggtgccaagttgcttgtgccctccaacaccctggctgcttttgggactcatagtaacgacaaccacaacagcaacagaggggaaaaatgcacacgctccagtgtatgggtgatggcgctgcagcaggccagcctagaatgttctgtagctttttagaagcaacgttacttagaccgcgtagcaccatgagaaaatgcccacagacgcagtattaaatgaaaaaaggtgtcacggcacacacactccagtgacaacgacaatgaaggaaaaggatggggaaaagactggcagtgaactccaaaatgctaacacagtcactgcctgctgaagaaatagtgggtgatttttgtttcattttctaaatttcctgtagcgctgttttgttattttctaaatcaagaaaatgagtacattcatgktttccctataatgagctcagattcacttccctgggacccacctgctccctagctctggcccacgtgtctgggacaatttctgccatgggatgcctttctcatttgggaca

SEQ ID NO: 162575 - DNA, 555 bp, Homo sapiens
tgatacatcttaataatcaatmctttggctgcttgctgtgaattacaaatttgagtacccctgagcagtttctccacaattatattattttgcacgtgctcttttctgccaatggctgaagcagctcagactataaggatgaaaaaaaaattcctggggtctcagtggaattcaggaccccagctctattgcaaaaaggtgaatttctttcacctggagctatgtatgcttacttgccttgcctcaagcccactataatctggctaacctcctgggttaagtgtttttggtatacttaagacaaaggacaataaaacatgtagcttgcagataaaatagataaaacacatgtaggggtaaggcagagagaaatgaaacatgacagctggtctttccttggctaacttcttcgagtgtccgaggacagcctcaggcatgacaacattatcttctgtattacgctgatatagcaaaaagccctttccttaatcatgctcctcttttaaactatcccatataaatcttggaacaacatagaaaagcacaagctcatca

SEQ ID NO: 162576 - DNA, 541 bp, Homo sapiens
cctttggctgcttgctgtgaattacaaatttgagtacccctgagcagtttctccacaattatattattttgcaygtgctcttttctgccaatggctgaagcagctcagactataaggatgaaaaaaaaattcctggggtctcagtggaattcaggaccccagctctattgcaaaaaggtgaatttctttcacctggagctatgtatgcttacttgccttgcctcaagcccactataatctggctaacctcctgggttaagtgtttttggtatacttaagacaaaggacaataaaacatgtagcttgcagataaaatagataaaacacatgtaggggtaaggcagagagaaatgaaacatgacagctggtctttccttggctaacttcttcgagtgtccgaggacagcctcaggcatgacaacattatcttctgtattacgctgatatagcaaaaagccctttccttaatcatgctcctcttttaaactatcccatataaatcttggaacaacatagaaaagcacaagctcatcaaactgac

SEQ ID NO: 162577 - DNA, 552 bp, Homo sapiens
cctttggctgcttgctgtgaattacaaatttgagtacccctgagcagtttctccacaattatattattttgcacgtgctcttttctgccaatggctgaagcagctcagactataaggatgaaaaaamaattcctggggtctcagtggaattcaggaccccagctctattgcaaaaaggtgaatttctttcacctggagctatgtatgcttacttgccttgcctcaagcccactataatctggctaacctcctgggttaagtgtttttggtatacttaagacaaaggacaataaaacatgtagcttgcagataaaatagataaaacacatgtaggggtaaggcagagagaaatgaaacatgacagctggtctttccttggctaacttcttcgagtgtccgaggacagcctcaggcatgacaacattatcttctgtattacgctgatatagcaaaaagccctttccttaatcatgctcctcttttaaactatcccatataaatcttggaacaacatagaaaagcacaagctcatcaaactgacacatgtaattt

SEQ ID NO: 162578 - DNA, 244 bp, Homo sapiens
aaaatagataaaacacatgtaggggtaaggcagagagaaatgaaacatgacagctggtctttccttggytaacttcttcgagtgtccgaggacagcctcaggcatgacaacattatcttctgtattacgctgatatagcaaaaagccctttccttaatcatgctcctcttttaaactatcccatataaatcttggaacaacatagaaaagcacaagctcatcaaactgacacatgtaatttgaa

SEQ ID NO: 162579 - DNA, 556 bp, Homo sapiens
atgatacatcttaataatcaatcctttggctgcttgctgtgaattacaaatttgagtacccctgagcagtttctccacaattatattattttgcacgtgctcttttctgccaatggctgaagcagctcagactataaggatgaaaaaaaaattcctggggtctcagtggaattcaggaccccagctctattgcaaaaaggtgaatttctttcacctggagctatgtatgcttacttgccttgcctcaagcccactataatctggctaacctcctgggttaagtgtttttggtatacttaagacaaaggacaataaaacatgtagcttgcagataaaatagataaaacacatgtaggggtaaggcagagagaaatgaaacatgacagctggtctttccttggctaacttcttcgagtgtccgaggacagcctcaggcatgacaacattatcttctgtattacrctgatatagcaaaaagccctttccttaatcatgctcctcttttaaactatcccatataaatcttggaacaacatagaaaagcacaagctcatca

SEQ ID NO: 162580 - DNA, 493 bp, Homo sapiens
gtttgttaaaaaaaaaaaaaagacctatatgttccatttggtagttacaactcttcattcttttaatcctgaatagccccaatgccatctttatttcacgccactgacttagagaaattgggtctgttgtcctggaaaatttcccacactctggatttgtgtctttgcctctttgatgtgacattcaagtcattttactgctcccccattcctccatattccctgtraatggaagccagctctaggagcacaattggcatttttggcagaaacacctccgggtgggactttgtgctacatattgcattacagcaggagacatacaatgtcctattttcagtgatgctaagattgatcatcgtttcaggtagtgacagcttgatccctctgaggtcaagttcctcattaacctttcatctaacgtgttcatcgatgatcactgtctggatcaattgtttctttagaagttgcaaaatggtgattttctaatttt

SEQ ID NO: 162581 - DNA, 564 bp, Homo sapiens
gcaccctacatacagtattcctaattttccccaaaactctacaggatcttacttactatccctcctgccaccaaacaacatggttctccggaaagttccctgattttacaattagatgcaacctctttttcttctaaagtgtatctctggactttttttctttttctttctttttttttttctttttgagacagggtcttggtctgttgttcaggctggaacgtagtagcatgatctcagctcaccgcaacctctgtctcccaggctcaagcgatcctcccaccccggcctcccaagtaggtgggacaacaggcccaagccaccaaccttggctaattttttttttttgtatttttcatagagatggggttttgccatttgcctaggctggtcttgaactcctgagctcaagccgtctgcccgcctcggtctccctaagtgctgagattaragtcatgaaccactgcgcccagcctctgcacttaaaaacaaaaacaaaaaaccaactttttttattgaagtgtaacatacatttagaaaagtaaacatatttgtacagctcaa

SEQ ID NO: 162582 - DNA, 454 bp, Homo sapiens
ccaacagccgtagactctccggggaaatcaccagtcagctctctacagcttcctcattccccacacgccatctgcagctcaggacaccggaaactcaaatcatcaaaaaccggagctggaagctcccttaggaagctgctccagctcctccagcccctcaaaagccaggctgagagaggggaagtggcccatccacactcagccagggagtcggtggcaacgccaagactcaagttgtgtscctttaaccaagcccggtctcttcttgccaccaccccaatgcctgtcaggagctggggttttccttctccacccatcagccctgcagggtgaagtctccatggcattcctgagccccaggatgaggctgccaacttaatagccctagcccaaggcttgactttggggaaggtaactgccccaccagcctcctctggatcaagtcctagtttca

SEQ ID NO: 162583 - DNA, 454 bp, Homo sapiens
ccaacagccgtagactctccggggaaatcaccagtcagctctctacagcttcctcattccccacacgccatctgcagctcaggacaccggaaactcaaatcatcaaaaaccggagctggaagctcccttaggaagctgctccagctcctccagcccctcaaaagccaggctgagagaggggaagtggcccatccacactcagccagggagtcggtggcaacgccaagactcaagttgtgtccctttaaccaagcccggtctcttcttgccaccaccccaatgcctgtcaggagctggggttttccttctccacccatcagccctgcagggtgaagtctccatggcattcctgagccccaggatgagsctgccaacttaatagccctagcccaaggcttgactttggggaaggtaactgccccaccagcctcctctggatcaagtcctagtttca

SEQ ID NO: 162584 - DNA, 587 bp, Homo sapiens
aattcacctccctgccattcactgccaccagagtgacctcaaaatcccagatctcactatgtctcttcttcttgcttgaaacccttcagcaggtccctgtcacctgaaaggtaaagcccaaacttcaggatggtgtctgagctctcgttggaacaatcactttgcagggcttctcctgcctccccattgtcacagcaccatcatgcgacatgctgtgctgttaccacctctcagggtctgctctgcctgcaattcccaccyccaactctcttatctggcaaacacctgttggcctttcaagaatcagtcccagtgtctcctcttccaggaagccttcccagaacacctcagccctccaggtagaactgaccactcccttctttgtgtctccaccattagcttctatatctttaataaaatccattactatttttctttgctttcaagtccattcctcaaggacagaagcattgtgttacttcacatatctctgaagtctagccaagcaactgagtagtcactgagtaagcatcagaagaatgaatgataaaatatcctatatgacttgaattctttgcaggatggtc

SEQ ID NO: 162585 - DNA, 583 bp, Homo sapiens
aatcttggctcactgcaacctctgcctcctgggttcaagtgagcaygtccagctaatttttgtatttttagtagacacggggtttcaccttgttggctggtctcaaactcctgacttcaagtgatccgcctgcctcggcctcccaaagcgctgggattacaggtgtgagccaccacgcttggctgatattaagcagatttcttattgtggacaaccttcaaaacaattttaaacctatccatcttgcttgtctcaacacctagttcaaagcctggcatacagtaggttctcaataagcatttgttgcacaaatgactatttcatttttttcccttttcacaaaagtgtctcacagaggctgtaagatatcacccatgggcagcaggactccccatttttcctgattatgactttgcctagtgacccctgtttttctcagaataaaccccacagggtgaagggaatgacagaatgtttctctttcaggtatcaggtggggttcttgatctccttaaagcagcccagaaaacaagtgccctgaaggctccctcatagggaaatagccctctcccccgaccagtcc

SEQ ID NO: 162586 - DNA, 593 bp, Homo sapiens
aatcttggctcactgcaacctctgcctcctgggttcaagtgagcacgtccagctaatttttgtatttttagtagacacggggtttcaccttgttggctggtctcaaactcctgacttcaagtgatccgcctgcctcggcctcccaaagcgctgggattacaggtgtgagccaccacgcttggctgatattaagcagatttcttattgtggacaaccttcaaaacaattttaaacctatccatcttgcttgtctcaacacctagttcaaagcctggcatacagtaggttctcaataagcatttgttgcacaaatgactatttcatttttttcccttttcacaaaagtgtctcacagaggctgtaagatatcacccatgggcagcaggactccccatttttcctgattatgactttgcctagtgacccctgtttttctcagaataaaccccacagggtgaagggaatgacagaatgtttctctttcaggtatcaggtggggttcttgatctccttaaagcagcccagaaaacaagtgccctgaaggctccctcatagggaaatagccctctccccygaccagtccagctgtgttg

SEQ ID NO: 162587 - DNA, 490 bp, Homo sapiens
gaattctacatgttcccagtcggaaaagaaaatggtgcagccccttagacagtttgccgttacttctatggtccagccattgcacttaggaaatgaaaacatacatccacacaatctatgtgcaratgtttacagctttattcaaaattgccccaaactgtaaacaactcatatgtccatcaattggcaatggataaacaaatggtgcattcatacaattaaagaatactcaggagtaaaaggaaacacgctacagttgcgtgtggcaatgtgtatgactctcacatgcaccacactgtgtgaaagaagccagattcaaaggccagtgtgctgtatgatgccattggcgtgacattctggagcaaaactatagggacccaaaacacatcagtggtggcagaggctgccagtaggacgaggggtcgactcaagggagcacagaggaatttgggagtgatcagctgttgcacaccttgacggtgctgctagg

SEQ ID NO: 162588 - DNA, 503 bp, Homo sapiens
ggtacaaggtaggaatccaatttcatgtttttctatgtaaatactatctgcatgacaggacttgagttttctgtgtataaatatttcatctgtaaataatgacagttttctttcttgtcaatcccgacaatttttatttcattttttcttgttctactgtgctaagacccctgatactactgtaatctgctaagcatttttatttggaaggagtgttaggtcttacttaaaaaaaaattatcacggacatttgaagcatacacagagtggagtacaatgagccctacatgcccatccagtttcagccatcggcaactctgcaatcttatctccgctcctctcacctctggctgactgtgcttgtgctacagttccagtgctttctctgatcatacagggtttgtatccaccttaatctgttagtgtgacaaattacattcataggttttctaatgttgaattrtcttgcatttctaggaaaagttctagtcaattataaaaat

SEQ ID NO: 162589 - DNA, 557 bp, Homo sapiens
gatttgctctccctctgcctgactgattgagatggacatctctcttctcctgctcatggcactcctgcttctcaggccttcagactcaggctgcaatctaccctattggccctccaactctcaggctttcaaactgaactattatatatgactcagtgctattgtcaattctccccaaaatgatttataaagtcaacaaattgtaatcaaaattccagcaaaatttcttgtagatatcaaaggaactggaaaagccaaaacaattttgacagaggaaaaaagttgggctggatttcaagaattattataaagctacaatagttaacatagcagagtattagtgaaagagtaaatacacagatcaatggaacaggacagacygtccagaaatagacctacaattgatttttaacaaaaggccagagataactcaatgaagaaaagattcatatgtaaagaaaagatctttagcttattttactcatacaaaactacactcatagatctgaaaattaacattaactcaaaatgagtcataggcataagtataaaatata

SEQ ID NO: 162590 - DNA, 458 bp, Homo sapiens
gtcttctctcaccaattatatttatcttctaacacaatgatttgcttttgttgactttgccrttgtttccaagccattttaagtgtttctcttttctcttctggacaagattccttcttcaaagacaggaaggtgtaacatctatcaaagtgctatgtgtatggacacacagcaggtgggcagaaacaaaattcatgtaacctaacctaggggacaggcacaatttcatcagtgccagtcgtgtagagactgtgtgcaatataactgccttcaacagcattgaataaacagttacagaataaagatgtcactctttctgtgctatgatgtaaactaagaaataactttaatacctgttttatctacaacataaaatcattataattttagaaaaaaaaactgatcatatcatgctgaaaaaagaaaacccaagaccaaatatcctgtcatactgaaat

SEQ ID NO: 162591 - DNA, 579 bp, Homo sapiens
agggattggttaaattgcaaaaaggagattgaggctgggcatggtggctcacacctctaatcccagcactttgggaggctgaggtgggtggatcacttgaggtcaggagttcaagaccagtctgtccaacatggtgaaaccccatctctactaaaaatacaaaaattagccaggtgtggtggtgcacacctataattccagctattcaggaggctgaggtgggaggattgcttgaacctggaaagtagaggttgcagtgagctgagattgtgccactgcactccagcctgggtgacagagtgagaktctatctcaaaaaaaaaaaaaaaaaaaaaaagagagagagagagaaagagaaaaggggctgttttagtccattactgttgctaacaaaatatctgagtcagggtaatttataaaaatcgctatttattttctcacagttctggaggctgggagtccaacatgaaggtgctggcagattaggtgtctgatgaggactgctctctgcttccaagatggcacgtcttgctgcatcctcacatggtagaaggtggaaagggcttgcctagttccctt

SEQ ID NO: 162592 - DNA, 601 bp, Homo sapiens
tttcttagggccacataaggaacaagttgtaaaagaatagatttgaacccacatctgtataaccccgaagtgcacacttacgccagttaccctctctctctagctggagatggtaatgtatacaaagacatagggtcatgtaaaagcagggattggagggactggaaaatgaagtgcattaatgacatggactataatttcaagtagcagcccttgcaaaggaactttctaaccccttggattgtggccaaaaaaaagcgagtatccacaaaatccctgtggcagtgctgccagctttcagtttcagtgtcatcttatatgtatgtgagtgtgtgtgtgcaccatgttatayacttttatctattgtcaagaaaaatctgaaatttacctagattgatcttagttcagggcactaactgggcattttaatttattttcagagagtttgattttcaaagagactaattaatattctgtttgaagaaacaaaatctaatatagctttagagtaccattcctgtggagaataggtcacctccaagaaaaacagcgttgccttcataaccttcaggtaacatgcatgggtctccatagagaaaat

SEQ ID NO: 162593 - DNA, 533 bp, Homo sapiens
aatccttcaaagaggagcaggttaagactagacttcacctgaaattgcatcctggctggtcttccttccccttgctatgatctctctccatctcctaagagttcccacttaataaattacttgtacacgattcgattcccctttttaggctctgctttaaagcagcctgactgatccattctcagggattataccaagtgcaaattggtcgagtcattgtttagttaaactcagattcttatgtccaagctagatcagcaacatagttcttctgtcaatactcttataagagagcattcatgtaattcattcattcattcattcaatgtatatgtgttgaaatcatgctcactgctggatttttgctggtttctggggatgtatcaaggcctacagcagaggcccttcctgccctcttagaactttccatacactgagattccttagtgtgagaagcacagatttacccttcacttttgcttrtaacaattcactcactagtaatgaagggcctcattttatgccatgcagag

SEQ ID NO: 162594 - DNA, 424 bp, Homo sapiens
ttgattacttattagagtaagaccaaatccaagccacataagctttcagaatacaaatcctgagatctaaatctagagaaatagataaaggtagcacagcagcctggagtcagcaagcttctatagacactcaatttaatagacctcaaactaccacytacgcgcacaacgtatcagctagagacatgtcaatcagaaagcaactcctgcccagactaccttcattttatgcatctgcaaatcctatcattaatgcatttgggatactagagtgttcattccagtgggtcactttgctgaggcatttgaggtgagtggtcagccatttttatgggtaactcaggctcctaaacaagctctgatctcttgggtttcctccactcaagaagtctacaggcacaggatttctcccttcttcatctga

SEQ ID NO: 162595 - DNA, 539 bp, Homo sapiens
ctaaaactttacacccatcgaacagcaactcctcatttgtccctccccacaacccctgacaaacgaccattctgctctctgtttctrtaagtttggctactttagatatctcatgtaagcagaatcatgcagtatttgtccttttgtgattggcttattttacttagctaatgtcgtaccagttcattcatgttgttgcacagagcagggcttctttttgaatatttaataatattcatatatattatactatatcatattatattatattatattatattatattatattatatatcacaatctctatccattcattcattgatggatatttagtttgcttcaacatcttggctattgtgaatggagctgcagtgaacacgggagggagaatatctatttgagatcctgattttaatttttttggataagtaacccaaagtaggattggtggatcatatggtaattctatttttatttatttattttttttgagacagagtctcacactctcgcccaagctggagtgcaatggcatga

SEQ ID NO: 162596 - DNA, 539 bp, Homo sapiens
ctaaaactttacacccatcgaacagcaactcctcatttgtccctccccacaacccctgacaaacgaccattctgctctctgtttctgtaagtttggctactttagatatctcatgtaagcagaatcatgcagtatttgtccttttgtgattggcttattttacttagctaatgtcgtaccagttcattcatgttgttgcacagagcagggcttctttttgaatatttaataatattcatatatattatactatatcatattatattatattatattatattatattatattatatatcacaatctctatccattcattcattgatggatatttagtttgcttcaacatcttggctattgtgaatggagctgcagtgaacacgggagggagaatatctatttgagatcctgattttaatttttttggataagtamcccaaagtaggattggtggatcatatggtaattctatttttatttatttattttttttgagacagagtctcacactctcgcccaagctggagtgcaatggcatga

SEQ ID NO: 162597 - DNA, 403 bp, Homo sapiens
aagctttgagtttggctttgacagcatcattgtcattgtcattattaccataatcatgaatactggtcatattgactgataattcaggcaggtaattatgccatctacatatattatttaatttagtcatctaacaatcctataatatagaattttgaagatgaaggaaatgaaagttcaaaattttagatattttactcagatagtcatactattaataattctatatgtcaagatctcataaaatagttaaaataagaataaatgtgtataacttttcaactgaagtcratctttgaggaaattggatatcatccattgatccagatttcccagaaggcctgagattccattatctttgttctaaggatttctaatgttattctctgaacccatgaaccaa

SEQ ID NO: 162598 - DNA, 501 bp, Homo sapiens
aacaagaagagaatatttataaggtgcaaatgggagtgctgacattactgctgtgatgcttttgcgtaaagtgtagtggttgcagcattccatatgttctaaatataccaaagctatgaccctcagtagagaggataactatacatcctagggtgcccaggaccatccaggttgcgcttaagttcccctatgagtaaatgccagccttgaagggagttagaaagatcctgcatggtgctcaaagttttggggatcccactgagctttgacctgcgagtgcaactctaataataataatcacagccttaagctaygtttagccccaccccactctcccatctagtcaactggaatgacaagtttgggcaaaacaaaaccgcagtaggcaaaagaaagcaggctttgtctgagcatccttgggtctgttaaaggactgaggctctgaggcctctgttcctgcagcctccttttagtccagtggcttcaaccttaagcctcacc

SEQ ID NO: 162599 - DNA, 473 bp, Homo sapiens
catagatgttaattgtaactagaaatgttttattgacaacttgcaacatttattacttgcaacagagtgtgaggctctaagaaaacttcctaggacctttagagagttttgatttaatatggctaaagtgcatcattgtgatactgatttcagttaggaggacacttcttcrgataaccatgctgtaactctgctagctaaaatggttcacatgctttgactccattcacagtttctttgcccaaagcttccccagacctctgtgacataggatgcctggagccaaagctatcctggctcacaagaaatccttgtccagaatgagagagagagagagagtttgtgcaaaacaaagcaaaagggcttgaccacagagtaaaagagtgtttgctttctttcagaggcccctttctacttgcccaacttactaagctagttccacaaaaaaagcataaaagaacatttatgaattc

SEQ ID NO: 162600 - DNA, 578 bp, Homo sapiens
ggcaatcacatgcaccagaagaaaaagatgctgagctgataggactcttgataatgctctaatcatccctccctctccccaccccagagtaacttaactcttttgatgatgtactatccaaggtacataatttttttccaggccccatggagctggcttcataggatgaagctgaaatacaccaagaagtaaaggaacaactgggtttcatgactttaraagtccaacattgggaagaagtaagtaaagggaaatttttactttaacttttctgccccagatttggttttagcctccctggggaataaaaatccagataagtgagccatagatgtcagtgagcttcttgaaactagtgatggagttctggagctgtgctaagggtcataaaaagcccggtggaaattatgcctttgtttccattagcgctgattagctgactaaaatatcagggttctgtagtttaggtcagtgtagcattggcatctctggttgatcttatgtacttttatgtattgaccccttatcctttggtcaataaaaattgtaaacactatctttcttgaaattgatttgat

SEQ ID NO: 162601 - DNA, 593 bp, Homo sapiens
cataggaacgtgtttgatatagtcaatttagttgatttcctcttgtatctctgcctcagagctttctccaaagtcaagggaggtagatcagctcttgctcacaagaggggtcctgaagtgcagagaagattattctgtggggcaacccttgaccaatgcggggtgagagtccatgtgcttctctgagatcctgtggaatcaagcacctttgcccactgcagccccttgatgacacgcccttgtactggcttttcctccttccctgtctcattctctccccttcctcagccctgcttcctctgaccattccccaaataaggactcacggagaccccattttacatgagcttctgataatcatgagtagctcaaccttaaacggctaagtgttcctacaaagggtggcacttctggtcaagttgtgcccactggaaagggcrgagattgttactgagagagcgcaggtacctgagaatcccagcatggtgaactgatgttccagcagagggcagtgcagcagactttttggaggcgaggaacttgagcccagaggatgcaggtttgaaaacagtttctcatcaagggacatttgg

SEQ ID NO: 162602 - DNA, 579 bp, Homo sapiens
ccagcaagtaaaatctagcaacatatataaaagattatagaacatgaycaagtggaatttatccaataattcaagactggtttaaaaatgcaaaaatcagtatgtaataggctatattaaaaaacacatgatcacctcagtatatgcagaaaaacatttgacaaaacaaaacatctttctgtcatgaaagcactcaacaaactagaaataggagagaacttcctcaatctagtaaagcatatctacacagagactcacagataatatgattcttaactgtggaaaagtgaaaactttcaaaagtcaggaacaagatgatgatttgtattaaacacagtattaaacatcacttatattaaacattggaccaaaggtagtaggcagtataatggccagaaaaagaaaaaaaaaaagaatccatatttaaaaggaaaaaaaagtaaaactatctttatttgcagatgacatgctcttgcatataaaaaatcccaaggaatccactagaaaactattaaaactaataaatgagttaagcaagtttgcagaatataaacccatatatgaaaatcaattgtattt

SEQ ID NO: 162603 - DNA, 553 bp, Homo sapiens
cttagaatatgccttggatcttgttttattagttggttgggtggttactgtgagtcaatggttggagcttgtgtgaggccttctcttctgttttcctaggagggcctgaccaggttgctttctctctttttatttcttctgaagataaaattgagcatctaagcttgttaccacaaagcggccccaatctagatcccaagagagagttcctggacctcatgcaagaaagaattctaggtgaggctatagagtaaagtgaaagcaagtttattaggaagtaaaggaataaaaaatggctrctccataagcatagcagcagcctgaactgctcgactgaatatacttatagttatttcttgattatatgctaaacaaacggtggattattcatgagttttccaagaaaggagtgggggctttctggaactgagggtccctccccttttagactatatagggtaacttcttgacattgccttggcatttgtaaactgtcatggtgctggtgggtgtgtcttttagtatgctaatatattataatgaacagtgagaa

SEQ ID NO: 162604 - DNA, 602 bp, Homo sapiens
  misc_feature (1)...(602): n = A,T,C or G
ggctgtcctcaacccatgtctttaatagcaactctgaggagtgacttakcagtctgtggctctcctttgttcttatgcctggagtgctgaagaaggctctgtttatgaggtggattagttagggtccagtaaaaaaataataataacagaaaaccttttaatatttcaaatagagggaatgtgatataggaactttccttcacaggagttgaaaaagctgagagagcaaaaaggtaatggagagatgacctaaatattagtaatgtaggaaatggtttatgactcttagggctgtggaaacaaaagagaggattggatgttttctgagcacagaagtatgaaagagggactacataacttggtaccagaaccatggagaagaggtccccatggccaacacggattttctgaagagatataacctcttccagaaacatttccagagcagagacagaacaaaagagataaacccttctctcttcctacctttgatcttccactggggtcttttatttgtagaagaaaactgtacaaaggaaactaagtaatataatttgaatgctcttggcccccnaaattgcagaagaagtagagaaatacag

SEQ ID NO: 162605 - DNA, 602 bp, Homo sapiens
  misc_feature (1)...(602): n = A,T,C or G
ggctgtcctcaacccatgtctttaatagcaactctgaggagtgacttagcagtctgtggctctcctttgttcttatgcctggagtgctgaagaaggctctgtttatgaggtggattagttagggtccagtaaaaaaataataataacagaaaaccttttaatatttcaaatagagggaatgtgatataggaactttccttcacaggagttgaaaaagctgagagagcaaaaaggtaatggagagatgacctaaatattagtaatgtargaaatggtttatgactcttagggctgtggaaacaaaagagaggattggatgttttctgagcacagaagtatgaaagagggactacataacttggtaccagaaccatggagaagaggtccccatggccaacacggattttctgaagagatataacctcttccagaaacatttccagagcagagacagaacaaaagagataaacccttctctcttcctacctttgatcttccactggggtcttttatttgtagaagaaaactgtacaaaggaaactaagtaatataatttgaatgctcttggcccccnaaattgcagaagaagtagagaaatacag

SEQ ID NO: 162606 - DNA, 618 bp, Homo sapiens
ctaatatatgattcttgccttaatatatgtgttcaggagcaatggaaacgtttggaatattcttmagaaaatgcagtctacagatgcagtggctcacacctgtaatcccagcactttgggaggccgaggcgggtggatcatgaggtcaggagttcaagaccagcctggccaagatggtgaaaccccatctctaccaaaaaaaaaaaaaaaaatacaaaaaattagccgggtgtggtggcacgtgcctgtaatcccagctactctggagactgaggcagcgaattgcttaaacctgggaggcagaggttgcagtgagccaagattgtgccactgcactccagcctgggcaacagagcaagagtccatctaaaaatagaaaatgcagtctaaaaaagataaatgaataaataactaaagctgaatttcaaagtataaataataacctggtattacttttacctttatatcacaaccatttcttaacaactgacatttgaattaaaaagaagttagacttacactgtccctttgttgtgaagaactgccacacaaaacctattactaaaaatttctattacacaaaccgtatctgtcagctgctgtcaatttccacaccct

SEQ ID NO: 162607 - DNA, 618 bp, Homo sapiens
ctaatatatgattcttgccttaatatatgtgttcaggagcaatggaaacgtttggaatattcttaagaaaatgcagtctacagatgcagtggctcacacctgtaatcccagcactttgggaggccgaggcgggtggatcatgaggtcaggagttcaagaccagcctggccaagatggtgaaaccccatctctaccaaaaaaaaaaaaaaaaatacaaaaaattagccgggtgtggtggcacgtgcctgtaatcccagctactctggagactgaggcagmgaattgcttaaacctgggaggcagaggttgcagtgagccaagattgtgccactgcactccagcctgggcaacagagcaagagtccatctaaaaatagaaaatgcagtctaaaaaagataaatgaataaataactaaagctgaatttcaaagtataaataataacctggtattacttttacctttatatcacaaccatttcttaacaactgacatttgaattaaaaagaagttagacttacactgtccctttgttgtgaagaactgccacacaaaacctattactaaaaatttctattacacaaaccgtatctgtcagctgctgtcaatttccacaccct

SEQ ID NO: 162608 - DNA, 618 bp, Homo sapiens
ctaatatatgattcttgccttaatatatgtgttcaggagcaatggaaacgtttggaatattcttaagaaaatgcagtctacagatgcagtggctcacacctgtaatcccagcactttgggaggccgaggcgggtggatcatgaggtcaggagttcaagaccagcctggccaagatggtgaaaccccatctctaccaaaaaaaaaaaaaaaaatacaaaaaattagccgggtgtggtggcacgtgcctgtaatcccagctactctggagactgaggcagcgaattgcttaaacctgggaggcagaggttgcagtgagccaagattgtgccactgcactccagcctgggcaacagagcaagagtccatctaaaaatagaaaatgcagtctaaaaaagataaatgaataaataactaaagctgaatttcaaagtataaataataacctggtattacttttacctttatatcacaaccatttcttaacaactgacatttgaattaaaaagaagttagacttacactgtccctwtgttgtgaagaactgccacacaaaacctattactaaaaatttctattacacaaaccgtatctgtcagctgctgtcaatttccacaccct

SEQ ID NO: 162609 - DNA, 605 bp, Homo sapiens
aaccctgttgtgcttttattccaatgctcaatttatataaaaacctaataatacccttttgaatttagttgatatgttcacacacagaatttctttaacaagattaatttttgcttccacaacttgttcaaacctttagctttatcttatttaacttaaaacaattctttaaaccctctaatccaggcaaaaatttaccaaactttaaagtaggcaagttgaacaattttaaaaagccaaagaagcaatttatgaccttaaagcatttaggaaacctagaatctgaccatgatttagaccacatgtttacattttgaagacatatctatttaactaataatatttaaarctattttttattttctcaaagattaaaataatgtgaactttaatcatgtgaagattaaaatgcattacatctttttttttcctttaaaaatatttgatttaggcacttttctttaagtcagctaattagaactctttttaatataaaatcacacatataacacatatgttactacacagacagaagaagattcagtagttgtaagatttttcatctgccaatttattaattggaccactggccttcaagaaacagg

SEQ ID NO: 162610 - DNA, 582 bp, Homo sapiens
gctgtgcatcatctctgttgggtatatatctaggaacaagattctggggtcatcagcattgttctgttcaactccaccaattgcatttgtgaatttcttatgaatattctttgcacacttattatcgggtggtttgtgttttattattgacttgtatctgtcctatttactctggatgttagttctgttgtaaatattctctcttagtctgtatataggcccttttattttacaaartttaaagtttttatgcagtcaaatctgtaattctttttctttatggtttctggttttatatcttgcttagaaagtccttctctatctcaagattgtaaaatactctcttatgtcttgtctcctttttttttttttttttttttagacaggatctcactctgtttccaggctggagtacaggatatgatcatggctaactgtagcctcaacctcctaagcccaagcgatcctcccctctcagcctctttagtaggtgggactacaggcatgcaccgtcatacctggctaattttttaattttttgtagggacagggtcttgctatgatgcccagatggtctcgaac

SEQ ID NO: 162611 - DNA, 582 bp, Homo sapiens
gctgtgcatcatctctgttgggtatatatctaggaacaagattctggggtcatcagcattgttctgttcaactccaccaattgcatttgtgaatttcttatgaatattctttgcacacttattatcgggtggtttgtgttttattattgacttgtatctgtcctatttactctggatgttagttctgttgtaaatattctctcttagtctgtatataggcccttttattttacaaagtttaaagtttttatgcagtcaaatctgtaattctttttctttatggtttctggttttatatcttgcttagaaagtccttctctatctcaagattgtaaaatactctcttatgtcttgtctcctttttttttttttttttttttagacaggatctcactctgtttccaggctggagtacaggatatgatcatggctaactgtagcctcaacctcctaagcccaagcgatcctcccctctcagcctctttagtaggtgggactacaggcatgcaccgycatacctggctaattttttaattttttgtagggacagggtcttgctatgatgcccagatggtctcgaac

SEQ ID NO: 162612 - DNA, 549 bp, Homo sapiens
cttgaaagaatttaaaaatgaaagtatttgtcagttttgtccttgaatatctttcatttgtcatagaatacatattttgtccatagtattttgttttataagtgtgagggtagatttttttattgagagcctactaatatgcctggcactgttgaggtgcaggagatcgayagtgaaaaaaaaaacaaaaaatctgtattcatggaacttacctggagggttgggggcagagaacaaagatcagatgataagtaaaagtctgttaggttatatgctatatattgtacaatatgttatgtatgtacacatattagggaataggtaggtgtgttcggagaagacctcattgaggtgatgtttgagcagatacttgaggaaatgttaatattggtataattgacatagtcacagaaagataatagtacagtgtaaagcagaggtgggaaaactggccaagggcaaatctggctgcagcctgttttttatagggactgtgctagaatgggtgttacatttttaaaggatttgtaaagtttttaagaaaaaacc

SEQ ID NO: 162613 - DNA, 549 bp, Homo sapiens
cttgaaagaatttaaaaatgaaagtatttgtcagttttgtccttgaatatctttcatttgtcatagaatacatattttgtccatagtattttgttttataagtgtgagggtagatttttttattgagagcctactaatatgcctggcactgttgaggtgcaggagatcgacagtgaaaaaaaaaacaaaaaatctgtattcatggaacttacctggagggttgggggcagagaacaaagatcagatgataagtaaaagtctgttaggttatatgctatatattgtacaatatgttatgtatgtacacatattagggaataggtaggtgtgttyggagaagacctcattgaggtgatgtttgagcagatacttgaggaaatgttaatattggtataattgacatagtcacagaaagataatagtacagtgtaaagcagaggtgggaaaactggccaagggcaaatctggctgcagcctgttttttatagggactgtgctagaatgggtgttacatttttaaaggatttgtaaagtttttaagaaaaaacc

SEQ ID NO: 162614 - DNA, 655 bp, Homo sapiens
gttatgatgttttccccttacattttcttccagaatttttatagttttagattttaaatttaaatcttcaagccattttgagttgattttgtatattatctaagattagggtccaggtacatttgtatgcatgtggttttcccrgcatcatttgtaaaacagactctcctttccctaatgtgtattctcagaacccttgtcaaagatcagttgaatatatatgcatgggtttatctgtgagctctctattctgttgcaatgttctatatgtctgtatttaggccagaaccatactgctttgattttgatcgctttgtaatatgttttgaagtcagaaagtgtgatgcctccagttttgttcctcttgttttggctctttgggttttttaatggtttcacaggaattttaaaattgttttttttctgtttagaattatattttctgtacaaaaagtattttctatttgaatgctgaaaaacttttctatttgaattgccaaaatctattgggattttgacagggattgcactgaatctgtagattgctttgagtagtatagacattttaacagtattaggtaatccaatccattaatttgagatttattgtcatttttttaggtcttaaattttctttcagcagttttctagtttt

SEQ ID NO: 162615 - DNA, 576 bp, Homo sapiens
ataagtgaaatgaattacagcaatattataagaagtagaagaaaggaattggaaatactttcactgccttctttcaacattttctttgtatttaactttctacactttgaatatgaaatgcctactcatggagtttttttttaatttatccttccaacaaatgtttataggagctttactcrtaattgccaaaaactgaaaatcaccaaatgcacatcaatgactaagtggataaacaacctgtggtgtatctatacaaaaaaaaattcacctttataaagaaatgggctatcaacaatgaaaagacatgaaagaaacttaaatgcattttgctaactgaaagaagtcaatttcaacagggtacatgctaatccaatgtgattccaaatacgtagcaatctgaaaaaggcaaaactggagagaatcaaactaaagatgagttattgccagggttttgtgggggaaaaaaggaaggataggcaggtggaacacatgaaatgtttaggataatgaaattattctgtaccctgtaatggtggatacatggcattatgcatttgtcaaaatccatagaat

SEQ ID NO: 162616 - DNA, 332 bp, Homo sapiens
gacatcctcaaggatgagaatgaaagttatatatttattctcagaaaacactggtagaatacggacacatgagacaaggccagaaaggaagtcaataaaatgtgattactaagcaaattaccaccagagaagcagaaggaaatccctcttcaatattttgagagacagtaaagaacattccctggagttaggacaaatgaagagcaagaagtttgtgcgtatctgacaasttttcttccatcactggttgagggctacttccaaagatttaacgttcctgccctttcagattaactgctctggcttagtgtacccacaacaaggaagaaaaa

SEQ ID NO: 162617 - DNA, 615 bp, Homo sapiens
tgcttatctatgcatataggaataaaacatacatagtaatatctgtgtatgtaggcagtcctgtatattactatagagcgggaccataaaaataaccgtaaaaacttaagtcatgtaaagggatcttgataatcaatgagaaaaattataattgtttcgtggtctttaaaaattattttccaagacattaaaaacactcttattggtagttatgaatrtatatgaaaattaaaaattagtgcaactgacatttattttatacaatgttaattaaaacattagaaacatttatgaattatttccttattaaaactgattaagaatagtttgaagagctcttgttttcttctcattgtttaacttgtgataagaagtgaatatctttatatactttggtgaattatggtatccttttataatttggatcaacttccaacatgttattctttgcactttaaatgtgatttgatatctccaagaatgattctaatgtgaaattttctgttgatatgacttcttctgtaacatctttatccttttccacatatgcactttctcatttatatgttccactagatttatttagcaacatatccacagtgtcttaaactatgg

SEQ ID NO: 162618 - DNA, 606 bp, Homo sapiens
gcagcacaccaacatggcgcgtgtatacatatgtaataacctgcacgttgtcacatgtaccctaaaacttaaagtataataataataaaaaagaagaaaaaaagaaagactgcaagagtgagactatggtttggaatctcagccaaacgtttaaagtttgtatgatttagggcagttctattacactgttaaattcagtctgctcatctggaaaactggaatgagaatggttaccacaacatcaagtaggctcaaggaataaaccaagataactgatgtaaagatctaattggcatgactggaacatcagtaattgatactttatttttgttgttgttaatgttatatttgtattattaactcaatgtagaggcactcggtaaattctgttattcctaaagtgttgacaagataaaggaaactctaaaacaaaacattttagaagtatgtattttagttttttcttttatatcctacctgaaagacaattcaataattatagtgctaagmtaattatgtagattaatcagtagtatttggcaggcagtgcatttctgaatgataacagcatggctcaggtggtcttaaagcataccatgctgaagg

SEQ ID NO: 162619 - DNA, 479 bp, Homo sapiens
tacctaaccttttcactttcagcagatgtctttgattcctcctttaagaaggaaatagaaatatcagaaaagggttttccaacctccttctgccaaacttagcaacttacaagcagtgatagaattttttctcattcttttttgttgtaatatacattttccctctattgtccttaaatgttgtggctcctgaatgttagatttgtttttctcattctattctctgactttatttatcttatagtatagtaacttcaaaatgtatatatatgtgtgtgtgtrtatatatatatatatatatatatatagttttattatagcaactccacttacaacacacttaaaactcaattcaaaatctattccatatatattgtatctattgttccacaattattaaataataactatccatacagctgcacagggtcaaaatctaccttgaccaatatattttaaagtccagtatattaaagtcc

SEQ ID NO: 162620 - DNA, 468 bp, Homo sapiens
cctgcactggggtttaaaatcttcctttctcctcatagctgcttccagatcattcttcttccgttctctatataaatacagatttaatttcatcatcagtgtacgtaatttgtcctatgtttacattttttaaccatyataactttccacctcacaccttccatacatcaattcctatattatgtaagccacattgagatgtataatacactgaacctaccacattgttattctctcccatccttcatcctcctttcctttttataaaactaagattccctggttcatgataatgaatgaaacactcttgttcttaattgttttatgaatattacctggcaaaaccagaatcctattcatatcttcttctacctattttgtgcctgaacccacacaatagctgacagtggttggagaataatccataatcacattaattggtcttattttaaaatcataatgattaac

SEQ ID NO: 162621 - DNA, 468 bp, Homo sapiens
cctgcactggggtttaaaatcttcctttctcctcatagctgcttccagatcattcttcttccgttctctatataaatacagatttaatttcatcatcagtgtacgtaatttgtcctatgtttacattttttaaccattataacwttccacctcacaccttccatacatcaattcctatattatgtaagccacattgagatgtataatacactgaacctaccacattgttattctctcccatccttcatcctcctttcctttttataaaactaagattccctggttcatgataatgaatgaaacactcttgttcttaattgttttatgaatattacctggcaaaaccagaatcctattcatatcttcttctacctattttgtgcctgaacccacacaatagctgacagtggttggagaataatccataatcacattaattggtcttattttaaaatcataatgattaac

SEQ ID NO: 162622 - DNA, 531 bp, Homo sapiens
caaattatactacagagctatagtatccaaaatggcatggtactagcataaaaakacacacagaccagtggaacagaatagagaaagcagaaataaattcttatatctacagtaaactaattttccacaatggtgccaagaacatacattgaaaggacagtctcttcaataaattgtcatgggaaaactgggtatccatatgcagaagaatgaaactagacccctatctctagccatatacaaaaaacaaatcaaaacaaattaaagatttaaatctaagatctcaaactatgaaagtactacaagaaaacatttgggaaactctcaaggacattggactaggcaaagatttgttgaacaataccccacaagcacaggcaaccaaaacgaaaatgaatgaatgggatctcatcaagttaaaaagcttctacacagctaaggagacaatcaacaaactaaagacacactccacagaataacaagagattaataaccagaatatataaggagatcaaataacttacaggaaaa

SEQ ID NO: 162623 - DNA, 526 bp, Homo sapiens
aaatagaagaggacacaaaaaatgaaaagacattccatattcacaaattggaaaaattactgttgttaaaatgtccatactatgcagagcaatctacagattcatttcaatccttatcaaaataccaatgacatttttcacagaaattaaaaaaactaaaatttatatggaaccacaaaagatccataatagccaaagtcatctcgagcaaaaagaacaaaactggaggaatcacattacttgacttcaaattatactacagagctatagtatccaaaatggcatggtactagcataaaaagacacacagaccagtggaacagaatagagaaagcagaaataaattcttatatctacagtaaactaattttccacaatggtgccaagaacatacattgaaaggacagtctcttcaataaattgtcatgggaaaactggrtatccatatgcagaagaatgaaactagacccctatctctagccatatacaaaaaacaaatcaaaacaaattaaagatttaaatctaa

SEQ ID NO: 162624 - DNA, 531 bp, Homo sapiens
caaattatactacagagctatagtatccaaaatggcatggtactagcataaaaagacacacagaccagtggaacagaatagagaaagcagaaataaattcttatatctacagtaaactaattttccacaatggtgccaagaacatacattgaaaggacagtctcttcaataaattgtcatgggaaaactgggtatccatatgcagaagaatgaaactagacccctatctctagccatatacaaaaawcaaatcaaaacaaattaaagatttaaatctaagatctcaaactatgaaagtactacaagaaaacatttgggaaactctcaaggacattggactaggcaaagatttgttgaacaataccccacaagcacaggcaaccaaaacgaaaatgaatgaatgggatctcatcaagttaaaaagcttctacacagctaaggagacaatcaacaaactaaagacacactccacagaataacaagagattaataaccagaatatataaggagatcaaataacttacaggaaaa

SEQ ID NO: 162625 - DNA, 534 bp, Homo sapiens
atttaacctttctttagaatacagaacttgtgtgagaaaaatgttaaatgacagcagccctaggtgctgtcattctaaraatatttgtcatttgttcactataaaaacatttattgtttgctgatatgtgcaaggaaatgtgaagaggattgaatgtgcactttcggaataaacagacattatgttcttgtacccaaggaatttatattcttgtgggagatataagcagaacatctataataaaatataataagtgcaaagataaaagactttgacttgcatataaaaaaggctgctaaccaagactttagaggaatgtggtgagaggaggaaattttctttgataaaactttcttctcatttatgtacccctgaaacaaatcccaataccaaagtaatccatggcatagaatcttctattatataattgaattaaatattatcaatcacacctattttctttctcctgcactaatttttttgcagcagctgctgtttttactaatattcattcattatcgagttacaggagtc

SEQ ID NO: 162626 - DNA, 534 bp, Homo sapiens
atttaacctttctttagaatacagaacttgtgtgagaaaaatgttaaatgacagcagccctaggtgctgtcattctaagaatatttgtcatttgttcactataaaaacatttattgtttgctgatatgtgcaaggaaatgtgaagaggattgaatgtgcactttcggaataaacagacattatgttcttgtacccaaggaatttatattcttgtgggagatataagcagaacatctataataaaatatartaagtgcaaagataaaagactttgacttgcatataaaaaaggctgctaaccaagactttagaggaatgtggtgagaggaggaaattttctttgataaaactttcttctcatttatgtacccctgaaacaaatcccaataccaaagtaatccatggcatagaatcttctattatataattgaattaaatattatcaatcacacctattttctttctcctgcactaatttttttgcagcagctgctgtttttactaatattcattcattatcgagttacaggagtc

SEQ ID NO: 162627 - DNA, 552 bp, Homo sapiens
ctactgactttttcatttctgcttacaaatttttgtttctctgaatactcctttaaaaattttttcttacttcaagggcaaagtaaattgtctcatctctatgagattaataataaacttgttgatattttattctcctctatctttatttcatctaatatgcctttattcattatatttattttagtatttggatgtctgccagtgcttaagaaagggaaagaagttgctgactgcaatcttctgggcacctaattgagtatgtcaacttggaattttcctataragtttgttggggaactctgatggtggcatctttaggtcttttgagccagtgagtttcttcagagggcactctgccaatctcctgctggggaagccagaaatctgagaggtaagtgaggaaagatgtctgaaagtcttagcattcaatagaggtaggcctaattattttcatagagcactcatgccctcaaatattattagtgtctcccagtctggagactctctgtatatgtggccccttacagagaataaacctcccttccactg

SEQ ID NO: 162628 - DNA, 552 bp, Homo sapiens
ctactgactttttcatttctgcttacaaatttttgtttctctgaatactcctttaaaaattttttcttacttcaagggcaaagtaaattgtctcatctctatgagattaataataaacttgttgatattttattctcctctatctttatttcatctaatatgcctttattcattatatttattttagtatttggatgtctgccagtgcttaagaaagggaaagaagttgctgactgcaatcttctgggcacctaattgagtatgtcaacttggaattttcctatagagtttgttggggaactctgatggtggcatctttaggtcttttgagccagtgagtttcttcagagggcactctgccaatctcctgctggggaagccagaaatctgagaggtaagtgaggaaagatgtctgaaagtcttagcattcaayagaggtaggcctaattattttcatagagcactcatgccctcaaatattattagtgtctcccagtctggagactctctgtatatgtggccccttacagagaataaacctcccttccactg

SEQ ID NO: 162629 - DNA, 548 bp, Homo sapiens
tgctttgtacacaatattattcagcaattaaatatatagatttttatccattactgtctctgtagagaaagtccctgctgcagaacgttaagaactctcatgcacaatatttatttttcttaataaaaagtgtgtggctgcataaaattttaatctttagagatttttgaattaatggcatatagtgatagatattaaaaattatggtcatgaactctgaaggttcttgtagagatatgtgtccagcgttcaatatcattttgtcaaagaaactaattcagtggagyacagaaaaatatcagtatgttaggttgtattttattttgtctttgcaaacccttctattataatacatcatactattctgtcgccagatctatgtgtttatgtgtgtatgttttgaagttcaaccttagtaatctctcatattctcataaggatataatttggaagagtattttaataaagatcttgctgtgccatctgtctgtgtctgactaggttatttaatttctagtcctttatataagattagatttctgatgaag

SEQ ID NO: 162630 - DNA, 541 bp, Homo sapiens
actcactgctctcaaaatcatacctgcaaatttcacaataatgagataataaattgatgtaaagtttaatacataagtgcaaccatgtttgatattaattatcattactcaattataaactaaaattgtaacaatatgcatgagaatttagaaaacaaattaatcatagtggctatctctgtgagaaagaaaggtaaatgaaaataggcaggcataaaaaagtgagcaatatttcatatatatttaaaggaackaagttaatatataattcattttaaaaaataatactgacattattttttaatgttggacatgtgcataccccatgatacagtattccatcacttaagtatgcactgcagatagatgtatacacatatacctcaggagatgtgtacacaatgtttatatcatctctgttcataatatcaaaaaatcagaaatcatccaaatgccaacttgaaagagaatgaataaatatatatatatatatatatgctatagactgaatgtttgttttcttaaaaagtcatattttgaa

SEQ ID NO: 162631 - DNA, 534 bp, Homo sapiens
attttaggctacagtgtccattttgctttgtatttcttttttctgtgagtatttaaaccacactgatttttttctttgttgatattttacgtggattacatgactatgacatggacagttaaataatatagttaaaatgtttaaataatattaaatatattgtgtacaggtatatattctaaacccaaggatgtataatgtctagatgaaaccctgaggcccaaatacttagttcaagccatattggcagtgaccaatgtrgcttatttttatgaactcactaattaagtttctttatgtagcaaattttacttaagcctctatagaaataggttaaaaataaacacagataatgatattaatttctagatacataatataaacttccaaggcattttgtaaaaaccaaattctgtttatgaagtaattatattttttcctaaagactgaaattttttctagttttaattcagtcctttccaagtaaaattaaattaaaattaaattgtgttattttgtgttaataatggcaat

SEQ ID NO: 162632 - DNA, 534 bp, Homo sapiens
attttaggctacagtgtccattttgctttgtatttcttttttctgtgagtatttaaaccacactgatttttttctttgttgatattttacgtggattacatgactatgacatggacagttaaataatatagttaaaatgtttaaataatattaaatatattgtgtacaggtatatattctaaacccaaggatgtataatgtctagatgaaaccctgaggcccaaatacttagttcaagccatattggcagtgaccaatgtagcttatttttatgaactcactaattaagtttctttatgtagcaaattttacttaagcctctatagaaataggttaaaaataaacacagataatgatattaatttctagatacataatataaacttccaaggcattttgtaaaaaccaaattctgtttatgaagtaattatattttttcctaaagwctgaaattttttctagttttaattcagtcctttccaagtaaaattaaattaaaattaaattgtgttattttgtgttaataatggcaat

SEQ ID NO: 162633 - DNA, 359 bp, Homo sapiens
tttattttcttacacagtttctgagagtcatgaatcaggaagtagattagctggttagttctgactcagggtcacacatgaggttgcaataaagctgtcatctggggctatagtttctggagacttgattagggatgaaagatccactgcaatctcactcaccyagctgttggcaggaagcttcagttactcaccatgtaagcttatctataggattgatctcaacatagcacctaacttccccagagacagtgatgagagagaaggagaatgaaagaatgtaacagaaacaaatgccgcagtgtcttttataaccctatcttgaaagtggtattccattacttctgccagattttact

SEQ ID NO: 162634 - DNA, 560 bp, Homo sapiens
tgccactgtgataggaaacatgaaatgcaataatttgtcctataattagaggagatgtcctagcatgactttgacaatttgtccactaaatattttatgactatgactccatttaccattgtgttttggtggaagaatcagacaatttgtcacttttgttcacaggtctctagattgaaagaaaacatacttggcaacagcacttaaagaagtatacttgaaaagtgacatctgtacctggacctgatgtatatgaggagattctagattttgatctgatgctataatgggaaggaattttgttgtctaaaggactgtggggagataaattttgtatgtaagggagaacatgaatcatctttggtaatctgagggcagagtatggtgttcatgctccagcatgaccctcaatgattcctctttcatgtttttcatctcttagtatggtcccttatcacattaagttgggctgaccaatgtgaccactaggatattgcagaaatgatggagtgyaacttctatgattgggccataaaagatattgtggttttcattttgcc

SEQ ID NO: 162635 - DNA, 574 bp, Homo sapiens
aagctacaagttatcctctctgtttccctcattttcagtttgagtcacacagcttgtgaatgcacattgctcacatcccatacattgcaaattgattagctaagccacctatgtggggcagcacagccattactacctcacatagaaggcctacatcaagagtgtaagaaggccatagttacacagacaggagttttttaggactaggttatttgtggggtggtgatatgtcgtctaacacattttgagtatgagaagtataaaacattagagctgcagatggagctgttggcttgttggaacagtgcagaagggtggctttgctcgaaggaggctgtgcttcctttcactgatgaaagtgttgatttcttacatatgctctgagtcccatgagccacactagggtccttttaaattaactccatccgtgagtaatttatgcctctcataaggtaacctcagaaacaagaggcaagatgcctgttataggtcattatatgcatttgtrtgtgtgtgtgtgtgtgtgtgtgtgtgtgtatcaggggagagacatgtgtgaagtaaccagctagaa

SEQ ID NO: 162636 - DNA, 600 bp, Homo sapiens
aaatctaattgaacaaatacgtcttattacatttatttacattttatgccacacaatttgtattatttggttatatcaatcaataaggcaaaccaatgtattgtatatttattttatgtgaaaaaatatcataaaacactttgtgtagtatgagttcattcatatatagtatatatttatgtgggtatatatgtatatatatatgcaaaaataaaatatggacaaactaaaatatcaaatgtaacagcatgaatataagattctgggtgattgtgggtgactttttctcataaatatctatcatacttttttttaactactcacaattctatagcaaagataactattcaattccaggttttttwaaaaaaatggtaatagtcaccattttaatgaagcacacaaaaaaattagactcacagaatttcaatcccataaagtgatagttcagattatatgtcaggtttacaatactttgaatgtttaccaataaaactgtaattagtctctcatgattttatgctttttggaaaataaaggagaaagaactacaaagaaataacatataagatatgcattaggataaaagaggaaaagcac

SEQ ID NO: 162637 - DNA, 423 bp, Homo sapiens
ttacttgacttatctgcaagcctgatacttgtttgaatggtgcacaatagctcaacatctacaagcctccttaagtctgcctcaaaacagtgcttgttcatatcttctccctcaagacccctcattttcagcttttcccagttcacttccacctaagacatatctcatagccctgatttgcttagacattcctttattgtaccaaatagccaatatttgaagtaaaatacaaacaaataaaaactaagtattgtccttgttcttctcagcatcacctatcaaaatgttaattttcctcaaggcataatggatgactacgaatgattggaaracagttaaatagacaaaaagtaagaatgaaaagttcggctgggcatggtggctcatgcctgttaagctcagcactttgggagaccaaggcag

SEQ ID NO: 162638 - DNA, 423 bp, Homo sapiens
ttacttgacttatctgcaagcctgatacttgtttgaatggtgcacaatagctcaacatctacaagcctccttaagtctgcctcaaaacagtgcttgttcatatcttctccctcaagacccctcattttcagcttttcccagttcacttccacctaagacatatctcatagccctgatttgcttagacattcctttattgtaccaaatagccaatatttgaagtaaaatacaaacaaataaaaactaagtattgtccttgttcttctcagcatcacctatcaaaatgttaattttcctcaaggcataatggatgactacgaatgattggaagasagttaaatagacaaaaagtaagaatgaaaagttcggctgggcatggtggctcatgcctgttaagctcagcactttgggagaccaaggcag

SEQ ID NO: 162639 - DNA, 470 bp, Homo sapiens
ggaactagaaaaatgttaaaaaatttcttacataaattatagaattacatcttccaaaaccaaaactgaaattaaaattttaaataaatgactagatcytaaacataaactgtattttattttcacaaatttaggacagatcacgtcttagaaataaatatgcagcattgtgtggcagatggcttaggaaaatggattaggcaaataccactcattttagccataattaaatggcaaaagctttaaaaatcaggttaaataaaattctgcagtataagttacatgtagttacaagaaagatatggctaaataattttttcttatacatttttgaatatagcttactaatatttttctatttgcctaaaaagcctgaggtgcattcttacagttattttttaaatacccaaaccaaaatgcaatttttggaaaataaactttaaaaaatataatttagaaaaagacatatt

SEQ ID NO: 162640 - DNA, 478 bp, Homo sapiens
ttttggtgggcacaattcaactcataagaggcatcactcatttttttccattttgttgttatagaaacataattaaattgcaactagagatattttatactatacaataggccctttctcagaataacactgatagccatgtatgatttatgaatgaacaaaaattaaggttatatccaatgataacaatgttattggggtggacacacagactttatataaattactgtcttacccatatttactttatttttaaattttaatgtaaagccaastcctctaaaacttcaaaaatcttacacttttcattacctacgctcagtataagagaggaaattagaatggctttaaataactaacgtctatacttagtttgaaaaccattatttagcaatgtggagacattattgcttttcctaagacaagacttcatgggaatggtatactcagtcaatcaccacaaatgtatataagcttg

SEQ ID NO: 162641 - DNA, 601 bp, Homo sapiens
aaattagaatggctttaaataactaacgtctatacttagtttgaaaaccattatttagcaatgtggagacattattgcttttcctaagacaagacttcatgggaatggtatactcagtcaatcaccacaaatgtatataagcttgtaatctgatgataatatccttcaaggaactaagacaagtactagagcaagctcaccactatgaaagagacaatacaggggcgattttgcccttttacatgagttcagtaatgaaatggtatctctcttcactctacagtaataagtaaaatgaatgtgagttgactgcagaaatgagatcaagtgatttgttcaatattccataatgtgattcrttaaaattcctaattatcttttaaggactgcttttataataattattctttcctgaaagtatcctgctcccttctgccaaactttgtgtaattcaactaggatatattttctattaggtaaatacataaatcatcataggtgagagacctacacattgattaatctcaagctttattaaaaatgccatgactcttctcaagttctcaggagaacattggttcccagcaccaagataattata

SEQ ID NO: 162642 - DNA, 601 bp, Homo sapiens
aaattagaatggctttaaataactaacgtctatacttagtttgaaaaccattatttagcaatgtggagacattattgcttttcctaagacaagacttcatgggaatggtatactcagtcaatcaccacaaatgtatataagcttgtaatctgatgataatatccttcaaggaactaagacaagtactagagcaagctcaccactatgaaagagacaatacaggggcgattttgcccttttacatgagttcagtaatgaaatggtatctctcttcactctacagtaataagtaaaatgaatgtgagttgactgcagaaatgagatcaagtgatttgttcaatattccataatgtgattcgttaaaattcctaattatcttttaaggactgcttttataataattattctttcctgaaagtatcctgctcccttctgccaaactttgtgtaattcaactaggatatattttctattaggtaaatacataaatcawcataggtgagagacctacacattgattaatctcaagctttattaaaaatgccatgactcttctcaagttctcaggagaacattggttcccagcaccaagataattata

SEQ ID NO: 162643 - DNA, 644 bp, Homo sapiens
aatgggattcgttgccaccttttgtgaagcatttagtgtgccttctggatctgttcaggtccacgtatatcattttcatagcacaacagattgtaactgcattgcccagaccttaaggcttgattgttctgacaacaccaagtttctgatagacaattctaattacacagtcacttatctcccatggtcaggcatttagtatctactaggagttagtatcaagctagtagctgcttttccaatgatgagtcattttcagctacagaaagcatggcatttctccagaacccagaactctcctttggggcttcccaggaacagaatatttatatttagttcaatgactatctccaccaccactggatttaatcgttcatattgccctagtggtaggatagactaaccaaagcctaggcctgtggcagaatcctctttyattctgttctcttttcaaagctagcagttttttgagtcatcattagacaatgggttagagaagtatttccaaatgtggtatatattctctcctaaatgcagggaaaaaaaagtccaatgagtggtgtgccactattttagtggtggaggtataaggcactataatttttctctaccttattagaatgtcttgtcatgtcctaaatttt

SEQ ID NO: 162644 - DNA, 559 bp, Homo sapiens
tttctctctgagctctcattagaaagaatcaccacaccatggaatactatgcagccataacaaaggataagttcatgttctttacagggacatcaatgaaactgttagtttgcattatcagcaactaacacaagaacagaaaaccaaatatcacatgttctcactcataagtgggaatggaacaatgagaacacatggacacagggaggggaacatcacccaccagtgtatgtygggggagtggggctaggggagggatagcattaggagaaatacctaatgtaggtgacgggttgatgggtgcagcaaaccaccgtggcacatgtatacctatgcaacaaaactgcacgttctgcacatgtaccccagaacataaagtatataaatagatacatacatacatacatacatacatacatacatacatacacaaaagtccattcacagcaatgtaggcttttcctagtatggagcacaaaactcttccagcctctacctactgccagtttaaatgctgctttcatatttttaagtatttgttagagaagcacctaagctt

SEQ ID NO: 162645 - DNA, 559 bp, Homo sapiens
tttctctctgagctctcattagaaagaatcaccacaccatggaatactatgcagccataacaaaggataagttcatgttctttacagggacatcaatgaaactgttagtttgcattatcagcaactaacacaagaacagaaaaccaaatatcacatgttctcactcataagtgggaatggaacaatgagaacacatggacacagggaggggaacatcacccaccagtgtatgtcgggggagtggggctaggggagggatagcattaggagaaatacctaatgtaggtgacgggttgatgggtgcagcaaaccaccgtggcacatgtatacctatgyaacaaaactgcacgttctgcacatgtaccccagaacataaagtatataaatagatacatacatacatacatacatacatacatacatacatacacaaaagtccattcacagcaatgtaggcttttcctagtatggagcacaaaactcttccagcctctacctactgccagtttaaatgctgctttcatatttttaagtatttgttagagaagcacctaagctt

SEQ ID NO: 162646 - DNA, 462 bp, Homo sapiens
aatggttgaactaatccacactccccccaacagtgtaaaagcattcctatttctatacatactttccaggatctgttgtttcctgactttttaatttatagcactaaatgcccacrgaagacagcaggagagatataaaatcgacaccccaacattacaattaaaagaactagagaagcaagatcaaacaaattcaaaagttaacagaagacaagaaataactaagatcagagcagaactaaaggagatggagacacaaaaagcccttccaaaaatcagtgaatccaggagctgtttttttggaaagattaacaaaatagatagactgctagccagactaataaagaagaaaagagagaggaatcaaataggtacaataaaaaacgataacggggagatcaccactaatcccagagaaatacaaactaccatcagagaatactataaacacctctatgcaaa

SEQ ID NO: 162647 - DNA, 536 bp, Homo sapiens
cacacaaaacctttctcaatacagctccagattctctctcactcccttctccttcctctgctcccatatatcatatcccattccctaaatctatttttagagtctatttcctctgcatgtcttttacctgctccattcacaggggagtctccctcaggcttaaagatccaattcaaatgttacctctctgtttacagatcatttacttcctacttttgttactttggtgctccaacacctgtcatttgggctattgcaagagttcttaaatggtctccctctagctcatgttgcccatattctaatgcacccttcaggctgccagcaaagtcctattacaaaacagaaatctgatgatgctactcctctgcttaaagtccttcactagcacgctagcgccaagaggaacaagacaacaaaaagtcctttacatggagaataaggccttctgtaatttasatccaacccaatgctctaatcttacctcctgttattccccctccactctagcctgccatgctgaacaagtgctcaga

SEQ ID NO: 162648 - DNA, 584 bp, Homo sapiens
cactgtaatttgtacgtgtatagtctgcaccattaggaggagttcttattgcagttgcagtgctgagtatccactggatttctgctctcagctcactcctcatgaggaattgttttcgataataccagtgtagccctgcagctatgagtttttctstgagtgagggtaaacatcaaacacagatgaacaattcaaccttcttaaaacatactgccttttatatgtttcctctataattataatacaagaaagttgcataaatatgcttcattttacataatcaaaatatttctaagaagatttagaaaaaaatagtttggataactaagttaaaaatctcacaattttaaagctagacatttaactcacagagaatgtttcctcatcagttaaatgaataaatatgtcatgaaattggtttaacagcagctgcaactatcctccaaagtattattcacttaaaatgacaaagaattacagctcaaaatatcaccttaccaagagttgtctgggagttgggattcacatactgatccttactccattcaaccatacacttcaaaatcgacactaagcattctaaa

SEQ ID NO: 162649 - DNA, 584 bp, Homo sapiens
cactgtaatttgtacgtgtatagtctgcaccattaggaggagttcttattgcagttgcagtgctgagtatccactggatttctgctctcagctcactcctcatgaggaattgttttcgataataccagtgtagccctgcagctatgagtttttctctgagtgagggtaaacatcaaacacagatgaacaattcaaccttcttaaaacatactgccttttatatgtttcctctataattataatacaagaaagttgcataaatatgcttcattttacataatcaaaatatttctaagaagatttagaaaaaaatagtttggataactaagttaaaaatctcacaattttaaagctagacatttaactcacagagaatgtttcctyatcagttaaatgaataaatatgtcatgaaattggtttaacagcagctgcaactatcctccaaagtattattcacttaaaatgacaaagaattacagctcaaaatatcaccttaccaagagttgtctgggagttgggattcacatactgatccttactccattcaaccatacacttcaaaatcgacactaagcattctaaa

SEQ ID NO: 162650 - DNA, 438 bp, Homo sapiens
ttgatccctatacttccacctgctcacctgccacctggggtggcccagctcctggatattccaccagaacgcccagctggggttgctgtccacactcctcaggcagagacactgttgtcatggacatgcaaaacccatctggaattgactgccttgggcattccctctgacagcaaggactgagcagatccgtttggactggtctggcaactttagggctggargcccaggctggaacaccacactggggcccctgaacctcttatgaatgcacctcctgcctggggttccctaaaaactgtaaactctccgtctccagggggcaccacgtgtgcctctgggattgtacttttctgtttttttttttttttttttttttttggagacacccaggctagagtccagtggtatgatctcagctcactgcagcttcgaatt

SEQ ID NO: 162651 - DNA, 453 bp, Homo sapiens
ctgtgaccctccatttgatccctatacttccacctgctcacctgccacctggggtggcccagctcctggatattccaccagaacgcccagctggggttgctgtccacactcctcaggcagagacactgttgtcatggacatgcaaaacccatctggaattgactgccttgggcattccctctgacagcaaggactgagcagatccgtttggactggtctggcaactttagggctggaagcccaggctggaacaccacactggggcccctgaacctyttatgaatgcacctcctgcctggggttccctaaaaactgtaaactctccgtctccagggggcaccacgtgtgcctctgggattgtacttttctgtttttttttttttttttttttttttggagacacccaggctagagtccagtggtatgatctcagctcactgcagcttcgaattc

SEQ ID NO: 162652 - DNA, 453 bp, Homo sapiens
ctgtgaccctccatttgatccctatacttccacctgctcacctgccacctggggtggcccagctcctggatattccaccagaacgcccagctggggttgctgtccacactcctcaggcagagacactgttgtcatggacatgcaaaacccatctggaattgactgccttgggcattccctctgacagcaaggactgagcagatccgtttggactggtctggcaactttagggctggaagcccaggctggaacaccacactggggcccctgaacctcttatgaatgcacctcctgcctggggttccctaaaaactgtaaactytccgtctccagggggcaccacgtgtgcctctgggattgtacttttctgtttttttttttttttttttttttttggagacacccaggctagagtccagtggtatgatctcagctcactgcagcttcgaattc

SEQ ID NO: 162653 - DNA, 448 bp, Homo sapiens
atccataaaataacacctgaatactcataatattactaacattatttcaaaattcttccccggtttatttaagtagtagccatgggtcttttttaagaaaaggcctacattcactctcccctccattttacagcttcmcaaaaaaaaaaaaaaaaaaaaaggtgttgtcatcaaggtcaccagagaactgttgttgctaaaggacaggggactccttccacttaaccttttatttctcacaatcatttagtcacctgtaccaggaaaccctctctttgcttcatttccatgacagctcacctttctggcttccatgctacctccctcaatcctccttttctgcctgattttcacatttgtcttcttctacctgttccttaccatttggttcttagtcctcttctctacaacccttcttgacaaatcatccattcccatggcaacagtt

SEQ ID NO: 162654 - DNA, 509 bp, Homo sapiens
ctttgtgcttttattagcaaatatagtacatttctatatattatataccccataaaacatcatataggtattattttataaaattgttttaaaaacagttaagagtagaaaggagaaaattatgcaggtatattattttctgtaattacataattatcttcactagtgcgggkgtgtgtgtgtgtgtgtgtgtgtctgaattattgtctgcagttttcaacatgaagaactttctttagtatttcttgtaagacaggtcatctaacaacaaattttcttcatttttgtttatctaagaatgcattttaccttcatttttgaaagatagctttgctgaatgtaggagtctagttgacaggtgtttttcttctgagcattctgaatgttatctcactgtgttcttgcctctattgtttcagctgaaaagtcagctgttaattttattgggttcccttgtaattgataagtcatttttttcttgctgctttcaagattttcttcttgtcttt

SEQ ID NO: 162655 - DNA, 528 bp, Homo sapiens
aattccttgtatttcagtgatgccaattgggtcagtgtctatatttctaaccagctgctgtggccaagggattaaaattattgattgtcttgggcctaaattacatgttccatccttggagaaaatagcaatgctctatccatccacatggaccaaatacaggaaggaatgaatctcctaatgacttttgccagamgtagggtgtatggatgcagagaagatacatcctgttatattttatgtctccccaaattacttttcttggctatatgatgcttttgctggaagtattctaaaaaaaaattcataatacaaatatttacatatataatccaaagtgtctgctgcctgaacattcccaagtcttttagcatttggggaactcattgctttaataattaaattaagataattaaatccccagcccatgtcctaaggaaagtcccaaactctccaaaaacgttccacatattcttgtgtgcagatagaatctccttatcacctctcattctgaacgtctcttcttgg

SEQ ID NO: 162656 - DNA, 520 bp, Homo sapiens
tattagaactttccagctgatttcagataagccaccttctacaatttcacaaaaactcataagttgcaacacttctgacacccacttacacaagcaaacttcaggtttgtttcaaggtaatgtgacatatttatggtaaaatagtatttatgtatttcckgaccatgtaatgtgtgtaaaagagaactctcatatttgttagatttcaaacttgttttacgtatcactgacaaaggttttgagtgttgtgccccttgtgcataagccctacaacacatatgtcatattatagcagagttgactgtatttgaaatgcaaattcacagtctttctgcattaagtttctaaaactaagcaaacatgtaggatcatcaaggtgattacagaactctaattatggtttctttgaatcataaaatgtgtttaataacaattcttagaacaagaaggattttataagcttaagaaaattataactttctgattgcatatgctttatatcaggtataatattgtgttt

SEQ ID NO: 162657 - DNA, 540 bp, Homo sapiens
aattctactgaaactattacaaaagattgagaagcaaggaatcctccttaattcattcacaaagccagtatcaccttgataccaaagcaaggagagaaccaaaaaagaaaactacagaccaatatccctgatgaatatagatgcaaaaatcctcaacaaattactagcaaactgaacccaaaaattcatccaaaaataattcatcatggccaagtggattttactccagggacagagggatgactcaacatatacaagtcaataaatrtgattaatcacatagacagaattaaaaacaaaaaccagatgtgatcatctcaataatatagaaaaagcatttgatgaaaatacagaatccctttatcataaaaaccttcaacgaactcggaactgaaggaacatacctcaaaataataaaagctatatgtgacaaacccacagccaatattatcatactaattggggaaacgctgaaagcatttatcttaagaactggaataaaacaaggatgcccacttttttcacttcagttcaacatag

SEQ ID NO: 162658 - DNA, 540 bp, Homo sapiens
aattctactgaaactattacaaaagattgagaagcaaggaatcctccttaattcattcacaaagccagtatcaccttgataccaaagcaaggagagaaccaaaaaagaaaactacagaccaatatccctgatgaatatagatgcaaaaatcctcaacaaattactagcaaactgaacccaaaaattcatccaaaaataattcatcatggccaagtggattttactccagggacagagggatgactcaacatatacaagtcaataaatgtgattaatcacatagacagaattaaaaacaaaaaccagatgtgatcatctcaataatatagaaaaagcatttgatgaaaatacagaatccctttatcataaaaaccttcaacraactcggaactgaaggaacatacctcaaaataataaaagctatatgtgacaaacccacagccaatattatcatactaattggggaaacgctgaaagcatttatcttaagaactggaataaaacaaggatgcccacttttttcacttcagttcaacatag

SEQ ID NO: 162659 - DNA, 475 bp, Homo sapiens
atgcccaatacatcaagacaaaaatccaccacaaaacttatctcatgaaatgggaatgtgtgccgggaaagaaatagggtgtgcyttagagctggcagaatctcataaggaaaacctccttatttgggctttggctggttgagatgcattcaacttagctgcctgcccaattcctgccaactccttgcccactcacattaaagaagtttgcctgtcaacacactctgcaacaatcaaaagctcaccatcagtctttccattcaagggagagaactgttaggaaaaggaactttataaggattttataggattttttttggctttacaatggtgtgaaagcaatacacattcagtgcactccttgacttatgatgaggtaacagcctataaacccaccgcaaattgaaaatccatatagaatcccaccataagtcagggagcatctgcactgacctgaggaacttcatcagaattc

SEQ ID NO: 162660 - DNA, 449 bp, Homo sapiens
caacagaatgtgtaaccagataacttttgactacctacaagtaaagaggtgtaagaccatagacaactctttttcrattaaaacctgaattggtgcattatttatctttatttctctacccctcccaaactcttagcatagtattctaaatatattagtcattccagaagtgaaagaacatttgagtgagttatttttatgtatgaatgggtaggtggatggataaataaatgtatgtatgtatggatgtatagatggatggatggatggatgtgccaagcttataatcaaaatcatcaacaggataggacattggtggcccagctcataatcaaggttttgatgcccgtccgtccccatatccttacctgtggcaggtatttcttacagcccatgacactccactgagtggcttgaaatccttaacgtaaagctctccaatcatagaa

SEQ ID NO: 162661 - DNA, 429 bp, Homo sapiens
ccagataacttttgactacctacaagtaaagaggtgtaagaccatagacaactctttttcaattaaaacctgaattggtgcattatttatctttatttctctacccctcccaaactcttagcatagtattctaaatatattagtcattccagaagtgaaagaacatttgagtgagttatttttatgtatgaatgggtaggtggatggataaataaatgtatgtatgtatggatgtatagatggatggatggatggatgtgccaagcttataatcaaaatcatcaacaggataggacattggtggcccagmtcataatcaaggttttgatgcccgtccgtccccatatccttacctgtggcaggtatttcttacagcccatgacactccactgagtggcttgaaatccttaacgtaaagctctccaatca

SEQ ID NO: 162662 - DNA, 449 bp, Homo sapiens
caacagaatgtgtaaccagataacttttgactacctacaagtaaagaggtgtaagaccatagacaactctttttcaattaaaacctgaattggtgcattatttatctttatttctctacccctcccaaactcttagcatagtattctaaatatattagtcattccagaagtgaaagaacatttgagtgagttatttttatgtatgaatgggtaggtggatggataaataaatgtatgtatgtatggatgtatagatggatggatggatggatgtgccaagcttataatcaaaatcatcaacaggataggacattggtggcccagctcataatcaaggttttgatgccygtccgtccccatatccttacctgtggcaggtatttcttacagcccatgacactccactgagtggcttgaaatccttaacgtaaagctctccaatcatagaa

SEQ ID NO: 162663 - DNA, 477 bp, Homo sapiens
acagaatgtgtaaccagataacttttgactacctacaagtaaagaggtgtaagaccatagacaactctttttcaattaaaacctgaattggtgcattatttatctttatttctctacccctcccaaactcttagcatagtattctaaatatattagtcattccagaagtgaaagaacatttgagtgagttatttttatgtatgaatgggtaggtggatggataaataaatgtatgtatgtatggatgtatagatggatggatggatggatgtgccaagcttataatcaaaatcatcaacaggataggacattggtggcccagctcataatcaaggttttgatgcccgtccrtccccatatccttacctgtggcaggtatttcttacagcccatgacactccactgagtggcttgaaatccttaacgtaaagctctccaatcatagaagagtatttgagatcaattctagaactgtta

SEQ ID NO: 162664 - DNA, 578 bp, Homo sapiens
atgcaaattattatatatttatatcataagacttattttcagcaaaataatcgtcattttaaaagtttgattttgtttttcttttgaaggagaggtttttgtttttgaagtccaagatggcagactagaggcattgttagcatgcctcttccacttggaaagacaaaatagtgtgtagagattcacactgtgaactttttttccaagaggcaagacaggaacttagaaaaactgaaagaaatgcagaccctttgaaataagcagcaggcagaagcctacactgtgaaccagacagaaaactgtgagtctccgcagtgtgagarggggagagattgcctgctgccataacacacactcccacagggtagctgggcaatgcaagccatgggggaaagccttaaccctacccagcactggagctgatttagggagcactggggaatatatgagaaagagtggcatcgggtggtgctttgcatgcactcccagactccagcaaggatagaggggagccattcttgtttctacctcacagtggaccttgcagaagtctgcaagctaactcagatgtggtcaca

SEQ ID NO: 162665 - DNA, 605 bp, Homo sapiens
ttcattaccataagatgcctctctgttttccagagctgattcttcctttacttttgcttaacagtagcaatagtgttcataattagatgcaccttggttttcaatcccaaagtgactttgcagattgcttcatgacagcatcccagtttctcattttactgttagtaagagaccatgcacatttgctgaaatgcacatcacaaatgtttgtcctgttttcacccagaggtaagtgaaaaatgtgtctgttttcccaagccaagaagaagaggggagaatcatggctgtgcacacctcagatttatggtccaaggaactctcacytgcctagtagttattttggtctagggaaggcccctgttcatatttccttcttcctggacctacaccaatttgagcagctatcaatccacagaatagaaggtactcaggaattttttttaatgtcacaatggttaatagcatggatatggaaacaaaacaagcttagtttgaatcctagcctatgtaacttcgtgtgaagtattttactttgtgtatcccagtaacctcatctttaaaaatcgagatattaattgttcctacctcatcagcttcttgtgata

SEQ ID NO: 162666 - DNA, 562 bp, Homo sapiens
tttcaaaacactaatgtttggagttattcattacacagcaatagtaactggagcaaatactctcttcagggcattaggatttgtctcaggaaaaggtggagtatattatacccacaacagayagtgaatgggtattcacttatcctgtgatcatcctcattaaagaccatggaaagaaaataacttcatcccagagacaactacacagaggaagaaacaatgaagtctagtcctcaccttccccatctcaagaagatcactagaagtttaccatacaaaacaaaagaaggaacacgtcaaattcagttacagaaccaatgaagattatctgatggaagaaaaggagaaaagagaaaggtaaactagtacaaagattaattattttaataaacagtatacaagttatacatatattactttatattttgtattaattatattatataataattaattatattatattaatagccaactatacagggaagatattattcctcttttgcaggtaagagaacatgtgatactcagggctgttaggcaatttgcctgaagtcgcaca

SEQ ID NO: 162667 - DNA, 562 bp, Homo sapiens
tttcaaaacactaatgtttggagttattcattacacagcaatagtaactggagcaaatactctcttcagggcattaggatttgtctcaggaaaaggtggagtatattatacccacaacagatagtgaatgggtattcacttatcctgtgatcatcctcattaaagaccatggaaagaaaataacttcatcccagagacaactacacagaggaagaaacaatgaagtctagtcctcaccttccccatctcaagaagatcactagaagtttaccatacaaaacaaaagaaggaacacgtcaaattcagttacagaaccaatgaagattatctgatggaagaaaaggagaaaagagaaaggtaaactagtacaaagattaattattttaataaacagtatacaagttatacatatattactttatattttgtattaattatattatataataattaattatattatattaatagccaactatacagggaagatattattcctcttttgcaggtaagagaacatgtgatactcagggctgttargcaatttgcctgaagtcgcaca

SEQ ID NO: 162668 - DNA, 571 bp, Homo sapiens
ggtatatataatgccatcaaagatgtcttaatctgctctattaagatattatctatgttgacaagatttgtggacaccctgcaratactcagatgccatgcaatgtgctgaatgctgttccatgctcaccctgaggaaggactccacctttatcacatcccactcaaagtaactgcagtgccacaagaccttagaggatgttaagagttgactgatgtttgataaggaattaaagtagaaatttatatctcatatctttcagcaaaactttataacaaaacacatgcaatgtaaaaatccccatgagacctgcctgttccccaggtcgttaaggccccctttagctgtgggccacttcatctcttctttcacccttctgccatcccaccctcctgcctcatgggctccagcctcttcattcccagagatcttcccgaggagtccctttcttaatacttaatagaaccatgtagctctctgaaaacttctccagtcctgtgtcctcagagccatcgttcagctcagaaaaacaaacacacaaacaaacactatcaccaccaccacaacaaac

SEQ ID NO: 162669 - DNA, 585 bp, Homo sapiens
cctctctaactttgaggaagctctatttctcattacaatggatttctccatcttgatyttgagcttaatttatttttaatttttttaatcatgtaatatttaattattatttaaatcattttattaatcatttttaaagggacattagctcaggctgctccaaggaggaggatatatgaaaacacgctgtacctttcatttttttacaactttacagtaaatctaaaattagtttttcaaaattaaaagttaaaaacattcaaattgccattcttctggattttacagtctataagaaaagatcataggctttgggattaagcaatctcaaacctgattccatctgttattagttatgtgacttaaggcaagtcacttaactttgttgagccccatttttttttgttgaatagacaacctagcacatgggtctatcacaagttaaaagtaggcaagatgtaataaaatagagttcatttatcatttcctccatctctgtactttattcaaaaaagttgataaattaaaaattactgctaaatttgcatattctcttattaatagttgtttactgagcttagaaat

SEQ ID NO: 162670 - DNA, 505 bp, Homo sapiens
tttttacaagtattatattagttagcatatgtaaaacatttaaatagtgcctgctgtgtgtaaacttgttgctactaagctgtccttggttcttttttccccttgactctcattttccccatcaaaattatctgtctccctctargtttgtctgctctggtggctctgatcaccaatgctgctatagtctgttatctttctctctctcattttttgttgtcttctgtacttttgctttaccctcaactctttaccagctgattagagtatattactttctttcaagtaatgacatttctggggattctcagatacttgttctttattgccaaaatgtgttttcttaccatttatttgaagcccggggatcctggatgactggttggacatttcaagtcttatctattacatattacaaagagtggtttttttttttaaaaaaaccctccattacagggttttaattgtaatcaactcaatgttctcccagcgttagcctaaattt

SEQ ID NO: 162671 - DNA, 616 bp, Homo sapiens
tattgtgctttttctgttccagggtgcaatcccggatgccatgttgcattttgttgytatgtctctttagtttttaaaatatgtgacagttctccatccttccttgttttccatagtcctgatgcttttggagtgtatggatcaattattttttgaaatgtccctccattttggtttgtctgatgttttcttatgattagattgagttcatgaactgttgaaaagaatattacaaagtgatacgcccttctcaatgcatgtcaggttatgcataatgtcaatatgtatattgaaattttgatataaagttggctttaggcacttggttaaggcactgtcttccaagattatccatggtaaaattactattttcctatttgtaattactattttttgcatattgtttgtatattatggaaactatgcaaacattctgcttctgcttaaacttttgctccctaaaccttgcaaaaattaggtgaatcttgcctatgtctatttcctacatcatttattactgtactgtactaatagcgattttctatttaaattgttcttctatatttattaattggaatacttctataggaaaaattgttttttctcttccatttac

SEQ ID NO: 162672 - DNA, 346 bp, Homo sapiens
cttcagaaagagtggtatcccagccaggtacagaaactttagcacttccttggactttactgctaatgcttcgcactgatgatgattcagttcctaatacttttagtccccacattcttaattcaaattcttgatagatttttattggccacaagtcagccagtttagcctyttttctttgtttgatactcctcatagtctaattagctatgaccagaggtttagatcatgtagtatggatatggctgtaagagtttacttccctgagtaagaagacagtttcagacaggggactgtggctgggcaggcacccccaaaagtgtcagcttctcaaatgtaagttgag

SEQ ID NO: 162673 - DNA, 567 bp, Homo sapiens
cacacctagatatattatacagttaaattatgctaaatttgacccgargctgtcctcatacctttaggccctacataaggaactgcctcctaacttagtacataaagacttaacttagaaatatatttttggtaacaattggctgcatctcagccaataacagcagtcaagcttcagccaatcccagacagccaactgatcagacgatgtcaatataaggcaaatgccaagctgtttctgtacctcacttccatttcctatctataaatactccttgtccatgttttgaagtggagctctctgaactactggttctgattggctgcctaattcgcaagtcattagttgctcaattaaactgtgttcagtttaatctgtctaacgtttttctttcaactatattcacactgtcaaaagacagcagcaaagagagaatcttggaaatagcaagaaagtgattcattgtatacaaaggattcccaataaaattgacagcttatttctgatcaaaaagtattgaagctgaaggcagtgggatgatgatatgcaaaggattgaaagaaaaac

SEQ ID NO: 162674 - DNA, 593 bp, Homo sapiens
cctgctatgacaaaagattggaaggagagtagagaaaagccaggccatcccgcctccgcagacacagtctgttcacactcgtgagcagcactttcagataggtgaaaaaarcagcttataggctgtgtctggtcggccccattctggcttaatcccagaggaagaggagcaccatagaactttctttagttatgacaataagcaccaagacacctgtgccttgcttcctgggtgaaatctagagaatggagaacttcaggggaaaagatccctacaacagcaaggcctggaaacagaacacttctctctgggggtttgcaaggacagaaagccccacagcaatccccatgccaccctgcatgggagagagatgtttacatggagtgctagggccttggtaagctacctgggaagtccaagtgttgatgatagggtataatgaggcaactcaatgtttcccctggcagcaaagaacaatgcaggtgggatactgagaagcagcaggcaggtgtggatcttacattactagtgagaagtccagactccagtgaaggggaacacagcccaaatgccacatggattgtgtgaatcca

SEQ ID NO: 162675 - DNA, 593 bp, Homo sapiens
cctgctatgacaaaagattggaaggagagtagagaaaagccaggccatcccgcctccgcagacacagtctgttcacactcgtgagcagcactttcagataggtgaaaaaagcagcttataggctgtgtctggtcggccccattctggcttaatcccagaggaagaggagcaccatagaactttctttagttatgacaataagcaccaagacacctgtgccttgcttcctgggtgaaatctagagaatggagaacttcaggggaaaagatccctacaacagcaaggcctggaaacagaacacttctctctgggggtttgcaaggacagaaagccccacagcaatccccatgccaccctgcatgggagagagatgtttacatggagtgctagggccttggtaagctacctgggaagtccaagtgttgatgatagggtataatgaggcaactcaatgtttcccctggcagcaaagaacaatgcaggtgggatactgagaagcagcaggcaggtgtggatcttacattactagtgagaagtccagactccagtgaaggggaacacagcccaaatgscacatggattgtgtgaatcca

SEQ ID NO: 162676 - DNA, 360 bp, Homo sapiens
acttcccaggtcaaaactttttaaaacataaatagggaaggacatagcaacggcttttgtagtttcttttagaaggcagagctgagcaaacttttcaatgtatcaacatgaaaagacatggctggccaggtgcggtggcttatgcctgcaatcccagcactttgggaggccgaggcaggtggattgcttgagaccaggagttcaagaccagcctggccaacatggcagaactccatctctactaaaaatacacaaaaattagccaggtgtgaggygcatgcctggacattcaaggaaatggcaaagagggaattaaatgcaagttttttccaggtaactccagcaaacactaacaaaggg

SEQ ID NO: 162677 - DNA, 471 bp, Homo sapiens
caggggcgctgtcactatcaccacgctacaaatgaggaaacggaggcacagagggttttcttgcattcccataacagcagagcccagcttgtycagctcccaggtcagccctcttaatcagcctgccacaagcacatacaaaggtcctgaagtgggagtaagtacagagtgtttgtggacccagaggctggaggtggtgaatggcagaagttggacaggatgagacagaaaagcctggcagggcctgatcctatgagttcttgtagactcctctgtagcgctgagtgccctgagtacagcatctgtttcttctaaatgtttctgtttgtttgcttttgaacaaattaatctgatccgtgtcctcataaatccatgccggctgctctacagggagagaccgaggagggtatcatgcaaccgggcagtcaggtcacaccctaaatcccacattcttatgtctaccacccagca

SEQ ID NO: 162678 - DNA, 336 bp, Homo sapiens
tttgggttgcttccacttcttgattattgtaaataatgcagtaacaaacatgggtatgcaaatatctctttaaattctcctttaaattattttggatrtatacccggatgtgggattgctgggtcatatggtagttctaattttaatactttgagaaacctccatattgttttctacaatggctaccctattttacattctcaccaacagtgcacaatggtgccaatttctccacatttttgccaacacattatttttgattctttttatagtggccatcctagtggatatgaggtgatatctccttgcagttttgatttgcatttatcttatgat

SEQ ID NO: 162679 - DNA, 336 bp, Homo sapiens
tttgggttgcttccacttcttgattattgtaaataatgcagtaacaaacatgggtatgcaaatatctctttaaattctcctttaaattattttggatatatacccggatgtgggattgctgggtcatatgktagttctaattttaatactttgagaaacctccatattgttttctacaatggctaccctattttacattctcaccaacagtgcacaatggtgccaatttctccacatttttgccaacacattatttttgattctttttatagtggccatcctagtggatatgaggtgatatctccttgcagttttgatttgcatttatcttatgat

SEQ ID NO: 162680 - DNA, 605 bp, Homo sapiens
ttggcattgtcattttatgcacattcttttcttaagaaagattctagaccaactggtaccaagaatgctgatattattatgtacatcatctcctgcgttagaactrgagacaaacatacaactaattatttgtaaaacgtctgtcagttttactgagtcctcagggcagaaggaaactgttattaaatctaggcctttgtattgatgagggcaatctatggaccaacttcacttgacatttaacaaaactgtgggtggtcattacatattttgagcaagtaagtaagtaaaggtcttctgtgtgctctaatacataaccaactctgcaattttaattttatttcaaaatcctcagtgggcaaaaacctaccaacacagccacaatttttttctagagcttgtttatctttcaatttttttgctcgtacatgccctcttatctcctccattttaaagtattatacatttaaaatattgtacctgttaaataagtgatgtgtgttttcccttttctaaatttctcaaggaagagtattctctcatatttctagtttatgttgaggctgtactgcctcaagaaccctcttgaatagagagtcccaata

SEQ ID NO: 162681 - DNA, 605 bp, Homo sapiens
ttggcattgtcattttatgcacattcttttcttaagaaagattctagaccaactggtaccaagaatgctgatattattatgtacatcatctcctgcgttagaactagagacaaacatacaactaattatttgtaaaacgtctgtcagttttactgagtcctcagggcagaaggaaactgttattaaatctaggcctttgtattgatgagggcaatctatggaccaacttcacttgacatttaacaaaactgtgggtggtcattacatattttgagcaagtaartaagtaaaggtcttctgtgtgctctaatacataaccaactctgcaattttaattttatttcaaaatcctcagtgggcaaaaacctaccaacacagccacaatttttttctagagcttgtttatctttcaatttttttgctcgtacatgccctcttatctcctccattttaaagtattatacatttaaaatattgtacctgttaaataagtgatgtgtgttttcccttttctaaatttctcaaggaagagtattctctcatatttctagtttatgttgaggctgtactgcctcaagaaccctcttgaatagagagtcccaata

SEQ ID NO: 162682 - DNA, 605 bp, Homo sapiens
ttggcattgtcattttatgcacattcttttcttaagaaagattctagaccaactggtaccaagaatgctgatattattatgtacatcatctcctgcgttagaactagagacaaacatacaactaattatttgtaaaacgtctgtcagttttactgagtcctcagggcagaaggaaactgttattaaatctaggcctttgtattgatgagggcaatctatggaccaacttcacttgacatttaacaaaactgtgggtggtcattacatattttgagcaagtaagtaagtaaaggtcttctgtgtgctctaatacataaccaactctgcaattttaattttatttcaaaatcctcagtgggcaaaaasctaccaacacagccacaatttttttctagagcttgtttatctttcaatttttttgctcgtacatgccctcttatctcctccattttaaagtattatacatttaaaatattgtacctgttaaataagtgatgtgtgttttcccttttctaaatttctcaaggaagagtattctctcatatttctagtttatgttgaggctgtactgcctcaagaaccctcttgaatagagagtcccaata

SEQ ID NO: 162683 - DNA, 567 bp, Homo sapiens
catcacatctgtttgcagcatggtttactgactatttcaaacctactattgggacctactgctcagtaaaatatatatacattttttctaaaatattactaggtacaaatgtacctagtcacccaagaccttttcaccagagttctgacaaacttgcaccacttcatcagagttctgatgaagatgtacaaggagattaatgtgttcatgcctgctaagccaacattcattctgtagcttacggatgaagaagtaattttaaatttcgagtctttttgtaagaaatttttttaaggccatagctcccataaataatgattcccctgctgaatctaagcaaagtaaactgaaaattttctagaaataattaaccatcttagacaccattatgattcwtgtgaggaggtcacagtacctaaactgtgtttttgtcatttgtgtagtatatatttttccatttcttcactttcagcttatatgtgtccttgaatccacggtgaatttcttatagatagtatgcagttggatcttgatttttttgtttatttgttttttttccagtctctc

SEQ ID NO: 162684 - DNA, 567 bp, Homo sapiens
catcacatctgtttgcagcatggtttactgactatttcaaacctactattgggacctactgctcagtaaaatatatatacattttttctaaaatattactaggtacaaatgtacctagtcacccaagaccttttcaccagagttctgacaaacttgcaccacttcatcagagttctgatgaagatgtacaaggagattaatgtgttcatgcctgctaagccaacattcattctgtagcttacggatgaagaagtaattttaaatttcgagtctttttgtaagaaatttttttaaggccatagctcccataaataatgattcccctgctgaatctaagcaaagtaaactgaaaattttctagaaataattaaccatcttagacaccattatgattcttgtgaggaggtcacagtacctaaactgtgtttttgtcatttgtgtagtatatatttttccatttcttcactttcagcttatatgtgtccttgaatccacggtgaatttcttatagatagtatgcagttggawcttgatttttttgtttatttgttttttttccagtctctc

SEQ ID NO: 162685 - DNA, 489 bp, Homo sapiens
ccctccctcccatcctccctccctccctcccttcctccctcacttccttccttccttccttcctttttccttccttcctccctttctttttctttctctttctttctttctttctttctttctttctttatttttctgtctytctttctttcttcttgcttttcttttctaacagttgaaagatattgtactacttccttttgggttctatggcatttgttttgaaatatgctgccattccaattgctatttctttatgggtaatggatcatttctctctggctcttttcaaaactttctttgggtttggtgttcagaagtttgacaaggatatgttttgtggtggatatagttgggtatgtgttattttgggttcattcaactttgttaatttgttggcttaagttttctgcaataatcagaaatttttcaatcacaatttcttccaatactttttcaatacaacccttttatttatcttttggaatt

SEQ ID NO: 162686 - DNA, 489 bp, Homo sapiens
ccctccctcccatcctccctccctccctcccttcctccctcacttccttccttccttccttcctttttccttccttcctccctttctttttctttctctttctttctttctttctttctttctttctttatttttctgtctctctttctttcttcttgcttttcttttctaacagttgaaagatattgtactacttccttttggrttctatggcatttgttttgaaatatgctgccattccaattgctatttctttatgggtaatggatcatttctctctggctcttttcaaaactttctttgggtttggtgttcagaagtttgacaaggatatgttttgtggtggatatagttgggtatgtgttattttgggttcattcaactttgttaatttgttggcttaagttttctgcaataatcagaaatttttcaatcacaatttcttccaatactttttcaatacaacccttttatttatcttttggaatt

SEQ ID NO: 162687 - DNA, 590 bp, Homo sapiens
tttattttaaaaatgtatcaaatgaaaataagtcatctatgtgtatttgtataaggaatttattttttaatgagatttatccccatattcttttcttttttcaaaaaacgttatatttttaaaatattgtacattctccttctcccaaaatccttttatatggcatattttctgaaagcgatgaggagctagacagaattactttatctccatgtctggagtctgccacaagagaatataaaggaatgacgtagctttttgatcttacacattcatgcaaacttaaataagtgacaagttttgtagaaaatagaaaatacaaggatgctggacaaatgacgggatgaagcataggtacacagcccacacacaaacagatcactagagataatgagcaagcacatygcctgctccggaatcccacacggtactgaatgtacaattaaattactgcttgagatcatgatgtaaatatttcattacaaaattaagcataaatcatggagaaagaaatggattccaatatccttggcactcttcacataaaactttacatctggagttttctggtcattttattttaatgcaat

SEQ ID NO: 162688 - DNA, 575 bp, Homo sapiens
tgttactgcaaatacgtgtgtgtgtgtagataaattttccaaataaattgcttgtttgtatataatcatttaatttattatactctttattgtatttcagtacaatagttctggccatgtggtggttactcaaacatatgcttckttcagttatacagctattcttattaaaaaataaaattgaattatggtttattgcatgcataattcagcacaattcttaattatttttatttcatcaatacttctaaaggaataagtatggggaaaaaaggcatggttctgtggtgtttgttaactacagtcaacaaaggaggcagaatctaaacccaagacttctgaatcctttccaggaatagatgattacttctttcacgtggtgtttttttattataaatacctaatgcagttgcttactttttaacagctatataattattaagaggaagtagctggaactatggaaaatattaaaccaaaccccagaactaataaatgataaatattactggcttcaagatgagccagccatgcaaaaaatcattaaaattattaagtactagatgttgataaca

SEQ ID NO: 162689 - DNA, 575 bp, Homo sapiens
tgttactgcaaatacgtgtgtgtgtgtagataaattttccaaataaattgcttgtttgtatataatcatttaatttattatactctttattgtatttcagtacaatagttctggccatgtggtggttactcaaacatatgcttcgttcagttatayagctattcttattaaaaaataaaattgaattatggtttattgcatgcataattcagcacaattcttaattatttttatttcatcaatacttctaaaggaataagtatggggaaaaaaggcatggttctgtggtgtttgttaactacagtcaacaaaggaggcagaatctaaacccaagacttctgaatcctttccaggaatagatgattacttctttcacgtggtgtttttttattataaatacctaatgcagttgcttactttttaacagctatataattattaagaggaagtagctggaactatggaaaatattaaaccaaaccccagaactaataaatgataaatattactggcttcaagatgagccagccatgcaaaaaatcattaaaattattaagtactagatgttgataaca

SEQ ID NO: 162690 - DNA, 572 bp, Homo sapiens
atttaaaattgccccattactcacccaggacctttctattaccccttctattttagtttcctatrtatcacttattatcatctgacatataatgttttttaacttaaagtatgtttgtctccctctgtgaatgctaagttgcaccagtgcccagaggaatgcttagcacatagcaggaccccaataaattcttgttgactgaatgaaagaagtcaatggcacaatgaggaaggagtagtatatgcgtgagtccatgctgttgaagggctcagggcagcctttcttcatccctactaagaccatgttatgagtctttcctacggactctcacggtacccttcaatttgtccttagctagaacttgccatttgctttttttttttctgcctgtttaattttaagctacttgatgtaaaggaacatgtcatgttaatctgtgtacctgtagaatcagttctcaataggtatttattgaatgcatggatctactagataatagcagataaaataagaaaagaaggcaattactctgctgctaattaggtttaggaaaatagttaaacataaatgat

SEQ ID NO: 162691 - DNA, 572 bp, Homo sapiens
atttaaaattgccccattactcacccaggacctttctattaccccttctattttagtttcctatgtatcacttattatcatctgacatataatgttttttaacttaaagtatgtttgtctccctctgtraatgctaagttgcaccagtgcccagaggaatgcttagcacatagcaggaccccaataaattcttgttgactgaatgaaagaagtcaatggcacaatgaggaaggagtagtatatgcgtgagtccatgctgttgaagggctcagggcagcctttcttcatccctactaagaccatgttatgagtctttcctacggactctcacggtacccttcaatttgtccttagctagaacttgccatttgctttttttttttctgcctgtttaattttaagctacttgatgtaaaggaacatgtcatgttaatctgtgtacctgtagaatcagttctcaataggtatttattgaatgcatggatctactagataatagcagataaaataagaaaagaaggcaattactctgctgctaattaggtttaggaaaatagttaaacataaatgat

SEQ ID NO: 162692 - DNA, 572 bp, Homo sapiens
atttaaaattgccccattactcacccaggacctttctattaccccttctattttagtttcctatgtatcacttattatcatctgacatataatgttttttaacttaaagtatgtttgtctccctctgtgaatgctaagttgcaccagtgcccagaggaatgcttagcacrtagcaggaccccaataaattcttgttgactgaatgaaagaagtcaatggcacaatgaggaaggagtagtatatgcgtgagtccatgctgttgaagggctcagggcagcctttcttcatccctactaagaccatgttatgagtctttcctacggactctcacggtacccttcaatttgtccttagctagaacttgccatttgctttttttttttctgcctgtttaattttaagctacttgatgtaaaggaacatgtcatgttaatctgtgtacctgtagaatcagttctcaataggtatttattgaatgcatggatctactagataatagcagataaaataagaaaagaaggcaattactctgctgctaattaggtttaggaaaatagttaaacataaatgat

SEQ ID NO: 162693 - DNA, 527 bp, Homo sapiens
ggaatcactggtgtgagtccaacagcgggagaacctggggtttcaaagtccaaaggcaaaagaagggcatcccagttccagaagcaggagaaagagagagagagagcagtaattggctctttctcctttttgttccatccaggtccccagccaattgcatggtgcacatccaccaagaaaagattgaaaacagagtcttccccactcagtccaacaactcacataccagtctcctccagaaacactctcacggacacacctgaaacagcccaataattctaatcagatgtcaaaccatcttgtttccctttcaacagaagagggatatgctcagtgtctactgaagcactgagaataatacaatgattgagaataatcctttaccagctatctgggtatcccttaattcagccaagttgaygcccaaaatcaactattacaagataccattataactctgtcccaaacattgagtgttaagtcagcagctaatgactgaggtattataataggagaagaaaaaaaat

SEQ ID NO: 162694 - DNA, 620 bp, Homo sapiens
ttctttgtatatttttggataacaataatttttcagatgtcttttacaactatttctccccatctgtggcttctctttttacactcttgatgtgtcttttgtagagaagacgtttctaatttccatgaagtcagcttctcaattatttctctgatggatcatgcctttggtgttatattttacatatcattgtcatgcccaaggtcatctatgttttctctgctattttctatgaatgttgtagtttttcattttacatttaaatctgtaatctattttgaattaatttttgtgaagggcatgagatctgtctagagattcactttcttacatgtgcatatccacttgttaaagcagaatttctggaaaagactctcctccattgcattgmctctgtagacttgtcgaaatcagctgattatatttatatgtatttttttctgggctctttatactgttcgattgatctatttgtctattctttcttaataccatactatcttgattactatagctctgtagtcaattttctatcctttcattgtcacttcacattctaggacaccaaaaatttaaatatctatggtgcctcctatgtcatgtaatctttactcactctt

SEQ ID NO: 162695 - DNA, 620 bp, Homo sapiens
ttctttgtatatttttggataacaataatttttcagatgtcttttacaactatttctccccatctgtggcttctctttttacactcttgatgtgtcttttgtagagaagacgtttctaatttccatgaagtcagcttctcaattatttctctgatggatcatgcctttggtgttatattttacatatcattgtcatgcccaaggtcatctatgttttctctgctattttctatgaatgttgtagtttttcattttacatttaaatctgtaatctattttgaattaatttttgtgaagggcatgagatctgtctagagattcactttcttacatgtgcatatccacttgttaaagcagaatttctggaaaagactctcctccattgcattgactctgtagacttgtcgaaatcagctgattatatttatatgtatttttttctgggctctttatactgttcgattgatctwtttgtctattctttcttaataccatactatcttgattactatagctctgtagtcaattttctatcctttcattgtcacttcacattctaggacaccaaaaatttaaatatctatggtgcctcctatgtcatgtaatctttactcactctt

SEQ ID NO: 162696 - DNA, 491 bp, Homo sapiens
gatattcttacctgatggcttctgcttgtatctcactgcaagcaaagactgggaaatgtaatcttccattcagttattttgttgcgctagattaaattagaatatatcagtgacaagatgcagataattgatagtacatgagtaactagccgtctctaactttgagtcaatttattctcatgataataattatttaaaacatctttatatgtttctagttctcgctgtcagattttaggaggtggtcatcatagcagaacgtagataacagaataggaaactccaatatagcactctatattccaggctaattttgtaaatgtttacatatttaatcktcaaaacaatttcatgatatgtagtcaacaaatagttgtcccttgaacaatatggttttgaactgtgtgggtccacttatatgcagtttttcttctatctctgccacccctgagacagcaaaaccagcccctcctccccttcttcctcagcta

SEQ ID NO: 162697 - DNA, 575 bp, Homo sapiens
tgttactgcaaatacgtgtgtgtgtgtagataaattttccaaataaattgcttgtttgtatataatcatttaatttattatactctttattgtatttcagtacaatagttctggccatgtggtggttactcaaacatatgcttcgttcagttatacagctattcttattaaaaaataaaattgaattatggtttattgcatgcataattcagcacaattcttaattatttttatttcatcaatacttctaaaggaataagtatggggaaaaaaggcatggttctgtggtgtttgttaactacagtcarcaaaggaggcagaatctaaacccaagacttctgaatcctttccaggaatagatgattacttctttcacgtggtgtttttttattataaatacctaatgcagttgcttactttttaacagctatataattattaagaggaagtagctggaactatggaaaatattaaaccaaaccccagaactaataaatgataaatattactggcttcaagatgagccagccatgcaaaaaatcattaaaattattaagtactagatgttgataaca

SEQ ID NO: 162698 - DNA, 578 bp, Homo sapiens
ttattttaattttttttactgattttttgagttgggagctgaaggaagtggaagccctgtgttcttgactgccctcccctggactggaatttgtcactctgctttagaaggtggagggaggcagtggattgcagttcatatgccaagacttttattgtccttactgagtattagtagattttcaattgtttgtgatagcagaaaactggaggccatgtaggagcctatcactagtgaatggataagcaaaatattattgatgcgtgctgtgggatacaattcggttattagaattaactrattgtattctcagcaatatggataaatcttgaaaatactgccaatggaaataaaaacagattaagattgatggcaaaatggcattcacttaaatttaaaaatattcataaaataatatcatgtattttgcaaagatgtacgaatatctaaggagacatctatttaacacagtagagtagaagtatatgggagaagaaagaagaaggggatctgaaagaagtgaggaagaaaaactccagcgataatgtgttatgaactgagatgtagaatggactatt

SEQ ID NO: 162699 - DNA, 578 bp, Homo sapiens
ttattttaattttttttactgattttttgagttgggagctgaaggaagtggaagccctgtgttcttgactgccctcccctggactggaatttgtcactctgctttagaaggtggagggaggcagtggattgcagttcatatgccaagacttttattgtccttactgagtattagtagattttcaattgtttgtgatagcagaaaactggaggccatgtaggagcctatcactagtgaatggataagcaaaatattattgatgcgtgctgtgggatacaattcggttattagaattaactgattgtattctcagcaatatggataaatcttgaaaatactgccaatggaaataaaaacagattaagattgatggcaaaatggcattcacttaaatttaaaaatattcataaaataatatcatgtattttgcaaagatgtacgaatatctaaggagacatctatttaacacagtagagtagaagtatatgggagaagaaagaagaaggggatctgaaagaagtgaggaagaaaaactccagygataatgtgttatgaactgagatgtagaatggactatt

SEQ ID NO: 162700 - DNA, 544 bp, Homo sapiens
catcaaatatctacaaactaataaactgatgtttatggcacagcagttttcctcatcctactctcttctcttggcccattcttttccagtttttcttttatcyaaccaacagcatactgcaaacgtcagttcaaggatcatgttttctcagatttcccaaatctcctcctatttgaattggagcctttacagttttctggtggtttagcatatactgcattgagaatatctctgtaattgtacttatagtacttgacagttctgtaatatctgtctgtcactcattagaatgtaagattcgtaaaggcagaagtcatgcattattcaacattgtttctaacagcactcagaaatatgtctgacacactgccgcttctcaaaaaggtttgtagatgactaaatggggaaaaaaaaagatttgtgatgactgttcttgcacatctccagcttgtttatatttaccacagcctgggataataaacagaagaattcaggataagagtgggaagaaatagcgcattacttcaattaatgatgaggggca

SEQ ID NO: 162701 - DNA, 531 bp, Homo sapiens
cttacttttattctcagttttgtcaaatagtagtatttggaccaatggcctgaatgaaaaactccttagaaagtgttcataggctgaaaattattcatcatgctggaatgmgcctacctcagaatatttgcactggctgtttcctgtacttggggactgtttcccctgaaaaaaaaaaaaaaaaaaagtttgcatgggtcattccctcacatccttcaaatctttactcagttatcacctttgtaacatgtacctgaccatcatatgtaaaactgtgattcccaccccagccaggttttccccattcccttttgttccctaagcacttagcacctccaaacatatgatataatgtaattgtttaatatattttttctttttccctatgctaagattaaacctctatcagagcagggaaatgtattttttttcattcatgtaacaccacttgcaggcaccttgtaggtatttagtaaatacctgttgaatgaacaaagaattaatgaggagtctggccaatattaaatattg

SEQ ID NO: 162702 - DNA, 624 bp, Homo sapiens
tcaacaatctctttatatctgtcaaaattgatcattattctataattcccatcttaaaaaaactttaaaaaatgaaatgtaatagaagtatgaagattaaggcaataaactagactaaaattttatgtgcatttaacacaaaggaccacccaacattttaaaatactctctatatgtgatggtaatttcccgcatttgtgtttcatcctcacaaaataagagcagacaaaaaaccctcttatttccagatttacttatcctcagctgttttwtagttaaacatgacctacgcaaggtggtgatcacataggggaattgattatctggcaagcatgatcataaggtatttgactggacacaagggcagtggtgaaagtcctggtgtccagtcctggatgctattaatgccatgtggaggtgacaggggtatttttactatggcagccccaatgagtggttaaaaataaaatctttgaggctggctgtttgacccacccaaatattatgtgaccccttattaattattatcctttaataaatttattttctgctttaagcaaaataatttcaatatttgctattaagtcctgatcaactcagagataagtcacaaagttgtctaat

SEQ ID NO: 162703 - DNA, 618 bp, Homo sapiens
atacataatactcaagctaatagttatgatgaattaatttatctgtaacatgtactgtctttattaatgttwtattgcctagcatgcattccaaacttagtattattaagtttatctgcaagtttgaatagctcatcaagatatgttttgaaatttggatagaccatcaattccttggaatagccaaccttgttactcttcctttagaatatactcaaaatccaacaatttctctgtaatttcactgtcatgaaccaatcttaggacaccatcatctctcatatagactatggtaagtttcctaagtggcatcctatttcacctttataccaccacggccatctatcctctcacctatacagttatactccatatagcagctgtggtgaatattttatcatttacaccacatgtcattacatccaataattccctacctcaatcagagagaagccaatgtctttacaacaatctgaaagcccctaaatggcctggctacttgctacagctcttaccttctgctcttactatttttcccttgttcattcagctgcatccatactggcctttgtgctatttcttgaacatgctaagcacccttacttcagtgaatttgtg

SEQ ID NO: 162704 - DNA, 584 bp, Homo sapiens
gctaagcacccttacttcagtgaatttgtgcattctgcttcccctagttggaatattcttcatccaaatatctgtatggttctctccgttacttccttcagatccctattggcatcttgtccttgaaggagctattacaagaccttgttgtctttaataaggatcccagccaaagcttgaaggagggtaggtaaatatctttggaaatttaaggaaagggaatctatgctatgtagcagcacaagtttttggcaacattgttgcttatagtaactgggtgatctagcttagcatcctcaactttttggcactaattgtttcccggaagacaagttttctacagacagagtcgggggtggggggggatggtttggggaagaaactgatcacctcagatcatcaggcattagatttttataaggagtgcacaacctagatctctctcatgtgyggctcacaaaagggttcatgctcctatgagaatctaatgccaccgctgatctgacaggaggcagagttcaggcagtaactctggctcaaccagcactcaccccctgctgtgcagtccagtctctaaaaggcag

SEQ ID NO: 162705 - DNA, 584 bp, Homo sapiens
gctaagcacccttacttcagtgaatttgtgcattctgcttcccctagttggaatattcttcatccaaatatctgtatggttctctccgttacttccttcagatccctattggcatcttgtccttgaaggagctattacaagaccttgttgtctttaataaggatcccagccaaagcttgaaggagggtaggtaaatatctttggaaatttaaggaaagggaatctatgctatgtagcagcacaagtttttggcaacattgttgcttatagtaactgggtgatctagcttagcatcctcaactttttggcactaattgtttcccggaagacaagttttctacagacagagtcgggggtggggggggatggtttggggaagaaactgatcacctcagatcatcaggcattagatttttataaggagtgcacaacctagatctctctcatgtgcggctcacaaaaggkttcatgctcctatgagaatctaatgccaccgctgatctgacaggaggcagagttcaggcagtaactctggctcaaccagcactcaccccctgctgtgcagtccagtctctaaaaggcag

SEQ ID NO: 162706 - DNA, 549 bp, Homo sapiens
acacgcatatataagtttgtgtgtggtgttgccatttcttacaactaagttaaacttttctttcttattttttctcaccctttcctttctctctcatatatatacacrcacacagttacatatgtatatgtatgagtatatatatacataatcacatgctgaaactaccacttcatcctcttcctgcacacccatgggctccaactcagtggtaagcagcccttctttttcctcatggtgtgagtcatgtgtttataggcttggtgggtctcaacatcatcttgtgtgacccctcatggtgaaagtttgcagcataatccactgaatccacatcaccacctcaacacatcacctaatataactatgcttcctcttccaaagtcttcagtatgtcatccaagattagctccaagatcagctccaaggtcagctccaagatagcagagaagggtaaggttgaaccagagcaaatcttgaggaagaggtcattgacctgagccttttgacacctcagctcccacccaccctcatccctctgcctagacctgg

SEQ ID NO: 162707 - DNA, 500 bp, Homo sapiens
cctcattagaaccatatctgccaggaccttgaccttggacttctagcctcctgaagtatgagaataaatttctcttatttatatgctaatactttatagtgttttgttataacagcctgaacagactaaaataggctgtgtatgaaaaaaggtggatacctggatgtcagaatccagggtttcagtctaaggtsagacactgaatcattgtgtgggcttggacaaagcatataacttctctgggcctcagattcccccactggtaaaataatgtttaaactaaatgattactaagatcttgttaagcttaaaattctgattgccttttcctgactagctctgaggaggcttgggtctttggaggctgtattagaacattacattttaaagggaataaaaaaaaaatcactccaaacctacagtttaaaggagacacttatccccgacagaaatggtttttctgtggttgcagaggtcagcagctgtgggaggctaatgta

SEQ ID NO: 162708 - DNA, 211 bp, Homo sapiens
gcagatgtagctttactaaacatacttaaataataagacttgaaagtcaaaattactccttgatccatgggctgcagaatggatgctgtgttaccaggcataaawacaacattagtctccttgtacatctccattagatttcttgagttaccaggaatattagtgaggagtaatactttgaaaggaatctctttttctgaacagtagatct

SEQ ID NO: 162709 - DNA, 556 bp, Homo sapiens
cctgagatacatggttattgaatgtgtgaatacattaatttataaaatggtatgtatgaaagttattataaactgaaaagaatctacatcattgataaattatattattttcataacaattagtaacaagtagccctgctttgggcatccatttataagaagaggataagagcccaatcaggacatctcagatttctcctaagttttctttccttgctaaaggaggcagttgttcatgcactctggtatgactatggcaggagaatctatggcaagaaggaagaaataacccatttgggtcaccatagagtgagagtattagcagaaatgaagcttcgtgctcaaggaataaaaaaaggcrtagatttgtttctttcctatcatgttatgaggaagcacaagctaatttatggcaggaggccacatggtgctacagacagagtaacgggatcagaagccagtcagatctgatttcaaatgtgactttgacaaatgcattgccacactatgcctcagtttcacctttagtaaaatgatgatgagattatttatcatt

SEQ ID NO: 162710 - DNA, 551 bp, Homo sapiens
gctttctgttccccacgtctttatgctccaagaccaagtaaaaggggcaaggtttttgacatgtagatgcaagagggcctactttatcttagatggcttaaatgcatgcrttacctttaatattcttaaccattttacaacatgcttatttttattcccgtttataaggtagaaaaaccacagctcactgagattcgataacctgttaaagttccatagctagcaaatgagcccagattttgactgaatgcctcccacctctaaagcttatgccatttccactgtttctctactttgtcaccttttccatgaagtcttttccaatcgatatcataaaggtgatatttcacctcctggtttctttgcctcacccattggtaacatgaattctgcaaacacttagtttacactagaatttaatttgagagaatctctattagtgtcaccctctgaagcttggaatgcactgaaaggtagcccatgtgcagcacatccacaacgcttgggatacagaaatattatttggaacgtgatccctgggactgagatgt

SEQ ID NO: 162711 - DNA, 459 bp, Homo sapiens
tgataatgtgcttgaagtcttacaagaaggcttggtttttattataacagccatgttcctacattggcaccagcagccaagataaaagctaacaaaggataatcttccacaataaacataaaaacaggatcataatgattaattttgttcattgttctctctgtagacatcagagtctatttctgtgaactattacttctttagttagaatttagccactggcagtgtgcatatatgagtgggatccaggggaggaagaaaaatggagagggctcagtgctgtgattgcatctggctgtggacacacaggaggcactatttaggaactcccagaggtcactggggacmattgacaaggaagtcatgagactaatgagattttataaaatttctttggatcaaacaaaagaaacaagaacaccacaaaatcagcataaagaatcatatccttactttagt

SEQ ID NO: 162712 - DNA, 459 bp, Homo sapiens
tgataatgtgcttgaagtcttacaagaaggcttggtttttattataacagccatgttcctacattggcaccagcagccaagataaaagctaacaaaggataatcttccacaataaacataaaaacaggatcataatgattaattttgttcattgttctctctgtagacatcagagtctatttctgtgaactattacttctttagttagaatttagccactggcagtgtgcatatatgagtgggatccaggggaggaagaaaaatggagagggctcagtgctgtgattgcatctggctgtggacacacaggaggcactatttaggaactcccagaggtcactggggaccattgacaaggaagtcatgagactaatgagattttataaaatttctttggatcaaacaaaakaaacaagaacaccacaaaatcagcataaagaatcatatccttactttagt

SEQ ID NO: 162713 - DNA, 585 bp, Homo sapiens
ttcactcccctggaaagggggctaaagccagggagccaagtggtctggctcagcrggtcccaccccaacataacccagcaagctaagatccactggcttgaaattcttgcagccagcacagcagtcccagcttgacctgggatgttggagcttggtggggggaggggcgtccaccattgctgaggcttgagtaggctgttttccccttacagtgtaaacaaagccactgggaagttcgaactgggtggagcccaccacagctcagcaaaaccaggctgcctctctagattccctttcctctgggcagggcatctctgaaaaaaaggcagcaaccccactcagagacttatagataaaacccccacctccctgggacagaacacctgggggaaggggcggctgtgggtgcagcctcagcagacttatccgtccttgcctggcagctctgaagggagaagcacatctctagcacagtgtttgaactctgataagggacagactgcctcctcaagtgggtccccgatccacaattatcctgactgggaaacacttcccagtagggtccaacagacacctcatacagga

SEQ ID NO: 162714 - DNA, 607 bp, Homo sapiens
gctgtttaagaacagctggtgtcatgttaataaatactagagcaagcaacacattgttcaactttacctgctctttactcaatccaggaaaagtttttcataatcggatgaggtagaataaatatgatgattaatgacctaaaaaacaaaagagaatgagaaattacttagtatctttagatgaattcaagtttccagaccaaatgaattaaatctcagagaactaaaataatttgcaactgtaattataaattataaractatgattgaaaatccttaaataataatggagaatagaattagtatcaggaaactagaattgggagcaaaacatataccaaaaatgtgggtagggtgagtcaccggattctgtaaaatacaaactgagaagataaggaagaaagcaattaatttcatatctttgcatagaaccttagactaatacgaacacattactagagttagctaggaaagcagtggttattattaggagtcttcccaggttctctaaaacatgattatctcaaacttgtttcagttattagttaaaatagtttgatagaatgtttagattgctagataagaaaatcctgttatagtatggctc

SEQ ID NO: 162715 - DNA, 582 bp, Homo sapiens
ataaaaactataaatattgatgaaagaaattgaagaggatacacacagaaaggaaagatattccatgatcatggattgtagaataaatattgtaaaaatgtacatactacccaaagcaatttataaagtctatgcaatccctatcatcacaaactggtgcctgtcagaagatgcgatgaggggagggagagtattaggaaaaatagctaatgcatgctgggcttaatacctaggtgatgggttgataggtgcagcaaaccactatggcacacgtctacctatgtaaaaaacctgcacatcctgcacagaactggaaataaaaaattaaaaattaaaaaaaaaaactatggtggtcagaatgcaatggcatgacatactaaaaatgctgagagaaaaaaccatcaatcaagaattctacactcagcaaaagtattctttgaaaacgagggagaaatcaagacattttcaaataaacacaaaaactgaggtaattcattagtagcaaatttgctcttcaaaaactactcaaggaagtctttygggctaaaatgaaaggtcaatagactgaacttgaaaccccat

SEQ ID NO: 162716 - DNA, 530 bp, Homo sapiens
agaattttcacaaactatgcattaaaaaaggactaattaccagaatctacaaggaactcaaacaagtcagcaaaaaaacccaaataatcccatcaaaaattgggataaggacatgaatagatactctcaaaagaagatatacaaatcaccaaaaagtatatgggaaatgcttaacatcactctttatcagggaagtacaaatcaaaaccacaatgagatatcaccttactcctgtaagaatggccataatcaaaaaattaaaaaataatagatgttggcatggatgtggagaaaagggaatgcttttacactgctggtgggaatgtgaactagcacaaccaatatggaaaacagtatggagacttcttaaagaactaaaagtagatctaccatttgatccagcaatttcactactggatatctacccagaggaaaataagtcattrtataaaaaagacacttgcatatgcatgtttatagtggcacaattcacaattgtaaaaatatgaaaccagcccaaatgcctatca

SEQ ID NO: 162717 - DNA, 569 bp, Homo sapiens
ctactgaaactattccataaaattgaggaggaggaagtcctctttaactcattctctgaagccagcatcatcctgatgggaaaacctggaagaaaggcagaaacacaacagaaaaagaaaacatcatggaatatccttgatgaacacagaagcaacaatcttcaacaaaatactatcagaycaaatccagcagtacgtgaaaaagctattccactatgatcaagtaggctttacccctttgatgcaaagttggttcgagatatgcaaattaatgtgattcatcacataaacagaactaaaatttaaaaaatcatatgattatcagaaaagtcatttgataaaactcaacaacccttcatgtaaaaaaatcctcaatgataatagccatctatgacaaaccaatagtcaacatcatacagaatgggcaaaagctggaagcattctccttgagaactggaacaaggcaagtttggtaactctcaccactcctatttaacatagtactggaagttatagccagagagatcaggcgagagaaaaaaataaaaggcatcgaaatgggaagagag

SEQ ID NO: 162718 - DNA, 496 bp, Homo sapiens
gatccagtttcagctttctacatatggctaggcagttttcccagcaccatttattaaatagggaatcctttaccccatttcttgtttttgtcaggtttatcaaagatcagaggttgtagatatgcggcattatttctgagggctctgttctgttccattggtctatatctctgttttggtaccagtaccatgcatgcacatttsaatcatggtaaattactgaggtttgaatctggcttgatgtaaagatgtgaactccttggttgcagaaactgcatttatttttcaatactatggacttgtttacccagtagtcagtggaatacctggcacatggttaagtaaatacatgttgaataaataattttcttttgaaagaaagttgattaatgtaagagtttaatgtatcactgcctccagaatgggacaggctttgattcattcaccaacagggtgggacataaacagaagtatagctatattcatattaaaaggc

SEQ ID NO: 162719 - DNA, 589 bp, Homo sapiens
ccatggtgccttcaacttttgttagactctggatttctcaatataataactagaggtagtgtcacaaagtccttacgttactctctataactattcatttcattttaatgtatgttatgtttgttaaatttttgaaggtataagctttagatgggtctgcaattattacagatttttcttgcataggatgaggagagtttcctatgcattgtcaaagccaaaaaatggagtattccctgtgccaataaacacatttctggtaaataataatgaaaaaatatgacattgatcttcggccacaatactgaactaaatgaaatatgtcaggggtccataaatcttgaacctaggaagatcttttgttcttcagagaaatgtaaggtggcacccacaatacgaaggcaggaagtgaaggctgacaaggaaggaaccagagatgctgagacaccataccagcctctggcccaaaggttcagttaccacaggattaaaacatgagctttgaagctcggctgcctatgggtaattgtggtctttcttrtattatttggtattcagtcaagttgtatttatgttttttctcctttct

SEQ ID NO: 162720 - DNA, 563 bp, Homo sapiens
taattcagcctctcctggtaaactaaaaagagaactgcatttcctctgaaaagaagaagttctaccagtgtcacagggaagtcctcgtgttgctggaaaggggtcctgatccagactccaaaagagggtgcttggatctggcacaggacaggattcagggggagtccatagagtaaagtgaaggcaaatttattagacaagtaaagaaacaaaagaatggstactccataagcagagcagcagcatgggccactcagctgctcatacttattatttcttcttgattatatgctaaacaagcagtggattattcatgagctttctgggaaaggggtgggcaattcctggaattgaggactcctctcctttttagaccatatagggtaacttcttattgttgccatggcatttgtaaactatcatggcactgggggtagtgtcttttagcatgctaatgcattataactagcctatcatgagcagtgaggatgaccagaggtcacttctgtcaccatcttgggttttggcagacttctttaccgcaacctgttttatcaataagg

SEQ ID NO: 162721 - DNA, 563 bp, Homo sapiens
taattcagcctctcctggtaaactaaaaagagaactgcatttcctctgaaaagaagaagttctaccagtgtcacagggaagtcctcgtgttgctggaaaggggtcctgatccagactccaaaagagggtgcttggatctggcacaggacaggattcagggggagtccatagagtaaagtgaaggcaaatttattagacaagtaaagaaacaaaagaatgggtactccataagcagagcagcagcatgggccactcagctgctcatacttattatttcttcttgattatatgctaaacaagcagtggattattcatgagctttctgggaaaggggtgggcaattcctggaattgaggrctcctctcctttttagaccatatagggtaacttcttattgttgccatggcatttgtaaactatcatggcactgggggtagtgtcttttagcatgctaatgcattataactagcctatcatgagcagtgaggatgaccagaggtcacttctgtcaccatcttgggttttggcagacttctttaccgcaacctgttttatcaataagg

SEQ ID NO: 162722 - DNA, 584 bp, Homo sapiens
ttaaaggtacttagtaaatattcataaatttaaaaaatgagggcaggaatgaacaaaaacaaaagaagtgggctgtcatctattaatgaaaatatagtctaattgagggccgtaggagtggacactgtcctggtgtagtgctcaactgaaaattaagaatggagaaaaatccattgaaaaatgtggatggtgaaacwttaaaagaaaaaccagggatatgactgggctgttagtgttaatcaattggctctcatgcccaccttttatctataaaatcaccaaattcactctgagaaatatgtaaaccaatgcaaaagatccatctagactatatttatattcctcctgagacccttctgtatggggcagaagccaacatgataaagctttgttccctgagtcctaatctggagagactctatatgtcttgtgcacttaattatgttcacaaagaatgtttatgaaatctgacttttataaagaggagaaacttaacagcaactctggtctgaggaacttgatgggactcatctctacctgggccaatgcatctattcttccgtatgtgactagaactgaaagaa

SEQ ID NO: 162723 - DNA, 584 bp, Homo sapiens
ttaaaggtacttagtaaatattcataaatttaaaaaatgagggcaggaatgaacaaaaacaaaagaagtgggctgtcatctattaatgaaaatatagtctaattgagggccgtaggagtggacactgtcctggtgtagtgctcaactgaaaattaagaatggagaaaaatccattgaaaaatgtggatggtgaaacattaaaagaaaaaccagggatatgactgggctgttagtgttaatcaattggctctcatgccyaccttttatctataaaatcaccaaattcactctgagaaatatgtaaaccaatgcaaaagatccatctagactatatttatattcctcctgagacccttctgtatggggcagaagccaacatgataaagctttgttccctgagtcctaatctggagagactctatatgtcttgtgcacttaattatgttcacaaagaatgtttatgaaatctgacttttataaagaggagaaacttaacagcaactctggtctgaggaacttgatgggactcatctctacctgggccaatgcatctattcttccgtatgtgactagaactgaaagaa

SEQ ID NO: 162724 - DNA, 584 bp, Homo sapiens
ttaaaggtacttagtaaatattcataaatttaaaaaatgagggcaggaatgaacaaaaacaaaagaagtgggctgtcatctattaatgaaaatatagtctaattgagggccgtaggagtggacactgtcctggtgtagtgctcaactgaaaattaagaatggagaaaaatccattgaaaaatgtggatggtgaaacattaaaagaaaaaccagggatatgactgggctgttagtgttaatcaattggctctcatgcccaccttttatctataaaatcaccaaattcactctgagaaatatgtaaaccaatgcaaaagatccatctagactatatttatattcctcctgagacccttctgtatggggcagaagccaacatgataaagctttgttccctgagtcctaatctggagagactctatatgtcttgtgcacttaattatgttcacaaagaatgtttatgaaatctgacttttataaagaggagaaacttaacagcaactctggtctgaggaacttgatgggactcatctctrcctgggccaatgcatctattcttccgtatgtgactagaactgaaagaa

SEQ ID NO: 162725 - DNA, 564 bp, Homo sapiens
agaagtgcacatatgggtgtatacaccaagtgacaaggtaaaatgttttctaatgtaattagtcgtgaaaaacataagtttgaaagctactggtctaaacaaatagaaggatgcccagggcagggaaattatctcatctcagagagagaggcccagaaggaccttgaaacaaaaagagcaacaatacagaaaggactgtcaagccttagagtttcgtagattgcattgaatggctgttctcttttttcaactaataaagtcattgaaatgcagaggtgaaaagttcctgtagcaaaatcatgttgaagtctgcaggtgcctatcacctatgaggaactaggtcttttattaaactcctattagatttttccaatcttattctgtacatgcaggatcaacattgatttcttttttttatcagacattgtccaaaaatggatgaggcatttctcattatctctcccttgaacaacatttatataggacttgctgagatatatgctctttattttyttacttgctcaaagaaaaaaaaaatcctactacatttttcccccatttgga

SEQ ID NO: 162726 - DNA, 371 bp, Homo sapiens
acagcagacctgatcaagcagaagaaagaatttctgaatatgaagacaggtcatttgaaattacctagtcagaggaaaaaaaaagaagaatgaaaaatatttaaaaacctgtaagacatgggacactattaagcgcacacacacacacacacacacacacacacacacacacacacagagtttgcattatgggtattccaaagaaaaagagaagagaaaagacatagaaaacctatttaatgaaataatagctgagaagttcccaaatctggaaatagatataaacatccagatccaggaagcttgaagtttcccaatagattcaacscagaaaggtcctccccaaggcaaattatagtcaaaatgtcaaa

SEQ ID NO: 162727 - DNA, 625 bp, Homo sapiens
ttacaaaacacacatttgcatgtttattcttaggtttttacagttctttaatcttatttattcacctatttttttgagacaaggtcttgatagggtcttgctttgtcgcccagactatactgcagtggcacaatcacagctcactgcagccttgaccttccacactcaaacaatcctaagtttcaccttttgacctacacagactaattgtattacattttaatgtgaagtctccaccctgaagtgaacttgggaccatgtaacatgaatgtttgcttaccacacaacctagcaagcccctttcacaaatattcatagctcctcctataacctattaaatatgtatgtttagccaacctgtttagcataaaactcctctcccacccttcttccttcaaagtgcctmctttctgtctcagccagagggtctgcttcccaggctgtgggttgcaactcttctcagaaataaagttctcctttccaaatttaagatcttgtgatctttattttgacatatgagatttccctagccggtttttagtccatccctgaaagactgaatggttagatctttgatatctttctcaagtacctcccatttgacctcagccatccattttcaagt

SEQ ID NO: 162728 - DNA, 569 bp, Homo sapiens
gtctcaggtttccgaaatctcgccacccgcgagtgatttgcagcgcaggggcctctgctgcctcggaaaccttcaaaggtgggcgggtcggggaccaagtcccctagggatggagaaggaaacggggccaaggaaaaggacatcgccaccctgggcagagcacgcacggccccagcgactcggacatggtgagggrcgcggaggctcggggtggacccgaggcctccacacatgtggcaggctgcagcaacccgccacccacgaggactcgcccaaggcccagagcgcgccgggcccctccctccgactccgtcgccgcccgactggccgcagcggaagccggcgcgcgatcccacgctgcgctttcgccacgtcctgacggctgcccgataaaacggacattaaaattgcactttccactgaatacagcagcgcctattgtggcggcacacctgaatgcgaaaattaaagccaaaatatttcctagcggctaaaagagctccaagcctaggcgaatctgccggtccgctcgccggaaatgcgggctctcctgccggaagctgcccctc

SEQ ID NO: 162729 - DNA, 536 bp, Homo sapiens
tcaggctcattaaacgcagggtctcactttcagtcaggcaaacaagcaagtggttacagcctcttcctgctgcaggaaagaccctgctcccatgctccagttccccgagcccaccctcctgacggccagggaagcctgcagacaggactaaagcccggggtctccaacccacacccccgcctgcctggagctcttacactgctgagcccgtcacaaagccctgtgccctcccgccgtcccaccrtgcctctccactcagcactggccagctctgcgggggcccaacacagctcactgtgcaacttttcagaaggaaagaaaaacaaatcccagtgagattcagagaacctcagctgcgtttaagaattcctactacaccattcactatgacattctgtctcagccaaatatcctgttgccagggaagaaaaattaaattttaaacacgagctgcagagtaggtgtcggtggatggcaagcaacggaaaccgcaaacagggctgtgcatcgccgtcagcccgaactgcagattaatt

SEQ ID NO: 162730 - DNA, 668 bp, Homo sapiens
atatttattaagtctactggttggttatgtgtactttgtgaatctgatattatataacatactgaggacatgggaagtattacaacataytgaggacaggggaggtattatatcaaaatgctttatgagacttagaactaagaacaagtccttcttatctcctgtttatgcaagaaagtaactccctaaagctgtaatatactttcataaagtgttttaaatgctttcctcaggagaatcttattgaactgaagagaataataattgaaaaataattgcactttctttctgagccaagatacatttactctctctgtgtaaatattagaataaaatattcagatgagtttatttttttcaattttaaagagtatttttagtcttataagtaggaaagtagttaccagatgtattctatgagaagtgaggaaacattggcaactgttaataataaattagtaatttacatacattaattaagaaaaaattagaaaaaagaagaaaggcaaatttgtaacagtacaaatttgtttctgccagattttgacttatctggaattcattgctacttccttattcattacttttattgaaggttttccaaaatttcaagactgttcacaattattaatctctttaggaatcttttgtttttactacttattttt

SEQ ID NO: 162731 - DNA, 668 bp, Homo sapiens
atatttattaagtctactggttggttatgtgtactttgtgaatctgatattatataacatactgaggacatgggaagtattacaacatattgaggacaggggaggtattatatcaaaatgctttatgagacttagaactaagaayaagtccttcttatctcctgtttatgcaagaaagtaactccctaaagctgtaatatactttcataaagtgttttaaatgctttcctcaggagaatcttattgaactgaagagaataataattgaaaaataattgcactttctttctgagccaagatacatttactctctctgtgtaaatattagaataaaatattcagatgagtttatttttttcaattttaaagagtatttttagtcttataagtaggaaagtagttaccagatgtattctatgagaagtgaggaaacattggcaactgttaataataaattagtaatttacatacattaattaagaaaaaattagaaaaaagaagaaaggcaaatttgtaacagtacaaatttgtttctgccagattttgacttatctggaattcattgctacttccttattcattacttttattgaaggttttccaaaatttcaagactgttcacaattattaatctctttaggaatcttttgtttttactacttattttt

SEQ ID NO: 162732 - DNA, 668 bp, Homo sapiens
atatttattaagtctactggttggttatgtgtactttgtgaatctgatattatataacatactgaggacatgggaagtattacaacatattgaggacaggggaggtattatatcaaaatgctttatgagacttagaactaagaacaagtccttcttatctcctgtttatgcaagaaagtaactccctaaagctgtaatatactttcataaagtgttttaaatgctttcctcaggagaatcttattgaactgaagagaataataattgaaaaataattgcactttctttctgagccaagatacatttactctctctgtgtaaatattagaataaaatattcagatgagtttatttttttcaattttaaagagtatttttagtcttrtaagtaggaaagtagttaccagatgtattctatgagaagtgaggaaacattggcaactgttaataataaattagtaatttacatacattaattaagaaaaaattagaaaaaagaagaaaggcaaatttgtaacagtacaaatttgtttctgccagattttgacttatctggaattcattgctacttccttattcattacttttattgaaggttttccaaaatttcaagactgttcacaattattaatctctttaggaatcttttgtttttactacttattttt

SEQ ID NO: 162733 - DNA, 404 bp, Homo sapiens
tgctacttccttattcattacttttattgaaggttttccaaaatttcaagactgttcacaattattaatctctttaggaatcttttgtttttactacttattttttctgcctctcgattgatgatagcatcatcataagcattttataggtaatgttaatatgactctgaatattcaaaacccaaaatgttgaaaaattttgtttttgtatatatatcttatgtttaaaaaaatgaaatattactacaaaacatattgcagataagtaaaggatttctttttcttctgtcccatttattaaatttcacgggcagcagttcatgtttcagcttgagtccttctcwtctcctgttctatattgtaagagttcagtcagggtggtgagaaaagttgtaagacaaagt

SEQ ID NO: 162734 - DNA, 326 bp, Homo sapiens
aatattgaatttgtggacaacatatctatgacataaataattaatacctgtaattgtgattgacaaataatcttttwaaaaactttcaattggagtaaaatacacataatgtaaaatttatcatttaaccatttttaaatggacagtctcatgatattgagtccattcacaatgttatacaatcattatcatcatctattccagagctcatttcattatgcaaaactgaaactctgtatccattaaaggattactactcattctgcctcccaccccagcctctgctaatcaccattattttactctctgattctatgaatttaaca

SEQ ID NO: 162735 - DNA, 326 bp, Homo sapiens
aatattgaatttgtggacaacatatctatgacataaataattaatacctgtaattgtgattgacaaataatcttttaaaaaactttcaattggagtaaaatacacataatgtaaartttatcatttaaccatttttaaatggacagtctcatgatattgagtccattcacaatgttatacaatcattatcatcatctattccagagctcatttcattatgcaaaactgaaactctgtatccattaaaggattactactcattctgcctcccaccccagcctctgctaatcaccattattttactctctgattctatgaatttaaca

SEQ ID NO: 162736 - DNA, 429 bp, Homo sapiens
ccatgagatctcatgaaactcattcactaccttgagaacagcacatgaaggacccacccccataattccatcacctyccaccaatttcctcccacaacatgcgggaattgtgggagttacaattcaagatgaagatttgagtggggacacagccaaaccatatcagtgggttagaattctggttaataacacttaaatggatgccaaagattggccaagtctatgtctatattacctggtatattgtactttaggacaagtatagtgcatttgttataatggatagatatcttgtgtgtataaatctgttccagttgtctgttgcactgcaaaaaataatggctaaaaagaaacaaaaatactgttttctatcatgtttctgtgggttgactaggatggctgagcactttttttttaatttttattttt

SEQ ID NO: 162737 - DNA, 429 bp, Homo sapiens
ccatgagatctcatgaaactcattcactaccttgagaacagcacatgaaggacccacccccataattccatcaccttccaccaatttcctcccacaacatgcgggaattgtgggagttacaattcaagatgaagatttgagtggggacacagccaaaccatatcagtgggttagaattctggttaataacacttaaatggatgccaaagattggccaagtctatgtctatattacctggtatattgtactttaggacaagtatagtgcatttgttataatggatagatawcttgtgtgtataaatctgttccagttgtctgttgcactgcaaaaaataatggctaaaaagaaacaaaaatactgttttctatcatgtttctgtgggttgactaggatggctgagcactttttttttaatttttattttt

SEQ ID NO: 162738 - DNA, 509 bp, Homo sapiens
ttttgccatgttgcccaggctgctctcaaattccagggctcaagcaatctgcccacctcagcttcccaaagtgctgggattgcaggcatgagccaccgtacccagccagcagtttattatcgtacaattctatagcccaaattctaagactaagttgctagcagagtttttcttcccagcctctctccttggctagtagatggccatcttctcctgatgtctccacatggtgtttcctgtgtacatatctgtatactgatcttctctacttatagggagaccagtcatattgaaatagtgcccatcctgatgacctcattttaacttaattttgaggtactaagcattacgacttcaacatatgaattttgggggagtcayaactcagcctgtaagactcagagaggagtttgtgaaaacgcagggagaaggtaaccatctagaatccaaggacagagtcctcagaagaaaaccaattgttggctccaggaaaataacaaactgacaaa

SEQ ID NO: 162739 - DNA, 509 bp, Homo sapiens
ttttgccatgttgcccaggctgctctcaaattccagggctcaagcaatctgcccacctcagcttcccaaagtgctgggattgcaggcatgagccaccgtacccagccagcagtttattatcgtacaattctatagcccaaattctaagactaagttgctagcagagtttttcttcccagcctctctccttggctagtagatggccatcttctcctgatgtctccacatggtgtttcctgtgtacatatctgtatactgatcttctctacttatagggagaccagtcatattgaaatagtgcccatcctgatgacctcattttaacttaattttgaggtactaagcattacgacttcaacatatgaattttgggggagtcataactcagcctgtaagactcagagaggagtttgtgaaaacgcagggagaaggtaaccatctrgaatccaaggacagagtcctcagaagaaaaccaattgttggctccaggaaaataacaaactgacaaa

SEQ ID NO: 162740 - DNA, 423 bp, Homo sapiens
agaaaaacaaataagagctattaggttaggaaaggatgacatgatcttgtatacaataaaaaaaaaggaatccactacaaaatgttaaaactaaaaatgagtccattaaagttataggatacaagaacaatgtacaaaaactatttgcctttctgtatacatscagtagataattcaaaaaattttttaaataacctattgtcaaaaaacttaaagcagaccaaaacaaattaaagatatttcatgtttacggatcagatgatttattattaagatggcaatagtcttcacattagtctacagattttgaggaatcactatcaaaacaccaggtgacattttaaagctatttctaaaatttatgtggaaaatcaagtgggccagaatagcaaaatgtgtcctaataaagaacaaattaggctc

SEQ ID NO: 162741 - DNA, 423 bp, Homo sapiens
agaaaaacaaataagagctattaggttaggaaaggatgacatgatcttgtatacaataaaaaaaaaggaatccactacaaaatgttaaaactaaaaatgagtccattaaagttataggatacaagaacaatgtacaaaaactatttgcctttctgtatacatccagtagataattcaaaaawttttttaaataacctattgtcaaaaaacttaaagcagaccaaaacaaattaaagatatttcatgtttacggatcagatgatttattattaagatggcaatagtcttcacattagtctacagattttgaggaatcactatcaaaacaccaggtgacattttaaagctatttctaaaatttatgtggaaaatcaagtgggccagaatagcaaaatgtgtcctaataaagaacaaattaggctc

SEQ ID NO: 162742 - DNA, 423 bp, Homo sapiens
agaaaaacaaataagagctattaggttaggaaaggatgacatgatcttgtatacaataaaaaaaaaggaatccactacaaaatgttaaaactaaaaatgagtccattaaagttataggatacaagaacaatgtacaaaaactatttgcctttctgtatacatccagtagataattcaaaaaattttttaaataacctattgtcaaaaaacttaaagcagaccaaaacaaattaaagayatttcatgtttacggatcagatgatttattattaagatggcaatagtcttcacattagtctacagattttgaggaatcactatcaaaacaccaggtgacattttaaagctatttctaaaatttatgtggaaaatcaagtgggccagaatagcaaaatgtgtcctaataaagaacaaattaggctc

SEQ ID NO: 162743 - DNA, 423 bp, Homo sapiens
agaaaaacaaataagagctattaggttaggaaaggatgacatgatcttgtatacaataaaaaaaaaggaatccactacaaaatgttaaaactaaaaatgagtccattaaagttataggatacaagaacaatgtacaaaaactatttgcctttctgtatacatccagtagataattcaaaaaattttttaaataacctattgtcaaaaaacttaaagcagaccaaaacaaattaaagatatttcatgtttacggatcagatgatttattattaagatggcaatagtcttcacattagtctacagattttgaggaatcactatcaaaacaccaggtgacattttaaagctatttctaaaatttatgtggaaaatcaagtgggycagaatagcaaaatgtgtcctaataaagaacaaattaggctc

SEQ ID NO: 162744 - DNA, 574 bp, Homo sapiens
aattttacatacaacatgattcatttacattttagaagttgttaagcataaaataccaaataagccccaaataagcctatttttaactgacacatacatgaaaatatgagcctaagaattaatttggaatcaaatcaaatagtttactctccggagaacatttctctgtgaataaatgattgaatagatagttcagaattgccataatgtatcaatcaccaygcttttccagataatacccactaaagcattagaaatacaatattattaatctaaatttgtaggtaatgttactgaggtccagggactttattaaatactaaaatttcaacaggagaaatgtgacttcgtcctacaagttccaaattcagtgtttttgatcttttaaccaacctaatttacaatcctttaacaatatttttgttttctcaaatccacgtattttctctaaaattaaaataatatcttacatgtaaattgtattctcttcatgtagcgtaggggtatgaatttatgctattctgtgctcctgggtttggcagcgtaccaagacacctggcaaaagcaaacacaa

SEQ ID NO: 162745 - DNA, 598 bp, Homo sapiens
aatcatggttggtcaaatgccagggtactctatgacccagccaagttgacacataaatttaaccatcgcatccactatgaaatacattcctatgacatcgtaatactgtagagtatagcaactgtggtgatgcctcatttgtgcctacaacaggccatactgatgctctgtcagtctggtcacctctggaagataagtgcgaatccatgctgttggtctccatctgtgctamcgggtcattctgttccctaaatcacatgtgtcttatactttcagggtgctagccatttgaagagatcaacatgttatcctcaatgaaatggattcatgttctactctgcaatatatagataggtcacatccctttggcttacattatgacagaggatttgacatagtctgaggtcaaattttataaaggtttattgtatattttaatgaaataaaattctttgtaatatatttctctcattgacatagaaaagaatgcacatgccatatcaatgtccacatcaggaacctggagctgttatctgctctaacaaagttaccatctctgtcatggcagttgtaataagggaaactaactactgaattc

SEQ ID NO: 162746 - DNA, 505 bp, Homo sapiens
ctacacttaaaacttcatcattacttgtattattccattttcacactgaaactggataattttttttaaaaagaggtttcattgactcagttttacatagctgaggaagcctcaggagacttacaattatggtggaaggtgaaggggaagcactcaccttctcgacaaattggcaggagagagagagagcatgagcaaaggggaactgccactcttttaagaccattggayctcgtgagaattcactcactattatgagaacagcatggggaaactgcccccataatccagtcacctcccaccaggtccctctctcaacacatggagattataactcatgatgagatttgggtggggacacagagccagaccacatcatctctattttgctaaaattgcgatgttgctaactgaaatggaacttataatgagaattctcttcaatttgacacacagttgatatcttatttcctcataattattttccctttaaatatgtggcatc

SEQ ID NO: 162747 - DNA, 574 bp, Homo sapiens
ataatttaacatcacttgatgtctagtaatgaaaggtagcatttgaatagttgaagaaaacaccacttagaaattttttgttaatccaaaagattgtattcattatacctaggtacttatcaaaagattttaggtggggagtaacatgtttatattttatatgttagttttcttacagctataggagttaggctaagaagtggaaggsacagtgatttcacattgtaaataaacatatttttctatatagactatgaactcttcaataaaatgttttatatatagactatgaactcttcaataaaatgttatattcattattttctatcatataatgctctagttcactttaataacaactgattttttttagtatttcctgtttgtttacctctgtaaagaaaacttcacttgaactcactcagctcttgctcagaactgagtagttaaatcttattacttttattacaaacataaggaaaaggagcattggagaggtgagagatgcagctcattttacaaatctctcagacatcagattcaaactcaaagtaatgactccaaataacagttt

SEQ ID NO: 162748 - DNA, 614 bp, Homo sapiens
atatatccacacaaaaacttgtacacacattttatagcagtatttattatactagcaagaaagtggaaacaatccaaatgtctttcaactgatgaatatgtaaacaaagtatattacagtcatataatgacaaatcattcagctataaaaatttaggtcaggaggtactgctacatgttacagtatctgtgagacttgaaaacataatgctaagtcaaagaagcaagataggacaagccaaatattgcattatttcatgtatgtaaaatctcccgtataggcaaatccatagagatctaaagtagattagtgattgcttagtggagaaagagatatgtgcactaactgttaatgtatttgatctttccttttggggtgttgaaaaggttctkgagttagtggtgatagctacggaactttgtgaatatgcaaagaatcactaaattgaatatttctgaaatacattttattatgtatactgaaggtatatccacaagatggtatatgaattacatctcagtttaaaaatatataagaaaacaatctaataatcactgatattccttacctcatcataaagtcaaggcagagattgcatcgctagagtggccctt

SEQ ID NO: 162749 - DNA, 602 bp, Homo sapiens
aacccagtccatacttagcctccagaattcatgggtattaccactgaagagtccttatgtctatggctctttcaacgttttctccagataaacagatctttgctgtgactatctgggtttacctctctctctctctcctcgttttctctttatgttttttaatttaaacttctattttcagttcaggggtacatgatcaggtttgatatataggtaagttctttgtaatggggatttggtgcacagattctctcgtcctcctggtaataagcaaagtacccaatagacagcattttgttcctcttctttctctcaccytccaccctcaagtaggacctggtgtctgttgttcccttcttagtgtccatttgtatgcagtgtgtagctcccatttataaatgaccacatgtagtatttgtttttctgttcctgcattagttccattaggataatagcctccaactccatccatgttgttgcagaagacataatctcattccttttgatggctatgtagcattccatggtatgtatgtactgcattttctttatccagtgtaccattgatggacatttaggttgattccgtgtcgttgctattg

SEQ ID NO: 162750 - DNA, 602 bp, Homo sapiens
aacccagtccatacttagcctccagaattcatgggtattaccactgaagagtccttatgtctatggctctttcaacgttttctccagataaacagatctttgctgtgactatctgggtttacctctctctctctctcctcgttttctctttatgttttttaatttaaacttctattttcagttcaggggtacatgatcaggtttgatatataggtaagttctttgtaatggggatttggtgcacagattctctcgtcctcctggtaataagcaaagtacccaatagacagcattttgttcctcttctttctctcaccttccaccctcaagtaggacctggtgtctgttgttcccttcttagtgtccatttgtatgcagtgtgtagctcccatttataaatgaccacatgtagtatttgtttttctgttcctgcattagttccattaggataatagcctccaactccatccatgttgttgcagaagacataayctcattccttttgatggctatgtagcattccatggtatgtatgtactgcattttctttatccagtgtaccattgatggacatttaggttgattccgtgtcgttgctattg

SEQ ID NO: 162751 - DNA, 602 bp, Homo sapiens
aacccagtccatacttagcctccagaattcatgggtattaccactgaagagtccttatgtctatggctctttcaacgttttctccagataaacagatctttgctgtgactatctgggtttacctctctctctctctcctcgttttctctttatgttttttaatttaaacttctattttcagttcaggggtacatgatcaggtttgatatataggtaagttctttgtaatggggatttggtgcacagattctctcgtcctcctggtaataagcaaagtacccaatagacagcattttgttcctcttctttctctcaccttccaccctcaagtaggacctggtgtctgttgttcccttcttagtgtccatttgtatgcagtgtgtagctcccatttataaatgaccacatgtagtatttgtttttctgttcctgcattagttccattaggataatagcctccaactccatccatgttgttgcagaagacataatctcattccttttgatggctatgtagcattccatggtatgtatgtactgcattttctttatccagtstaccattgatggacatttaggttgattccgtgtcgttgctattg

SEQ ID NO: 162752 - DNA, 448 bp, Homo sapiens
ctctgtagactttggcgtggtggttggccctataaactccattccttgttgaatcgttaaaaagtcatcatttttattttttcaactttttcttcttgtatatatgagagaaatgactaacatttattactataaaagctaaaaccagaaattctgctagatatacatatatatatatacttaattataaatgaaataagtgtatttactgaggtaaaagcaaacatagtaatcttcaaaatacagaaaagaaatttgctatgagagattgtctaaattcatcaattctagagcaaacgaatagagaaaaatgttatgtattcaaacctttgccatgttttataattgtgtgtagyattatttaatttgccagtatttattaaattttagtccagtaaactaacttccttttgccatttaataaaattgcctattgtttaatttcaaa

SEQ ID NO: 162753 - DNA, 620 bp, Homo sapiens
cctgacaaacttcccccacctccaagcattctggaactgattaatggcaagttctgcctcaaaacgtcttttctcttcttatccttggtgagaatgtatcaataaataggaagagatgatgatgctactgaagcctgtaagcacaacttctcatttcatcagctttgctgatgttacctccggctcagaggttccatcttctctctgcctttatgggatgcatcgggattgctttgacagcaagccccaaaggcatatggcagagagcttcttgctttttaagtctgcttttactgccttaccagttaagtgcagtagcaggtctaatgataactggaagctgacaaaataattcaaatagtgccctcaaattttgagctaaaaaaacaaaaaccaaaaagcctattagtgtaaatgcattttactcttgatataaaagaaagtacaatatacttctggaaaagactgactttcattttattattattactatattttttccattcttttctattaggagttcatgagctgggggycggaagaaggtgactggaattctctcttacttatgaggactatgaccagagaaattacgtaatcctctatcctccttaaaattc

SEQ ID NO: 162754 - DNA, 356 bp, Homo sapiens
ccccttcaagatagtgtgatattttgcagtttaattttattctttaattctaaaatgtttatattactatcactgaatgttagccagaatgtgcttaaacattattggatggagtgcatcgtccgatcaacagttsgaaattgctcagtcagttctcttgaaggtaagtacacatgtactttatttacagtaattttactaacataaaaaatactcctaaggagttgaataataatattcattgcagtgccattcataaccacaagcagaaaaagaaatccatcaacaagtgaatggataaacagattccaatgtgctcttaaaatggaaaaactcttcaataatcaaaagaaaca

SEQ ID NO: 162755 - DNA, 514 bp, Homo sapiens
tggcattccacttcttatccttgaagaaaaaaatatcgctaacctaaatcctttcccataaatacaacacactttctttttgccagatgcttaaatgtcattggtctgttttaaagtaattctatttgatctctgtgaaacagatggaagtatttgttatacaaaccttatttagaatgtaatctttttttctctcctgattgcatatgkttggcagtgagctttctcttctagatgtgaatgaatcttggttagcctccaaatctaaacacaccctaatttcaaaaaccacaatcctgaggactcaattcctgtttactgaggaattaaaacctagagaaaccacatagttactaaatgcagtacaacctagtgagtttttaaaaacaaaaatcattacagtttatttagggttattgactgtcattaagttcagagagtaagatcttttcctaagcagtatataatatttacagttggttaactatatctattgcttctgaatcttgaaata

SEQ ID NO: 162756 - DNA, 449 bp, Homo sapiens
gagaggtgtcaaatgtcacctcaccaattagcaaactgtaattctgctttgcttctgagattgaatctaggctgcccgagtaaagaggattgtctggtgccaaccagatagtctggagataccacttgtgggcatggtcagtgtcagtgccttctgtggtctgcagtgccttggaatgctgttggatgcctgtgagatcagccaccctcccctgaggcttaccattaatctgagtaggagaatacggtagtgtaagtaagactgcagtcttccttggttgcgggagtagaccgaaaaaaaaaamcaaaaaacaaaaaaccctgataacctcttgctctgcaaaatctcatgcaagcattcttcacttttgagtgtagactagttaagatttaaaatgactgctgttttcatgaaatagtatcagacagttcagaaaaggctcatggttc

SEQ ID NO: 162757 - DNA, 491 bp, Homo sapiens
tcactaatcagagaaatgtaaattaaaaccaaaatgagatactatctcacacctgttagaatggccatcagcaaaaaaagatgaaagtgttcttatactttatattcatagctagaaactagtttaactatcaggaaaaataaaatgtcaaagcaagaaataaaagcatctgtctatgtctctacttagattctactcatggcccacaccaatattcatttccccaacaaagctaaacttcttcccccactaccttcacatgctttacagagccaacagtaattaatatagaatatggctgactctcacagcacagagacaatgtttaagaagccacacagttaggggagattttagcctttcaagtttccaaaacaagttgtcctccttgcagataaaacagtccaaacatgtagtcatgckcaacttctaagagctgttagataattctcatacttatctgtactcaaaaatcagaaatgggtacagcc

SEQ ID NO: 162758 - DNA, 587 bp, Homo sapiens
cagcctgtatgatgctattttataggccagggactaaaggttctcacaggtaaatttctagaaaaagatggagttatgatttaagcccagaagttgcctcatttaaatttcatgaactttttgttggattatgataaagctaacatgcagtaaggggttcaaraagtgtgaacaccagccgggcgctgtggctcacacatgtaatcctagcatttgggaggccaaggagggtggatcacctgagttcaggggttcgagaccagcctggccaacatggcacaaccctgcctctactgaaaatacaaaaatcagccaggtgtggtggtgcatgcctgtaatcacagctactccggaggcaggagaatctcttgaacccaggaggcggaggttgcagtgagccgagatcaggccactgcactccagcctgggcgacaaagtgagattccatcaaaaaaaaaaaaaaaaaaaaaaaagtgttactacctacaaggcctacccagttaagaataattcatgtccgtgtcttaggagaacgtacgttctcactggagagagggagcagacagacaatgcatcaaagagaattc

SEQ ID NO: 162759 - DNA, 598 bp, Homo sapiens
tgatttaagcccagaagttgcctcatttaaatttcatgaactttttgttggattatgataaagctaacatgcagtaaggggttcaagaagtgtgaacaccagccgggcgctgtggctcacacatgtaatcctagcatttgggaggccaaggagggtggatcacctgagttcaggggttcgagaccagcctggccaacatggcamaaccctgcctctactgaaaatacaaaaatcagccaggtgtggtggtgcatgcctgtaatcacagctactccggaggcaggagaatctcttgaacccaggaggcggaggttgcagtgagccgagatcaggccactgcactccagcctgggcgacaaagtgagattccatcaaaaaaaaaaaaaaaaaaaaaaaagtgttactacctacaaggcctacccagttaagaataattcatgtccgtgtcttaggagaacgtacgttctcactggagagagggagcagacagacaatgcatcaaagagaattctcagttcaaacacagtcaatgctgacacagatagtacagagtgctctgggaacacagatgaagcaataaacacccgtgtaagtggag

SEQ ID NO: 162760 - DNA, 376 bp, Homo sapiens
atttgggaggccaaggagggtggatcacctgagttcaggggttcgagaccagcctggccaacatggcacaaccctgcctytactgaaaatacaaaaatcagccaggtgtggtggtgcatgcctgtaatcacagctactccggaggcaggagaatctcttgaacccaggaggcggaggttgcagtgagccgagatcaggccactgcactccagcctgggcgacaaagtgagattccatcaaaaaaaaaaaaaaaaaaaaaaaagtgttactacctacaaggcctacccagttaagaataattcatgtccgtgtcttaggagaacgtacgttctcactggagagagggagcagacagacaatgcatcaaagagaattc

SEQ ID NO: 162761 - DNA, 601 bp, Homo sapiens
atttaagcccagaagttgcctcatttaaatttcatgaactttttgttggattatgataaagctaacatgcagtaaggggttcaagaagtgtgaacaccagccgggcgctgtggctcacacatgtaatcctagcatttgggaggccaaggagggtggatcacctgagttcaggggttcgagaccagcctggccaacatggcacaaccctgcctctactgaaaatacaaaaatcagccaggtgtggtggtgcatgcctgtaatcacagctactcsggaggcaggagaatctcttgaacccaggaggcggaggttgcagtgagccgagatcaggccactgcactccagcctgggcgacaaagtgagattccatcaaaaaaaaaaaaaaaaaaaaaaaagtgttactacctacaaggcctacccagttaagaataattcatgtccgtgtcttaggagaacgtacgttctcactggagagagggagcagacagacaatgcatcaaagagaattctcagttcaaacacagtcaatgctgacacagatagtacagagtgctctgggaacacagatgaagcaataaacacccgtgtaagtggaggaagg

SEQ ID NO: 162762 - DNA, 376 bp, Homo sapiens
atttgggaggccaaggagggtggatcacctgagttcaggggttcgagaccagcctggccaacatggcacaaccctgcctctactgaaaatacaaaaatcagccaggtgtggtggtgcatgcctgtaatcacagctactccggaggcaggagaatctcttgaacccaggaggcggaggttgcagtgagccgagatcaggccactgcactccagcctgggsgacaaagtgagattccatcaaaaaaaaaaaaaaaaaaaaaaaagtgttactacctacaaggcctacccagttaagaataattcatgtccgtgtcttaggagaacgtacgttctcactggagagagggagcagacagacaatgcatcaaagagaattc

SEQ ID NO: 162763 - DNA, 376 bp, Homo sapiens
atttgggaggccaaggagggtggatcacctgagttcaggggttcgagaccagcctggccaacatggcacaaccctgcctctactgaaaatacaaaaatcagccaggtgtggtggtgcatgcctgtaatcacagctactccggaggcaggagaatctcttgaacccaggaggcggaggttgcagtgagccgagatcaggccactgcactccagcctgggcgacaaagtgagattccatcaaaaaaaaaaaaaaaaaaaaaraagtgttactacctacaaggcctacccagttaagaataattcatgtccgtgtcttaggagaacgtacgttctcactggagagagggagcagacagacaatgcatcaaagagaattc

SEQ ID NO: 162764 - DNA, 475 bp, Homo sapiens
cagcctcgtatgctccaacttacacaagcrtatcatagcaaaatctccaacaataactaagaaaaataaagaactgcctttctgtggcttagggtcctttcatttcctagtgcattctcctccccttttccagatacttatccaggacttcccaataccagttttcaattccttcctggaccccagctcttgctgtcaagtggggtctgtgactaacggttctgtacgatgagatgtgagtggatgtgacacatggcactttcaggctgatccaaaataaaccttctgccctgttttccactcggtctctctcctctcctgccacagcactcccaaaagaggataaagaagacagaagtccactgagctactacaagtaagatagctgtcccaaagtgtcacctatgcccaccaaggactttgccttagagaaataaatttcactgtgttaaaccactggaattatttgaagtta

SEQ ID NO: 162765 - DNA, 475 bp, Homo sapiens
cagcctcgtatgctccaacttacacaagcatatcatagcaaaatctccaacaataactaagaaaaataaagaactgcctttctgtggcttagggtcctttcatttcctagtgcattctcctcccyttttccagatacttatccaggacttcccaataccagttttcaattccttcctggaccccagctcttgctgtcaagtggggtctgtgactaacggttctgtacgatgagatgtgagtggatgtgacacatggcactttcaggctgatccaaaataaaccttctgccctgttttccactcggtctctctcctctcctgccacagcactcccaaaagaggataaagaagacagaagtccactgagctactacaagtaagatagctgtcccaaagtgtcacctatgcccaccaaggactttgccttagagaaataaatttcactgtgttaaaccactggaattatttgaagtta

SEQ ID NO: 162766 - DNA, 555 bp, Homo sapiens
ataaccatctcattgtatatcatcttttaaatgactattgatccatattgtgtatttgtgatatatctggtgcttactgcatattgaacatttaaattaaagctagtgtcaacatatgaaacttttttttgtgaaacacctttttgcttagcaggcattagagytcatgagtctttgctctttgggaaatacatgattattttaagtttaacatcaaataagtttaggaaatactattatgaataacctgaataataataatttactggtagataattaaaatgaatcaaatttagactcggcatctgggttccattatttacatcatgtcaaagaaataagctagtcatatattgctatttttattagaagagaaagcatacatttctattatatgtgaaacaacacaagtaagtcatgtgataaaagttaaagagctaattaactgtctgtatatgggcaagggtatgatgaatttctattctgttctttttattgtttaaggtaggcacatttctgaaaattgagtgagttcccatttgggacctcacaaaa

SEQ ID NO: 162767 - DNA, 555 bp, Homo sapiens
ataaccatctcattgtatatcatcttttaaatgactattgatccatattgtgtatttgtgatatatctggtgcttactgcatattgaacatttaaattaaagctagtgtcaacatatgaaacttttttttgtgaaacacctttttgcttagcaggcattagagttcatgagtctttgctctttgggaaatacatgattattttaagtttaacatcaaataagtttaggaaatactattatgaataacctgaataataataatttactggtagataattaaaatgaatcaaatttagactcggcatctgggttccattatttacatcatgtcaaagaaataagctagtcatataytgctatttttattagaagagaaagcatacatttctattatatgtgaaacaacacaagtaagtcatgtgataaaagttaaagagctaattaactgtctgtatatgggcaagggtatgatgaatttctattctgttctttttattgtttaaggtaggcacatttctgaaaattgagtgagttcccatttgggacctcacaaaa

SEQ ID NO: 162768 - DNA, 282 bp, Homo sapiens
gtatatcttcatatgcgttttacctagcytccttttctgtgaattgtccatttatatcttttgcttaattttgtagtgagtgttgatgtttttcttgaaggatttccttgtacattctacatatagtctctttttggtggcagagattacactattttctccagcgagttacttatttggtagcctctctgaaaaatacactgttgaatataaatctttgattttggtagggccaaaaccatcaaatttgtctttggtttttaatttctgaatttattaaaa

SEQ ID NO: 162769 - DNA, 282 bp, Homo sapiens
gtatatcttcatatgcgttttacctagcctccttttctgtgaattgtccatttatatcttttgcttaattttgtastgagtgttgatgtttttcttgaaggatttccttgtacattctacatatagtctctttttggtggcagagattacactattttctccagcgagttacttatttggtagcctctctgaaaaatacactgttgaatataaatctttgattttggtagggccaaaaccatcaaatttgtctttggtttttaatttctgaatttattaaaa

SEQ ID NO: 162770 - DNA, 282 bp, Homo sapiens
gtatatcttcatatgcgttttacctagcctccttttctgtgaattgtccatttatatcttttgcttaattttgtagtgagtrttgatgtttttcttgaaggatttccttgtacattctacatatagtctctttttggtggcagagattacactattttctccagcgagttacttatttggtagcctctctgaaaaatacactgttgaatataaatctttgattttggtagggccaaaaccatcaaatttgtctttggtttttaatttctgaatttattaaaa

SEQ ID NO: 162771 - DNA, 606 bp, Homo sapiens
tatgacacaaagctggagagttgatataatcctgagttaggacagtaacgatatatttctggccttgccagctggagacaaattgcttctggtgggtcttatggacaggaatggagaaaaaggcatttgtcaagtcaatggctgcataccaggtaccaggagatgtgttaatttgctcaagcaatgaaactacatctggtacagcrgctgcaattggagtcaccacttggttaagcatatgataatccaccgttattctctaagatccatctgtcttctgtgcaggccaaataggagagttgaatggggatgtggtgggaatcaccatccctgcatcttttaggtccttgatggtggcattaatctcttcaatccctccagagatgtgatgttatttttgttttactatttttctaagtagaggcagctctaatggcttccatttggccttttccaccataatagccctcaccctaccagtcagggagccaatatgggggttctgccaactgctaagtgtgtctatgccaattatgcatcctggcacaggggaaatgaccacaggatgagtccagggacccactggactcactgtaagttagatct

SEQ ID NO: 162772 - DNA, 564 bp, Homo sapiens
taatcctgagttaggacagtaacgatatatttctggccttgccagctggagacaaattgcttctggtgggtcttatggacaggaatggagaaaaaggcatttgtcaagtcaatggctgcataccaggtaccaggagatgtgttaatttgctcaagcaatgaaactacatctggtacagcagctgcaattggagtcaccacttggttaagcatatgataatccaccgttattctctaagatccatctgtcttctgtgcaggccaaataggagagttgaatggggatgtggtgggaatcaccatccctgcatcttttaggtccttgatggtggcattaatctcttcaatccctccagaratgtgatgttatttttgttttactatttttctaagtagaggcagctctaatggcttccatttggccttttccaccataatagccctcaccctaccagtcagggagccaatatgggggttctgccaactgctaagtgtgtctatgccaattatgcatcctggcacaggggaaatgaccacaggatgagtccagggacccactggactc

SEQ ID NO: 162773 - DNA, 525 bp, Homo sapiens
cctggtaccaaaatctgtattagtcagggttctcgggagggacagaactaatagggtatatgtatctatgaaagggagtttattaagaagaattgagtcacactatcacaaggtgaagtcccaccatatgccatctgcaagttgaggagcaaggaagccagtaatggatcagtctgagtcccaaaacctcaaaagtaggaaagctgacagtgcagccttcagtctgtggccaaaggcctgaaagccactggyaaaccactggtgtaagaccaagagtccaaaagctgaagaacttggagtctgatgttcaagggcaggaagcatccagcacaggagaaagatgaaggctggaagactcagcaagtcctcccacgttcttctgcctgctttaatatagccatgctgacagctgattagatggtgcccatccacattgagggaggctctgcctctcctagttcactgactcaaatgttaatctcctttggcagcaccctcacagaacacggaagaacagttctttgc

SEQ ID NO: 162774 - DNA, 632 bp, Homo sapiens
tcccctgcctgagaaacagctccataggctgcccctggcaaatacatccccaggctgacctagcaactgtgcatccttgtcttaggtctgagaaacagccccatgggctgcccctaccaaatatcctcctaggctagccatcaatattctgggtctgagaaacaaccctgcaagccacctctggcagaaatgcccctaggccagctgagcagctgtgtgcacctgtcccaggcctgagaaatagccctgtgggctacctccagcagacacacacccaggccagctgagaagctgtgtagccatgtactggaccttagaaacagtccttggcaggtactcccccaggctggactagcagctgtgcacytatgcccccagccagaataacagactgcaaaccagaccctaagttggccaacttaccatgtgcatgtatgcaccctgacctgagaaacagcccagcaagcccacccatggcaaagttgcaccatcgctgccacatactctctcagccttggccaccgagctactcataaatgtcatgaatgtggattacaactgaagaaactgcatagagaaacactactgtgtccaactagaaacaaacccaatgcaccttcactaaactgaca

SEQ ID NO: 162775 - DNA, 611 bp, Homo sapiens
gtctttgctgttcttcagcctccactggtgatacccaggcgaacagggtcttgagtggacccccagcaaactgcagcagatctgcagaagaggggcctgttagaagaaaaacaaatggaaagcaacgataacaacaatatcaacaaaaagaccccacaaaaaccttatccacagatcaacagcctcaaagagcaaaggtagataaatccacgaagatgaggaaaaaccaatgcagaaacggtgaaaattccagaagccagaatgcctcttttcctccagatgatcgcaacacttctccagggcacagaatggggctaaagctgagayggatgaactgacagaattaggcttcagaaaatgggtaataatgaacttcgctgagctataacccaatgcaaagaagttatgaacattgatgaaaggttacaggagctgctgactagaataaccagtttagataggaacattaaagacctgatggagctgaaaaacacagcatgagaacttcgtgaagcatacacaagtatcaatggctgaatcgatcaagcagaagaaaggatttcagagtttgaagaccatcttgtggaaataaggcatgcagacaagattag

SEQ ID NO: 162776 - DNA, 528 bp, Homo sapiens
gtatgcttgttatagcaaccctagctgactaagatgcagtcatagtgttctcacagacataacagcttgctcctgtggccggaggacagtgggagagaggcagagtgatgagagytggagtccaagatcaagcagggtttttaagcctcagtgaagggcatgaactttattctaagtatatgggagaccatggaaaattgtacacaaaggggaaccagactatgatttacatttttaaaaaattaccttggcttttctatgacaagatgattgtggggtgaaaaaaggaaaatcaggaagacaaactagaagctcgtgcaagagtccaaacaagagatgatggtggcttggattaggtagtattggagatggagggaatggccagaattgccacctattttggcactattctttttaaaatatcctaaaagtaaaaatatatatatatataaaatttaccattttaaccatttttaagtgtgcacatcagaaactaagtacattgttgtgcaatcatcactgccatcc

SEQ ID NO: 162777 - DNA, 596 bp, Homo sapiens
aggagaacatagtacaggtagaagcagagttagtgaatacaggtaactctttaaagaatttggcatgaagaggagcaaagcagtgagatggaagatggaggggatcctgcttctagagatttatttttagatagaagatactataatatactgttatacatgctagtaagtaagccaatagagagtgacaattgatratccaggacagaagagaaaattgcagtagcaaaatccttgagaaggtgagacagatggatctttttaaatgacttacttttaaaaactgccagatgaattgatataccttcaagtttactgattcttttttctgccatctctaatttgctgttaagtctgataagaacttatttcctaaggaacctttatataaataacgtatgagtaatatagatatatttataaataataagtaaatagagtacaattaatctcttgccatatgtaatttaatcttataaataaagcaagctggaggaggcggtttgtgcctgtaatcccagctactcaggaggctaaggcaagaggatttcttgaggccaggaatttgatactagtctgggcaacatagcaagacc

SEQ ID NO: 162778 - DNA, 581 bp, Homo sapiens
aacgttactttgagcattcatgaagaatactcactcattcaacctttcacttattaactaaatatttgttgactactccstaaaaaaccagtggtaaagcaaacattcatccttttctaagagacacacaatagtcaaactattgattcataatgtcgatgatacaatagacaaatttatactttatatattcaaggtcattttattttcattaaagatacaatgagattgtaattagctacattattctgcttatttatctataatttttttttatttttaaagtttttggtaaactttttactttggaataactttcatttacagaaaagttgcaaagataatacagagagtccccatatattcattatccagtttctattatggttacttttttatacaaccatggtaaatttgtcacaactaacaaaccaacattggtacattactaaactctgtgaattaaagtttggattttattcagatttaactagttttcccaacacaggtcttttttctattccaagtttcagtctcgtgctataaattgtgcttagttatgtcttcttagtctcctatgg

SEQ ID NO: 162779 - DNA, 581 bp, Homo sapiens
aacgttactttgagcattcatgaagaatactcactcattcaacctttcacttattaactaaatatttgttgactactccgtaaaaaaccagtggtaaagcaaacattcatccttttctaagagacacacaatagtcaaactattgattcataatgtcgatgatacaatagacaaatttatactttatatattcaaggtcattttattttcattaaagatacaatgagattgtaattagctacattattctgcttatttatctataatttttttttatttttaaagtttttggtaaactttttactttggaataactttcatttacaraaaagttgcaaagataatacagagagtccccatatattcattatccagtttctattatggttacttttttatacaaccatggtaaatttgtcacaactaacaaaccaacattggtacattactaaactctgtgaattaaagtttggattttattcagatttaactagttttcccaacacaggtcttttttctattccaagtttcagtctcgtgctataaattgtgcttagttatgtcttcttagtctcctatgg

SEQ ID NO: 162780 - DNA, 629 bp, Homo sapiens
cgatgatacaatagacaaatttatactttatatattcaaggtcattttattttcattaaagatacaatgagattgtaattagctacattattctgcttatttatctataatttttttttatttttaaagtttttggtaaactttttactttggaataactttcatttacagaaaagttgcaaagataatacagagagtccccatatattcattatccagtttctattatggttacttttttatacaaccatggtaaatttgtcacaactaacaaaccaacattggtacattactaaactctgtgaattaaagtttggattttattcagatttaactagttttcccaacacaggtcttttttctattccaagtttcagtctcrtgctataaattgtgcttagttatgtcttcttagtctcctatggtctgtgaaatctttatttttcgtgatctttacagttttaatggatattggtcagggattttgtagaatgctcctcaatttgggtttgcctattgttttgtcatgaatatactggggttatgagttttgcctctgagaataccacagaggcaaataccaaccttatcacattatatgaagtggtacatgttattaacatgatatc

SEQ ID NO: 162781 - DNA, 566 bp, Homo sapiens
ctgtgtgttatcaatatttgactatagggatactcccagtactatcaactttggattagaagcctagaagttgtatgtccaacttggcactaacatagggtgcccctgaacaacttgctccaagcttttgacatttcttttgcagtatagctaatgatatrtatttagtctatgagaaattttggtaaattaaatgaacttcgtatgtcagaagtcttatctgagagttaaatacagtaattttatgggagttttagtaacttttttgggtcagatttaaaaacagtaataaatgccacaaacttaccactctcacaaagtccttttctcaaattcctgagttagactcctacagagtcacactgtttgcatttgaaagatcatatgctgactttgcctatggagcttttgcttagagttgagaacatttttgcagctggggtgaacctatagcttgctggggaaaatcaacatgaagcaattgatcactcatccaaaaataagaattctaacagaaaggggtggtaactgcaaaaagagcatgctggcatcaaataaaaaatatg

SEQ ID NO: 162782 - DNA, 504 bp, Homo sapiens
tttgatttctcccactgaattttaccttagtgtcctttctactcaaagttagtaaaaagtcactggtagatatttgttcagtatatatttatggggtacaaaatgaggtttatgacttatgaatacaatgtggaataattaaagctaataaacagatttataaacccaaatacttatctttttttgtggtgagaacatttggaatttgctcttactcattttgaaatatcaaattatttttaattaatttagacacaatgggtatatgtcctttaattttctaggttggaaattgcaaaaatgaggtatgtaatagagttttgtgamctttaaaagtctggaaactcagtttaaagtagtgatttttctttgtctaagtcatgtatctgagaatattataagtatgactttattttatttaaagtaaagctcggttagtttttcatgataacaatgattttcataagggagaaagaagagaaaaagtgtatgaagggtcaactc

SEQ ID NO: 162783 - DNA, 504 bp, Homo sapiens
tttgatttctcccactgaattttaccttagtgtcctttctactcaaagttagtaaaaagtcactggtagatatttgttcagtatatatttatggggtacaaaatgaggtttatgacttatgaatacaatgtggaataattaaagctaataaacagatttataaacccaaatacttatctttttttgtggtgagaacatttggaatttgctcttactcattttgaaatatcaaattatttttaattaatttagacacaatgggtatatgtcctttaattttctaggttggaaattgcaaaaatgaggtatgtaatagagttttgtgacctttaaaagtctggaaactcagtttaaagtagtgatttttctttgtctaagtcatgtatctgagaatattataagtatgactttattttatttaaagtaaagctcrgttagtttttcatgataacaatgattttcataagggagaaagaagagaaaaagtgtatgaagggtcaactc

SEQ ID NO: 162784 - DNA, 621 bp, Homo sapiens
gcatttaatgtaattattagtttaataatataattgttatatatctacaattttgctatttgttctctgttgtcccatcagtttgtttctcttgtccttctttaactgctcattttttgactactcaattatgtgtatttcattttacttcctccattaccttattcgttctacatctttttttaatggttggtctagaatttgccatgtacatcttaattgatcataaacttcaaatatatttattccacttcctccatttcattatttatgctatcgttgtcatgcattttactygtacatatatatgagccttacaatacattttcactatttttgattttcacagcagtttatctttttaaagtaattaataataacaagaaaaatcttttgtacttacccccttttttaaccatttctggcactcttcattttcctatgtaaatttaaatttctatcttgtactatgctcctaccgactgaacacattcctttaacatttcttatagtgcagatctgctggcaataaattctctgtttttgtttgcaaaaaaaatatgtattttactttaacttttaaaagttttttttttttaaactgggcatagacttctgaag

SEQ ID NO: 162785 - DNA, 292 bp, Homo sapiens
ataacagaaatattagtttcastttttgttagataagtgtcttggaggaagtaaaatgtaaattttgtcttaaagcaattgtgacttgaactagccacggaagagggataaggcaattcaggtgaagaaaacagcaaattcaaaggcatgaaaatagaaaatgagtagtgagcttgtaatatattgacaaatcataaagacactatccttattttgtttatctgtttcagaggttgtcaaactacagtaatagctgcatttagtctatggcctgtttttgtgtgaccagtga

SEQ ID NO: 162786 - DNA, 292 bp, Homo sapiens
ataacagaaatattagtttcactttttgttagataagtgtcttggaggaagtaaaatgtaaattttgtcttaaagcaattgtgacttgaactagccacggaagagggataaggcaattcaggtgaagaaaacagcaaattcaaaggcatgaaaatagaaaatgagtagtgagcttgtaatatattgamaaatcataaagacactatccttattttgtttatctgtttcagaggttgtcaaactacagtaatagctgcatttagtctatggcctgtttttgtgtgaccagtga

SEQ ID NO: 162787 - DNA, 568 bp, Homo sapiens
cctttgttctacttgtttgatttgacttcatgataataagtttaacttcctatttatatcttgccattttttttgaacactgaaaagcctcaaaaaattacctgtgaaatcatactctttggccacaagtttgtttatattgcaggaaaaagaacattaggagatatgaratttaagggcatgaaaagaaaacagcatgctactgctttaggtgtatcaggcctcaccctaactcaatctgcatgtgatcaaataatttttagtttttaattattaattatggaattggtgaagatgctatatgtttcatgcttacatatatgatagaaaatgccaaatggaatttgtgtaagggaatatatggaagctttaggttgaagcaagagttaatttgggagcaaagatgtttggtacaatgttatcactttatcctggttggtgaaaggggggatggttcttatacaaacacctgtcatacatgatcatgttctatgtgccagaatagagtgacagtgaggaactgagtaatctttcctttttttctgtttactcagttagatttcattaa

SEQ ID NO: 162788 - DNA, 610 bp, Homo sapiens
cttacttttaagaatcaattagattcttattgcacaaaagttttagatttttgtaaaatttgccaaaattactggagcttcaaacttaatccttaaatttctttttgtaaagtgaaaaactaaatattgtcatacctagactggagattaggtcaattagtgagagaatttttgatgttactaggtgtttatatatgtaggctaaatgctaatgatctctttttttcttgtaataacagaggatacttaaggataatcagaatgggaattattttcagaatcttttttttttttcactcagttcagatggcactttctatgttttattgcccaggaagtaaaaatatttttttcttgcttttaacagattttaaaagacaattacagatgtctatttggtgggtttctgtttggcctgctgattcctttctgctctatttccatttcatattcaagaaactcaagcccagkggcttatataaaaaatgtattataaaatgatcatgtttttatttctccttttttaaaaaaccagttctgagtattcttaaatcatcataccctcattctcctgttacattactgctgggcaagattttttcaaggtgaa

SEQ ID NO: 162789 - DNA, 648 bp, Homo sapiens
gaacttaaccttaaatgtgactgttgaagtcacttttcttaggtttaattcatgatcttcactctcatccctctacctgtgccttcccctaagacctcatttcagtgttcaggctttatgaccctgttttaatgatagtaccatcttgcttagcagcaatttaacagactgtcattgaaaggcctatctgcaatcagaaaaacttaaacaccatcttgatagaattgtgaatttacattatcaaaagaaatagccaataagttgagagaatatttcagtggaggaaaattagaagttatcttagaaacaagttcttcagaataaaaaaattgtccccaagaaatagcctggaatatattctcccacaccctactcacactttgtaaaattatagagattcttaagacttcctatcaaaaccaaataaagtcataagcattttgttgaaattattaaaatgttttcatttttagtaataagcaccctttctgaaatttcaatatttcatayatttgtagagtaaaaattgggaaaagaaatagatcaagggagatatatttgatagactatatataaattttaattgacaaactttggatttttaacagagaagctagaaaacattctatagtttgaacattattttgt

SEQ ID NO: 162790 - DNA, 472 bp, Homo sapiens
cccattgattggaaccatgttagaaactttcattaataaaacaagatagaagaggataatttcacttatttcatgtgtctcttaattmctgttttctcataaatagatttatgactagtcagttctcaattgataccatatttataaatgtattttgtctaaaagcaatattataaaatgccctttttcaacatttctaatataatcatggcatatagaatcttctatttaaactttgatggccaacaacatgactgtcatttgtggcaatgattacctatgctactctaagactttgttacttatatgttaattcatagatttgactttttcttcagatatgatattaaagctttttgcatttaaatcaattatttgaatattgttacaaagtttcaaaggactttcttggcatattaaaatatttgaattatcgctgtttgcagaaacccagacacattaatgacatgat

SEQ ID NO: 162791 - DNA, 470 bp, Homo sapiens
accttgaaaatgcagttcaaattttatttgttttgtaaatctttcctgaatccaacaaatgtttaattgaatgctctttttactttgagatccttaaatttaatattgcttcagatattgcttcagaagcatgactaggactctagaagaataaaacaggcctgctgagagccaatagtcctataggttttcaagacttatatctaggtacgaatttgataatattgcaagattattctaaacatacaaactctttagatcttaggacaagaaagaattgaaaactgtatgygcgcgcacacacacacacacacacacacacacacacacacttgttagcttgaaaatatttttaaaaatctatcagggaatcattcaaaccatcttcccatcccctgttttcttcctcctcacacacacaggcacatacacccacaggagctattaccaactggaaaccttgcaaacgg

SEQ ID NO: 162792 - DNA, 488 bp, Homo sapiens
acaaataagtaaacaatgccttaaaacgtgttcaggaaatgatagctttaaaaggatgaaactcttctaggtataaattttgtttcagtgaaagctatgcagacaatcaccacaatgtctgatgtacattgaacttgtgaataaaattccttaatttccaaaaataatttatgtttttaaaattggagcttcytagaagattggttgaactactatatctttgataagccatttccacctcctaatcaagggaacatatagtaactttaccatattggttgcctacagttaaaataccttatgaatcatagtagaatcaaatattttgtttttttgtatgtaataattcagatgtttatatactgttatttacacagaaattgaatttataagaatttaaggagaaaattttgctcaaatctttctttatgtgatgcaaagataacctggtttgacattttgacatctttctttttttaagaaaacgg

SEQ ID NO: 162793 - DNA, 600 bp, Homo sapiens
taatatttattttctctattgatatatgtatagcgtgagttaaataggagtaggagatttctgtataacaaatttctcagtcaatttgattttaaacctacactttctcaatttttttaatatcctctatcataaggtacatccaatttgtaagtaaagctaaaatagattgtgagaaatctcaaattatttcttattagaccacataamattttcatagtcagagaaattgatagtcctctgatatttggtcttcaaatttcatattacattttttcaacattttattgcttttcacttggcttaattctgtatgtgttgctggagaacaaaaaaagaaagtagtatgtccaaagagaatatgcaacagcatgtgatgcagtcttctgaacattatttcgacatccctaataaaagtcaggacatacttcaaagtatacatcaagaactattacttataagcccagagcaaaccaaacggaaaataatatcctcagcaatttaatttggattacattcatccatgtttacttccttctgtacacttagacacactaatgctaaaaaaaattaatgttggcaagaggagctgtgctaaaa

SEQ ID NO: 162794 - DNA, 542 bp, Homo sapiens
agaacaaataatttgatggtggatatatttgtgcaaaatatcatggacacttctaccattggtacacaactagtccacccttctaatgaacttggctttctcctttgcttcaagatgttggtggtcttaattaagcaaccaaataggtctggcctggttatttaaagtaaaatggggcatattgggaattactagggtagttcaggacttaccaagcatggctgagtgaagcaggataaaaggaagaaagcagatacagctatacacacaaaatactggaaccaaagtccagtctggcaaccttagtggccaggaatcagtctcagcctgcaggtaagscaagtgggcaagataaaagtggcagctgttccaacaggtaagagaaacatagtgatggggaatttcatgaaggggggttatatcaccagttccaagcagggtatgaaatactagtatcagagcagtctattaaaagggaacaaaatttagtcatctagctgacgttctgactcagagaagtaacatcatctgacatacatttt

SEQ ID NO: 162795 - DNA, 506 bp, Homo sapiens
tccttggctgcagcaactgattaaagccttcttggcaatactcatcrtatcagtgattggcttcctgtgctgtgagcagcaggacctagactgatgtttcggtaacactatgttgaatacagaatgtagggatcaagaatggaagccaagagaccagtactccaggaaaggcaggatgacgagtgctcagaacagggtgtgaggaatagaggcagaggatagcatgcaattctagtctatcctgagagtagaacccactgtatttaacaacagatgatgtgcatgtgatgaaacagcgagagtagtgcccctgagatggggataactatggtaaagcagatgtgagagtgagatttgattcaactgtggatatattaagtttgagatatcttttagatactcaagtgaaggtcttggaggagtatgaggtttagggagatgaggtcattaagtcatgagagtaaacagaagagagctaagctccaagggtatccagtattaggagt

SEQ ID NO: 162796 - DNA, 585 bp, Homo sapiens
ctgaaaacatcatccatatcctttaagactatgtcttcctatggattttgtttcagaaagtccaggtaaaatcatcatgctgatgtgtgattttcacatacataacatactttctctattgagaaatgtcttgccccaaactgtgcagcttgtaacgtgtagataactatttcttagcctrtactctttcaactattttgtgctgcattttggtgaaaatagacagcctatttcatcattttgaagcaacatttatatagaatgtcatttcagatttttgctcctatgggtttctgcattgatgatcaacgtgtttatttttaagcatctctgtgaagtgactaataatggcatctaagaaagtaggacagtgtttcccagagtgtgttctctatgaacacctgtcatgtgagattctccttgggggaaaaaagttccatcatcaaatacagttggatcatgctgtgttttgtgtctcttctcatagaggcccaaggcacattaatatataaaaggctatgagtagacacgtagtcaaaaaatgaatcttgtttagcccaataattcccaaaattgttctactat

SEQ ID NO: 162797 - DNA, 632 bp, Homo sapiens
atctcttttatttcagtgacatgtctgaggtgattttcaagcagaaatactctaaatctatttttatagcttccaacgaggctttaacagaatcatgtggaatgtgggttttataaattctccactacaatttctctatatagactcaaagaaagggtttgaaagcctgctcttcatcttttgtcaccagatgacaagttctattcttttcaggaaagactaatctctgggagttcatcctggtagatgtgtagaaaagtctagaaaaataagtttagatgatctccattttccaaagatcttttaaaagtactttaacttcttgaagcaatgcagacaaggaaagagaagttatgattcaaaatactcttgccagaattatattctctatgggccaagggagtttacagctacagacggaatgaacgagcaacacatcacattcttgccttcttctcttgttctcctctatcagaaggattagtacagaaaaatgttctggaatttcttaaaaagaaaaatatacaaaagtttccatttggacctaaaytgttactcatctgctcctgggtttgctttcctctggaatcataattgtaaacagagtttcttagtaatactaatgtaaccct

SEQ ID NO: 162798 - DNA, 500 bp, Homo sapiens
ttgaaatgtatggggaaaagatgatcacacaattataaaattccaggaagtatgtatgtcaaatatttcaaatcttttgagaaaacagtccctgtagaaatataaacagccaagatagtaggcctttctgattaaagaaagtctctcccacaaggacccacctgatgatctcaggagagagtaaacagtgacttatagtgagtgcgggattatrttgagagatttttgacaaacagttccaaaactctgtaagttgaagttgttttaattcatcattaaaccaatgttatttaaaaaactaataatcctgaagcaaaatctacttataaagctttggttaaatttacgttcacattaattttacttataggctttaaattttccaacagaatgacaattataagaaatcttataaagatcagggatttttttttttttttggctgacaagtgaaaacaatttacctttccaatggcaaatgggaatgtgatcaagcacaa

SEQ ID NO: 162799 - DNA, 586 bp, Homo sapiens
catcaaattttcacgttggagaggggaaaagggaatccttcagggagatgtcaggattgtaggcagtgttgagtagtcaattaagaaatattgtgaaattaaagtgaaactagttagctgagttgtgtatttcttttccagcaatgttactttaactaggagtagttggatagttaaacaaggtcacagaattgtcagaacaaacacatttgacagagtaagaatcagggaggttaagaatttttgcacaatgacctatttttcctcayatcatcagtgtagagcaattactagagactttttgcttcaggtccactgctaaatgatgtacgaaaggggtccatttttctagagattgtagccatctgtccatgacctccacagttttcagggaatccatcattcaagggaatggtagtggcccagtgccctgaaaattctccttggtttgggattctgccttcttgtatttttggtagccatctgaccatgaacaccatctcatgtatttcatcccttagtgcgatattgagaacttatctctcaccctgcacaagtgaaaacttggttgatacacacttcttga

SEQ ID NO: 162800 - DNA, 586 bp, Homo sapiens
catcaaattttcacgttggagaggggaaaagggaatccttcagggagatgtcaggattgtaggcagtgttgagtagtcaattaagaaatattgtgaaattaaagtgaaactagttagctgagttgtgtatttcttttccagcaatgttactttaactaggagtagttggatagttaaacaaggtcacagaattgtcagaacaaacacatttgacagagtaagaatcagggaggttaagaatttttgcacaatgacctatttttcctcacatcatcagtgtagagcaattactagagactttttgcttcaggtccactgctaaatgatgtacgaaaggggtccatttttctagagattgtagccatctgtccatgacctccacagttttcagggaatccatcattcaagggaatggtagtggcccartgccctgaaaattctccttggtttgggattctgccttcttgtatttttggtagccatctgaccatgaacaccatctcatgtatttcatcccttagtgcgatattgagaacttatctctcaccctgcacaagtgaaaacttggttgatacacacttcttga

SEQ ID NO: 162801 - DNA, 503 bp, Homo sapiens
gttggtgatactaactttagactccaaattcagaaactcctatggacttttttattaatggcaaggagtcacactatagcataattacttctcaggctgtttctcatgatacagaagtttctgtctggcttgtgtaactatacacctgaaaatatcccggatttactgcttttggatgtcacatttacctaatgttctctgatgttggagctgatggtaatgtaattgctgctatgattttgcaaacaacctcaatatcctcccattcccctaaacatacaaatatatattacttatttaaccatcctgatgtctttaagtttgtgaatatataaaggcaatactcatggataaaaatttgtaggacaaacttgagcttgcagacatacaaaatttagttttgrccctaatgctaatgatattcttaaaatgtatgccattgagaaaattataggcaaaaatgacaacattagaataacctatgacaaaggaagatatttaac

SEQ ID NO: 162802 - DNA, 425 bp, Homo sapiens
gtcattcagatagaggtagtttcttgtcattaaaaattgatttaaatgttctccattattttagcaaagtttaaaatctackatagaaaattcttacataaaagattcatgttttattattatttggtgtggcttttgccccagacctaaaagattcatgcttaggagatttaaatgtttttggatatagaaggccttgggtcctttaattagtttacaaggaaaaaaaattcaatttagaatgttaatatttttctctaaatacaaatttggattctctggttcccttcctttcttttttctcttccctttcccttcccctttcctttctcttcccttccttcccttcccttccttcatcttgcttcatctatatcttcaccaccacctacctcatctctagcttggatttttaggtcaactgc

SEQ ID NO: 162803 - DNA, 440 bp, Homo sapiens
agcatattacgggggtggtggagaaagaagcactgtaataaattactccatctcagagatgcccaaggaacagcagatgggggctaaaraaccccataagaacagtaggacctgttaagtgagcataatgagatgggtttgggaatataaatctggagagaggagctgaggtggagaacaaactcggagagaagaaagaattgtgtcatgttgaggagccacatgatgagagaaaataagcaggaaaaagcaagagagtgttctttagaagcaacacagccaaggagctctttagtgactacatatggctacagatttgtaaggtgcttactgttggtagggtgttcagtacaatcttccttttctcccccttcttaggaaataatcaagtcagtattgcttattagagctttaggataagcaaatatttgtaggaattc

SEQ ID NO: 162804 - DNA, 564 bp, Homo sapiens
ccatttaaagcaatcttctgacacctgctatataggaacctgacacacagttctgtctgtcgggatgtgagctcttacaggcccctctactttttttaagcactccttaagaattttggggggggattaaagtgattaaaacaccttggggaaaaactgctctactaaagcaaatcctagacattatgtaattccacctgtaaatactattggatatcattctaataggtaatgatggtatcatggttgtgtctttaagaatattaaccataattccttagtattatctgatattaaggagttcattgctggtcgttgcyactgagttatcactggttctaggccataatagtgaacaaacagcaattggaaataaaacctggcaatcttaaaactgagttggaaaaaccagtttcatgtattttttaggggaaaaatgcatacttttaaattttatacctatatgccgtttctcttataccaaaaatcttggttcttatatatgtcattggataaacttactgctaatagcaattaaatgttggtattttgaagttataaatg

SEQ ID NO: 162805 - DNA, 604 bp, Homo sapiens
ttacctattcaaggccatttaattgcttttgggtaagaattcagttccctaattcccagttcataaaggccatttctggaggcaagtttaggttttgttattttggaattatatgtcagattgttgttgaaatgtttatcaaccacctcagaaaaagaaagaattctgaaacagctccctataatttgttatttggataattcctggatttcattaacctggatttaatttataatagatgagagatcaaagaaatcctagctcttatggtatgatttggtccacatgaactttagattttatttttctaccttatacactattatatatgttaattttgtgtccaaagtagatttaagagragaacagtcaattgagggcctattaagcacctgtgtaccaggtgcagggaaagaaggaagactgaaacagaagtaaataggcaatacaatacaatacaatacaatagtattgtatcttcaatacaagttgaagatggttatgatgagtataaatccaggaagctagcaatggcaggagagctgagaagcaacaaatcaagctgcaggttttctaaactttccttacaggaagactgttggct

SEQ ID NO: 162806 - DNA, 561 bp, Homo sapiens
atatacactataatccaaaataggtggggtacaggaatggcatgcaagtgaccaaaaaataaagcccaacctggaataaaacagttcaaagaacagaaaggaaaacttcacttaaattaggtctataccctctagaaaaaaatatacaaaataattatatgttttatattagaaattaatgaccagmatatgtacacaacaaaacaagtactcaaaaacaagctaaacaaaatgataggatgagaagaggattgtagatatgaggaaacaaaatatggactaaaatttctagagataactaataagaatgtagagctagcaaagtacagaagtgatatcactgaaagccaaagtagaggaagatttgtgatatcttcatgaattcagatgaaagagatgaatgcactagatgaggttgagctatagaacataaattgaatgcaattagatgaggttacattatagcacataaatgacacagtattaggataattgatattggcccctgaagtcaagaactcatcaaatcaaggagttgatacataaatacaatgtaagaaa

SEQ ID NO: 162807 - DNA, 555 bp, Homo sapiens
ttgagactatccacggataaactaaaactaatatgaaaataattcttgtgaaaattgccttacaggcaagaatttgcaactttcatagggtaaacagatttttaaagcgttagaatttcataattgtgacaaacatcctcctagaatagaaggtgaaacaagcaagtaagcagacaagcaagcaagcaaacctttcaccagaatgttatactgactttagtgactaatggatatatttttctctatgagagactgttcatgtatctccaattccctaattagaaaaacatatatccaggtcttagattattttatatattgctgtatccacacctaaaagtcatgatttgaccttaktatagcgaaatgaaaggaaatataaggaaatttaccctgcattaataatttattgaatacactatgatggaaatggagattctgttaaccaaagagtttctcaagaaacttattcattctagaatattacagcttttgagtgagaagcttattatatacatttaagggctcatcaataaaatattaacatgtattgaa

SEQ ID NO: 162808 - DNA, 555 bp, Homo sapiens
tgcaccaaagaaaatgctgtagcactttccatagtttaaagtcagagatgagatctctgatagtattttactattttagtttgtctagaaataagtgatctttatagtttctgaccctctaaaaaggaagccatagtcccttgtagttgctatggcgatataaacatccctagaatcactatagaatatagcatttctatttctctccctgaatagttccttatcttatctgaaaatatgatgtcaaaatgataaagtaccaactttttagtcaaatcccttcttaattttgacatgcccctatgaattgaccacttcactattccgctgaaattctgtaagatgtttatttttggccactctttctgcaaaaggaaattctaaatatacatacaaatggaattttaatttctgaaaggcatctgtacacgaatttatacaactcgagtccttaatattttaaaataggatatttgcatctctgattcacagtctccaataagttaaagaagaccctgattatrcactgtgaatagagaaaaattagatagcaca

SEQ ID NO: 162809 - DNA, 606 bp, Homo sapiens
  misc_feature (1)...(606): n = A,T,C or G
nnnnnnnnnnagtttcatcttccacgcagtgaaagcagattcaaacaaaaacattactctcacatgcatcatacgttttcgagagtgagcagtgtgctggaaattgcccyaacccatgctgttttatgtaagccatagtccttagaatgtaggtactcagagaagagcaggtacttttttgtgctaggaagaaacatggccaagcaatactgctatctgacgaggaagctgttgttctttaacctggaccattttcagagtaggcattttaaaagctgcctgatgagaactttttgaaactgtagcagagcttccatggatattctgattggatatatcattgcttcctgctcagcttgctaagataacttgaaaacagaaaatccttttgtctggagtaggtatttaattaaccaaatgttaagtattgtgtattttttcagttgcttaagtggaaagacattattacctgaatatagtttttttatgaacaacccagaatattaccgggttaaaggtcattggtttattacttaacctaaaaataattgctttgacatatatggaatattgtatatctcattattttttgataacttcagaaga

SEQ ID NO: 162810 - DNA, 617 bp, Homo sapiens
ttttatgaatgtctttcgtatatcctttcagggattggacgttcattctaacatacctcttatatattgtgcattaatttaaaaaataaaggctttatggcttcacctctgcctgtgtattgatggtgcttttagtgtttcacctttgctgttctgctaacataycctcaataaatcgatcccaagtgccagaaagcaaataaccctttattttttgcacatttagaatgtttcccccaaaaaggagggagacggtaggtattagagagtgcctactgcgtggtgttcaatcacaataggcccttcgattaatatttattcattttgacatcccaacttgttctagtctgtgatggggtctttaacctggcatctgtggatgggattaagggaggtcccaggatcgcaggaattatattacataaggtaaatacctttgcgttgtgagtcaggtgttacattccatttcacagtggaagattattgagatccagcaacatacccacatcattgataattggtagacatggggttgtataccagctctgtgttactctaaaacacatgcttgcttcaacatgccacactgccttcttacagagctgtgaagaagttga

SEQ ID NO: 162811 - DNA, 617 bp, Homo sapiens
ttttatgaatgtctttcgtatatcctttcagggattggacgttcattctaacatacctcttatatattgtgcattaatttaaaaaataaaggctttatggcttcacctctgcctgtgtattgatggtgcttttagtgtttcacctttgctgttctgctaacatatcctcaataaatcgatcccaagtgccagaaagcaaataaccctttattttttgcacatttagaatgtttcccccaraaaggagggagacggtaggtattagagagtgcctactgcgtggtgttcaatcacaataggcccttcgattaatatttattcattttgacatcccaacttgttctagtctgtgatggggtctttaacctggcatctgtggatgggattaagggaggtcccaggatcgcaggaattatattacataaggtaaatacctttgcgttgtgagtcaggtgttacattccatttcacagtggaagattattgagatccagcaacatacccacatcattgataattggtagacatggggttgtataccagctctgtgttactctaaaacacatgcttgcttcaacatgccacactgccttcttacagagctgtgaagaagttga

SEQ ID NO: 162812 - DNA, 617 bp, Homo sapiens
ttttatgaatgtctttcgtatatcctttcagggattggacgttcattctaacatacctcttatatattgtgcattaatttaaaaaataaaggctttatggcttcacctctgcctgtgtattgatggtgcttttagtgtttcacctttgctgttctgctaacatatcctcaataaatcgatcccaagtgccagaaagcaaataaccctttattttttgcacatttagaatgtttcccccaaaaaggagggagacggtaggtattagagagtgcctacygcgtggtgttcaatcacaataggcccttcgattaatatttattcattttgacatcccaacttgttctagtctgtgatggggtctttaacctggcatctgtggatgggattaagggaggtcccaggatcgcaggaattatattacataaggtaaatacctttgcgttgtgagtcaggtgttacattccatttcacagtggaagattattgagatccagcaacatacccacatcattgataattggtagacatggggttgtataccagctctgtgttactctaaaacacatgcttgcttcaacatgccacactgccttcttacagagctgtgaagaagttga

SEQ ID NO: 162813 - DNA, 617 bp, Homo sapiens
ttttatgaatgtctttcgtatatcctttcagggattggacgttcattctaacatacctcttatatattgtgcattaatttaaaaaataaaggctttatggcttcacctctgcctgtgtattgatggtgcttttagtgtttcacctttgctgttctgctaacatatcctcaataaatcgatcccaagtgccagaaagcaaataaccctttattttttgcacatttagaatgtttcccccaaaaaggagggagacggtaggtattagagagtgcctactgcgtggtgttcaatcacaataggcccttcgattaatatttattcattttgacatcccaacttgttctagtctgtgatggggtctttaacctggcatctgtggatgggattaagggaggtcccaggatcgcaggaattatattacataaggtaaatacctttgcgttgtgagtcaggtgttacattccatttcacagtggaagattattgagatccagcaacatacccacatcattgataattggtagacatggggttgtataccagcyctgtgttactctaaaacacatgcttgcttcaacatgccacactgccttcttacagagctgtgaagaagttga

SEQ ID NO: 162814 - DNA, 465 bp, Homo sapiens
gaccattaatgggacttagaaattctttatatatttattggccgtttggatttcttattttgtaaagatgacaaaaatcttaacgttactatgatgcataaaacacattagttatttactataaagtgatcaccttaaaaatgccatccaggtcaagatacagaatattgccagcaggccacaagccctttttgtgccwtggttcacttttcaagaacttttcccatttttctattggattatctgttcttttctgaaagatttgtaggaattctttataattatgaatacacacatttcatccattatgtgtgtattccaaataatttatcctactctgtgggtttcatttttactctctcagtgctgtcttttgatgtatagatgttattaatatacaaggtagtccactttattatttttattcatgattagtgcttcatcatttgtgtaagcaattttttc

SEQ ID NO: 162815 - DNA, 607 bp, Homo sapiens
catcatgctccccagagagacccaagataagatgattagggttatttttctagcacataaaatagacttccttttctgacatggaggcctgaatcctaaccaaatttccttggtaactgcaacaagaactgtctacatattgttccaattccaccttcagtccttcagggaacagtgtctggtgtgtggcctatgtaacattacacagcactctggagattccacagatctgcaggcctagtaacaaaaakagaagttcaactaaccaatcaaccaacaaggatcactctgggccacctaagtcctgttacagaagacaaagtaatgatcagtctcatcactcccctcctttaaacttcagtgtccttggtactaataacactcatgttggaaataaagccaatagaatcattctgcatatgctttattacctgaaataccacctttaacattaccctctgatgactttttaacagttaacttcaatgtctagcacgttgctatatgtctattttttttcaataatggaagcactagaagggaaatggcattattatgtacacgaaagatttatatacaaagagtatgtaacttattttatttgtta

SEQ ID NO: 162816 - DNA, 425 bp, Homo sapiens
acctttttttaattaaacaaattcctttgataatattttaatgtgactcaagaatccagcactatctatatatggaccctctgcatccatgaaaagaagtacctcatacaattctgtgaatatgagactaaaatacaattccaattatgaggtattttttttttagtctaatgcaggaagaatgaagactagtcacgtcaagaaccacagccttgctatgttttccttgtgtaagtgctgtaaataaattggtgaagggaatgatcaaatgccttattttcctccctaaagttagacttatcaatattcttgaccccagatcattctggtgtctatactgtatagagtgttcgcaaagatgagtgcaatgattcttcccatcctctccacatgcacytctgtggctttgccaccctgcccatcaa

SEQ ID NO: 162817 - DNA, 539 bp, Homo sapiens
ggcgccatctactgccgagaacccagtcaacatctcatggacaaagctgcactaacccccggccggctgagctctgggccccgttagcctttctttgaggctcgtccactaaaaggcagccccagtagtmccagctgaaatgctccacacccgagccccgctggcctgcggaagcgaagactgacaagcactctgtccgcgcgctgagtgggggctcgcggcaccgggtgctccgcccaggccccagcacactcactcaccagcctggtagctcggtacggcccgggccccacgatgcgatgctccatggcgcgtaggcagcagcggccgcacgcgccagcgctgatccccgccagccggaggagcagcagtttgaatcccaagcccgcgggctgcgggcgctgattgggcggcgcggcagcacgtcaccggaaatgcgcggggaggcaggcgtcttctccgagacccgaggcgctgggagctccgggtgcgaacttgcccggggcgaaatctgttgcccaccctggtcccaccgtgcg

SEQ ID NO: 162818 - DNA, 460 bp, Homo sapiens
ggaagctgctgatcaacagttcaagtgttttctattrggagactgcctttccctggtgccggctgtgaccaactattattttagagagacaattaacaaccacctgaccatcacctgatggctgcctgacattcctgatgtgtgtgtgtatgagggggagccctctcctgccctgctcatgcctgactagctacctactgtaacaccttaaccagattttctttgtcatggcttttcttctcaaatttatctctctttacctaaaaaaatgaataaaagcatcttactttggccacttcttcagacttcactctcttgtgaagatccccatgtgcacataaaactaataaaatgtgtatacttttctcctggtaatcttcctggtgtcagtgtggtttctagatacaactggagagctcattaagaggtaaaagggagcttggaggtgatctctggctcc

SEQ ID NO: 162819 - DNA, 460 bp, Homo sapiens
ggaagctgctgatcaacagttcaagtgttttctattgggagactgcctttccctggtgccggctgtgaccaactattattttagagagacaattaacaaccacctgaccatcacctgatggctgcctgacattcctgatgtgtgtgtgtatgagggggagccctctcctgccctgctcatgcctgactagctacctactgtaacaccttaaccagattttctttgtcatggcttttcttctcaaatttatctctctttrcctaaaaaaatgaataaaagcatcttactttggccacttcttcagacttcactctcttgtgaagatccccatgtgcacataaaactaataaaatgtgtatacttttctcctggtaatcttcctggtgtcagtgtggtttctagatacaactggagagctcattaagaggtaaaagggagcttggaggtgatctctggctcc

SEQ ID NO: 162820 - DNA, 460 bp, Homo sapiens
ggaagctgctgatcaacagttcaagtgttttctattgggagactgcctttccctggtgccggctgtgaccaactattattttagagagacaattaacaaccacctgaccatcacctgatggctgcctgacattcctgatgtgtgtgtgtatgagggggagccctctcctgccctgctcatgcctgactagctacctactgtaacaccttaaccagattttctttgtcatggcttttcttctcaaatttatctctctttacctaaaaaaatgaataaaagcatcttactttggccacttcttcagacttcactctcttgtgaagatccccatgtgcacataaaactamtaaaatgtgtatacttttctcctggtaatcttcctggtgtcagtgtggtttctagatacaactggagagctcattaagaggtaaaagggagcttggaggtgatctctggctcc

SEQ ID NO: 162821 - DNA, 460 bp, Homo sapiens
ggaagctgctgatcaacagttcaagtgttttctattgggagactgcctttccctggtgccggctgtgaccaactattattttagagagacaattaacaaccacctgaccatcacctgatggctgcctgacattcctgatgtgtgtgtgtatgagggggagccctctcctgccctgctcatgcctgactagctacctactgtaacaccttaaccagattttctttgtcatggcttttcttctcaaatttatctctctttacctaaaaaaatgaataaaagcatcttactttggccacttcttcagacttcactctcttgtgaagatccccatgtgcacataaaactaataaaatgtgtatacttttctcctggtaatcttcctggtgtcartgtggtttctagatacaactggagagctcattaagaggtaaaagggagcttggaggtgatctctggctcc

SEQ ID NO: 162822 - DNA, 591 bp, Homo sapiens
atatgcagaagattgaaactggaccccttctttcaccatatacaaaaatcaactcaagatggataaaaacttaaatgtaaaacctaaaactataaaaaccctagaagaaaacctaggaagtaccattctggacacaggccctggcaaagatttcatgacaaagatgccaaaagcaattgcaacaaaaacaaaaattgacaagtgagatttaattaaaataagtaaactaaagaactctgcacagcaaagaaagaagaaagaaagaaagaaagaaagaaagaaagaaagaaagaaagaaaraaaagaaagaaaaagaaagaaagaaaaagaaagaaagaaagaaagaaagaaagaaataaataaataaagaaagaaaaaaactatccacagagcaagcagacaacctacagaatgggagaaaatatttgcaaactatgcatccaacaaaggtcaaatatccagaatccataaataacaaaaaaatcaacaagcaaaaaacaacccattaaaaagtgggcaaaggaaatgaacagatacttttccaaagaagatggatgcataactaacaagcatatgaaaaaatgctccaca

SEQ ID NO: 162823 - DNA, 557 bp, Homo sapiens
ctaatgcggccgatctgacaggaggtagaactcaggcagtatgtgaacaacagggagctgctgtaaatacagatgaagcttcactcacttgcccaacgcttacctcctcctgtgcagcctggttccttataggctatggactgataccagtctgtggcctgtgggttgaggacacctcgttcagggaataacaagaagaagaaaatgctacatgttcagtacagatgcaaccatccatttttttcytctgaatattttcaatctgtggttggttgaatccatagatgcagaacccataaatacaaagagtcaattgtatatggcagctgtttttatatgttcagactgagcaggtttctgttaaaactctcttgtaatccccttttcctgtacattctataacttactactcttcttcctctttgtctcttcctcctaaactgttattattgccagttgagggtaagaaggttaggatgtggaatattgtgtactagcccctgaccaaatatataaacaaaggtagattcttctagtcttagaaaaccgaagctcat

SEQ ID NO: 162824 - DNA, 557 bp, Homo sapiens
ctaatgcggccgatctgacaggaggtagaactcaggcagtatgtgaacaacagggagctgctgtaaatacagatgaagcttcactcacttgcccaacgcttacctcctcctgtgcagcctggttccttataggctatggactgataccagtctgtggcctgtgggttgaggacacctcgttcagggaataacaagaagaagaaaatgctacatgttcagtacagatgcaaccatccatttttttcctctgaatattttcaatctgtggttggttgaatccatagatgcagaacccataaatacaaagagtcaattgtatatggcagctgtttttatrtgttcagactgagcaggtttctgttaaaactctcttgtaatccccttttcctgtacattctataacttactactcttcttcctctttgtctcttcctcctaaactgttattattgccagttgagggtaagaaggttaggatgtggaatattgtgtactagcccctgaccaaatatataaacaaaggtagattcttctagtcttagaaaaccgaagctcat

SEQ ID NO: 162825 - DNA, 367 bp, Homo sapiens
gaaaaaaaagacagtgcaaacttgggatacttctatagaaagaaagctcatacttggaagatattatgttctgtgcttcatacttaaaagaaatatctataaaaactgatgccaactttaaaacattattttggaggtgaagtaagtaatttctctgaaggagtttatcccagtaaatagaagactggaaggaaattgatcagtcttcaaattttaagaactattagattttatatggacttgaaggaatttgacctgaaatagtttagtgcaaaaamtttttacaagctgagacctgtactatcatcactcgaaatattgaactgtaagatgatgtatagacagaataatagccctaaaatatgcc

SEQ ID NO: 162826 - DNA, 454 bp, Homo sapiens
tatgtatgaccaggcttcattactgcagttcctggttagataacgttttggatcccagaagtagtgactattgattttagagtactgactgatgtcctccttagcttatatgtagctaccaggtagaaatagcacttcctaatatcctaaacttccaattatattaattatgacttgaatttctttttcattgcccattttctctcattcatcctctcagattaaagataggcaagctcatgtagagacatragatgagaactactaaagatgttcgtcagtaatggttatgatacaaggataattttaagtatttctataactattgttttgttttcacatgtatacatatgtaactaacctgcacattgtcgacatgtaccctaaaacttaaagtataataaaaaaaaaagaagcctctccttttgtctcacactttgttgccctgatttcc

SEQ ID NO: 162827 - DNA, 622 bp, Homo sapiens
ttttatcatattttctactttcacaaaattcataaaccatggcaggaaaataattagaaaagtgtggttttaaaagctttcaccttctgatagmcattatttataataaatatttgtaatatcataagccttctacagaaaatattttaaaatacagtttcacacataattatggcttctctataggtataattcttaattggatggaactgttgggctttatggagagattgtagatcattgaaatattagagtaaattgtgtatgtaggaattaaatctggaaaatactaccaaaaaggtgagcattttttttgatgtaggtatccttcaaaattatttggtccacttatcattttacagaagtagactacattatgaaaactacatacacttttttccctcactttatttttctcttcagactaatataaacttaacattaagccagatttttcatctaccaaatatccaatattaatgttttcacttaggataaagcacatggttatacttaagatttcaattacacattgccttaaaaccttgaatactagttagaacgtttttactcaaaacataaggttatgccaaaatgtccttcatactttatattctaccaa

SEQ ID NO: 162828 - DNA, 622 bp, Homo sapiens
ttttatcatattttctactttcacaaaattcataaaccatggcaggaaaataattagaaaagtgtggttttaaaagctttcaccttctgatagacattatttataataaatatttgtaatatcataagccttctacagaaaatattttaaaatacagtttcacacataattatggcttctctataggtataattcttaattggatggaactgttgggctttatggagagattgtagatcattgaaatattagagtaaattgtgtatgtaggaattaaatctggaaaatactaccaaaaaggtgagcattttttttgatgtaggtatccttcaaaattatttggtccacttatcattttacagaagtagactacattatgaaaactacatacacttttttccctcactttatttttctcttcagactaatataaacttaacattmagccagatttttcatctaccaaatatccaatattaatgttttcacttaggataaagcacatggttatacttaagatttcaattacacattgccttaaaaccttgaatactagttagaacgtttttactcaaaacataaggttatgccaaaatgtccttcatactttatattctaccaa

SEQ ID NO: 162829 - DNA, 527 bp, Homo sapiens
agtcatgtgctgctgcataatgacatttcagtcaacaatgaaccacatttatgatggtggtttcctgagattatactaccatatttttactgyagctttcctatgtttacatatgtttaaatacacaaaacttaccattgtgttatagtttcctaccgtattcagtactgtcacatgctgtacaagtttgtaacctaggaacaataggctgtaccatatagcctagttgtgtactgggttgtgccatctaggttcatgtaggtacactatgatgtttgtacaatgataaaatcacctaatgatgcatttccacagtataaccctattatgcaatgcataaatgtatgtatgtacatgacataagttatatattttttgtacattgccagagcccttaaattgttgttgataattgtgccgttttatagttgtgctacaggaagaggatttgccaaactttttacttcatacgaaagtgcccaaattttgatactttatatttgaatctcacttgaaggcaggtaagt

SEQ ID NO: 162830 - DNA, 365 bp, Homo sapiens
ggtattaaaacccatgaatacattctaatactgtaaggttacatgtgccttaaatggttcccaaatgaatataacattaacaaacagaaatgctttaaaattgatcagaatktgcagtcaaccagttcttacacttcatatatttgatttaaaacctcacctaagacacaaggaaaggagacaagagcctgtcattgcagctaaagcatggagtttggcctgatcttatacattaatgtaggatagaaaattaatttccctgacaacccagcacagcaagacggaaatgcagcagcacagccagggaaagatgatggcctctgttttggtggtcttgcccaatttcttccattgttatcatttac

SEQ ID NO: 162831 - DNA, 483 bp, Homo sapiens
  misc_feature (1)...(483): n = A,T,C or G
gaacaaagcttcacagtgtggaagaagacccgagcaggttgccaatgctggcttgggcagcctgcttttattctcttatctggccccacccacatcctgctgattggtagagccgagtggcctgttttgtcagggcgctgattggtgsgtttacaatccctgagctagatacaaaggttttccaagtccccatcagatgagttagatacagagtttggacacacaggttctccaacgtccccgtccagagcagctagatacagagtgtngattggtgcatttacaaaccttgagctaaacacagggtgntgattggtgtgtttacaaaccttgagctagatacagagtgctgattggtgtatttacaatccctgagctagacataaaggttctccacgtcctcaccagagcagctagatacagagtgtcgattggtgcactcacaaaccttgagctaaacacagggtgctgattggtgtattt

SEQ ID NO: 162832 - DNA, 483 bp, Homo sapiens
  misc_feature (1)...(483): n = A,T,C or G
gaacaaagcttcacagtgtggaagaagacccgagcaggttgccaatgctggcttgggcagcctgcttttattctcttatctggccccacccacatcctgctgattggtagagccgagtggcctgttttgtcagggcgctgattggtgcgtttacaatccctgagctagatacaaaggttttccawgtccccatcagatgagttagatacagagtttggacacacaggttctccaacgtccccgtccagagcagctagatacagagtgtngattggtgcatttacaaaccttgagctaaacacagggtgntgattggtgtgtttacaaaccttgagctagatacagagtgctgattggtgtatttacaatccctgagctagacataaaggttctccacgtcctcaccagagcagctagatacagagtgtcgattggtgcactcacaaaccttgagctaaacacagggtgctgattggtgtattt

SEQ ID NO: 162833 - DNA, 483 bp, Homo sapiens
  misc_feature (1)...(483): n = A,T,C or G
gaacaaagcttcacagtgtggaagaagacccgagcaggttgccaatgctggcttgggcagcctgcttttattctcttatctggccccacccacatcctgctgattggtagagccgagtggcctgttttgtcagggcgctgattggtgcgtttacaatccctgagctagatacaaaggttttccaagtccccatcagatkagttagatacagagtttggacacacaggttctccaacgtccccgtccagagcagctagatacagagtgtngattggtgcatttacaaaccttgagctaaacacagggtgntgattggtgtgtttacaaaccttgagctagatacagagtgctgattggtgtatttacaatccctgagctagacataaaggttctccacgtcctcaccagagcagctagatacagagtgtcgattggtgcactcacaaaccttgagctaaacacagggtgctgattggtgtattt

SEQ ID NO: 162834 - DNA, 602 bp, Homo sapiens
aaaaaatagttgatgaaataaaatacaataatgttgacaaaatacaggtgagtcagtgattccatattttgagatttgaagaaaatctttaaacaayagtcaggtaagagagttatactaatcatcaaaatgatactctccccaattccaatttcataaatggttagatgaagaattaacaccagtaataaaaagacaacactctagttggaatgtgtctcaaactcatgatttggtgaattttgcccatccattgtctcataccttaactaaagaagaaagaaaggagaagtgaaacaaagaatagggctaacaaagttataagttaacagttaaaacaactatatacccaatccaggcttccagaatgcacctacaaacctcacaatggacctaaccctttgctttgcagttattgcaggaaacctgatcactttaaaaaggattgcagaaaactaaagtgtgaggaatagcaccagatgaagaaaaaaataaaaggaagaatagggattctccaaggaacttgaagtgatcttttctttgtctcctactgacactctgggaaaatagaaattattttaaatgaagaactcatacaaaca

SEQ ID NO: 162835 - DNA, 586 bp, Homo sapiens
ttgccttacatttttatgaggttttattttataagtctcaatggtatgcaatttggtgaataaaaattcatgacattttaaactggactactcacttcaacaataaaaactggttcctgggactcatttaatgcttaaaatttttattgtgcataaaaggaaaatagttctacagggcttttaatataataagctcargatcatagttgtctctcccgtcctgttctgcaggagaacgtcttctaacttagtaattttttgataatttgataattatattattacatattagtatatcttatatatattatttgtttggagatttataatttatacttacgtatatttatccattttggtaggcttaataatcaccattcaaataggtctctgcctaaatcccctgaatctgttatgtttacatacatgtcaaaggggacactgcaaatgtgattaagggtaaggagcttgatatagggcgattaccctgagaccttaaaacaataaaatgttgagaagaaagaagaataatatagtgagaccttttatgtacgaaaacattgcttaacctgaatatattttaaag

SEQ ID NO: 162836 - DNA, 586 bp, Homo sapiens
ttgccttacatttttatgaggttttattttataagtctcaatggtatgcaatttggtgaataaaaattcatgacattttaaactggactactcacttcaacaataaaaactggttcctgggactcatttaatgcttaaaatttttattgtgcataaaaggaaaatagttctacagggcttttaatataataagctcaggatcatagttgtctctcccgtcctgttctgcaggagaacgtcttctaacttagtaattttttgataatttgataattatattattacatattagtatatcttatatatattatttgtttggagatttataatttatacttacgtatatttatccattttggtaggcttaataatcaccattcaaataggtctctgcctaaatcccctgaatctgttatgtttacatacatgtcaaaggggacactgcaaatgtgattaarggtaaggagcttgatatagggcgattaccctgagaccttaaaacaataaaatgttgagaagaaagaagaataatatagtgagaccttttatgtacgaaaacattgcttaacctgaatatattttaaag

SEQ ID NO: 162837 - DNA, 586 bp, Homo sapiens
ttgccttacatttttatgaggttttattttataagtctcaatggtatgcaatttggtgaataaaaattcatgacattttaaactggactactcacttcaacaataaaaactggttcctgggactcatttaatgcttaaaatttttattgtgcataaaaggaaaatagttctacagggcttttaatataataagctcaggatcatagttgtctctcccgtcctgttctgcaggagaacgtcttctaacttagtaattttttgataatttgataattatattattacatattagtatatcttatatatattatttgtttggagatttataatttatacttacgtatatttatccattttggtaggcttaataatcaccattcaaataggtctctgcctaaatcccctgaatctgttatgtttacatacatgtcaaaggggacactgcaaatgtgattaagggtaargagcttgatatagggcgattaccctgagaccttaaaacaataaaatgttgagaagaaagaagaataatatagtgagaccttttatgtacgaaaacattgcttaacctgaatatattttaaag

SEQ ID NO: 162838 - DNA, 615 bp, Homo sapiens
cgtgactttttaatatgcttttgtatataacagttttgaatgtacttaggtaatcaactgttttccatattataagctttttctattttatttgtattaaaatgttagttaagtaaaaaaaatagtttatttccaaagcaaattgtagatatgaagacagtggttaacattctatattttggtataagctttggtataagtttgaatttgctatatatgttattagctttctactactgaggcacttattttatctatatctaagttacttaacttccatgagactcaattacatcatcrttgaaatggcttaataagactgtttgggaaaatggaaatgattgtcttagtctgtcttgtgctgctataagaaaaaaaatacctaagactggataatttataaaggataataatttgttttctcaaggatctggaagctagaaagtctatgatcaaggtgctagcatcttaaatggcccttcttgctgtgctataacatgtcagaagacatcacatgaggaagacagagagaaaaggggggtgaactcatctttttattacgaatctactccaacgataatgaacccactgttgaaataatggaattaattcatt

SEQ ID NO: 162839 - DNA, 456 bp, Homo sapiens
tgacggtgctttatttattccctgggatactgctccragagcaatagctttcttgtcagatttattttctgatctttaaccttgatatgtgtatttattagattaccactggcatccatgctttgttaaagaaatttgagtgtttaaaaaagagtgaggtttgtagaaatatcaacttttgtacacagcagagagtccaaagggcaatttgtggctgatcacagagtagaaaatataatcctaaactgtatagaagcagggtttcatagattgccttcaccccacctttgaaccaagtgaatatctcaagaacatgtatgctgtgttctttatgagaataaagtttgaagcaaatttgtcctatgtttaagttctttttttatcatgtacttatgtggcttttttacaagttatttaatgtccctgaggggcaatatcttcttttgtaaaataagg

SEQ ID NO: 162840 - DNA, 459 bp, Homo sapiens
attccatcattctctccctcaaggtgaagtcttactgctgcctcttaattttagcaacatattttactaccttgttatttcccacagcagctagcattgtttcttattgtgagtagcctctctgttaatcatagttggttttctaccattgcaaaacaaaccgactcaraacattggattaaaatcatttattatttcttaagattctgtggttacaccaggcagtttttgctttgttttgttttgttttgtttttaccgacacctccttgtctcattcatggagttgcagtctactgtgactcagcagaaaatggatggtttatgatcacctgactcccatatatctggagttgtgctgatggcaattggcaggtcctccctctttcaagctggtctctcatcagttagcagtgtggcttggcttccttaaaggagagaaaaagcatgaacaacaagg

SEQ ID NO: 162841 - DNA, 684 bp, Homo sapiens
atgaggtctataatcattctgttttgagtcctggaatttttttttcatagtcgaagaaactagtgatcttgagaacggtgttgtgcttatactgcaatctgatagtaattatatgtatactgcaaattcatataatttttctctattttttgtttcacatagttttaaataatatgcagaaatcacagaggtacattattgccaagatataaagatcatctgttgaaatgattaattattaatgtattcacatgctagctgattaaaaatatttagtgtaagtgtatgtattagggttctctaaagggacagaactaatggaatatatatatatttatatatatatatayatatatatgtatgtatgaatttgttaagtattaacttacacgatcacaaggtcccacagtagcccgtctgcaggccgaggagcaaggagagacagtccgagttccaaaactaaagaatctggagtccaatgtttgagggcaggaagcatccagcacaggagaaagatgtaggctgggaggctaggccagtctcttttcacatttttctgccggtttatattctagatgtgttggcagctgattagactgtgcccaggcagattaagggtgggtctgcctttcccatcccgctgactcaaatgttaatctcctttggcaacaccctcacagactc

SEQ ID NO: 162842 - DNA, 474 bp, Homo sapiens
ttaatagtgatatgatcttggacaagtggtttaacatccatgaggcaaaattcccataacagtaaattttaaaaaagaataataatacttttcatgtgcatttctgtgaagattaagtgtaatgcaataccagatgtggtaagttgtttgaaataatatcataatatccacaaatattcttttctaatatccatggctttttacaatggctttgmagcaactttgatgaagggctagtttattttttatctgaatttagatggccttatgacttgctttgatgaatagaatgcagtacaagtcaatacctaaaatctcagactcaaaatgttgtagaaaccaagaaactcttattttagatcctatgaatctctgttgtcaatatctcgtgttcagtatgtagttgggcagtttttttgtcagccaaaatgaaaatcttctcttctaacaattaagtctattcatatttatttc

SEQ ID NO: 162843 - DNA, 592 bp, Homo sapiens
ctacagattatggcagatttttatctatagtacttacatttgccaatctttccttatcctaaaatattctatgtaaactttttttttttttttttttgagatggagtcttgctctgtcgcccaggctggagtgcagtggcacgatctcggcccactgcaagctccgtttcctgggttcgcgccgttctcctgcctcagcctcccgagtagctgggactacaggtgcccgccaccacacccggctaattttttgtacatttagtagagacggggtttcaccgtgttagccaggatagtctggatctcctgacctcgtgatccgcccgccttggcctcccaaagtgctgggattgcaggtgtgagccaccgtgcccagcctataaacttttaatggtaatataaaaaaaatccctraaagctatattacattaaagagaaaaaactagacaacaaaattaaaaattaaaagtatttccaaactgcaatacaagccaggtctagttaagtgtatatagtcccatggacacaaaagtgtaacaaatgaaactatgcgtaaactctgaacaactatatgctaaactgtagaaccaaa

SEQ ID NO: 162844 - DNA, 397 bp, Homo sapiens
atggggtcgctcgcggcggcagcgggggcggtggccccaacgggaaatccgggaaggctgcggggttggcaccggccacaaggtaggaacgcggggagcgcgcggaggcctccgcrccttcctcctcctcctttatctttagagcgggcggctggaagtcgctatagagagggtacgcgtcgtccttgggctcggcgtcgggcgggtacgcgcagtcggggaagtcgcctacagcgaccggggtggacgaggcacagggtgaactccgcggcggggcaaaggcgctggcagccccggccccgccgtcgtaactttcgtcttccagcagctgccgagtgcgggctgccaataaggcgtgattgagaggcaggataggcacgtggatgaaatccatcac

SEQ ID NO: 162845 - DNA, 498 bp, Homo sapiens
ctgcacaccctacaaagcaaaaacacaatagaaacaacaaagcaaacagctaacaactaaacaagggatcaaaacctcacatataaaaattaaccttgaacgtaaatggtctaaatgcctgatatggtttggttctgtgtcctcacccaaatctcacgttgaattttaattcttaatgtttggggagggacctgatgggaggtgattggatcatgggggcacatttcccccatactgttgttgtgataatgagtgagctctcaggagatatgatggtttaaaagtggtggcacttcccctctcactctctctctctctctctgctgctctgccctggtaagacgtgcttgcttcccatttgccttycaccatgattgtaagtttcctgagacctcctagctatgcttcctgttaagcctgcagaactgtgagtcagttaaagttcttttcttcataaattacccagtctcaggtagttctttataacagtatgagaat

SEQ ID NO: 162846 - DNA, 625 bp, Homo sapiens
caatgcccatacccctattgtatcttggaagtaactaacttgtttttgatattacaagatcataggtggaagggacttgccttgtctcagacgagactttggtcttggacttttgggttaatgctggaatgagttaagactttgggggactgttgggaaggcatgattgtgttttgaaaactgagaaggacataagctttgggaggggccaggggcagaatgatatggtttggctctgtatccccatccaaatctcacgttgaattgtaattcccaatgttgagggaggaacctggtaggaggttattggatcatggaggcaaatttcccccatgctgttgtcatgayagtgagtgggttctcccaagatataatgatttaaaagtgtgtggcactcccctgacccacctctcctactctgccatggtaagatattcttgcttccccttcaccttctgccttgattgtaagtttcctgacgttgcctagctatgcttcctgttaagcttgtagaactatgagtcatttaaatgtcatttcttcataaattacccagtctcaggtagtactttatagcagcacaagaatggactaatacaatgtcccatttaaaagtcacagagtg

SEQ ID NO: 162847 - DNA, 476 bp, Homo sapiens
cttctttttggattaccttattcaatttccatcaaggaaattgttagttccactaaccagacagcagctgggaaggcagaagcttactgtatgtacatggtagctgtgggaaggaggtttctttctccagktcctcactggccatacaccagtcccttgttagttatgcctggtcatagacccccgttgctatcatctcatatttaagtctttggcttgtgaatttatctattctttcagcttcagcactgcagagtgctgggactttgctaacttccatttcttgctggcttagcacattcctcataggcccagctcttttctcatctggccctgctgtggagtcaccttgccccttcaggagagccatggcttaccactgcctgctaagcctccactcagctgccaccacactaaatccaagcttctctaagatgttgcagactttacaggcaagcataaaaggcttgatcttc

SEQ ID NO: 162848 - DNA, 532 bp, Homo sapiens
aatgacttaaaataataagcaaataggccagtcacagtggctcttatctgtaatccaagcactttggaaagctgaggagggtggaccatttgagtccagaagttggacaccagtctgggcaatatatggagatctcatctctataaaaaaaatatgaaattattcaggtgtggtagtcccagattttcaggaggatgaggtgggaggattacttgatcccgggaggtcaaggctgcagcgagccatggtcgcacmattgcacttcaatgccggtgacagagcaaggtcctgcctcatcatcatcatcatagtaataacaataataagcttcacaccacaccctaaggataaactaagtcaaacagaaatatttaagtttgttttattggttaaagcagaatagtaaaatcattttaatgattttaacatgtcaagtttaacaaagtgcatgataaatataaaaattagttgtttaaaaatcatcttcaaaatatgtatttcaaatcaataaggtcctctatattaatttgaa

SEQ ID NO: 162849 - DNA, 532 bp, Homo sapiens
aatgacttaaaataataagcaaataggccagtcacagtggctcttatctgtaatccaagcactttggaaagctgaggagggtggaccatttgagtccagaagttggacaccagtctgggcaatatatggagatctcatctctataaaaaaaatatgaaattattcaggtgtggtagtcccagattttcaggaggatgaggtgggaggattacttgatcccgggaggtcaaggctgcagcgagccatggtcgcacaattgcacttcaatgccggtgacagagcaaggtcctgcctcatcatcatcatcatagtaataacaataataagcttcacaccayaccctaaggataaactaagtcaaacagaaatatttaagtttgttttattggttaaagcagaatagtaaaatcattttaatgattttaacatgtcaagtttaacaaagtgcatgataaatataaaaattagttgtttaaaaatcatcttcaaaatatgtatttcaaatcaataaggtcctctatattaatttgaa

SEQ ID NO: 162850 - DNA, 583 bp, Homo sapiens
atatcactatcaatatcaggacatataaacttctagttcactggaagaacataagaattaataggtatattaaagaacacttcagctgacctattttagacctgtatcaatggattgtgcatttaacttagcatttgctcaaaagagaacctggccttattctacatgcttcttaaatacttggtttgacttagtttacagctgcatgtaatctggatcttttttttcccttctttttaatgaatacttggatctcttagtaaacttttgtcttctttatataaatctcaagtatttgccattaagattattcctagatgatttatctttttgttgtaattttaaaaattgcttcattaagttttctaatgccttcctgctgatatgggagaaaggtattaatatttaaatatttatcttatatccagccactttgttacacaggcatatcttggagatatagccggtttggttccagaccayggcaatgaaggaaatattgcaacaaagtgaatcacatgcatctttttgtttcccagtccacgtagaagttatatttacactatactagaatgtattaagt

SEQ ID NO: 162851 - DNA, 482 bp, Homo sapiens
gaactacaggcatgagctcaccatgcctggccattccttggggctttatagaacaagtataatcctttttctttatgacaataccctgagttcagaaatctcagagacaaatgtttacagagaccaggtaaataagtagctagagtgacaagacttaagaaaagagaccattggcgtaccaccagtttgtggagggaactggaaaaactggaatacacatgccccatccaaaagcaaccattgcaactaaactttaacagattgttgccacctaagtaattcacggatggtctcataattctggtcagcattgtctgagccaaacaaaatgtatctatgggcatgatcagatactagagccagcagattgcaacctctgcttagataattgcaggtatcagccttcccttggctaaacagctacttcatactgataagtagccyttgcctggcacaaagcaggtggggctgaatccagcctg

SEQ ID NO: 162852 - DNA, 618 bp, Homo sapiens
gaaatcctaaatttatcaatgtgttcaacttcattatttcttcaaattctgtttaggcatatcaagtgacttaagattctgttataactttctagaatctccccagtcttacttgaaactggctttgtaaaaaaaaaaaaaaagaaagaaaaaggtagaactatatggataattaattaacattttcctaaatgttatttaagtctargcaccaaaatatataagatttgaactggccaggtgcagtggctcacgcctgtaatcccagcactttgggaggctgaggcaggcagatcacttaaggtcaggagtttgagaccagcctagccaacacagtgaaaccctgtctctactaaaaataaaaaaattaggtgggcttggtggtgggcacctgtaatcccagctactctggaggctgaggcaggagagtcacttgaacctgggaggcagaggttgcagtgagcagagattgtgccattacactcctgggagacagaatgagactccgtctaaaaaaaaaaaaaaaaaaatgagcctaggcaaggtggtttatgcctgaaactccagcactttgggaggattgcttgaggccaggagttccagaccagcctgcaacaa

SEQ ID NO: 162853 - DNA, 618 bp, Homo sapiens
gaaatcctaaatttatcaatgtgttcaacttcattatttcttcaaattctgtttaggcatatcaagtgacttaagattctgttataactttctagaatctccccagtcttacttgaaactggctttgtaaaaaaaaaaaaaaagaaagaaaaaggtagaactatatggataattaattaacattttcctaaatgttatttaagtctaggcaccaaaatatataagatttgaactggccaggtgcagtggctcacgcctgtaatcccagcactttgggaggctgaggcaggcagatcacttaaggtcaggagtttgagaccagcctagccaacacagtgaaaccctgtctctactaaaaataaaaaaattagstgggcttggtggtgggcacctgtaatcccagctactctggaggctgaggcaggagagtcacttgaacctgggaggcagaggttgcagtgagcagagattgtgccattacactcctgggagacagaatgagactccgtctaaaaaaaaaaaaaaaaaaatgagcctaggcaaggtggtttatgcctgaaactccagcactttgggaggattgcttgaggccaggagttccagaccagcctgcaacaa

SEQ ID NO: 162854 - DNA, 581 bp, Homo sapiens
tgtgaactaccagcagcccaaataagcatccttttctccttcaatcatttctcataaagcagattctactcatctcaccatccatctttttcccctaacatatcagaattcatcaaagtagaaactccagaaatcatccagaaatacaaatgtgatctgaccagcacgggtataaactttctctttccttaatttagaaaaaggattattaattttgagtcttagatctcataaaagtagagctggattgattttaagggatcaatgaacctactgaaattgtataaaaagattttgtggggctggcaaacaaatgcttttcttttaacatattcttaaaagaacaaaacctcaaagaagatttaacaaccactatagactaagtttcaattaatgtagtctgtagcattagattttggaaggctgttctatcagaatatggaccaatactgagmgtagtcgctactaaaactctttgtctttttattcatatcttctcctaaaaagctccatgacccctgcagaatactggtataattacccacacctcacccacccagtgattgttgatgtaactaatt

SEQ ID NO: 162855 - DNA, 321 bp, Homo sapiens
aacattaactgataagtatgaggtgggaagaaacatctgaaaatattggattacaatttccttaaattcttactcaaactgttagagccatttgaaccagagtgactccakcttgaataggggctgggtaaaataaggctgagacctattgggctgcattcccaggaaattaggcattctaagccacaggatgaggtaggaggtgggcacaagatagaggtcacaaataccttgctgataaaacaggttgcagtaaagaagcagaccaaaaatcaccaaaaccaagatggccaggaaagtgacctctggttgtccttactg

SEQ ID NO: 162856 - DNA, 321 bp, Homo sapiens
aacattaactgataagtatgaggtgggaagaaacatctgaaaatattggattacaatttccttaaattcttactcaaactgttagagccatttgaaccagagtgactccatcttgaataggggctgggtaaaataaggctgagacctattgggctgcattcccaggaaattaggcattctaagccacaggatgaggtaggaggtgggcacaagatagaggtcacaaataccttgctgataaaacaggttgcagtaaagaagcagaycaaaaatcaccaaaaccaagatggccaggaaagtgacctctggttgtccttactg

SEQ ID NO: 162857 - DNA, 578 bp, Homo sapiens
tactttattttgagttccttggctgctgaggtttttatttggaaaagaaacatcaaaataagtcataatagcagcaatagtgttttgagaaagaattagaaatgaaataatttctatatgatgatgccagagacaagctttatttactgtggcattttaatatgatattacatgtttattttttcaagttttaagattaccttattcaatactctttcccatttttattatttacataatatctttttaatgacactgccaaaacatggtagttgtcctacttaagataaatgtctatgtctcttcttttttttgctcaatccaatttgctgtggtttttataatataaatttctcaactacacatgtaggcactttttctatttttagttggctttttcattgcccttgttctccaaagactttgaagaaaatttgcaactctgaggagtttcatgctgtaactttgacttgctattttatwtttggtcaaactatccaacccaaacctctatcagctccagacttcattcctttggtctataccaccttctcccttctctgaactctaacactaga

SEQ ID NO: 162858 - DNA, 578 bp, Homo sapiens
tactttattttgagttccttggctgctgaggtttttatttggaaaagaaacatcaaaataagtcataatagcagcaatagtgttttgagaaagaattagaaatgaaataatttctatatgatgatgccagagacaagctttatttactgtggcattttaatatgatattacatgtttattttttcaagttttaagattaccttattcaatactctttcccatttttattatttacataatatctttttaatgacactgccaaaacatggtagttgtcctacttaagataaatgtctatgtctcttcttttttttgctcaatccaatttgctgtggtttttataatataaatttctcaactacacatgtaggcactttttctatttttagttggctttttcattgcccttgttctccaaagactttgaagaaaatttgcaactctgaggagtttcatgctgtaactttgacttgctattttatatttggtcaaactatccaacccaaacctctrtcagctccagacttcattcctttggtctataccaccttctcccttctctgaactctaacactaga

SEQ ID NO: 162859 - DNA, 578 bp, Homo sapiens
tactttattttgagttccttggctgctgaggtttttatttggaaaagaaacatcaaaataagtcataatagcagcaatagtgttttgagaaagaattagaaatgaaataatttctatatgatgatgccagagacaagctttatttactgtggcattttaatatgatattacatgtttattttttcaagttttaagattaccttattcaatactctttcccatttttattatttacataatatctttttaatgacactgccaaaacatggtagttgtcctacttaagataaatgtctatgtctcttcttttttttgctcaatccaatttgctgtggtttttataatataaatttctcaactacacatgtaggcactttttctatttttagttggctttttcattgcccttgttctccaaagactttgaagaaaatttgcaactctgaggagtttcatgctgtaactttgacttgctattttatatttggtcaaactatccaacccaaacctctatcagctscagacttcattcctttggtctataccaccttctcccttctctgaactctaacactaga

SEQ ID NO: 162860 - DNA, 611 bp, Homo sapiens
ccttcacaaacaattgctatacatgtattctcctggctctgcagtctaagatttaaccaagtgagaatttcatccttgttattctttcaagtacttggctcctacagagctgtgctgagggagcaaaaatagctgataagtaaagtgactgaaattcttctgtgatgatataatccaagtyctctctgttgctgggcgatatactctctttgggtataaattagaggaatagtgactagagattcttttctctgtgtgctattattttttaaagtaatttacgttagggaattttgttttcttaatttacttttgacaccttactgtactctgaatactactttgatttgttatatgactttatacattcagttttattttcaaccaaatgaggttggttgaattaagggttagaataaatagggcatttataaaaaatggtccatttatcatttctgagctactctaatatctgtggttgaacacataaacctaagctatttcttattagcataagtttaatgtatgcaatttctgactcatcagtaagactcagtgtgttctctaattttttatatttctgtaacacatattagggtcctagacaaata

SEQ ID NO: 162861 - DNA, 313 bp, Homo sapiens
tgcctctcccaaacctaaccacccccaagtcttgccatggtccagtctgtaattcccagcccttcattactccattctctcatagytctgggcccacatctcctgtctgtgtctctccctcagactgttctctgagctctagacggcaggtgcagtgctcgcagacttgtgcatctgagcagcctgcaaacatgacccaaaccagcacagcccgagcaagctcgatgtctgtgccctgacgtctgctcttcctaggcggtcacggtctcaacgaacagcactgtcatcactaaggataacattgagagtcatc

SEQ ID NO: 162862 - DNA, 467 bp, Homo sapiens
ctcacttctctccgcccccttctgagactctgtcatggcagtgttctctcttatggcaatgcctagaaatacagtggcttttactttattaacaggtttcctggtgacattctggggagtyaaacacccctgaagtcttggcttattttcatctttgacaagatgatagctttgggttggctgtttggaatactaggttctggtgacaaactctgagtgactgtttgagaaaaggcactccaaatggcctgtgatgaagactcactttcatttccctttcaccaggggctaggcaagggctgcatagcttctgttagtgtctagccttttttcagaagccagtctatagaacaagtcaaaggtatagcttctgctttcttggagttgaaatgtgatacactcagaggacgctcttttaagccaaggcttctattaaaatgttaagcatataacctagtgagaggaga

SEQ ID NO: 162863 - DNA, 503 bp, Homo sapiens
cctctacatctgggttggccacaaatcctactgaaattcctggtaggatggtatctatgtttgtctctggcttgtataaaaaaaacttcatatttttatggcattttctactttttcaggcaygcttatatttcaaaatagctttgcaagataattaccccagcttcatacgtaagccgcataaatgaaagacagtgagttcatttacatttgtgatagtgacaattttgagttcagaaaggtaagttgttccctatgggcatgtgatgaggtggggttagggagaaacggagctggcctctacatcttctgacctcactctcagtatactattttatatgtggtacattttctcactggactccaatgtaaatagaacctgccctgccttatagtgatgaggtaaaggattattttggggggactgggggacagaagaagacataggaaaaagaggacatggggatgtgggcttcctatgcgatctctggaccctccaagtg

SEQ ID NO: 162864 - DNA, 489 bp, Homo sapiens
gggatcacaaagacaataacagctataaataaataggcaaagaaaatctcacttacatgtaattgaaatagaggagtcagactaaggagatagaagaacagcaacaacaactaatatttatgtaaagctatggcacaaaaactctttctgaaaataaagacaatyttcatatttcaaagatctgttgatatgttctcaacagtcttaataaaacaatctgactttaaagacaaaggaaaaaatcctttaagtgctcaatacaatcctccaagccatttacaaagaaaagaaaattgtgctggcgtcagcattcttaacttcaaaagagaggcaagacaatagaagagcaatattgtaataaataaatttgtaagaatagaagaacactaaatattatgagttctaataaagtaataatttaactaaaaatgtgaagagaaagaggaaagggaaataagctcattgatttctagatgctaataggtaggt

SEQ ID NO: 162865 - DNA, 571 bp, Homo sapiens
gttttaagccttagatgttttttatagatttctcaaaatcaaattctaaattaaatatttttcttgaccttaaattatctttaaaattttacagatgggcccttggtgaatctcaaaaggctatctctttttatacaaaagatattaaatgaatcatatttatttcatataataaattgagaagcattctcaaataattagtaatactaaaccttctttgagttatacttgtatgtatttattattaatatgtattccagaaattgyatgaaattcttacatacttgatcataccactagactgggtaagaattcctgaactttaattaagagactgatggtttcatcaaacttctaacccaacatcataagaagaattaattgaataccaaaataattctttggcaggtttttattctaattcagccagtactaaaattgttaaattatgtgatttgaattaactaccttgattgatccaagtcaaattttgaattaactaccttgattgatccaagtcaaattttctgatctagtttggatgtttgtctgctccaaatctcatgttaaa

SEQ ID NO: 162866 - DNA, 496 bp, Homo sapiens
aattgtttttgagtccttagaatttccaaagacactttttgcatatgaattaaaaatatttataaaataaaagtcagtcttaaagatctctgctgttataagatttgctgaggtccagatacataatgcaagtgaggccactgaaatacaaaatctaaaagtcattccagaaaagtcaagcttactatttggtaaaatgtccagaatatcgttaagataaaaagttaatacataatgagtacaagttatgaccatttacaatcctcttaaagtcagaaaatcagaaatgaggaaattgtatagccaaattttgtacttgtgtaaattaattaacgcagcataaagcaygatttatgaatacttgttaagatttgaactaataggatgaaaggagctgtttagatactctaaatgaatggtgttacaatggctctacatttttgaagtccctctcattttgttctgtatcatttgctctgtaatcagtggttaagtt

SEQ ID NO: 162867 - DNA, 592 bp, Homo sapiens
acacactgaaacaatcagattaaatttgaatatacattaatatatagatagacatcaaaatataataaagtccttggttaactgctggaggagcaaagacttaaagggctaagatctcagagaaaaggaaataaaaaaatagtaaagaaattttgcctaagggtagttgtctgtttctggaaaatcgacatagaaagttgctgctaaagaaaagacaagccagctgaggtttttgaagacttatgggacttgggaggcaacaattggagttcggggctataaaagaatctagtacttacagaccaatataccaaagagaagcaaggcacataaacgtgagttccttattttggtatttttcccataaggtattttcccgattctaaatakataatgaccagatgggcaagaagccaaaattaaatataaataaaattaaaaccaggacattttcagcagtaacgttattctgcagtgacaaaaactgaagttcagtaagcaacctttggaaatgtcttcagctcagttagaaacctttggtagctataccgttccaccaggcacaagagactttgataaagttttacaaaga

SEQ ID NO: 162868 - DNA, 466 bp, Homo sapiens
gaaacactcccattaccaactgctttagatgtattccctggaacagtctctgaggcatgaaaatgcatgacagaagtttctaggaagaagatctgaaaaacaacatttgtggtgagtgagaaaaactaaaatgaagtacaggaagatgttcaactgcaatgtgttacagtggaagtgtgtgatgattccatcgcatttcatctctagagttgagagatggaattcattctcaactrtagagggaggctcctttagattggtcccaaattgaagtaacagggcttcgccattgtacctcacttggtattatgtgtaggttgcctccatcgagaaggtgtaaccttgggtgttttccctccaaggacaattctctgagagggatacatctgtgagctgtccgcagccaaaattcatggctaccatgggaataattgctttagtttgaaagggggaacagatagcccaa

SEQ ID NO: 162869 - DNA, 562 bp, Homo sapiens
ttacaagttttaaaaaatatattttgaatagtagcattggtataggaccttagtacctgtacagtattttaaccatgatgctgacttgagtctcttgtgttacaatactgacttttttttgtactgttgctcaatggctaaatatgtgtaatgaatacctgctgttcttaaaacctggaatttagataggataccttgctttaattgaatctcctttgcaactgtggaaatgaaaaatagtatacttaactaagtagtacttattttttttccattatgataaccatagcctattcaaagaatgtagctttatttattctgcttatattgccataatttaatttattctaagaattgctgataaaccaatattaaagcaataaaaaaagtgtttcgggatargcataactctaactatacttcaaaattatgatgcattgtttataaactaaatttttttctctctgggaaaaaatgtttgtgttacattataaaaaaatgtaaatcacattaaacatgtgctttagattcatgttctaatgaataatttgtgatagaagac

SEQ ID NO: 162870 - DNA, 439 bp, Homo sapiens
tggcacatgcctgtagtcctaactacccaggaggctgagggacagaattgcttgagtccaggactttgaggttgcastgagctatgattgcgccatagcactccagcctgggcaatagagtgagaccctgtttctaaaagtgaaaacataaaataaatagaaatgccatgggaattttgataggaattgtattgaatctgtagattgctttggatagtacagacattttgtcaatcttaattctttcagcaatgcacgggtatgtagtagctccaagtccaaggggacacagtggctgtgagttcatgtgcagtgttgatggctggggtcagcaacaggctctgtggctaattacaggtggaagcatgatgtaaacatgcagtcacaggactcagagccatggatacatgtaaacacatactgctagagccaactgcaa

SEQ ID NO: 162871 - DNA, 517 bp, Homo sapiens
caggttttcagtgctttcttctaccagggtctctttgacccatttgttttaggcatcattctgggtcatcctcttgcagatgggctaatgagagttgaaataatcagaagttacaaaagaacaatatagtagactcaaagtgttctggacagtgcctagagtaaataaatttttattgattaactcttgattaaattgtttaataatttagttagattagcaagatgraatctatctcttgaggggaacatcataagtagaaatactggaacaactacgatttcagaacccctttgatatgaaaactagagtctgttatggagatatgaatccctactttctcacttaaactagtagacaatgcttctaatgcattaggcaaaatatagatgaatattagttttaatatcagtattgcaagctacatctacttagtatgtaactggtgaatgttttgaaatctccattgccataataaaaatattactatgattttttatttaaacataaatgaaga

SEQ ID NO: 162872 - DNA, 475 bp, Homo sapiens
tgcctgctggggtatgggggggtgatatttataggaacagggtgcgggtgtggcaggccagggtggtcttggcaaatacaacatttgggcaggaaaacaaaaaagccctagccagggacccgcccttcccttcccagcacttccctgccccacttccgtatcacacacacagctacttccttctattttatgactatattatatttaaatgtatggctctatgtaaccagtcttccgatgtaggcagttgagtgtttctaatattttgttattacagatggtcacaataaaaatctttgttgcacatgcacacacacatatgcagaaatcccaaaaaatgatttctctcaattttttttcatttctggaactgacacacagaatggttaaatttgtctagtctgaaragacacctaagattcaaaagatgtacacaacctacttcctttaggatatttttgagcattgagttaat

SEQ ID NO: 162873 - DNA, 440 bp, Homo sapiens
cagatgaggaaactaagagtagaggagaataggagtctttattaggccataaagtcagggtgggacttaaatggtggtctgctggcactgttgagtgccctttccactacagtatattgcttctaagtgttacatataaatgtattgcttggtgagatgcagctaaagcagtatttagaggaaaatttatagcactgaataagtatattagaaaaggagagagatttagaattaataatctaatttcctaatttaggaaactagamacagaagagcaaattaaatcaagaataaacacaagaaaataataaaaattggagcagaaagtaatgaaactaaaagtagaaaatcaatagagaaaatcaacaaaaccaaaagtagatgatttgaagatatcaatagacaagccaactaaaaaataagaaaaaatgaaaattact

SEQ ID NO: 162874 - DNA, 486 bp, Homo sapiens
aaattgcctgacatagagttcaaagtaattatctaaggaagctcagtaagccacaagagaacacagacaagttaataaaattcagagaaataatacatcaacaaaatgataaattcaacaaacagatataaaacatttataaaaacaaccaaatggaaattctgaagctgaagaatacgctgaataaactgaaagaaattagttttatcagcagactttatcaagtagaagaaataatcagcaaacttgaagacaaactatttgaaattacccagtcataggaacaacaamaaaagaagactaaagaaagccaaagggactacaggacaccatcaagtgaaacaaaatacacattatggaattcttaatagaagcagagaagaagagaaagggatagaaaacatatttaaagaaataaggacaaaaagtattcaatctgggggaaaagtgaacattcagatccatgatgcagaaagaaacgccaat

SEQ ID NO: 162875 - DNA, 482 bp, Homo sapiens
gttattattgttattatcaatgatcacaactgactattttgtacatacaaggaactgtgctagatgtttcacatattttcactttaatttcatgagggtgatgaacctgatttctctccattttacagataagcaaaatgaggatcagaaaggtgcagatacttttccaaggttttttagcttagtagaaaaacagtcttgaaactcaagtaaccctaatctatctgacttaaactaatctaggtggaaaaatctcacaatgtcactctttaaagaactgttaccttctacactggaaaatatggatgcaggtagcttggctcaaaawctcttgaggggtcttagaagagcctgacatgctgcataaaaggagtttctgcttctcaaatctagtctcctctcccagatagattggtacagggacccatgacatcggctcagaaatacttctggtccactgtttgttttgtacacacagccca

SEQ ID NO: 162876 - DNA, 477 bp, Homo sapiens
agaattcagctgtgtaccctgggttttttgttgttgttggcaatttttttattaccatttcaatctcgttgcttgctgttggtctgtacaggtttctatttctttctgctttaaactaggagcattgtatatttccaggaatttatcaatcttctctaggttttctagtttatgcatgtaaaggtgttcatagtagccttgagtgatcttttgaatttctatggtatcagttgtaatatctcctgtttcttttctagttgagcttatttggattctcttattttcttggttaatctccctaacggtctatcaattttatttgtcttttcaaagaaccagttttttatttcatttatcttttgtatatttttgtttcagttgtatttagytctgctctgatcttggttatttcctttcttctgctgagtttgggcttgatttgttcttgtttctccagttccttgaggcatgaccata

SEQ ID NO: 162877 - DNA, 543 bp, Homo sapiens
agatcttgaccgaaacaatggaccaatttttacaagatgaaatttaataggaataaatgtaaaatcatgcacttcaactaaaaaaatcaactacccaagtacaagatggtcaaaatgtggcttatagtcaagatgctcatgtgaaaamgaccttgggagtttagctggcaacaaagcctcttatgggtcaagggaaacttagttgcataaaaatgctaatatcctcttagcctttgtaggtgtatactaatatctccttaggctatattaatggaaaagagtgttgctataatcaatggtaatagctcctctttactctgcacctcgctgtgctttgagtttggttctggaccacagaaaaacaggagctggttcgttggagagtgaatatgagtgccccaagcaatacaactgtgctctggagaatttcagcttggatatggtggtatggagagacaagagacatgaatgtttttttaaaatgtcagattagctgtttatgaaaagtgcttcaaataattcctacagccctatggaactagg

SEQ ID NO: 162878 - DNA, 519 bp, Homo sapiens
gaacttattgggatctgaggtgaaggtcactcttactatgctttatcaaagagattggtggcattatgcccctgtgctagagatcggtggaactctgaacttgagagagatgatttaaggtatctggtgcaagaaatcttaagcaacagtgttcaagatgtgacttagctgcttctaaaagcctatgctcatttgcatcaacaaagaaattatctgaaactggaacttacatttaaaaaggaagcagagcataaatgtttggaaaatttgcagcctcaccatatcatataaaagaaaaacccattttcaagagagaaattcaagctgattgcagagatttgcataagtaaaaaggagcagaaggttaatascaaagagaatgggaaaagtgccctgaaggcatttcagagacctttgcagcagccactccatcacagacctggggtcctaggaggaaaaaatagttttgtaggccatgcccagggccctgctgctctttgcagcctcaggacatggaac

SEQ ID NO: 162879 - DNA, 543 bp, Homo sapiens
agcttgtggaactgtgagttaattaaacctcttttcataaattactctgtctcatgtagttctttctagcaatgtgagaatggactaatacagatactatgggaatttgaagactctgacacctacaactataactaacacattgtctaattagatataaattacaatttatctcctagccagtttgacaagacacacacacacacacacacacacacacacacacayacacactaaggcctttataattcagtgtttaatatctaatacctaatttctgggtttacacaaagaattataaggcatgctaaaaggcaagaaaaacaaaacacagtttaaagagacaaagcaagcatcaaaaccggatttagacatgacattgatatcagaatttgcagacaaagaaattaaaatacttacgataaatatgatgggggtaatgaaaaagtaaaagaactttaaaaaacagatgtgtaatgtgagcaaacagatggaaatgctaagaaatgaacaaaaggaaatgttagaaatcaaaaacaaatc

SEQ ID NO: 162880 - DNA, 574 bp, Homo sapiens
attatttgatcaacatattagtttgacattattctttggaggtgtttacattttgttatttataacacatatacgtagttcattttggagaggggagaatgagattgttgtgcttctgtatttaatataaaagaaggtagataaagggaaaaaaggtacaaggagaaattcaaatgtataaaaggatataaatgtgtaaaggtagataaaaggaaaaaaggtacaaggagaaattcaaactcaaatcaaattcagtatgtatgctgatactcaattctgatattgatcctgggtttactatcagtaattaggtttattcttcattctgatcaagtcaattaactctttgcagaagtaaaaatatttctaatcagaggatgcaatttctactgaagctaatctgtgacatgggaaagtttattcatctaaaactgtgtaacacacctttctaacacacaatttacagmtttttttcccctaaataacttctcaactcatctctttctggcttgttggctgagttcttattttatactgaatatttgtttatatacatcaaggagaaaacaaaatg

SEQ ID NO: 162881 - DNA, 505 bp, Homo sapiens
ctagcagaggttttctgtgaggactctacccctgaaacaggtttctgcctggacacccaggctttttgatgcatcctctcaaatctacacataggcttcccagcttcattcactcttgcattctgtgcacatgcagacttaacaccataccttgtagaagctgccaaggcttacggcttgcaccctctggagctgtggctcaagctgtgcctgggccctttgagccacagctgaagctggaagatagggatgcagggagccatgatcccagactgcactgagcagcaggaccttgggcctagcccaggagaccattgtgtcctcataggcctcaaggcctgtgaagagaggggctgcctcttaaatctctgaaaacaacctttaaggcagttttcccattgtctcagctattagcacttgtcttcttatttttatgtgaatttctttagcaagttgttcagcagscttgttgaattcttttttttatttaaccacataaccagcc

SEQ ID NO: 162882 - DNA, 612 bp, Homo sapiens
atgcttgttgtctgtatgtatgtcttcttttgaagtgtctactctttattaactgctttagacatatggcagggacagaagccaatctctgcaagatgaaatattctaaattggaacttaaataatgacaatttctaatgaaaaatttgtcaagaatcacaaaacatggatgaagctggaaaccatcgttctcagcaaactatcgcaaggacaaaaatccaaacaccgcatgttctcactcataggkgagaactgaacaatgagaacacatggacgcacgaaggggaacatcacacaccggggcctgttgtggggtggggggagcggggagggacagcattaagagatatacctaatgctaaatgacgagttcatgggtgcagcacaccaacatggcacatgtatacatatgtaacaaacctgcactttgtgcacatgtgccttagaacttaaagcataataaaataaataaataaataaaaataaataaataatcacaaaacatcatacaaattttcttaacagtagacaaaaaattgtgtaaaataatatcagaatttaagacttcaaaaacaaaaatcttacattataggctattatatcactatagtt

SEQ ID NO: 162883 - DNA, 620 bp, Homo sapiens
tcactattaatttacctatttttataacatgattcttaataaagcactgataatacaatattttattaataaaatttcataaaatatgttgtttaaacttaataagaatgatgagctttttttattggcattcttatttaactgcatatctcttttctttttaaccatagcgaagtttgcagaacagatgccaatattagaaatattagattactaaatgtcagaattattaaaagtgaatttctttttcattttaatgcatcttcataaggaaacttcagaataatttaattattttattaaaattacataaatgacattaatttaattataccactgtcatcgttggacatgtaaaggaatttgacaagataattgaatgtttgtattttctgactccttactgctgcagcaacatatgtagctacttcttaatcatgattaagcttcatggttagttactctgatcattattaaatactatcattattgtgtattaggtttcaaagtattaaatttaaggtagaagaaatgcacccatggacagcctccrttactcaggcatatgaattctatttaaatggtgattaagtatatttacagcatgtattttacaggtg

SEQ ID NO: 162884 - DNA, 616 bp, Homo sapiens
tgaacctctgtctcaaaaacaaaacatacaatcacatgcaaattaaacaacctgctattgaatgacttttgggtaaatcatgaaattaaggaagaaatcaagaagttattaggggctaatgagaacaaagatacaacttaccagaatctctggaacactgctaagacagtgataagagggaaattcatagcactaactgactatataaaaattttagaaagatctcaaattagcaatctaacatcacaactaaaataactagagaagagcaaaccaaccccaaattgagcagatgacaagaaataactaaaatcagagctaatctgaaggagatagagttccaagaaaccattcaaaatatcaacaaattcaagttgttttttgraaaaaaaaaaaaaaaaccaataagccagtagctagattaataaagaagaaaagagagaaaatccaagtaaatacagtaagaagaaagcaaagggatgttacccctgactccacagaaataaaaataaccaccagagtctactgcaaacacctctatgcacacaaaccagaaaacctggaatagatgtataaatttctggacacatgcatcttcctaagactgaaccaggaa

SEQ ID NO: 162885 - DNA, 560 bp, Homo sapiens
acacttatttcatcactttattmcattattgtggcactcacttttctctacaagaaaaaaaattcaattttgcttttttttactagcaaattaaaatatatttaatttaaattccaaatacagctttctctatatagatatttatatatctatatatctctacatataaatatatattgagaaaaattaagaaatattcataatttaatacataatcaaaagacaagttgaatataataagaatttttgtactagttgctatggacagaatgttagcatcatcccacattcataagatggtattgaacacctagtgtggtagtattaagagcctttgggaagttattacaacatagggattccaccctcatgaatgagattagtgcccttataaaagagacttgagtgagcttcctttctccttttactatgttaggatgtagcaataaggcaccatctatgaaacagagagccttcaccagaaatcaaatctgttgcaccttgatcttggaattcctgagctccagaactattggcaatacatttctgttgtttttaaa

SEQ ID NO: 162886 - DNA, 530 bp, Homo sapiens
tttcatttattatatttaaatggctctctgaaagcagacttttgacttcaataaattctgccccatgtttccatagtaacctactcaaaacattgtcatcttgtcatactgcttcactaaggctgtcaatatattccaattgcttatgagaaagattatactcctcaatttggcattcaaggaacctataatgtgatgcaaactatttttaaagttgggccttccaaattcatctcatattgtattacttatcaaaatgataaagtcattattacttaaatacaatctgcacttacagccattttatattcacttttgacaattttatattctgtggaatatcttgaccttcaaaactataaactttataaactttaaagtcttcctagrtttaaataaatctacctttatttctatcttgttcataaagtatttttttccaaattttctcaaactctaagtggaacccaagtttctctatggattaataaagaccctctagccattatcaaactgactagtagataatt

SEQ ID NO: 162887 - DNA, 530 bp, Homo sapiens
tttcatttattatatttaaatggctctctgaaagcagacttttgacttcaataaattctgccccatgtttccatagtaacctactcaaaacattgtcatcttgtcatactgcttcactaaggctgtcaatatattccaattgcttatgagaaagattatactcctcaatttggcattcaaggaacctataatgtgatgcaaactatttttaaagttgggccttccaaattcatctcatattgtattacttatcaaaatgataaagtcattattacttaaatacaatctgcacttacagccattttatattcacttttgacaattttatattctgtggaatatcttgaccttcaaaactataaactttataaactttaaagtcttcctaggtttaaataaatctacctttatttctatcttgttcataaagtatttttttccaaattttctcaaastctaagtggaacccaagtttctctatggattaataaagaccctctagccattatcaaactgactagtagataatt

SEQ ID NO: 162888 - DNA, 564 bp, Homo sapiens
tttaaaaaacttacaactatatattattgctacctttgtgatagaaattagagtctattatatttcctgagagtcatctccaaaattagaatttcacatttttaytgaaatctatcttctcatattgataaagttgagtgctgatctaatgttaagcaacactgaaaataagtttgtaaaactaaaaagaacatatctggccaataaaagcattcctaatatgcagagtgcaaagacaaactcgtatcttggaaaaaaaaacactcttatctgcacttggctcagacaaaaattttttccttgatgctaataaagatgaccttttgtacataaacaatatcttaaaatatagcattctaatatgctaattactttaataggagattttctgatataagtagttgttctagatataggcttgtgtaatcaagcctaatcaaaattaaatgatagtaattctaggcgatatgaggcatctgacccacgtttgcatatattttcactttgcactatattttttctactctattctttattcaggaagtcaaaattcctagtaactaa

SEQ ID NO: 162889 - DNA, 564 bp, Homo sapiens
tttaaaaaacttacaactatatattattgctacctttgtgatagaaattagagtctattatatttcctgagagtcatctccaaaattagaatttcacatttttactgaaatctatcttctcatattgataaagttgagtgctgatctaatgttaagcaacactgaaaataagtttgtaaaactaaaaagaacatatctggccaataaaagcattcctaatatrcagagtgcaaagacaaactcgtatcttggaaaaaaaaacactcttatctgcacttggctcagacaaaaattttttccttgatgctaataaagatgaccttttgtacataaacaatatcttaaaatatagcattctaatatgctaattactttaataggagattttctgatataagtagttgttctagatataggcttgtgtaatcaagcctaatcaaaattaaatgatagtaattctaggcgatatgaggcatctgacccacgtttgcatatattttcactttgcactatattttttctactctattctttattcaggaagtcaaaattcctagtaactaa

SEQ ID NO: 162890 - DNA, 564 bp, Homo sapiens
tttaaaaaacttacaactatatattattgctacctttgtgatagaaattagagtctattatatttcctgagagtcatctccaaaattagaatttcacatttttactgaaatctatcttctcatattgataaagttgagtgctgatctaatgttaagcaacactgaaaataagtttgtaaaactaaaaagaacatatctggccaataaaagcattcctaatatgcagagtgcaaagacaaactcgtatcttggaaaaaaaaayactcttatctgcacttggctcagacaaaaattttttccttgatgctaataaagatgaccttttgtacataaacaatatcttaaaatatagcattctaatatgctaattactttaataggagattttctgatataagtagttgttctagatataggcttgtgtaatcaagcctaatcaaaattaaatgatagtaattctaggcgatatgaggcatctgacccacgtttgcatatattttcactttgcactatattttttctactctattctttattcaggaagtcaaaattcctagtaactaa

SEQ ID NO: 162891 - DNA, 655 bp, Homo sapiens
tacctgccttgaaatttctggcatgtgtgtgtttttttttcttaatcaattatcttgccaatctggccagtaattttgtgagctcatctttttttttttttyttttttattctagaaacaacccattccaacaactgacattatgttttgaaaccatttcacccaaacccataaatcatttaggaacatgtacttcccatgttatcataggaacacttgagctactgtttctctgctatgtgtactgagtctccattgtgtagcctcctatgccagtgaggatataaggatatcatccaccgcccagtctcaatatctgtgctttgaaatatattagtagccttcccctagtttcagctttgtttatcagcttttcatgggctaattcctggctttcgatgaacagaggggaaaaaacaaatgaacaaacaaaaaaaagtacaaacctaatttgtgttattattcaaagtcaatctttacattggattatccctttaattctggctctgctcaatagccaaataaatttggaataatatgtctgagcaatataaaagaattatagcaatctatagaagaatattgtagattaccacagttgttttagattgtttaaagcccttaaatttaaggcaaattaagagattgaaaataa

SEQ ID NO: 162892 - DNA, 655 bp, Homo sapiens
tacctgccttgaaatttctggcatgtgtgtgtttttttttcttaatcaattatcttgccaatctggccagtaattttgtgagctcatcttttttttttttttttttttattctagaaacaacccattccaacaactgacattatgttttgaaaccatttcacccaaacccataaatcatttaggaacatgtacttcccatgttatcataggaacacttgagctactgtttctctgctatgtgtactgagtctccattgtgtagcctcctatgccagtgaggatataaggatatcatccaccgcccagtctcmatatctgtgctttgaaatatattagtagccttcccctagtttcagctttgtttatcagcttttcatgggctaattcctggctttcgatgaacagaggggaaaaaacaaatgaacaaacaaaaaaaagtacaaacctaatttgtgttattattcaaagtcaatctttacattggattatccctttaattctggctctgctcaatagccaaataaatttggaataatatgtctgagcaatataaaagaattatagcaatctatagaagaatattgtagattaccacagttgttttagattgtttaaagcccttaaatttaaggcaaattaagagattgaaaataa

SEQ ID NO: 162893 - DNA, 546 bp, Homo sapiens
cagaattcaatagttacttgggcaaggactgaaaaaatatatttgtaatctgctttaaatatgtataattattgtattttacatgttgagtaatattttacatattaaaaatatcaaatataattttkatgactcacaacataaattaaaattcaagtgttaaataatcaatggcagaaatatatttttctgttacgtatacaacaaaatctttatattgtctaaaaatacggagatagggtttttaactaagtatcctgtatctttgaagcatgattgaatctcaactgtttcctaaaaatatgtggtgtgatacaagatagattatgtaaaatttacaaattcagtattgttaatgattaaatgtttataaattaaggtgttggatcagaagcataaagttattgttcaaatttacttttaggcatcctaaatgaaaaagataaacttatcaactccacgtcagataaagccaaataagagcaaaccaaggtcagtcacttgacaaataatccaagagagaaaaaaggttaccatataaaatcg

SEQ ID NO: 162894 - DNA, 282 bp, Homo sapiens
actataaaccattctcatccttctctgtgttagaacactaaaacttattcctgctatatgattttaacttccttcccattgaccaccaaccaacctctccccattctacccccttcctctccaaggcttgatctattctcagcttctatgattctatgatatcaactctctctctctctctctctcwcacacacacacacagacacacacagacacacacacacatatacacaaactattttaagattccacatatgaatgagatcctgtgatatttgtatt

SEQ ID NO: 162895 - DNA, 618 bp, Homo sapiens
ggaacttagttgactaatgaatgactaaataattgtatgcatgctcagactttattatttactaccactgagttactctattttttaaatcaataaatagagcattatttattgaatatgtgcacagcatacataattctactagcctatataattscagctaaatatggatttcttatttagcagcttaccaattaagatataattcagttttgaagttttgaatcaaaatatctgaaggaaatatcaaagttacacatgtgtattacttaatatatttgttatacaatattagatattcacctttttaaagaaactattattatatttagtaatggcatcaaagtgttaattcactttaaaaaccttcagaaaataaagaactgtctcaaatgacaagctttgtagatcagtcaatgtaaagtaacttttttccccacaattttacataagtaaaaacaataaaaaaccctgaagatttcaaaagtccattaacaatgacaagtgtcttagaaataaagtttgattaaaatgtagaaagttagaggtcttttttaaaagaaacaatggatcagtttaaaagtatcaggtaaaataatgagattttaaaaggcagtg

SEQ ID NO: 162896 - DNA, 618 bp, Homo sapiens
ggaacttagttgactaatgaatgactaaataattgtatgcatgctcagactttattatttactaccactgagttactctattttttaaatcaataaatagagcattatttattgaatatgtgcacagcatacataattctactagcctatataattgcagctaaatatggatttcttatttagcagcttaccaattaagatataattcagttttgaagttttgaatcaaaatatctgaaggaaatatcaaagttacacatgtgtattacttaatatatttgttatacaatattagataktcacctttttaaagaaactattattatatttagtaatggcatcaaagtgttaattcactttaaaaaccttcagaaaataaagaactgtctcaaatgacaagctttgtagatcagtcaatgtaaagtaacttttttccccacaattttacataagtaaaaacaataaaaaaccctgaagatttcaaaagtccattaacaatgacaagtgtcttagaaataaagtttgattaaaatgtagaaagttagaggtcttttttaaaagaaacaatggatcagtttaaaagtatcaggtaaaataatgagattttaaaaggcagtg

SEQ ID NO: 162897 - DNA, 618 bp, Homo sapiens
ggaacttagttgactaatgaatgactaaataattgtatgcatgctcagactttattatttactaccactgagttactctattttttaaatcaataaatagagcattatttattgaatatgtgcacagcatacataattctactagcctatataattgcagctaaatatggatttcttatttagcagcttaccaattaagatataattcagttttgaagttttgaatcaaaatatctgaaggaaatatcaaagttacacatgtgtattacttaatatatttgttatacaatattagatattcacctttttaaagaaactattattatatttagtaatggcatcaaagtgttaattcactttaaaaaccttcagaaaataaagaactgtctcaaatgacaagcttygtagatcagtcaatgtaaagtaacttttttccccacaattttacataagtaaaaacaataaaaaaccctgaagatttcaaaagtccattaacaatgacaagtgtcttagaaataaagtttgattaaaatgtagaaagttagaggtcttttttaaaagaaacaatggatcagtttaaaagtatcaggtaaaataatgagattttaaaaggcagtg

SEQ ID NO: 162898 - DNA, 618 bp, Homo sapiens
ggaacttagttgactaatgaatgactaaataattgtatgcatgctcagactttattatttactaccactgagttactctattttttaaatcaataaatagagcattatttattgaatatgtgcacagcatacataattctactagcctatataattgcagctaaatatggatttcttatttagcagcttaccaattaagatataattcagttttgaagttttgaatcaaaatatctgaaggaaatatcaaagttacacatgtgtattacttaatatatttgttatacaatattagatattcacctttttaaagaaactattattatatttagtaatggcatcaaagtgttaattcactttaaaaaccttcagaaaataaagaactgtctcaaatgacaagctttgtagatcagtcaatgtaaagtaacttttttccccacaattttacataagtaaaaacaataaaaaaccctgaagatttcaaaagtccattaacaatgacaagtgtcttagaaataaagtttgattaaaatgtagaaagttagaggtcttttttaaaagaaacaatggatmagtttaaaagtatcaggtaaaataatgagattttaaaaggcagtg

SEQ ID NO: 162899 - DNA, 286 bp, Homo sapiens
acataggcttcccatattttatagatgactttatttatgatttccaaaaaaaaaaaaccctatttagtacattcctgatacattagtaagaggtacttttttagaaatgtaaacatcaatcccygttgctttttagtgaagaccactgtaccctgaaatgcggtatataacactacatagatgagaaaaatagacaaagtcctcatccggctataaaatgtcaaactgaaaagatctcaaagacagagagtgcataaagaaattttataaagtcctgtgtgaaaac

SEQ ID NO: 162900 - DNA, 252 bp, Homo sapiens
cttgtgcagtacactgaaaggtctgttagaattctcatgaggatgctctgtttgcattagattttaaatgattatttttatagcaccttttccatttttgaatttatcttttctcattttaaaaataattatagaatctgactttagggaccctgtgacaatttatgtggaaggaagattcttttttttttwaaaaaaaagattttttgaaaatgcagtggatagaattatagtcctggaatttttgctgat

SEQ ID NO: 162901 - DNA, 537 bp, Homo sapiens
gtacgtggcctaggggttggggatccctgcattaaataattgacaaacaagaccgggggtggtggcttacacctgtaatcccagcactttgggaggcgggcagatcacttgatcccaggagttcaagaccagcctgggcaacatagtgagacccccatctctacaaataaaataattagccagtcatggtggtgcgtatctgtggtccttgctacttgcaacgctgaggtgggaggatcactctkgaacccaggaggtcgaggttgcagtgagccgagattgtgccaccacactccagcctgggtgacagagccagactctgtctcaaaaaacaaaaacgaaaaaaaacaaacatcaaacaaaaaaaatcgaagaggtccttcgccatagacagtttgtgaagcactggtttcgaaaaaaaaaaaagtcttgtttgaggtgattttttttgtatagggttattcttgaaaaaatttagaaaaaccttctttaacgtttaataaaataataatcgatgttttaaaatagtttatgcca

SEQ ID NO: 162902 - DNA, 566 bp, Homo sapiens
cttgtatttaacctgaaagagttttttaatgacaaaatacctcataacaataagtaattccaccaacatttcagcctaataaaaaaaaatcctggagtcagggaacatatgcatgggagagggtgaaagtataacagagcatgggagaagagggggaatttttttttaagtgratgataaaggatataacttgaccacaaagtggttttggtgcatcaaaagttgtcagctttgagaaggttctaaggaaggtaggccaaggtctagttctgaaagatgttcaagaacaaaaaaacatggtgagctccagtcaggggctggctggggatatcaagacaaaagtcactcatggaatctggtggaggcagaaagcaggtaggtgtgtctacaggcaagtccaaaagtttggcaagaagacaaggcttgggattcaagaattgccaggctgggaaagctgcaccaaaagcctatgaacacaggcaaagctccaatctttctaaaaactgcttatcagaaggaattaatcatattaacaaatacatcaagtgaagaaaaacacaaacatg

SEQ ID NO: 162903 - DNA, 566 bp, Homo sapiens
cttgtatttaacctgaaagagttttttaatgacaaaatacctcataacaataagtaattccaccaacatttcagcctaataaaaaaaaatcctggagtcagggaacatatgcatgggagagggtgaaagtataacagagcatgggagaagagggggaatttttttttaagtggatgataaaggatataacttgaccacaaagtggttttggtgcatcaaaagttgtcagctttgagaaggttctaaggaaggtaggccaaggtctagttctgaaagatgttcaagaacaaaaaaacatggtgagctccagtcaggggctggctggggatatcaagacaaaagtcactcatggaatctggtggaggcagaaagcaggtaggtgtgtcyacaggcaagtccaaaagtttggcaagaagacaaggcttgggattcaagaattgccaggctgggaaagctgcaccaaaagcctatgaacacaggcaaagctccaatctttctaaaaactgcttatcagaaggaattaatcatattaacaaatacatcaagtgaagaaaaacacaaacatg

SEQ ID NO: 162904 - DNA, 599 bp, Homo sapiens
gaacaaaaattaattcaaattgaaaaattccccacagcagtcagtggcttgaaccagaatgttttacattcactctctctttctggccatcaaaagccttccatgcttggaaaggaaaaactataataaaaaatatatggttatactggggtttttaaagtataaattattaaggygcataatcatatcttaactttgaataacccagatattaccctaagtatttatcaggcattaagaccaactcattatacttgctctctctcccaaatcctcctgctttctattctgaattggtagcactatcacccaacccagatgttcaaggaaaacatctaagtcatctttaaattttgcttaacagtactattttcttctactcctcataactgccttcttcctcttattacctctcccagtccaagcatgaccttctcttctagatgatcagaaatagttcctaaatgatctccctgatcagcttttcaccctccccaatctaacaattacagtgtgtcacaatatgattgtcacctctttacttgcaataatcgaatggctcccttttacatattccagcctattttcaaactaacgtc

SEQ ID NO: 162905 - DNA, 526 bp, Homo sapiens
acataaaccaatagaaaaagtgccatgctcatgcataggaagagtcaattatcattaaaatgactatactccccaaagcaatctagagattcagtgcatttcctatcaaattattgacatcatttttcacagaattagaaaaaaaaagtctaaaatttatacggaatcaaaaaagaggctgaatagctaacgcattccaaacaacaagagcaaagctggagacatcacatttcctgactttaaactataaggcaagaataatcaaaatagcatgatgttggcataaatgtagatacataggccagtggaacagaatrgaacgaaaaataaagccacacagtgacaaccaactaatctttgacaaagctgacaaaaataaacaatggagaaaggacaccttatgcaataaatgctgctgggaaagctggctagccatatgcagaaaaatgaaactgggcccctatctctcaaccatatagaaaaattaagatggataaaaatgacttaaatgcaaaacctgaaacaa

SEQ ID NO: 162906 - DNA, 580 bp, Homo sapiens
taacaataaatgaatttattaaacatttttcatggatcttccattatatatctctgttttgattattataaaacagaaagtcaaaaaaagggataaacagyagtggggaacacttactaggtctcaggaaccacatgctttaccatttcacaacatcactacaatatatgcatttttatatcacactttagagatgtgataacaagattttaagaatataagtccctggacttgggtaagatagttagtaaacagtaaagctgagactgaaacaaatctgacttcaaagcccatttactgcaattccatactagtagcatctttgcagcagtaaaaataaagtagtgaagaagaattaaagatatgcctaataaccaagaaaaagaaatagctccttaagcagtaagaattagaaaaaaaatcatcaatttaattaattgtatatatgaaagaaagaataagttagaacacctggccaaatttctgcatttctgtactggagacttacataaatgggaaatgcagattctaaaaacaggagcataaggcagtctacgaaagtttgatgttttatggacat

SEQ ID NO: 162907 - DNA, 550 bp, Homo sapiens
taagaactgaatgaatgtcaaatatatctaggcctggaaagacagcaaagctcaaaattcagaaccaatcttggctccactatatccctgctaggtattactgggaagtagaaggaacgattgaatgaaaatcctagcagatatccttaatgtttctggacatcttatcacatctgggccaaaagaagatgcctaacaaataataaggctaccagttattatttttttattaagaatcacttatgctaaacacataacatttttagtttagtttttttttcagatttgtatattgtatttaagttatgygtccttaaatttggggccagaaagttgggtttctgttcaatcagtaaatggttggttaacaacatcattattccttgcctacattctccatctcctcctgtctttcttatctcagtaaatggtacactcatttataatgcaatctctcaagccagatacttggttttctcctttgggttttccctctgtcttactcacatgtgcaatgaatatctaagtcctgttatttggccatcatcat

SEQ ID NO: 162908 - DNA, 550 bp, Homo sapiens
taagaactgaatgaatgtcaaatatatctaggcctggaaagacagcaaagctcaaaattcagaaccaatcttggctccactatatccctgctaggtattactgggaagtagaaggaacgattgaatgaaaatcctagcagatatccttaatgtttctggacatcttatcacatctgggccaaaagaagatgcctaacaaataataaggctaccagttattatttttttattaagaatcacttatgctaaacacataacatttttagtttagtttttttttcagatttgtatattgtatttaagttatgtgtccttaaatttggggccagaaagttgggtttctgttcaatcagtaaatggttggttaacaacatcattattccttgcctacattctccatctcctcctgtctttcttatctcagtaaatggtacactcatwtataatgcaatctctcaagccagatacttggttttctcctttgggttttccctctgtcttactcacatgtgcaatgaatatctaagtcctgttatttggccatcatcat

SEQ ID NO: 162909 - DNA, 584 bp, Homo sapiens
caccgctggccgcaccttgcgctgcaatctgtgctccttgggcacctggaccgcgaactcctctggtagctccacggggcccttgtccacgatgagcagcggtgcgctctgcagctggctgtgaagcagatgtctgggtggaagagcgcctcctgggctgcgctcagcgtgtcgcaatggagcagcaagggcaggatgtcgttcactgtgcttgccacctgcggggacccaggcgcaccatcagacccctgctcacctcagtcccgcctcaggggagccctggtagaggctattcccaaggctgcyctctgccgccggctataggcccaagactccagccaccccaggccctactcagacaaccctacagctgagaggattacatctcctggcccctagtataatgctatcctagttaaacactatcttaattaagctaaaaaaaaaaaaaaaactcatcctaatctctaataatgattagaaaattagacataattattgaaagcacagtaagctacctgaaaaaatataaatattatttttatttttatagattcacagcactctaatgtaaattaagggca

SEQ ID NO: 162910 - DNA, 501 bp, Homo sapiens
tattttacctttacaaatagagaaagcattgacaagaaacgaaatatttggttgagataaaacagaaactaagtgaaaaggaatcatggcaacattttcattttgttttctcttacccaastctgactcacaagaaaacctgaaaatctattctcaattgtcataagtgtataactcagaaaagaaattttgaaagcaattactaatttaaaattacattatttaacatgcacaaaataactgacagctacttgaagagggatattgaagtggacagacaattgtcagattcatgaacaagatcacaatgctctatcctaacaaacctcaacattctttttctgtgccttttttgccttcctctgtgaccatggagtatacgagagtcaaaagttggtatcaggagatgtatgtatacacacacatacagatacacatacacgtgcatacacaaaaatagaaagtaaatgtatatatagcatttcattactggaagaaatt

SEQ ID NO: 162911 - DNA, 483 bp, Homo sapiens
tattttacctttacaaatagagaaagcattgacaagaaacgaaatatttggttgagataaaacagaaactaagtgaaaaggaatcatggcaacattttcattttgttttctcttacccaactctgactcacaagaaaacctgaaaatctattctcaattgtcataagtgtataactcagaaaagaaattttgaaagcaattactaatttaaaattacattatttaacatgcacaaaataactgacagctacttgaagagggatattgaagtggacagacaattgtcagattcatgaacaagatcacaatgctctatcctaacaaacctcaacattctttttctgtgccttttttgccttcctctgtgaccatggagtatacragagtcaaaagttggtatcaggagatgtatgtatacacacacatacagatacacatacacgtgcatacacaaaaatagaaagtaaatgtatatatagcatt

SEQ ID NO: 162912 - DNA, 591 bp, Homo sapiens
agaaattctacaaaaagcttaaataactaaagtcttccctcatcaactacttggaaacttccttacttattamctatgctaatttttattcaaatctaacacaattatactctaaaagaatttcaaatttttttgttattcctttcaacaaaagtaagtcttctaaatgggagacattgattttattttctggaaactttcatcttgaattctggtgtcataattgtttccccagttttattttttaatattctcttcttttcaaatcatgctaaaaatttatatttctatcgtatattagcttcctttctatacaccaaacagaggttaacattagagtctcaaaactgcttatcctgggaatgtgttagctactcttaaatcacatttctgtaagacaatttactctcaaacattccccaaagtatactgaatatgattgtaccttttccatcataatatcatagacaagaaactatatcttgtttataaatgtttaaatttccccaactcttaacttttcacttgttataaattataactacaaattctacttcaatattgactttacagatttttatcaatccataa

SEQ ID NO: 162913 - DNA, 591 bp, Homo sapiens
agaaattctacaaaaagcttaaataactaaagtcttccctcatcaactacttggaaacttccttacttattacctatgctaatttttattcaaatctaacacaattatactctaaaagaatttcaaatttttttgttattcctttcaacaaaagtaagtcttctaaatgggagacattgattttattttctggaaactttcatcttgaattctggtgtcataattgtttccccagttttattttttaatattctcttcttttcaaatcatgctaaaaatttatatttctatcgtatattagcttcctttctatacaccaaacagaggttaacattagagtctcaaaactgcttatcctgggaatgtgttagctactcttaaatcacatttctgtaagacaatttactctcaaacattccccaaagtatactgaatatkattgtaccttttccatcataatatcatagacaagaaactatatcttgtttataaatgtttaaatttccccaactcttaacttttcacttgttataaattataactacaaattctacttcaatattgactttacagatttttatcaatccataa

SEQ ID NO: 162914 - DNA, 549 bp, Homo sapiens
ttgccagagttagtatggtgggagttcacaatgacctataagtccagcatgtgatttaaattaatagattatttgaagaacgttaagtcaacaatttttcaagttgtagaaatatcactgtaatgtcttgtcagtgtggaagtaaacaaaagtcaggagggaaaacggaaaaaaacataggatgggcacggaagatacagtaaaaagttgaatcaaattgggagtagggagagtagttcaggtataaagtgacacttgcactagaactttgagtcatgcctccattcttccctcatttcttccctgcaataccctacataagtttcagagagatcagagcaaggaagacttatttatcttcagtgaattttatggttaaccttaattttaaggttacccaaaacatgtttcaagcaatgaaatgytaaatctcaacacatcatctgaaacactggcaaataatatttatttttttatcactgaagtaaaaaaggcacttccccttataattatattttaaatacataacttgatgctaagttagaagac

SEQ ID NO: 162915 - DNA, 567 bp, Homo sapiens
ccacagcccagcagttccttccacccctgcagaaaaccttgatgcaattcctgctttatagcctctgccaaatgaagcacaaacttaattacatcacctccccgacaggacggggagcagcgtgctgggcttcttcagccccctaatctaatcactggcgtgggtcatttcaattacggacaccagagtgtggggggagcgtggctgctcataaaagcctccatgctgttgctcagctaattatgaagctcttactgtctccgcaggtaaataastcaggactgagcagttccggctgctgagatggagtctgatcgagggaacaggacaaggtaggctaagctcgacagggtgatggctgaggtggagcccagggtcacagagggggttgcaaggaaggaagcccggccttcccgaaggctctctgccctgaggagacaatccaccatgcaagaattgattggtggattttaccttaaaacccaagctctgaagtttcctagaagcctcagagccacagggcaggataaaattcagactccacccacttctactaaccttgcctta

SEQ ID NO: 162916 - DNA, 499 bp, Homo sapiens
aaatggagggaagaaagaaataaaccatctaaggagcacagccaattatataggttggctttaattttcaaactagtgcttaaataccaatggtattattgcctttagctctctggaaactacagtgtaattaggttcactcaacttaacttaaaacatgcccagtcattaaaatttttcttgatccagccaagttatctcgcgcgtgcacacacacacacacacacacacacacacacacgcagcacagatctctaagccaaaagtacatcacgtccccaagaaacggcaaaaacatgtcactgctttttggaaatcatgctcatgttttgtgaccttccttaaagataatgttctcacgattaattaatttatgaatagttttccccccaacaygcacaacaggttccatgcaaattcttgagcttttaaattatactgttaatgaaagcaaataaaggcagttaaaaggcaatttgctcaattggtgttaatattt

SEQ ID NO: 162917 - DNA, 519 bp, Homo sapiens
ttcaaaaataaaaagcccatctagcagggactgggctatgagagctggtataaagggaaaattctggaatcaggggaacttccattacaaaataagaaagaccaatgccatagggaagtcacaacattttggaagcaggataaaaaggaatgaaaaagagcyagatttcttttccatcagaaaagagaagatgggacaggcacagtggctcatgcctgtaaccccggcactttgggcggctgaggtgggaggatcacttgaggtcaggagtttaagatcagcctggccaacatggtgaatccccaactctactaaaaaaattttaaaaattagccaggcatggtggtgcaggcctatagtcccagctacttgggaggctgaggcaggagaatcgcttgaacccaggaggtggagactgcagtgagctgagatcgtgccactgcattcaagcctgggtgccagagcaagactctgtctcaaaaaaaaaaaaaaaagaagatcgtgaaatcatagaccaat

SEQ ID NO: 162918 - DNA, 551 bp, Homo sapiens
tattcatcaccacaaagttgccattttacacaaatgcctgataaaaagtattatttcctttacagtattaattcaacgggtctgtgatgaaccatacctcaactttgttgtgcaggaagcttctagatttatacatacgaacaataataaaaccatagttgaaatttgtcaaccatttactttgtgccagaccctttacctgtatcagctcctttattcttcacagcaatccataaggcagtgcttttatgatgtcacctttacaggtgaggaaacagggaagtaaagcaaagtgcctaaggtctcrggatagtagacagaatgatgggcccccaaagatgcccacttcccaatccccagaacatgtgattatgttaaggtgcaagatgaaagggactttgtagtgtaattaatttaggaatcttgagatgaggagattattttaaattatctagatgggccctttataaccacaaaggtttttataaaggaaagatggagttaggagagtcagagaaggagatgtgacaaagcaaagcagagaagcagag

SEQ ID NO: 162919 - DNA, 449 bp, Homo sapiens
gaattctttcctggatgaaaccaatgaccctcatgggctaagccccaggttggagttcacctgccctgcatcagtccaatctcaccattttacaagagaggaagcagaacagagaggtggcacagcattcccaaagccatacggccaatgagagccaggacttgggaccagagccagtttggggccatcatgaggatgtcatggaagccattcagccattcttggagatcttttggtattgccttccaagtacatagcattaattttttttwaaatcttcagtcatggcatgtcttgcccatagagggaagatttgattttcaaaactagcaccaatatctcaagagggtggtgaagctgggtaataaaatttgaggtcacaaacaagggggactagggagcagtaaagttgaaatcctcctgtagctcataacccagcaataacagca

SEQ ID NO: 162920 - DNA, 454 bp, Homo sapiens
cctttttaaaatgggaagaaaatccatgtatttaaaaattccacttatttaactacataagcactgaacactattgtgcaaagataattgtggtttaactgccacagttagtatcaaaatcaacatatatttcctgtcttgctgtttttctgcattaatctcattacagttcaaatccaggagaatatctatcctgaagcatagcacatgtgcccgtgttctcctactgaatgtgactgtcatgtaggcagctggtgttctggaggaactttccaaacacctccaacttctgtggagagctcggcgttctccatccygctccccctttagtgaatgagaagcatgtcagcctgcacaagagccaatacaacaattctttttggcagtagctaattgttaatgacttcttcaatgtattcatttcaaagacaaaagtaataatagattacacaca

SEQ ID NO: 162921 - DNA, 503 bp, Homo sapiens
gaattcctttgatactcaggtttagttttacagctatgatcttcaatcttaataatggcagttcgtgatgataagaggctagcagaaaggagtgcatttgcttggagactgtttttaatggggggtccccctctttgtttctataacacgccaaaatcacggactactccaaaagcatgtaactatctgtataaatatttactgacwtgtctttagctatatgtacaagctcaggagaaactgacttatattaggtgagagttctcttctgtattaactcatttcaggtgataagatcataccctgcctggtattttccttctgagttttataataagaccaaaaaacaaaaagtatcaactcaggattatcaaagggattatctcacatatgaacatgaggagccactatttctaacactacactcacaattgtggtcttcacctgcatgaggcaggggtagtagagtagcagggttaagtaagttgcaacatttcagatag

SEQ ID NO: 162922 - DNA, 634 bp, Homo sapiens
gaataaattagagaagatgaagtaacgggcactcaagctacttttctgctttagccaaatagaaaactggacaaattataaaaaataatcatttccagacactggccaaaggcactgaaggactgggatctctaaagaagggaaactaacgatgtgagccctgcaattacaccagcttgcttcctgggggcagtttttaagccacagcccaggaaagtgaaacccaaacatagctttacattcttgttggattgaggagagagattagagttctgggaagccaaggaatgtagaatttgcagggtaagatagcagagaagagggagttatccrgatgtggaggagcagtggggctttggagatatgcaaaagagatcgctcaggtctttgggtactgatctatgtaaacataaaaggaactactaaagctaaggaaaaacccactgtaaagaagtgggcataagctttccctgaaactcaaacaggacagggaacgttttatgtccccacaaactagaataaaaaactttatagtacataggtacatcaggtcagatcttcaaagggatattacctttgtagtcaggcttaactagtccaactttaaagattcctctggactttctcaaatttt

SEQ ID NO: 162923 - DNA, 634 bp, Homo sapiens
gaataaattagagaagatgaagtaacgggcactcaagctacttttctgctttagccaaatagaaaactggacaaattataaaaaataatcatttccagacactggccaaaggcactgaaggactgggatctctaaagaagggaaactaacgatgtgagccctgcaattacaccagcttgcttcctgggggcagtttttaagccacagcccaggaaagtgaaacccaaacatagctttacattcttgttggattgaggagagagattagagttctgggaagccaaggaatgtagaatttgcagggtaagatagcagagaagagggagttatccggatgtggaggagcagtggggctttggagatatgcaraagagatcgctcaggtctttgggtactgatctatgtaaacataaaaggaactactaaagctaaggaaaaacccactgtaaagaagtgggcataagctttccctgaaactcaaacaggacagggaacgttttatgtccccacaaactagaataaaaaactttatagtacataggtacatcaggtcagatcttcaaagggatattacctttgtagtcaggcttaactagtccaactttaaagattcctctggactttctcaaatttt

SEQ ID NO: 162924 - DNA, 634 bp, Homo sapiens
gaataaattagagaagatgaagtaacgggcactcaagctacttttctgctttagccaaatagaaaactggacaaattataaaaaataatcatttccagacactggccaaaggcactgaaggactgggatctctaaagaagggaaactaacgatgtgagccctgcaattacaccagcttgcttcctgggggcagtttttaagccacagcccaggaaagtgaaacccaaacatagctttacattcttgttggattgaggagagagattagagttctgggaagccaaggaatgtagaatttgcagggtaagatagcagagaagagggagttatccggatgtggaggagcagtggggctttggagatatgcaaaagagatcgctcaggtctttgggtactgatctatgtaaacataaraggaactactaaagctaaggaaaaacccactgtaaagaagtgggcataagctttccctgaaactcaaacaggacagggaacgttttatgtccccacaaactagaataaaaaactttatagtacataggtacatcaggtcagatcttcaaagggatattacctttgtagtcaggcttaactagtccaactttaaagattcctctggactttctcaaatttt

SEQ ID NO: 162925 - DNA, 634 bp, Homo sapiens
gaataaattagagaagatgaagtaacgggcactcaagctacttttctgctttagccaaatagaaaactggacaaattataaaaaataatcatttccagacactggccaaaggcactgaaggactgggatctctaaagaagggaaactaacgatgtgagccctgcaattacaccagcttgcttcctgggggcagtttttaagccacagcccaggaaagtgaaacccaaacatagctttacattcttgttggattgaggagagagattagagttctgggaagccaaggaatgtagaatttgcagggtaagatagcagagaagagggagttatccggatgtggaggagcagtggggctttggagatatgcaaaagagatcgctcaggtctttgggtactgatctatgtaaacataaaaggaactactaaagctaaggaaaaacccactgtaaagaagtgggcataagctttccctgaaactcaaacaggacagggaacgttttatgtccccacaaactagaataaaaaactttatartacataggtacatcaggtcagatcttcaaagggatattacctttgtagtcaggcttaactagtccaactttaaagattcctctggactttctcaaatttt

SEQ ID NO: 162926 - DNA, 376 bp, Homo sapiens
tttcaccaggtgaaggagatcttccatgacccacagactgagaacaaccagacctttcaaaacccagaacctggagattggatcttctgaaaatgacatcagagacctcattgaacccatggtcctctccctattggaagagaccataccaagttctacttgccacccacgctgcagtaaaatatcaaaggcttaaaccttgggttcacatgttaaagctcaaaagggcccctccaagctcctggaaatgtatacctgtttgagaattgaaggtaaacctgaccrggaaaacttttccccagaagcagatgccatcctagacattaacagctatcctaacgccatagatcaagacttttctgacatcatgaaaact

SEQ ID NO: 162927 - DNA, 572 bp, Homo sapiens
cagaagcagatgccatcctagacattaacagctatcctaacgccatagatcaagacttttctgacatcatgaaaactgaaaaccttatcctttttcctctttttcctatttctgccatcctaatcgttccctttctttacaggaaaagccatggactgtaatttgtggatggctttagcaaaggcttatgctccagtaagaaaccaaaacaattgttaaatttgtagctaatgcccccaaatcaggaaacgattccactaatgccactgcctgtctgtgttaccagtgacagtcatgctaaaacctcaaaggaggagtagaaattgatattctagacatgactgctacttgctttcctatgcttattgaaaacaatactctgacctttccagttaataacagaatggctactaaatataaaaaacctatcaaagtgatgcctacaaaaggtatrttgtgcttccgagcattgaatactcaagatttggggatcacttatgagggtacaagtaattgcttgtatgatgtcgctggactaaatccagtaaggtctcgttccactgaatactgtt

SEQ ID NO: 162928 - DNA, 604 bp, Homo sapiens
agatctcttcttggcttatgttggggtcttgcccatggtgctaaacagaactgaatgctgcacttaccttcmcgctggttttactactacagaaagcttaatttaaaaggtagccaacactgcaattcctgtaaacactgccaccgaatgcaccagggacatttctcaggggaaagaaacacatgacgtgattatgggagtagctaacagctggtttgcaggcgtcctaaatggtggatggcaaggctggctagtctaagatttttctcatctctgtgtttcatttaatcatgtacagattactatgattgatattaccaggctaactacaaaaatagatatctctttaaatcagaccattttacagcacactatggttcttaattgccactccaccccaaacacagactatgaccactaagacttaaatactgatgaattgtctttattgcctgaattttgaattgtttgttctgatgagtttggttcgcagagattcctgttgcatagtgtacttcactttctttatattatcctcccaatagccattatagtggcctccctcctgtgttatatcccttaagaattataaatgctcatacgt

SEQ ID NO: 162929 - DNA, 604 bp, Homo sapiens
agatctcttcttggcttatgttggggtcttgcccatggtgctaaacagaactgaatgctgcacttaccttcacgctggttttactactacagaaagcttaatttaaaaggtagccaacactgcaattcctgtaracactgccaccgaatgcaccagggacatttctcaggggaaagaaacacatgacgtgattatgggagtagctaacagctggtttgcaggcgtcctaaatggtggatggcaaggctggctagtctaagatttttctcatctctgtgtttcatttaatcatgtacagattactatgattgatattaccaggctaactacaaaaatagatatctctttaaatcagaccattttacagcacactatggttcttaattgccactccaccccaaacacagactatgaccactaagacttaaatactgatgaattgtctttattgcctgaattttgaattgtttgttctgatgagtttggttcgcagagattcctgttgcatagtgtacttcactttctttatattatcctcccaatagccattatagtggcctccctcctgtgttatatcccttaagaattataaatgctcatacgt

SEQ ID NO: 162930 - DNA, 582 bp, Homo sapiens
gatgaggtagtactcctgtgttatgtgattttatatgccccaagagattggcacatgtagtaaaggtccctaattggttgaatttgagttaatcagaaggtgggattttcctgaataggcccaacctaagcaagcaagctctaaaaaagagacacaaaacaacaacacatgctctttgtctgcccttgaagaaacaaatgtcagtcctatagccacaataaatggaattctgtcaacaacctgaatgaycccggaagatgagaaccaagtctcatctgacaccttgattccagctttagggaaccctaaacagtaaacccagttgggacatacctagacttctgacctacaggactgctagataacagaagctgctaaattcctgcagtctgtcacacagaagtagaaaacttacatacatcttacagtttccaaaaaaatgctcatttgaccttcagaggataccattaatttacaaatcaactatggcttagaaaactgatttcctttgcttaaggtcagctattggtcaaagtcaggactctcccctgcaaaaataatctgcctcctaagattcagcaa

SEQ ID NO: 162931 - DNA, 590 bp, Homo sapiens
ggtggttaccagaggccaagaaagggagtgtggagggaggataaggagaggctgattaatgggtacaaatatacagttagattcaataattaagaccatgtttgatatatcagtggggtgactatagttaacaataatctgttgcacatttcaaaataaatagaggagaaaaattcatatgtttctagcacaaagaaaagatagatatttaaggtgatggatattccaattactctgatttgatttttacagattatatgaatgtatcaaattatcacatttacccccaaaatttgtatatctattatgtatcaatacaaatacattttaaaactatgaaagccgatagtggtagaatagaaggtacatgcggaagttagagataaagcaatgcaaaaattaagagacatgaaccacagaatgaaaagtccagtatttgtctgatagtaattctaaaagcagagaataattataattcatggacagtaaatagataaagatagagaactatttgatgaaagtyatgaattgttaaatcgaagaagtataacaagtcctgagccagataaacaaaaatatagcctctccta

SEQ ID NO: 162932 - DNA, 587 bp, Homo sapiens
gaaggataggagctccatggtcatctgtggatgccaccctggtgcagctctatcacwgatgccacctatctaatattatatatattatatatatatataaaatatatgatcttatatacttacaagtatatacattatatattacatataatatatacttacaagtatatacattttatatatatataagtaatgtatatacttattgctggggttccagagtgaccttcatgagttattcgacccatctgagcttcattttcctaacctttaatgactattgtcagagttataaaaactataattaatgaacacaaagaaataagcaaactatggcatgtagtttaagtgctcaacatttttattagttaacaattagtggttgtaatatcattagtatttttagtactaatgtagtaatactattttcatgatgatgataatgatgatgattgatgataattcagtcaatatttgactgagaaactcaggacagaatctgaaatggggattttcaaaggaggaatagagaacaagtgtatgctggatagtctgtggctttagaagggccagttagagaacagagt

SEQ ID NO: 162933 - DNA, 587 bp, Homo sapiens
gaaggataggagctccatggtcatctgtggatgccaccctggtgcagctctatcactgatgccacctatctaatattatatatattatatatatatataaaatatatgatcttatatacttacaagtatatacattatatattacatataatatatacttacaagtatatacattttatatatatataagtaakgtatatacttattgctggggttccagagtgaccttcatgagttattcgacccatctgagcttcattttcctaacctttaatgactattgtcagagttataaaaactataattaatgaacacaaagaaataagcaaactatggcatgtagtttaagtgctcaacatttttattagttaacaattagtggttgtaatatcattagtatttttagtactaatgtagtaatactattttcatgatgatgataatgatgatgattgatgataattcagtcaatatttgactgagaaactcaggacagaatctgaaatggggattttcaaaggaggaatagagaacaagtgtatgctggatagtctgtggctttagaagggccagttagagaacagagt

SEQ ID NO: 162934 - DNA, 587 bp, Homo sapiens
gaaggataggagctccatggtcatctgtggatgccaccctggtgcagctctatcactgatgccacctatctaatattatatatattatatatatatataaaatatatgatcttatatacttacaagtatatacattatatattacatataatatatacttacaagtatatacattttatatatatataagtaatgtatatacttattgctggggttccagagtgaccttcatgagttattcgacccatctgagcttcattttcctaacctttaatgactattgtcagagttataaaaactataattaatraacacaaagaaataagcaaactatggcatgtagtttaagtgctcaacatttttattagttaacaattagtggttgtaatatcattagtatttttagtactaatgtagtaatactattttcatgatgatgataatgatgatgattgatgataattcagtcaatatttgactgagaaactcaggacagaatctgaaatggggattttcaaaggaggaatagagaacaagtgtatgctggatagtctgtggctttagaagggccagttagagaacagagt

SEQ ID NO: 162935 - DNA, 573 bp, Homo sapiens
caacagaattttttcttttataaaagtaaggtggctgttcacaagaagtaactatgtatctgatgtatgttccatgtgtcttctgatgrtcatgcagaagggtgatgtgtgtgcacagctgtgagtctaagaagtaaagatgccattcctctaatgcgcctgaaataccttcatatgccccttttggccacattcgtaataacattaatctaaacctggttttcagtgtaattttgggtaagattcaaaaaggaaacacatacaaggcttaataaagttcccctcagtaggaaaatggaaaattatctttttttctgtttcggacttgatgccacatttttaaaaacaatgtaaatttgcttttactatttaattgttctttaatggaataaccacaattaggatttcccctcctaatgtatctgagcaaattgagtaataggattcatacttaccggtgcagttctgaatctggtgatggggttgttgatggaatattagaatttgctgggtgggtggctgtgaaatgaaccttgccggtatatcctggaatatttgcagcactaaagtgaa

SEQ ID NO: 162936 - DNA, 451 bp, Homo sapiens
cctgcaggattttttggaattttgttggaaaagtgcagctgtaagttagagaggtaacccagaatgaggcaaagttattcatgcgtgtgtctctcccccaaccattcattaaagcttccatgcatgttacaaaggaaatcccctccatctgtgtgaaaggttttttccactgcctttgaaaacacctgcagaattaaaatgcctctaaagtcatatcctgccatcagagcagttaagaagtcagagggatggacgcaggccatctgtcaatcacatgaaaggcttgataaaaaacattgcacagcctctgtgcctctgtggcatgcatgttattgatgctaaatggtatcatatgttacattgtcttaatgctattagattacatcatatttaataataacatttcatggaagaktagactgattagctgctcagtcttgggaatgaattc

SEQ ID NO: 162937 - DNA, 658 bp, Homo sapiens
gattacatcatatttaataataacatttcatggaagattagactgattagctgctcagtcttgggaatgaattcagttgcataataaaytgccaaatatttgaaaacgaaagtcctcacccacactgcttctaaatctactccatttaaccctggcacatatggccataacaaggggaattttgccatcttaagtgcaacacagcgaccttatattaagaggagaatactctctggggaacactttagactgctgctgataggagatattatttttcagctggagggaacaaagctattaaagatactgaaacatacaagccgggaaatggatttccaggttagtcgcatgttcaaagaattccactccccatttgaggaaagtagagagacgcagagacccacttaaaaataagaagtcttcatttttgcctttgctccacagcttctagtcctttaaataccttattttgtactccctagttccaaataagccaggattttgttcactaattgataaatttgaatatattattgcccaagtctacaatgaattggttctcaaccaaacatgataaaatagaaattaagtaatttaagaaaatcaagaagtttagtaactcagaagaagggagcacagatggtatataagttaaata

SEQ ID NO: 162938 - DNA, 658 bp, Homo sapiens
gattacatcatatttaataataacatttcatggaagattagactgattagctgctcagtcttgggaatgaattcagttgcataataaattgccaaatatttgaaaacgaaagtcctcacccacactgcttctaaatctactccatttaaccctggcacatatggccataacaaggggaattttgccatcttaagtgcaacacagcgaccttatattaagaggagaatactctctggggaacactttagactgctgctgataggagatattatttttcagctggagggaacaaagctattaaagatactgaaacatacaagccgggaaatggatttccaggttagtcgcatgttcaaagaattccactccccatttgaggaaagtagagagacgcagagacccacttaaaaataagaagtcttcatttttgcctttgctccacagcttctagtcctttaaataccttattttgtactccctagttccwaataagccaggattttgttcactaattgataaatttgaatatattattgcccaagtctacaatgaattggttctcaaccaaacatgataaaatagaaattaagtaatttaagaaaatcaagaagtttagtaactcagaagaagggagcacagatggtatataagttaaata

SEQ ID NO: 162939 - DNA, 493 bp, Homo sapiens
ctggccgctgtagtgtagccaagttgacacacaaaattaaccatcactttgaagaaggatgtggacacacgattctctctgaagaagacctgagcaattcgtttaggtggagatgtcagtttgctgagaccatattgttaatactcaaatatggggaaaattcccacccctgactgtccctggttttcagggacagtctaaactggctgcccatttgctcagggagtcctggcttttccagtccgcactgattctcacagtatgtgatcctaagctaggttcttcactagcattacagaagaataaaccttgggcttaggatgtcatgacmcttggtctgtaatagattttctctggaaattcaccacgatgaggagaatgtaaacatgactggtctccagcagcccagcctctgagcaagcactaagtgggccccatcctgccagcagctgctcccagaagagcttcgcttctctcagatccaccctgacag

SEQ ID NO: 162940 - DNA, 536 bp, Homo sapiens
cagcagctagcatcctcattgtttctctctgtgttggctgcaaattcctttttctgtttatcccctcaggagcctaggctctgggagtgtagcatgggggttggagggagaaaaagcagaygttcccaagactgtcattgccatgggcaccagccatgtttgtggtgctgttactgatatggcccagagatggcatgaacatcaagttgtcaaggacagcctactggttctagttactgaagctaccaccaatgttttacagtggattccctgccagccaccagactgggaaacttcaaattgtttaaaagaggcacctcctatcccccagcctgatgctggagcaagagagctactcacagtgcctgaaatatatcctggttctcatttttcctctgctcttaactctacccagagaccatcgtgcagatctattctgcaggtgggaaatggaggcagagcagaacagactcgcagacttcgatcattccttcaacgaacagttgctgagggcaacaatcccaagtgctgactgt

SEQ ID NO: 162941 - DNA, 536 bp, Homo sapiens
cagcagctagcatcctcattgtttctctctgtgttggctgcaaattcctttttctgtttatcccctcaggagcctaggctctgggagtgtagcatgggggttggagggagaaaaagcagacgttcccaagactgtcattgccatgggcaccagccatgtttgtggtgctgttactgatatggcccagagatggcatgaacatcaagttgtcaaggacagcctactggttytagttactgaagctaccaccaatgttttacagtggattccctgccagccaccagactgggaaacttcaaattgtttaaaagaggcacctcctatcccccagcctgatgctggagcaagagagctactcacagtgcctgaaatatatcctggttctcatttttcctctgctcttaactctacccagagaccatcgtgcagatctattctgcaggtgggaaatggaggcagagcagaacagactcgcagacttcgatcattccttcaacgaacagttgctgagggcaacaatcccaagtgctgactgt

SEQ ID NO: 162942 - DNA, 553 bp, Homo sapiens
cgtctggctgctgcagcagctagcatcctcattgtttctctctgtgttggctgcaaattcctttttctgtttatcccctcaggagcctaggctctgggagtgtagcatgggggttggagggagaaaaagcagacgttcccaagactgtcattgccatgggcaccagccatgtttgtggtgctgttactgatatggcccagagatggcatgaacatcaagttgtcaaggacagcctactggttctagttactgaagctaccaccaatgttttacagtggattccctgccagccaccagactgggaaacttcwaattgtttaaaagaggcacctcctatcccccagcctgatgctggagcaagagagctactcacagtgcctgaaatatatcctggttctcatttttcctctgctcttaactctacccagagaccatcgtgcagatctattctgcaggtgggaaatggaggcagagcagaacagactcgcagacttcgatcattccttcaacgaacagttgctgagggcaacaatcccaagtgctgactgttgca

SEQ ID NO: 162943 - DNA, 581 bp, Homo sapiens
ttgaaaccatcctcctcatttccccactgatgaagacaaagaaggctagatgaagaactactgaaatacaaacacaaacagcatggcacatagagagaagcttgtccctcactttgaagttttatcctagagattttccacaggacatctctttctgyctcatcatgggctctttcttatctcctgagcccttaaaaccacaactccaagttcagcttcttttgatctgcggggatataggttaagaaagagatggggagtagctgcttatttcagcttcccaggcaacccaaaggcagggagaagacgcagaaataaaatattgctgcagcaagttaaacctgcactctcccttctaggcagtcatcctcatttaagggtcctaggaagattggggtcagtgaagatgatatcctaaacatccaattctcattaataactgagaccattttattaatccattctttaaaacctttaaaaacgtatattttaaaaataatacatgctgatagaatgcacaacaccaagagtggaccctgatgtaaactatggactttaagtgataatgatgtgtcaatgta

SEQ ID NO: 162944 - DNA, 581 bp, Homo sapiens
ttgaaaccatcctcctcatttccccactgatgaagacaaagaaggctagatgaagaactactgaaatacaaacacaaacagcatggcacatagagagaagcttgtccctcactttgaagttttatcctagagattttccacaggacatctctttctgtctcatcatgggctctttcttatctcctgagcccttaaaaccacaactccaagttcagcttcttttgatctgyggggatataggttaagaaagagatggggagtagctgcttatttcagcttcccaggcaacccaaaggcagggagaagacgcagaaataaaatattgctgcagcaagttaaacctgcactctcccttctaggcagtcatcctcatttaagggtcctaggaagattggggtcagtgaagatgatatcctaaacatccaattctcattaataactgagaccattttattaatccattctttaaaacctttaaaaacgtatattttaaaaataatacatgctgatagaatgcacaacaccaagagtggaccctgatgtaaactatggactttaagtgataatgatgtgtcaatgta

SEQ ID NO: 162945 - DNA, 581 bp, Homo sapiens
ttgaaaccatcctcctcatttccccactgatgaagacaaagaaggctagatgaagaactactgaaatacaaacacaaacagcatggcacatagagagaagcttgtccctcactttgaagttttatcctagagattttccacaggacatctctttctgtctcatcatgggctctttcttatctcctgagcccttaaaaccacaactccaagttcagcttcttttgatctgcggggatataggttaagaaagagatggggagtagctgcttatttcagcttcccaggcaacccaaaggcagggagaagacgcagaaataaaatattgctgcagcaagtkaaacctgcactctcccttctaggcagtcatcctcatttaagggtcctaggaagattggggtcagtgaagatgatatcctaaacatccaattctcattaataactgagaccattttattaatccattctttaaaacctttaaaaacgtatattttaaaaataatacatgctgatagaatgcacaacaccaagagtggaccctgatgtaaactatggactttaagtgataatgatgtgtcaatgta

SEQ ID NO: 162946 - DNA, 581 bp, Homo sapiens
ttgaaaccatcctcctcatttccccactgatgaagacaaagaaggctagatgaagaactactgaaatacaaacacaaacagcatggcacatagagagaagcttgtccctcactttgaagttttatcctagagattttccacaggacatctctttctgtctcatcatgggctctttcttatctcctgagcccttaaaaccacaactccaagttcagcttcttttgatctgcggggatataggttaagaaagagatggggagtagctgcttatttcagcttcccaggcaacccaaaggcagggagaagacgcagaaataaaatattgctgcagcaagttaaacctgcactctcccttctaggcagtcatcctcatttaagggtcctaggaagattggggtcagtgaagatgatatcctaaacatccaattctcattaataactgagaccattttattaatccattctttaaaacctttaaaaacrtatattttaaaaataatacatgctgatagaatgcacaacaccaagagtggaccctgatgtaaactatggactttaagtgataatgatgtgtcaatgta

SEQ ID NO: 162947 - DNA, 587 bp, Homo sapiens
gtggcgggcgcctgtagtcccagctaactgggaggctgaagcaggagaaccgcttgaacccgggaggtggagcttgcagtgagccgagatcatgccactgcactccagcctgggagacagagtgagattccatctcaaaaaaaagaaattcatcctaaaggctcaataaacggaaacagcygtggtggagagcctgctgggatgggagatgagagacctgaggtctctatgaggtggttcactagctgtgtgaccttgagaaaggcatttcaccctctgggacttatttttatcatttttcaaacaagggagttgaaccacatccatatttctcgccaagaccaccttggatgtttgtcaaaatgcctatctgtgccctgatcaaattggaatctatcagggtaggagcccaaagatctacatttttaaaatacattctaagtttttgctacaataaggccagcaaagatgtagaaattatttctaggcaccaaactctatgataagctttctttgttttcatacctgtcttgtattattatacccatttgacagatgaagaaactgaggctcacactgatcaaaca

SEQ ID NO: 162948 - DNA, 587 bp, Homo sapiens
gtggcgggcgcctgtagtcccagctaactgggaggctgaagcaggagaaccgcttgaacccgggaggtggagcttgcagtgagccgagatcatgccactgcactccagcctgggagacagagtgagattccatctcaaaaaaaagaaattcatcctaaaggctcaataaacggaaacagctgtggtggagagcctgctgggatgggagatgagagacctgaggtctctatgaggtggttcactagctgtgtgaccttgagaaaggcatttcaccctctgggacttatttttatcatttttcaaacaagggagttgaaccacatccatatttctcgccaagaccaccttggatgtttgtcaaaatgcctatctgtgccctgatcaaattggaatctatcagggtaggagcccaaagatctacatttttaaaatacattctaagtttttgctacaataaggccagcaaagatgtagaaattatttctaggcaccaaactctatgataagctttctttgttttcatacctgtcytgtattattatacccatttgacagatgaagaaactgaggctcacactgatcaaaca

SEQ ID NO: 162949 - DNA, 593 bp, Homo sapiens
ccaacatttctcaaagcatatttcatggaacacctactccagggtaccttgaaagatgttagggataaaaaaatgttcgcgggcagtgaagtctgggaaagcctgagctgaagaaagctggatggacaggttagtttgcaacaggactactgagagccttgactgtgttggtgtgtatcgtgaatgtctgagagaagaacaagcatatagtgtttccccaaattatttgacattgtaacttaatttagattctcccaaaagcagagacaaaagcttggtatcaagtgtagtttatttgggagttgattccagtgatcagaaatgagggggtggaaagtatgaaaagaaaaarcaaaaggcaataaaagtgcataatgggctggtttccacggtgatcaagtagaaatcagtattgctggaaaatctaagaaggaccatataaaaaatacgtaaaaattgtgccactaaaaggcgaagcaaccagggcttacattctctgttggttataggttgcccctaagaagttaagtgccctgcacttcctgggttacagctacatgctatggtttgagtgtcccctcccaaactcgtgt

SEQ ID NO: 162950 - DNA, 593 bp, Homo sapiens
ccaacatttctcaaagcatatttcatggaacacctactccagggtaccttgaaagatgttagggataaaaaaatgttcgcgggcagtgaagtctgggaaagcctgagctgaagaaagctggatggacaggttagtttgcaacaggactactgagagccttgactgtgttggtgtgtatcgtgaatgtctgagagaagaacaagcatatagtgtttccccaaattatttgacattgtaacttaatttagattctcccaaaagcagagacaaaagcttggtatcaagtgtagtttatttgggagttgattccagtgatcagaaatgagggggtggaaagtatgaaaagaaaaagcaaaaggcaataaaagtgcataatgggctggtttccacggtgatcaagtagaaatcagtattgctggaaaatctaagaaggaccrtataaaaaatacgtaaaaattgtgccactaaaaggcgaagcaaccagggcttacattctctgttggttataggttgcccctaagaagttaagtgccctgcacttcctgggttacagctacatgctatggtttgagtgtcccctcccaaactcgtgt

SEQ ID NO: 162951 - DNA, 550 bp, Homo sapiens
cccacctcagtttagagattcactccagttggaccagttttgatcctaaagacccttgacattttcagtggccaaaagaatgtgatgcaaaaccttccttatgcaatcacatgccctccaccaagggtggctgtcttttgacagctgggcaacataagtggttgacaattctaaaataaatgaatgaatacataaatagatcttaatgaggacttagtaacttgacatgcatgagtagtatagtctacacaaggctatcttcttaccaaataatgtccaaaccccctcacttctttataatgaatgagaataacttctatagtgtcttccaccaccccaacacacacccaccatctttgtggatatcatgcagcttttaaagaattgttgatttaacactgcaatgcacacaggtggctaatggagcrcctatggcacagaggaggcagtcactttacctgaagtcacagagcaggccaattctagagcagaaaacagacaagtctgatgtccaaaggctaccaggccatcacagaaactcaatgtgttc

SEQ ID NO: 162952 - DNA, 607 bp, Homo sapiens
aacacataaatttctggaattgagaacctgggaaaattgcaaacagcataaacctmaaaaaatccataaggcacattatgatcaaacttctgaaaactaaacataaaaaaaaaaaatcaagaagccagcaagagagaagtggcaccctacctataaaaggaaaacaattcaaatgacagtgtatctctcatcagaaaccagggaggcaagaaggaagtggaacaatatttttgaagcactgaaagaaaagaactgtcaactgagaatcccaatatctattcagcgataaacggatcatcaagacaattctcttaggaaaacaaagaaaatttgtcactaaaagaatggctaatgttttctaaacagaaatatatagaagggaggaaggtagaaaactataggcaaaaatatggcaaaaataaaacagactttcactcttttttgagttttctaaattatacttgatggaagcaaaaaaaagttataacattgtcttctgtaattctaaatgtgtaaagaggaactatttaaagacaactatattataagtgagaaagtctaatcaaacatgaagacagataagtttgcaacacttcactagaactgg

SEQ ID NO: 162953 - DNA, 607 bp, Homo sapiens
aacacataaatttctggaattgagaacctgggaaaattgcaaacagcataaacctaaaaaaatccataaggcacattatgatcaaacttctgaaaactaaacataaaaaaaaaaaatcaagaagccagcaagagagaagtggcaccctacctataaaaggaaaacaattcaaatgacagygtatctctcatcagaaaccagggaggcaagaaggaagtggaacaatatttttgaagcactgaaagaaaagaactgtcaactgagaatcccaatatctattcagcgataaacggatcatcaagacaattctcttaggaaaacaaagaaaatttgtcactaaaagaatggctaatgttttctaaacagaaatatatagaagggaggaaggtagaaaactataggcaaaaatatggcaaaaataaaacagactttcactcttttttgagttttctaaattatacttgatggaagcaaaaaaaagttataacattgtcttctgtaattctaaatgtgtaaagaggaactatttaaagacaactatattataagtgagaaagtctaatcaaacatgaagacagataagtttgcaacacttcactagaactgg

SEQ ID NO: 162954 - DNA, 607 bp, Homo sapiens
aacacataaatttctggaattgagaacctgggaaaattgcaaacagcataaacctaaaaaaatccataaggcacattatgatcaaacttctgaaaactaaacataaaaaaaaaaaatcaagaagccagcaagagagaagtggcaccctacctataaaaggaaaacaattcaaatgacagtgtatctctcatcagaaaccagggaggcaagaaggaagtggaacaatatttttgaagcactgaaagaaaagaactgtcaactgagaatcccaatatctattcagcgataaacggatcatcaagacaattctcttaggaaaacaaagaaaatttgtcactaaaagaatggctaatgttttctaaacagaaatatatagaagggaggaaggtagaaaactataggcaaaaatatggcaaaaataaaacagrctttcactcttttttgagttttctaaattatacttgatggaagcaaaaaaaagttataacattgtcttctgtaattctaaatgtgtaaagaggaactatttaaagacaactatattataagtgagaaagtctaatcaaacatgaagacagataagtttgcaacacttcactagaactgg

SEQ ID NO: 162955 - DNA, 400 bp, Homo sapiens
aatttgctaagagagtcgcttttagtggctcttaccacatacacacaagggtaactatgcaagatgacagatatgttaatgtacttgactatagtcaaaattttactatttgtaattatatcaaaacatcatgttgtgtacctgagtattgacaattttaaaraagagaaggccctagtaagaatgagatctttgatggactgaagccttccgtccattcctacaagacatgggttggctccatcttcacctgcaatctcatctcatggccctgccccctcattagatgccccattaatgcccctgaactcatcaagtcagtgtcagattcaggatacagtctacgttgtccttggcctggatgctcctcacacctagagcctcattcaaatgtgctctt

SEQ ID NO: 162956 - DNA, 400 bp, Homo sapiens
aatttgctaagagagtcgcttttagtggctcttaccacatacacacaagggtaactatgcaagatgacagatatgttaatgtacttgactatagtcaaaattttactatttgtaattatatcaaaacatcatgttgtgtacctgagtattgacaattttaaaaaagagaaggccctagtaagaatgagayctttgatggactgaagccttccgtccattcctacaagacatgggttggctccatcttcacctgcaatctcatctcatggccctgccccctcattagatgccccattaatgcccctgaactcatcaagtcagtgtcagattcaggatacagtctacgttgtccttggcctggatgctcctcacacctagagcctcattcaaatgtgctctt

SEQ ID NO: 162957 - DNA, 618 bp, Homo sapiens
atgatttgcaagatggggcccaaaaaaagcatccaaataaaacctgacatctgtgtagaggggacggatagaaacgtctcaggttgattccctagagaactacctgcaggttttctgtggcctgccttatgtaattggggaaataattccttgctctgcctgtagaatttgttcctagctggtgacctaaacatagygctctccaagtggagtacattatttttctggaaaagatctactgagtcagtaatggagctgtggagagtaaagtgagccaaagtaactccaaacctgcaaaagagattcagagaaaaaataaagggagctccaaccaggagcaaaagtcttttttgcccaagtttaagaagtcttttttcataggaaaaaagacttcttacttgggcaattacaagaatcttgaatagacctgcctactgcagagtcaatgtccatgaagacaaccctgccaatgattagactttctacttacacagagaacacagtagcctttccttttagtaatgtagtcttttagctaaatagacctccatacttggaaagaaaacttcgactagttatccacaaaaatagacataaataataagccaaaaatgacca

SEQ ID NO: 162958 - DNA, 300 bp, Homo sapiens
aaaagacacatattatacaattcccatcatgtgaaaacccggaatagggaaatctatagaggcataaattagattagtggttgattagggctgggagtgaggcgatggtggtggtagtgataaagggatacaggggtcatagctaaaggatatkgggtttctttttgagacaatacaaatgttctagaactaactaggctgttggttttccatgtttgtgagaaaaaaattgaattttacatcttacattggtgtattgtttggtatgtgaattatatgtcaatgaagctgccaaaattg

SEQ ID NO: 162959 - DNA, 520 bp, Homo sapiens
ccgtatcattagatcactagaatctagacacacacaaacatatttcctacatatatgtttcttaaggaaatacttggctatgaactcagaattaattagagaagactgcttattaatgatagctaagaaaatgcaattttcattcagtcatttgacatcatcagtagatattacacattaatatttaagaacattagcctgaaactttaaaagacatgagctgaaacccaggtttttgaactagctgcataagcctagtcaagtcatgtaaaatctaaatctcatgtatcctctaacatgagaatgataaaactcacatcatargcttcttgtgaatatcaaggtaaattatataagccatatgcccagtacagctctggcacagagaaaccaattagtgaacaattactacagttcttaatgtctcttgccaatgaaaacattatttctccaacttggctttttaaaaactttgtaatataaaaaatacttaagaactgtaagaccacttttcccttta

SEQ ID NO: 162960 - DNA, 447 bp, Homo sapiens
tcagtggaaccatgagagacagagtcgaaagcagcagagcctggaattatttctctaagcaagacccagacgccaggcaggtagtgaaattgctcctgccccacctccatccttgctgcctatytgagaacagagtctgccaacccctcctgatgagagactgacccctcatagccactgcaggctggaagccataagcttaaaccacttccataccatgaaagcaaaatgtatggttggcaaaaagcaaaaaaaaaaaaaaaaaacaaaaactggttactggcgagtgcagaaccacagtctgggtcgatgacaaattatccagcatgaatcttggtgtgacttaggcccttcttagtcctctaaaattcatcacattttgtttattcgttcactacccacttacagtagatgccaagaaatatatataacaagattatagatata

SEQ ID NO: 162961 - DNA, 427 bp, Homo sapiens
agtcgaaagcagcagagcctggaattatttctctaagcaagacccagacgccaggcaggtagtgaaattgctcctgccccacctccatccttgctgcctatttgagaacagagtctgccaacccctcctgatgagagactgacccctcatagccactgcaggctggaagccataagcttaaaycacttccataccatgaaagcaaaatgtatggttggcaaaaagcaaaaaaaaaaaaaaaaaacaaaaactggttactggcgagtgcagaaccacagtctgggtcgatgacaaattatccagcatgaatcttggtgtgacttaggcccttcttagtcctctaaaattcatcacattttgtttattcgttcactacccacttacagtagatgccaagaaatatatataacaagattatagatataaa

SEQ ID NO: 162962 - DNA, 444 bp, Homo sapiens
tcagtggaaccatgagagacagagtcgaaagcagcagagcctggaattatttctctaagcaagacccagacgccaggcaggtagtgaaattgctcctgccccacctccatccttgctgcctatttgagaacagagtctgccaacccctcctgatgagagactgacccctcatagccactgcaggctggaagccataagcttaaaccacttccataccatgraagcaaaatgtatggttggcaaaaagcaaaaaaaaaaaaaaaaaacaaaaactggttactggcgagtgcagaaccacagtctgggtcgatgacaaattatccagcatgaatcttggtgtgacttaggcccttcttagtcctctaaaattcatcacattttgtttattcgttcactacccacttacagtagatgccaagaaatatatataacaagattatagat

SEQ ID NO: 162963 - DNA, 378 bp, Homo sapiens
acgccaggcaggtagtgaaattgctcctgccccacctccatccttgctgcctatttgagaacagagtctgccaacccctcctgatgagagactgacccctcatagccactgcaggctggaagccataagcttaaaccacttccataccatgaaagcaaaatgtatggttggcaaaaagcaaaaaaaaaaaaaaaaaacaaaaactggttactggcgagtgcaraaccacagtctgggtcgatgacaaattatccagcatgaatcttggtgtgacttaggcccttcttagtcctctaaaattcatcacattttgtttattcgttcactacccacttacagtagatgccaagaaatatatataacaagattatagatata

SEQ ID NO: 162964 - DNA, 449 bp, Homo sapiens
cagtggaaccatgagagacagagtcgaaagcagcagagcctggaattatttctctaagcaagacccagacgccaggcaggtagtgaaattgctcctgccccacctccatccttgctgcctatttgagaacagagtctgccaacccctcctgatgagagactgacccctcatagccactgcaggctggaagccataagcttaaaccacttccataccatgaaagcaaaatgtatggttggcaaaaagcaaaaaaaaaaaaaaaaaacaaaaactggttactggcgagtgcagaaycacagtctgggtcgatgacaaattatccagcatgaatcttggtgtgacttaggcccttcttagtcctctaaaattcatcacattttgtttattcgttcactacccacttacagtagatgccaagaaatatatataacaagattatagatataaat

SEQ ID NO: 162965 - DNA, 448 bp, Homo sapiens
atcagtggaaccatgagagacagagtcgaaagcagcagagcctggaattatttctctaagcaagacccagacgccaggcaggtagtgaaattgctcctgccccacctccatccttgctgcctatttgagaacagagtctgccaacccctcctgatgagagactgacccctcatagccactgcaggctggaagccataagcttaaaccacttccataccatgaaagcaaaatgtatggttggcaaaaagcaaaaaaaaaaaaaaaaaacaaaaactggttactggcgagtgcagaaccacagtctgggtcgatgacaaattatccagcatgaatcttggtgtgacttaggcccytcttagtcctctaaaattcatcacattttgtttattcgttcactacccacttacagtagatgccaagaaatatatataacaagattatagatata

SEQ ID NO: 162966 - DNA, 446 bp, Homo sapiens
cagtggaaccatgagagacagagtcgaaagcagcagagcctggaattatttctctaagcaagacccagacgccaggcaggtagtgaaattgctcctgccccacctccatccttgctgcctatttgagaacagagtctgccaacccctcctgatgagagactgacccctcatagccactgcaggctggaagccataagcttaaaccacttccataccatgaaagcaaaatgtatggttggcaaaaagcaaaaaaaaaaaaaaaaaacaaaaactggttactggcgagtgcagaaccacagtctgggtcgatgacaaattatccagcatgaatcttggtgtgacttaggcccttcttagtcctctaaaattcatcacattttgtttattcrttcactacccacttacagtagatgccaagaaatatatataacaagattatagatata

SEQ ID NO: 162967 - DNA, 622 bp, Homo sapiens
gaataacttgtgtgaagtaagcacagttctacccagatgaaaaattagcctcaacagaccgatgtgtatgaacaaaagtctatctggcctaattccccacaggcccgcaaygcggacacgcctcacttacatactagaaaccatactacatcccagtcacttttcccggcttcggatcacttgtagcataagctctgaacctgttaacactatgtggatgacactttggtggaattaagtcattttcttcctcctattgttctgcgtgcctttcatgggctaagaagaggaacaggtgaaggtagcagcggtcaactctttcatccctagtaaagacgacactgcccttccttggagaagtccatcatgcttccgaaagggcttccaaagacttgtcaatgtggacatcttcgcaagaagccagctaccatctaataaaggcagctgtcaacccacacaccacgctgttctgtggaagcagggagaacgcaatctcctaccctgtttcccacagagggagggaccccactttgccctagaggacagcagagtctaacagggaaccttctcggccctctccctttgtgttatttgctcttccacagggaggaagggcagctgc

SEQ ID NO: 162968 - DNA, 269 bp, Homo sapiens
aagaagcacagcagcttttgcacacatgcgtgggrttagatggaaaacaagtggattgagggtctgccaatgaaagcgacccatactgaagtccactggctctggttgagacccagaagagtcatgcatcagaatagaggtggacaggaaataccctggcctttgtagggactgagcctgcacagacgacctcaattgcagcctgtatggaggacccctgaccatcccccagaagtagactcccatctcttctgcagcaagataacatg

SEQ ID NO: 162969 - DNA, 406 bp, Homo sapiens
gaattccagaaggaactactgagatgcaaagaagcacagcagcttttgcacacatgcgtggggttagatggaaaacaagtggattgagggtctgccaatgaaagcgayccatactgaagtccactggctctggttgagacccagaagagtcatgcatcagaatagaggtggacaggaaataccctggcctttgtagggactgagcctgcacagacgacctcaattgcagcctgtatggaggacccctgaccatcccccagaagtagactcccatctcttctgcagcaagataacatgctactaggtctcagttcattgctaaatattttttaaaaagtatctcacatttaacaaaaaaagatcagtcatatggcagcaaaatacaatgtaatatgaccaaaacatg

SEQ ID NO: 162970 - DNA, 425 bp, Homo sapiens
aagaagcacagcagcttttgcacacatgcgtggggttagatggaaaacaagtggattgagggtctgccaatgaaagcgacccatactgaagtccactggctctggttgagacccagaagagtcatgcatcagaatagaggtggacaggaaataccctggcctttgtagggactgagcctgcasagacgacctcaattgcagcctgtatggaggacccctgaccatcccccagaagtagactcccatctcttctgcagcaagataacatgctactaggtctcagttcattgctaaatattttttaaaaagtatctcacatttaacaaaaaaagatcagtcatatggcagcaaaatacaatgtaatatgaccaaaacatgaaagactgtgaaaatgaatctggaggtgacccaagcattgaattcaa

SEQ ID NO: 162971 - DNA, 269 bp, Homo sapiens
aagaagcacagcagcttttgcacacatgcgtggggttagatggaaaacaagtggattgagggtctgccaatgaaagcgacccatactgaagtccactggctctggttgagacccagaagagtcatgcatcagaatagaggtggacaggaaataccctggcctttgtagggactgagcctgcacmgacgacctcaattgcagcctgtatggaggacccctgaccatcccccagaagtagactcccatctcttctgcagcaagataacatg

SEQ ID NO: 162972 - DNA, 435 bp, Homo sapiens
gctgaattccagaaggaactactgagatgcaaagaagcacagcagcttttgcacacatgcgtggggttagatggaaaacaagtggattgagggtctgccaatgaaagcgacccatactgaagtccactggctctggttgagacccagaagagtcatgcatcagaatagaggtggacaggaaataccctggcctttgtagggactgagcctgcacagacgacctcaattgcagcctgtayggaggacccctgaccatcccccagaagtagactcccatctcttctgcagcaagataacatgctactaggtctcagttcattgctaaatattttttaaaaagtatctcacatttaacaaaaaaagatcagtcatatggcagcaaaatacaatgtaatatgaccaaaacatgaaagactgtgaaaatgaatctggagg

SEQ ID NO: 162973 - DNA, 376 bp, Homo sapiens
ttttgcacacatgcgtggggttagatggaaaacaagtggattgagggtctgccaatgaaagcgacccatactgaagtccactggctctggttgagacccagaagagtcatgcatcagaatagaggtggacaggaaataccctggcctttgtagggactgagcctgcacagacgacctcaattgcagcctgtatggaggacccctgaccatcccccagaagtagactcccatctcttctgcagcaagataacatgctactaggyctcagttcattgctaaatattttttaaaaagtatctcacatttaacaaaaaaagatcagtcatatggcagcaaaatacaatgtaatatgaccaaaacatgaaagactgtgaaa

SEQ ID NO: 162974 - DNA, 376 bp, Homo sapiens
ttttgcacacatgcgtggggttagatggaaaacaagtggattgagggtctgccaatgaaagcgacccatactgaagtccactggctctggttgagacccagaagagtcatgcatcagaatagaggtggacaggaaataccctggcctttgtagggactgagcctgcacagacgacctcaattgcagcctgtatggaggacccctgaccatcccccagaagtagactcccatctcttctgcagcaagataacatgctactaggtctcarttcattgctaaatattttttaaaaagtatctcacatttaacaaaaaaagatcagtcatatggcagcaaaatacaatgtaatatgaccaaaacatgaaagactgtgaaa

SEQ ID NO: 162975 - DNA, 435 bp, Homo sapiens
gctgaattccagaaggaactactgagatgcaaagaagcacagcagcttttgcacacatgcgtggggttagatggaaaacaagtggattgagggtctgccaatgaaagcgacccatactgaagtccactggctctggttgagacccagaagagtcatgcatcagaatagaggtggacaggaaataccctggcctttgtagggactgagcctgcacagacgacctcaattgcagcctgtatggaggacccctgaccatcccccagaagtagactcccatctcttctgcagcaagataacatgctactaggtctcagtkcattgctaaatattttttaaaaagtatctcacatttaacaaaaaaagatcagtcatatggcagcaaaatacaatgtaatatgaccaaaacatgaaagactgtgaaaatgaatctggagg

SEQ ID NO: 162976 - DNA, 376 bp, Homo sapiens
ttttgcacacatgcgtggggttagatggaaaacaagtggattgagggtctgccaatgaaagcgacccatactgaagtccactggctctggttgagacccagaagagtcatgcatcagaatagaggtggacaggaaataccctggcctttgtagggactgagcctgcacagacgacctcaattgcagcctgtatggaggacccctgaccatcccccagaagtagactcccatctcttctgcagcaagataacatgctactaggtctcagttcattgctaaatattttttaamaagtatctcacatttaacaaaaaaagatcagtcatatggcagcaaaatacaatgtaatatgaccaaaacatgaaagactgtgaaa

SEQ ID NO: 162977 - DNA, 420 bp, Homo sapiens
tgaattccagaaggaactactgagatgcaaagaagcacagcagcttttgcacacatgcgtggggttagatggaaaacaagtggattgagggtctgccaatgaaagcgacccatactgaagtccactggctctggttgagacccagaagagtcatgcatcagaatagaggtggacaggaaataccctggcctttgtagggactgagcctgcacagacgacctcaattgcagcctgtatggaggacccctgaccatcccccagaagtagactcccatctcttctgcagcaagataacatgctactaggtctcagttcattgctaaatattttttaaaaagtatctcacatttaacaaaaaaagatcagtcatatggcagcaaaatacaatgtmatatgaccaaaacatgaaagactgtgaaa

SEQ ID NO: 162978 - DNA, 630 bp, Homo sapiens
tcagcaattctcctgtctcagcctcctgagtagctggractacaggctgacaccaccatgcccggctaatttttgtatttttagtagggacgaggttttgccatattggtcaggctggtctcgaagtcctggcctctggtgatccaccagcctcagcctcccaaaatgctgggattacaggcatgagtcaccatgcccagcctaaacttggcaagataataaataacctttttaagtgtcgttgggcacttgtctggttgtttttctttaggttaccatgccagcaatgattccttttgagtttctgacagaagatagtggttttcatccaaataagtcaactactctaccccatccctaagccacttgtatggaaagaaaaagaggaagaagccagtactgagactgcgtaagcttcccccagcatcacccgctatgagatgtgtggcagctgagacccgggaactgctcaagggcaccaggccccatctgtctgcactcactcaccttcctcaggtactcgcatgggcatgtcactgactttacgtgctgctgcagctccttggtgagctggccctggtcatgggacaggaaccgtggggtcaggacaatagagagcttcaccatttg

SEQ ID NO: 162979 - DNA, 630 bp, Homo sapiens
tcagcaattctcctgtctcagcctcctgagtagctggaactacaggctgacaccaccatgcccggctaatttttgtatttttartagggacgaggttttgccatattggtcaggctggtctcgaagtcctggcctctggtgatccaccagcctcagcctcccaaaatgctgggattacaggcatgagtcaccatgcccagcctaaacttggcaagataataaataacctttttaagtgtcgttgggcacttgtctggttgtttttctttaggttaccatgccagcaatgattccttttgagtttctgacagaagatagtggttttcatccaaataagtcaactactctaccccatccctaagccacttgtatggaaagaaaaagaggaagaagccagtactgagactgcgtaagcttcccccagcatcacccgctatgagatgtgtggcagctgagacccgggaactgctcaagggcaccaggccccatctgtctgcactcactcaccttcctcaggtactcgcatgggcatgtcactgactttacgtgctgctgcagctccttggtgagctggccctggtcatgggacaggaaccgtggggtcaggacaatagagagcttcaccatttg

SEQ ID NO: 162980 - DNA, 630 bp, Homo sapiens
tcagcaattctcctgtctcagcctcctgagtagctggaactacaggctgacaccaccatgcccggctaatttttgtatttttagtagggacgaggttttgccatattggtcaggctggtctcgaagtcctggcctctggtgatccaccagcctcagcctcccaaaatgctgggattacaggcatgagtcaccatgcccagcctaaacttggcaagataataaataaccttttwaagtgtcgttgggcacttgtctggttgtttttctttaggttaccatgccagcaatgattccttttgagtttctgacagaagatagtggttttcatccaaataagtcaactactctaccccatccctaagccacttgtatggaaagaaaaagaggaagaagccagtactgagactgcgtaagcttcccccagcatcacccgctatgagatgtgtggcagctgagacccgggaactgctcaagggcaccaggccccatctgtctgcactcactcaccttcctcaggtactcgcatgggcatgtcactgactttacgtgctgctgcagctccttggtgagctggccctggtcatgggacaggaaccgtggggtcaggacaatagagagcttcaccatttg

SEQ ID NO: 162981 - DNA, 605 bp, Homo sapiens
caataagctttctcaaccaacaataccatcttccaaaaatcctcaaagattaagcaaagaggggtcctgtgaaagatcgtgaaagtcagacatgaaagattttttaatttcacaagcccattttaatttgaagcaagggacttttcattaagcatccgacatgtcagtaccttcagtttgtaagatttagaactaatctttcttggccgggtgcagtgtctcacacctataatcccagcactttgggaggccaaagcaggcagacagcctgaggttaggagttttgagactagcctggacaacatatagtgaaaccctgtctctactaaaaaatacaaaaattagctgggtgtggtggggcacgcctrtagtcccagctacttgggaagctgaggcaggagaatcacttgaacctgggaggcagaggttgcagtgagtcgagatggcaccactgcactacagcctgggcaacagggcaagactctgtctctcaaaaaaaaaaaaaaaaagtactaatctttcttaagttcttaagctcggcaaagacacacagatcacaggtcattcggttctacactggctgccagcatatttactggcgcttc

SEQ ID NO: 162982 - DNA, 605 bp, Homo sapiens
caataagctttctcaaccaacaataccatcttccaaaaatcctcaaagattaagcaaagaggggtcctgtgaaagatcgtgaaagtcagacatgaaagattttttaatttcacaagcccattttaatttgaagcaagggacttttcattaagcatccgacatgtcagtaccttcagtttgtaagatttagaactaatctttcttggccgggtgcagtgtctcacacctataatcccagcactttgggaggccaaagcaggcagacagcctgaggttaggagttttgagactagcctggacaacatatagtgaaaccctgtctctactaaaaaatacaaaaattagctgggtgtggtggggcacgcctgtagtcccagctacttgggaagctgaggcaggagaatcacttgaacctgggaggcagaggttgcagtgagtcgagatggcaccactgcactacagcctgggcaacagggcaagactctgtctctcaaaaaaaaaaaaaaaaagtactaatctttcttaagttcttaagctcggcaaagacacacagatcacaggtcattyggttctacactggctgccagcatatttactggcgcttc

SEQ ID NO: 162983 - DNA, 597 bp, Homo sapiens
tcttccaaaaatcctcaaagattaagcaaagaggggtcctgtgaaagatcgtgaaagtcagacatgaaagattttttaatttcacaagcccattttaatttgaagcaagggacttttcattaagcatccgacatgtcagtaccttcagtttgtaagatttagaactaatctttcttggccgggtgcagtgtctcacacctataatcccagcactttgggaggccaaagcaggcagacagcctgaggttaggagttttgagactagcctggacaacatatagtgaaaccctgtctctactaaaaaatacaaaaattagctgggtgtggtggggcacgcctgtagtcccagctacttgggaagctgaggcaggagaatcacttgaacctgggaggcagaggttgcagtgagtcgagatggcaccactgcactacagcctgggcaacagggcaagactctgtctctcaaaaaaaaaaaaaaaaagtactaatctttcttaagttcttaagctcggcaaagacacacagatcacaggtcattcggttctacactggctgccagcatatttactggygcttccaaatccacacgataagctt

SEQ ID NO: 162984 - DNA, 593 bp, Homo sapiens
aactaatttccagagagcctattagagactccccaggcctcatccacaccctctcccgccactctcggcccactgcagaacgctcatcttacttgatagtcacagtgacatccatcattttgtcggtggtgatagttccaaggacatggtggcgaatggctgtcaatgtcaagatactaggtgaagacctacaaatcaaagcagaggaaacgctagaacctactcattctcagaagatcatcagcaataccctttttgggcatccttcttcaccctaaatatactacagaaaattgctyttagtctggggtaaaataactctggagatccagagaagtattttaaagagtaaactaattctccactccacaactttatgcttccaattcccagtgaaacccacacacttctgtaaaaatacaaaaatggcagacttgaacttgacagacgcccatcggtgagggctgggagatttgacaaagcttctatttaaggcacttcaaaaacacagccctctatcctggggttacagaattcttgggaaagggatcctgtctccggttcctcagtaactaatccaagtgtcttaaaat

SEQ ID NO: 162985 - DNA, 569 bp, Homo sapiens
aaaactaatttccagagagcctattagagactccccaggcctcatccacaccctctcccgccactctcggcccactgcagaacgctcatcttacttgatagtcacagtgacatccatcattttgtcggtggtgatagttccaaggacatggtggcgaatggctgtcaatgtcaagatactaggtgaagacctacaaatcaaagcagaggaaacgctagaacctactcattctcagaagatcatcagcaataccctttttgggcatccttcttcaccctaaatatactacagaaaattgctcttagtctggggtaaaataactctggagatccagagaagtattttaaagagtaaactaattctccactccacaactttatgcttccaattcccagtgaaacccacacacktctgtaaaaatacaaaaatggcagacttgaacttgacagacgcccatcggtgagggctgggagatttgacaaagcttctatttaaggcacttcaaaaacacagccctctatcctggggttacagaattcttgggaaagggatcctgtctccggttcctc

SEQ ID NO: 162986 - DNA, 486 bp, Homo sapiens
gctcatcttacttgatagtcacagtgacatccatcattttgtcggtggtgatagttccaaggacatggtggcgaatggctgtcaatgtcaagatactaggtgaagacctacaaatcaaagcagaggaaacgctagaacctactcattctcagaagatcatcagcaataccctttttgggcatccttcttcaccctaaatatactacagaaaattgctcttagtctggggtaaaataactctggagatccagagaagtattttaaagagtaaactaattctccactccacaactttatgcttccaattcccagtgaaacccacacacttctgtaaaaatacaaaaatggcagacttgaacttgacagacgcccatcggtgagggctgggagatttgacaaakcttctatttaaggcacttcaaaaacacagccctctatcctggggttacagaattcttgggaaagggatcctgtctccggttcctc

SEQ ID NO: 162987 - DNA, 402 bp, Homo sapiens
ttgctagtgtaggaaagggcatggttaatgcagcctggtgaggcacactagtgatttcccatcataagtgacaagcagtcccctcttaccttatcatacaaagggatcataaagtaaccattattaggggcacagtctgtctggtatttcaaagtcccatgcttggtgtacagctttatctggaaaggaaggaaggaaaacagaaatcataacattgcctttgggaattaactacacatgttacacctgaatgcactcagtcagtmtacattcactgaggacctattatatgccagcttttaacacggggcattactggggacagagggaaatcaacaaactctctcccaaatcatgtgactcaatgtttttcagattagaaaccatctacagcctattaca

SEQ ID NO: 162988 - DNA, 500 bp, Homo sapiens
ttgttggtggaattatctaacaactttctcaaatctttctgacccatatatttcgcaggtaaaatatataatctcacaaaaagctttagggccgggtgtgtggctcacgcctgtaatcccagcactttgggaggctgaggtgggtggatcgcttgagcccaggagttcgagaccagcctgggcaatatggcgaaaccccatctctacacacacacgcgcacacgcacacacacgcacacacacacacacacgaaaaacacacacgaaaaacgctttargaatttgtgtaagctggtgtatttttccatgataaatgatcgatacttttttaagcaaaacgtgttaatgttagcatattaaagaaagtatgtaagatttattttaatcctagctctaataacatatgcctagaaacaaattttgatgagttttcttcccctaagcaagaagtgcatgcagtcagtatactttgaattagctctgcaagatgaaacatgatt

SEQ ID NO: 162989 - DNA, 482 bp, Homo sapiens
gttggatcaaaaagcatgaacaattgctaaaactcttaatatgtcttgtcaattagctctccaaacaaatatgagtcattgcctgaaatctcttttgtcmtcaggaagggatagagctgcttgactcagatctcccaggtggccttagaccgtaatgtcttcctttcgtgcagagctcttaccatcctaagccactactcctacctaatattctataaaaagctttttctccctacccagtgtctccaatgagctgactttcttttctggattactcttttatgtaataaaaagtagacatgagggtcaaacagaaagggaaaaaggggaatttgtttaatttctaccaagtgccaggcatagtacaaagaacatttagataaggcagaaggcattaattatttttatctacccagaaccccctgccccacctaagcaccccagcccctgacctggccacgtgggtggctatgtgacccgag

SEQ ID NO: 162990 - DNA, 374 bp, Homo sapiens
atgtaataaaaagtagacatgagggtcaaacagaaagggaaaaaggggaatttgtttaatttctaccaagtgccaggcatagtacaaagaacatttagataaggcagaaggcattaattatttttatctacccagaacccmctgccccacctaagcaccccagcccctgacctggccacgtgggtggctatgtgacccgagctgaaccaatcagagtccttccctgggatctttttcacatcataaccacatgagaaggtctcccattatgaaacagagaagcttgttggcagccatggttctagccaaggatggaaaaaacaaccaaaaaaagaaaagaaacaaaaaaaacccaccatggtaaaaatatatat

SEQ ID NO: 162991 - DNA, 374 bp, Homo sapiens
atgtaataaaaagtagacatgagggtcaaacagaaagggaaaaaggggaatttgtttaatttctaccaagtgccaggcatagtacaaagaacatttagataaggcagaaggcattaattatttttatctacccagaaccccctgccccacctaagcaccccagcccctgacctggccacgtgggtggctatgtgacccgagctgaaccaatcagagtccttccctgggatytttttcacatcataaccacatgagaaggtctcccattatgaaacagagaagcttgttggcagccatggttctagccaaggatggaaaaaacaaccaaaaaaagaaaagaaacaaaaaaaacccaccatggtaaaaatatatat

SEQ ID NO: 162992 - DNA, 506 bp, Homo sapiens
cacaggcttgacaatggctggagctcagcctccacagtatctgttgtgattagtgctcaaaagcataaagcataactggaactaagaagaaacaagatgctcaaggtctccccttcagccttccttccaagtaacagaatcatgatttgatgatttgaccccttcttctaccacctcaatattgaaatctgtttccaattcccgttaccttagagaacaccrtcagatgtccattgtatatctcagattcatttctttccaaaaacgaatttaacttgccttccaaataattttactcctaatttttagctcactttctccatgaatatcatcgccattcacccagttacccaaaccaagagcctgaacaacatctttgagtccttctccatcacaccctacattcaaccaattgccaccttctcttttatatacctccttaagtcacggccttaatttgggaatgatcgtttctcatttggacttgacttcatggtcaaatatgg

SEQ ID NO: 162993 - DNA, 593 bp, Homo sapiens
atttttctaggaccagtgaccaactaagtcatgtttttctcatagagaaggcaaaagcacaagaaggcaaactcatcacacgagagcatttcaagcctttcataagggttatgtcctctcacatcccattagccaaagaaagttaagctcaactcaacagtygaagggtagggaagtacactatgccatctctcagggaaaaggaagtcacatagcctagctgaacatcaatgatgtaataggagagggaacaaatatttactaaacaatagtctcatctaccgtaaagctcaaatacttcacaaaagagccacccttagaaatagcttttatctcatctattttatgggtgagtggggaagaaggatgacaaagcccctttaagaattttatataccctagacacattcacttttggaggtctcaccagaaagcatttgaaacatgctacaaatttgcctgtatcctacattaaatggatttttggctctaaacattttttgagaaaattttaaaattctgctcctgaaattatctggcaataggtgatttatttaaatttagattggatgtgatttcttggtaattgtgca

SEQ ID NO: 162994 - DNA, 595 bp, Homo sapiens
cctgcgagcagctgtccacacctcctggcactctctgtatctgtcccgtccctgccagctccccacccgcccagtgcttcaccagctcacccctcagacactgtccaggtgggaaycattcccctcaactccctccagaacaaccagatggcacctgccagcagccctgggagccagaatcccacccacctgacccaagggctctatctgatctcagcctaacccatgaatcaggccctttggagagccaaaggaaaattgggcttccctgccagctgactatgtgacagttcagatgtcccagagcacaggaaagaggcagagacagggtcgtgaggagcccttgcttctccttcaacatctcccataaacagctggagaggggctctcacagggtccatgggaagagaccaaggaggggcatggaggagaggggagggctgagaagaccagggtgaaatggatgaggagaaggaagcagatggcagggaccctcccatctcccacatgggctcccttaggtgctactggccttgtgcaaatttgcacactcacattcacacatttctgtctgcttctctccaatcgttcagat

SEQ ID NO: 162995 - DNA, 616 bp, Homo sapiens
cctggcaaagtcaccaagagccctgcgagcagctgtccacacctcctggcactctctgtatctgtcccgtccctgccagctccccacccgcccagtgcttcaccagctcacccctcagacactgtccaggtgggaaccattcccctcaactccctccagaacaaccagatggcacctgccagcagccctgggagccagaatcccacccacctgacccaagggctctatctgatctcagcctaacccatgaatcaggccctttggagagccaaaggaaaattgggcttccctgccagctgactatgtgacagttcagatgtcccagagcacaggaaagaggcagagacagggtcgtgaggagcccttgcttctccttcaacatctcccataaacarctggagaggggctctcacagggtccatgggaagagaccaaggaggggcatggaggagaggggagggctgagaagaccagggtgaaatggatgaggagaaggaagcagatggcagggaccctcccatctcccacatgggctcccttaggtgctactggccttgtgcaaatttgcacactcacattcacacatttctgtctgcttctctccaatcgttcagat

SEQ ID NO: 162996 - DNA, 622 bp, Homo sapiens
gcaaagtcaccaagagccctgcgagcagctgtccacacctcctggcactctctgtatctgtcccgtccctgccagctccccacccgcccagtgcttcaccagctcacccctcagacactgtccaggtgggaaccattcccctcaactccctccagaacaaccagatggcacctgccagcagccctgggagccagaatcccacccacctgacccaagggctctatctgatctcagcctaacccatgaatcaggccctttggagagccaaaggaaaattgggcttccctgccagctgactatgtgacagttcagatgtcccagagcacaggaaagaggcagagacagggtcgtgaggagcccttgcttctccttcaacatctcccataaacagctggagaggggctctcacagggtccatgggaagagaccaaggaggggcatggaggagaggggagggctgagaagaccagggtgaaatggatgaggagaaggaagcagatggcagggaccctcccatctcccacatgggcycccttaggtgctactggccttgtgcaaatttgcacactcacattcacacatttctgtctgcttctctccaatcgttcagatacctagcaca

SEQ ID NO: 162997 - DNA, 360 bp, Homo sapiens
agagccaaaggaaaattgggcttccctgccagctgactatgtgacagttcagatgtcccagagcacaggaaagaggcagagacagggtcgtgaggagcccttgcttctccttcaacatctcccataaacagctggagaggggctctcacagggtccatgggaagagaccaaggaggggcatggaggagaggggagggctgagaagaccagggtgaaatggatgaggagaaggaagcagatggcagggaccctcccatctcccacatgggctcccttaggtgctactggccttgtgcaaatttgcacactcacattcacacatttctgtctgcwtctctccaatcgttcagatacctagca

SEQ ID NO: 162998 - DNA, 550 bp, Homo sapiens
ttttttccttcagccggttcatgttaggtttctctcatagcccctaaacacagtgctcaaataccaataacctggatcccatcttgcrgctctgcaggaagctgtttttgcacaaggttcttccacatttctgggaaccaggagatgtctacttcagctacaatctctcctgctcgtcccctgtcccctcgggagggtctggctcagaacagatttcactgtgggacccaagccaacctgttagccactcctaccccaggacgggtgaaacacagtcttgcagtaacaagacttacttttgaaggatggaattacaatatggaaaaaatacaacttcacaaggtacacgttcagttcatagcagcagccaagactttgaaggaagagttcaagtcgccacaaaaacatagcagagggaatagtacggattttagagccagatagtactggagacttggagactgcagggctgggagggtcacagacagtcctgagttcaaatctccactccaccactcattgcccacgtgaccttgagcaagttatttaa

SEQ ID NO: 162999 - DNA, 427 bp, Homo sapiens
tgcggtgaaacgggcagcgattccagagccatcacaactcctggctgaaaccaaacatgacagatttaccattgggcaggctgctccatttattatttaacrctcgcaataaatatttgcatgacccagtgctggagggaacgctctgtgataactcactgcattttcctgccaaacaccagcacagtcggattccgaagctgcagcagagaatattttatgctattctaaaaatccaggtgatggccccttgttagaaaaccttttctcatccatttccatagaggaaaaaaggagcagggagaccttagctccgagaagcaactagaggaggaagaagaggaggaggaagatgctgacaggtgacatttacttagcacctactgagtgccaggccctaagctaaggacttcacactcattcattc

SEQ ID NO: 163000 - DNA, 413 bp, Homo sapiens
cgggcagcgattccagagccatcacaactcctggctgaaaccaaacatgacagatttaccattgggcaggctgctccatttattatttaacactcgcaataaatatttgcatgacccagtgctggagggaacgctctgtgataactcactgcattttcctgccaaacaccagcacagtcggattccgaagctgcagcagagaatattttatgctattctaaaaatccaggtgatggycccttgttagaaaaccttttctcatccatttccatagaggaaaaaaggagcagggagaccttagctccgagaagcaactagaggaggaagaagaggaggaggaagatgctgacaggtgacatttacttagcacctactgagtgccaggccctaagctaaggacttcacactcattc

SEQ ID NO: 163001 - DNA, 427 bp, Homo sapiens
tgcggtgaaacgggcagcgattccagagccatcacaactcctggctgaaaccaaacatgacagatttaccattgggcaggctgctccatttattatttaacactcgcaataaatatttgcatgacccagtgctggagggaacgctctgtgataactcactgcattttcctgccaaacaccagcacagtcggattccgaagctgcagcagagaatattttatgctattctaaaaatccaggtgatggccccttgttagaaaaccttttctcatccatttccatagaggaaaaaaggagcagggagaccttagctcygagaagcaactagaggaggaagaagaggaggaggaagatgctgacaggtgacatttacttagcacctactgagtgccaggccctaagctaaggacttcacactcattcattc

SEQ ID NO: 163002 - DNA, 427 bp, Homo sapiens
tgcggtgaaacgggcagcgattccagagccatcacaactcctggctgaaaccaaacatgacagatttaccattgggcaggctgctccatttattatttaacactcgcaataaatatttgcatgacccagtgctggagggaacgctctgtgataactcactgcattttcctgccaaacaccagcacagtcggattccgaagctgcagcagagaatattttatgctattctaaaaatccaggtgatggccccttgttagaaaaccttttctcatccatttccatagaggaaaaaaggagcagggagaccttagctccgagaagcaactagaggaggargaagaggaggaggaagatgctgacaggtgacatttacttagcacctactgagtgccaggccctaagctaaggacttcacactcattcattc

SEQ ID NO: 163003 - DNA, 604 bp, Homo sapiens
aagcttgtgctgggaggtgaagggagaacaactcgctggaggaagcaaggaagaggagatttagttagagcagacagccaggatcagagcatgcagggtctgatcatttatttccaagttattctgaaatcaaagagaagcaggcttttaagctaagaatgcagcacatcggctrgcatagaataagagttcaaaaaaagtgtaagctcccttccctatcctgaaacaaccaaagtaaataaaaatggcccctctgttttcaattatttatttatttgtgctttcaaactgttttcttaaaaaaaaaaaaaaaactacagagtagtgagtgggggcgggggggtaaggggtggaatactcaaaacgtgttcaaaatcaaacgagccagaaactcctcgctggaaattttctctctagatctctgcaggaatcagtggaaccatgagagacagagtcgaaagcagcagagcctggaattatttctctaagcaagacccagacgccaggcaggtagtgaaattgctcctgccccacctccatccttgctgcctatttgagaacagagtctgccaacccctcctgatgagagactgacccctcatag

SEQ ID NO: 163004 - DNA, 606 bp, Homo sapiens
aagcttgtgctgggaggtgaagggagaacaactcgctggaggaagcaaggaagaggagatttagttagagcagacagccaggatcagagcatgcagggtctgatcatttatttccaagttattctgaaatcaaagagaagcaggcttttaagctaagaatgcagcacatcggctagcatagaataagagttcaaaaaaagtgtaagctcccttccctmtcctgaaacaaccaaagtaaataaaaatggcccctctgttttcaattatttatttatttgtgctttcaaactgttttcttaaaaaaaaaaaaaaaactacagagtagtgagtgggggcgggggggtaaggggtggaatactcaaaacgtgttcaaaatcaaacgagccagaaactcctcgctggaaattttctctctagatctctgcaggaatcagtggaaccatgagagacagagtcgaaagcagcagagcctggaattatttctctaagcaagacccagacgccaggcaggtagtgaaattgctcctgccccacctccatccttgctgcctatttgagaacagagtctgccaacccctcctgatgagagactgacccctcatagcc

SEQ ID NO: 163005 - DNA, 605 bp, Homo sapiens
aagcttgtgctgggaggtgaagggagaacaactcgctggaggaagcaaggaagaggagatttagttagagcagacagccaggatcagagcatgcagggtctgatcatttatttccaagttattctgaaatcaaagagaagcaggcttttaagctaagaatgcagcacatcggctagcatagaataagagttcaaaaaaagtgtaagctcccttccctatcctgaaacaaccaaagtaaataaaaatggcccctctgttttsaattatttatttatttgtgctttcaaactgttttcttaaaaaaaaaaaaaaaactacagagtagtgagtgggggcgggggggtaaggggtggaatactcaaaacgtgttcaaaatcaaacgagccagaaactcctcgctggaaattttctctctagatctctgcaggaatcagtggaaccatgagagacagagtcgaaagcagcagagcctggaattatttctctaagcaagacccagacgccaggcaggtagtgaaattgctcctgccccacctccatccttgctgcctatttgagaacagagtctgccaacccctcctgatgagagactgacccctcatagc

SEQ ID NO: 163006 - DNA, 605 bp, Homo sapiens
aagcttgtgctgggaggtgaagggagaacaactcgctggaggaagcaaggaagaggagatttagttagagcagacagccaggatcagagcatgcagggtctgatcatttatttccaagttattctgaaatcaaagagaagcaggcttttaagctaagaatgcagcacatcggctagcatagaataagagttcaaaaaaagtgtaagctcccttccctatcctgaaacaaccaaagtaaataaaaatggcccctctgttttcaattatttatttatttktgctttcaaactgttttcttaaaaaaaaaaaaaaaactacagagtagtgagtgggggcgggggggtaaggggtggaatactcaaaacgtgttcaaaatcaaacgagccagaaactcctcgctggaaattttctctctagatctctgcaggaatcagtggaaccatgagagacagagtcgaaagcagcagagcctggaattatttctctaagcaagacccagacgccaggcaggtagtgaaattgctcctgccccacctccatccttgctgcctatttgagaacagagtctgccaacccctcctgatgagagactgacccctcatagc

SEQ ID NO: 163007 - DNA, 606 bp, Homo sapiens
gggagaacaactcgctggaggaagcaaggaagaggagatttagttagagcagacagccaggatcagagcatgcagggtctgatcatttatttccaagttattctgaaatcaaagagaagcaggcttttaagctaagaatgcagcacatcggctagcatagaataagagttcaaaaaaagtgtaagctcccttccctatcctgaaacaaccaaagtaaataaaaatggcccctctgttttcaattatttatttatttgtgctttcaaactgttttcttaaaaaaaaaaaaaaaactacagagtagtgagtgggggcgggggggtaaggggtggaatactcaaaacgtgttcaaaatcaaacgagmcagaaactcctcgctggaaattttctctctagatctctgcaggaatcagtggaaccatgagagacagagtcgaaagcagcagagcctggaattatttctctaagcaagacccagacgccaggcaggtagtgaaattgctcctgccccacctccatccttgctgcctatttgagaacagagtctgccaacccctcctgatgagagactgacccctcatagccactgcaggctggaagccataa

SEQ ID NO: 163008 - DNA, 517 bp, Homo sapiens
tcatcaggaatacgaatacctgggctagaacctgagatagagctgtggactcattttcctcagacagaagatcttgaaactttctcttcatgtcttcatcctgtgagggaattaaaaacataagtagctgtgtctgaaggatagcaaactcctagaatgacaggggtagcatgcccctgtggaaagagggaggaaaagatgtccgtccaagaatcacgcccttgatgaagctcccacagcgaaggcattatgtgttgcccccctctaccttcccagaggagtccaattagcagtcaatgttccatcaatcctggctgactcacatccacatgcctaaaagctctcagtgggtcaatcacagcctccagcagtcaagagtttctgaattarcatcccagatcctgagaaaggtgacaatcagggggccaggggccgggcctgactccgtgcagatcctcaaatccttccgggaccactctccacctgctgcctctgccatgaatgaggccagtcaccc

SEQ ID NO: 163009 - DNA, 517 bp, Homo sapiens
tcatcaggaatacgaatacctgggctagaacctgagatagagctgtggactcattttcctcagacagaagatcttgaaactttctcttcatgtcttcatcctgtgagggaattaaaaacataagtagctgtgtctgaaggatagcaaactcctagaatgacaggggtagcatgcccctgtggaaagagggaggaaaagatgtccgtccaagaatcacgcccttgatgaagctcccacagcgaaggcattatgtgttgcccccctctaccttcccagaggagtccaattagcagtcaatgttccatcaatcctggctgactcacatccacatgcctaaaagctctcagtgggtcaatcacagcctccagcagtcaagagtttctgaattagcatcccagatcctgagaaaggtgacaatcagggggccaggggcygggcctgactccgtgcagatcctcaaatccttccgggaccactctccacctgctgcctctgccatgaatgaggccagtcaccc

SEQ ID NO: 163010 - DNA, 372 bp, Homo sapiens
tggctgtgttgaatggaactgctcattagagaagaccagacatctatcagaaaacctgcccaatggcatagctaattccaaaactaaagattaatccagcaaagccaaaacgtacttccaactcttggcagttctaaatgaggtcaggatttaataatggcagccccaacmcctagcaggagcacagcactaacacagatgaaaggtgcaggtgacggccttcactaaggacacatttactcacctgaatgaacaagcagtgggaccctttataccagtcacttgggcttgagaaatagctggattctccccagggaggctgccctcctccccctcccccacttcccttatttaaggttgaagatggctgga

SEQ ID NO: 163011 - DNA, 397 bp, Homo sapiens
atggttttgtcctttattctgttaatatagtttattacattgatttttggatgttaagtcaacctcacattcctgagataaacttcatttgattrtggtataaaatccttttcatatgttgctcaattacatttgctaatatttggttaagaatttttatgtctaggttcacaagggatattggtatatagctgtgttttcttgtaatgtctttgtcttgttttgatatcagggtaatattgatatcaaatgaaataaagttagttgggaagtttccttcatcctctatttgctgaataaagcttttgtaacattggtattatttcctcccttaatagcttcatagaattcaccagtgaagtatattttttctctataggaagatttgaaattactg

SEQ ID NO: 163012 - DNA, 397 bp, Homo sapiens
atggttttgtcctttattctgttaatatagtttattacattgatttttggatgttaagtcaacctcacattcctgagataaacttcatttgattatggtataaaatccttttcatatgttgctcaattacatttgctaatatttggttaagaatttttatgtctakgttcacaagggatattggtatatagctgtgttttcttgtaatgtctttgtcttgttttgatatcagggtaatattgatatcaaatgaaataaagttagttgggaagtttccttcatcctctatttgctgaataaagcttttgtaacattggtattatttcctcccttaatagcttcatagaattcaccagtgaagtatattttttctctataggaagatttgaaattactg

SEQ ID NO: 163013 - DNA, 284 bp, Homo sapiens
agtctatagtttctcaacattttatctaagtatctatttttacttaatcctgattagaactcatttgacttcctgtgtccaaatcaataaaaaccctaatcaattctgtaaaatttgaagccagttttcttctcaaatattatgtcttcttcattctttcaattatgtttctgaaactaccawtaattgtgttttagatcttttccataatctaaatctctcattttccacctcatttttttgtgtgtgtgctatgctcttaaataatttcctcatatctacta

SEQ ID NO: 163014 - DNA, 284 bp, Homo sapiens
agtctatagtttctcaacattttatctaagtatctatttttacttaatcctgattagaactcatttgacttcctgtgtccaaatcaataaaaaccctaatcaattctgtaaaatttgaagccagttttcttctcaaatattatgtcttcttcattctttcaattatgtttctgaaactaccaatarttgtgttttagatcttttccataatctaaatctctcattttccacctcatttttttgtgtgtgtgctatgctcttaaataatttcctcatatctacta

SEQ ID NO: 163015 - DNA, 487 bp, Homo sapiens
attcctgttgcttttttgtttaatagaacctttaaaaattttagattcacggagtacatgtgcaggtttggtacatggatatattgcataatggtgagatttgggctctagtgaacccatcaccaaacagtgaatactatacccaataggtaatttttcaaccttaaccctccaaccctctctccttttggactccccagtgtctattatttccatctttatgtccatatgtacccattgtttagctcccacatataagtgagaacatgtggtatttgagttttctgtttctgagttatttcacttaggataatggtgttcagctctatccatgttgctacaaaggacatgatgccattcttttttatgactgcatagtattccatggtgtatatgtaccacattttctttatttagtcatttargttgattccatgtctttttattgtgaatagtgccacaatgaacatatgtgtgtgcatctctt

SEQ ID NO: 163016 - DNA, 604 bp, Homo sapiens
ttctcttttgctctagcttgggctatttgtttccaacttttgcgtggactgtggcagagccttcaatttggtctctgtctccagttttatccctaactaattcaccaagaccctcatataaaaatcgcaagactcattatgttacttcctgcctaaaaccttcccatggtgccttactttgccraagtcgggggagacctttctatgatctggcccaccaagctcattctcctccctcctttccttgccctgtatattccagcaacactaaattacttgttgaaccccatttaggtgtattgtttcttatcgccattcctttattcatgctgccttctctacttgcttgtaacctgccctttaccaaaataatgagagacatagtgcattagaaaataaagtaaacatttctgttttctttctcagaaaaatgaactgtcaagtatgtttattttctttcttttaagggatgttactggctggttttacaattaggaatgttccattcatcaatgaacatgtccatgttcctaacgcatggtcttcaattttaagaagcattgcccttaacattattctaatacgagctgggcttggactcgat

SEQ ID NO: 163017 - DNA, 512 bp, Homo sapiens
ccctgcaaagattttgattggtgtatctctgattaattcatttgggggagagattacatctttatattattgaggctttggccaggcgtggtggctcacacctataatcccagcrgtttgggaggccaaggcaggcatatcacttgaggtcaggagttcaagaccagcctggccaaaatggtgaaacactgtatctactaaaaacacaaaaactagccaggcgtggtgttgggtgatggtaaaattggggctttttagttcacacttgtgaaatgtctctctaagtattcaggtattatcttaattactatattattagattcacaatttttataaaagtatagactgtcttcacagttttgttcttagacactttgtgtttgtaattgatgttgtggattaaattctctttgatcacttattcctggggaagccagctgccatgtcctgaggcagccctgtggagaaaaccccgttggaaaaaactgaagcctgcaatggctacatgagta

SEQ ID NO: 163018 - DNA, 430 bp, Homo sapiens
tccttgttctcttttggttaccaaatgcattgaatatctttttccatcctttcactttcaacctttgtgtgtgtttagatctaacataagtctcttgcatatagtatatatttagattttttaatccattcagccaattctctgtcttttgattggaaaattagcctatttgcatttaaagtagttactgatagggaggggcttactattgtcattttgttcattgttttatacatgtcttscaggtattttttccacttttcctctctttctgcctccctttatgtttcactgatttctttttttggtagggacgtgctttggttcctttctcatttttatttttgtatcttctgtaggtcttttctttgtggttactgtagaattacatgaaaacatcttatagttataataatctattttaaattga

SEQ ID NO: 163019 - DNA, 430 bp, Homo sapiens
tccttgttctcttttggttaccaaatgcattgaatatctttttccatcctttcactttcaacctttgtgtgtgtttagatctaacataagtctcttgcatatagtatatatttagattttttaatccattcagccaattctctgtcttttgattggaaaattagcctatttgcatttaaagtagttactgatagggaggggcttactattgtcattttgttcattgttttatacatgtcttccaggtattttttccacttttcctctctttctgcctccctttatgtttcactgattyctttttttggtagggacgtgctttggttcctttctcatttttatttttgtatcttctgtaggtcttttctttgtggttactgtagaattacatgaaaacatcttatagttataataatctattttaaattga

SEQ ID NO: 163020 - DNA, 496 bp, Homo sapiens
ctccaggtacatactgtaaaaatactcctgcacatgtagaataggagacactgcataacaaagttcactagaacatgaggctgaggtgggaagatggcttgagaccaggagttcgaggctgcaccagtagctgggactataagcatgtgtcaccatgcctggctaattttttgctgttgttgttgttgttagagatgatgtcttcctttattgaacaakctggtctccaactcctggcttcaagtgatcttcccacttctgcctcccaaagtgctgggattacaggtgtgagccaccatgcccggccaagttctgcttctttacttgaggtagatactttgatgtttcattttcctttattgtacagatatactttatattctcatatgtgacacaagtcaaaatttaaaaaaacaatttaacgtttattccctttagatgaatgatgggcaaatttacataatgaattcatcactgaaacaatgtatagatttca

SEQ ID NO: 163021 - DNA, 496 bp, Homo sapiens
ctccaggtacatactgtaaaaatactcctgcacatgtagaataggagacactgcataacaaagttcactagaacatgaggctgaggtgggaagatggcttgagaccaggagttcgaggctgcaccagtagctgggactataagcatgtgtcaccatgcctggctaattttttgctgttgttgttgttgttagagatgatgtcttcctttattgaacaatctggtctccaactcctggcttcaagtgatcttcccacttctgcctcccaaagtgctgggattacaggtgtgagccaccatgcccggccaagttctgcttctttacttgaggtagatactttgatgtttcattttcctttattgtacagatatactttatattctcatatgtgacacaagtcaaaatttaaaaaaacaatttaacrtttattccctttagatgaatgatgggcaaatttacataatgaattcatcactgaaacaatgtatagatttca

SEQ ID NO: 163022 - DNA, 602 bp, Homo sapiens
aattagaaattatctaattttctaataaagttttccccaggcacaaggaatctgtgaactggacctaaaaaattcttcataatgtgyttttattaccataaaagatgcacatttattttaaaaacttctctacaccactatcataaacctttgcacacacttatttcttttggaagctaacttctgagtggtaatgaaatatattcttaagaaaaaagtctgacacaatgcctttgcatcttaaaatatgttaaaatattatttgaaaagagtcaaacatctgtcttttcagggtatcacagggcgtcaaactggaaaatgtggcactgccaggagtttctacctggtgaagggtggcagacttttctcttcagagggctcttgacagggtagcgtccattatcttgccaatttaccacaacctaggcccaatcctcggtcttataggttcagaaatttatttttatcagcgtcaatagggtagctacattgcttagaagcaaacaaaaataaccatgcttcaatagaaatcaggatatagatgtattaatacagaatgaccaatataaatgtgacagaaataggaatgcctgtttatggtc

SEQ ID NO: 163023 - DNA, 602 bp, Homo sapiens
aattagaaattatctaattttctaataaagttttccccaggcacaaggaatctgtgaactggacctaaaaaattcttcataatgtgcttttattaccataaaagatgcacatttattttaaaaacttctctacaccactatcataaacctttgcacacacttatttcttttggaagctaacttctgagtggtaatgaaatatattcttaagaaaaaagtctgacacaatgcstttgcatcttaaaatatgttaaaatattatttgaaaagagtcaaacatctgtcttttcagggtatcacagggcgtcaaactggaaaatgtggcactgccaggagtttctacctggtgaagggtggcagacttttctcttcagagggctcttgacagggtagcgtccattatcttgccaatttaccacaacctaggcccaatcctcggtcttataggttcagaaatttatttttatcagcgtcaatagggtagctacattgcttagaagcaaacaaaaataaccatgcttcaatagaaatcaggatatagatgtattaatacagaatgaccaatataaatgtgacagaaataggaatgcctgtttatggtc

SEQ ID NO: 163024 - DNA, 602 bp, Homo sapiens
aattagaaattatctaattttctaataaagttttccccaggcacaaggaatctgtgaactggacctaaaaaattcttcataatgtgcttttattaccataaaagatgcacatttattttaaaaacttctctacaccactatcataaacctttgcacacacttatttcttttggaagctaacttctgagtggtaatgaaatatattcttaagaaaaaagtctgacacaatgcctttgcatcttaaaatatgttaaaatattatttgaaaagagtcaaacatctgtcttttcagggtatcacagggcgtcaaactggaaaatgtggcactgccaggagtttctacctggtgaagggtggcagacttttctcttcagagggctcttgacagggtagcgtccattatcttgccaatttaccacaacctaggyccaatcctcggtcttataggttcagaaatttatttttatcagcgtcaatagggtagctacattgcttagaagcaaacaaaaataaccatgcttcaatagaaatcaggatatagatgtattaatacagaatgaccaatataaatgtgacagaaataggaatgcctgtttatggtc

SEQ ID NO: 163025 - DNA, 612 bp, Homo sapiens
agatttacaatcatgtatgttgtcatcttctattaaattccatactccttgaaggcaggagtcatgccttattctgtccctcagagtactcagaatgatgcagagcacacagaaagtactcaaatcttgttgactgatccagtgagaaattaccaacttcagttccagcctctctttaacatgtacatagtaatttgggtaagtcaagctccatyctgaaggacataataagggactctttaagcacattattatgaaggcccttcagggataacaccagagtgatgaggtgccctataccagggacaatggagacagagtacttgggattcatcactggagtcctcaaagcatcttccaagggcataataaggaaggactcaaacacctttgaatctccgtgagaccaggcatgaggtcttttgaaagagttctttaactggagtgaatgtcaaagagaagtataataaaataaaagacgtgagtagggtcccccttgttcataaaatgacactacctaaatcaccaaatctcactgagccttggtttaactcaagaggttccatgccactataagaggtggtaactgccaactgataggaaatattttca

SEQ ID NO: 163026 - DNA, 531 bp, Homo sapiens
tatattgcaagagaataattattttctttattaaaaaagaaatactggatgctaagtccaaaagacataaattattttatactaataactactaatattttattcattaaaatataaaggtcaaagatttcaaaatgatctttaaatgattaataacatgttgatctttttcttctttctgtaaacctttttgagtcttaamaatactaaactatacaagcaatattaaatagtatataaacttggattaaaatattcaaatttactagaatgtggacattggaaagaatgaaaataaacagaagcataaagcagcagatataaaattaagaaagcaactaagagtgtttaaagtacatattcatctgtagtctaatgtctaccataaacaatgactcttctcagtaaaacacaaattgttcatgaagggaaaaagcatgttgtattagagaatattcaacataacttttttagtactaacttgtgcctggagtattattggtttttctattatgaacttattatgcactt

SEQ ID NO: 163027 - DNA, 439 bp, Homo sapiens
aaattcccattaactacagtcacccaacagtgctgtagagaactagaacttcttccttctctccagctgtaattttgtatgtattaaccacatttttcttatactcttctttctcctactctttccaggatatggtaaccaaaactctactatctacttctaygagtttaaaaattttagcttctatacataagtgagaacacgtagttatgtggtgtttatgtttctatgccaggcttatttcacctaacataatgccctccacttgcatacttgttgccacaaataacaggattttgttctttattatgactaaataatattccattatatatgtatgtcacatttctttatccattcatctgttgatggacacttttgttgattccatatcttggctattgtgaatagtgttgtaataaacatgcaggtgcaggta

SEQ ID NO: 163028 - DNA, 439 bp, Homo sapiens
aaattcccattaactacagtcacccaacagtgctgtagagaactagaacttcttccttctctccagctgtaattttgtatgtattaaccacatttttcttatactcttctttctcctactctttccaggatatggtaaccaaaactctactatctacttctacgagwttaaaaattttagcttctatacataagtgagaacacgtagttatgtggtgtttatgtttctatgccaggcttatttcacctaacataatgccctccacttgcatacttgttgccacaaataacaggattttgttctttattatgactaaataatattccattatatatgtatgtcacatttctttatccattcatctgttgatggacacttttgttgattccatatcttggctattgtgaatagtgttgtaataaacatgcaggtgcaggta

SEQ ID NO: 163029 - DNA, 439 bp, Homo sapiens
aaattcccattaactacagtcacccaacagtgctgtagagaactagaacttcttccttctctccagctgtaattttgtatgtattaaccacatttttcttatactcttctttctcctactctttccaggatatggtaaccaaaactctactatctacttctacgagtttaaaaattttagcttcyatacataagtgagaacacgtagttatgtggtgtttatgtttctatgccaggcttatttcacctaacataatgccctccacttgcatacttgttgccacaaataacaggattttgttctttattatgactaaataatattccattatatatgtatgtcacatttctttatccattcatctgttgatggacacttttgttgattccatatcttggctattgtgaatagtgttgtaataaacatgcaggtgcaggta

SEQ ID NO: 163030 - DNA, 439 bp, Homo sapiens
aaattcccattaactacagtcacccaacagtgctgtagagaactagaacttcttccttctctccagctgtaattttgtatgtattaaccacatttttcttatactcttctttctcctactctttccaggatatggtaaccaaaactctactatctacttctacgagtttaaaaattttagcttctatacataagtgagaacacgtagttatgtggtgtttatgtttctatgccaggcttatttcacctaacataatgccctccacttgcatwcttgttgccacaaataacaggattttgttctttattatgactaaataatattccattatatatgtatgtcacatttctttatccattcatctgttgatggacacttttgttgattccatatcttggctattgtgaatagtgttgtaataaacatgcaggtgcaggta

SEQ ID NO: 163031 - DNA, 433 bp, Homo sapiens
atcatttcatcacatctcgtctcatctcatcttttcatctcatcatttcaactcattgcatctcatctcatcatttccatttcattattccatttcatcatttcatttcattattttatttcattatgtcatttcatctcaacacatttcatctcatctcatcatttcatctcatttcatctcattatttcawctgatttcatgtcatcatatcatgtcatcatttcatcacatctcatctcatcatttaaactcatcatttaatctcatttcatctcatctcatcatttcatcgtttcatctcatcatttcttctcatcccatcattgccatttcattatgtcatcatttcatttcatcatttcattattgcatttcatctcatttcattattgcatttcattatgtcatttcatttcatctcatttcatta

SEQ ID NO: 163032 - DNA, 433 bp, Homo sapiens
atcatttcatcacatctcgtctcatctcatcttttcatctcatcatttcaactcattgcatctcatctcatcatttccatttcattattccatttcatcatttcatttcattattttatttcattatgtcatttcatctcaacacatttcatctcatctcatcatttcatctcatttcatctcattatttcaactgatttcatgtcatcatatcatgtcatcatttcatcacatctcatctcatcatttaaactcatcatttaatctcatttcatctcatctcatcatttcatcgtttcatctcatcatttcttctcatcccatcattgccatttcattatktcatcatttcatttcatcatttcattattgcatttcatctcatttcattattgcatttcattatgtcatttcatttcatctcatttcatta

SEQ ID NO: 163033 - DNA, 571 bp, Homo sapiens
gatgccaacagcatttgtgggggattggctgtgggtgtgaaacagcagcagcggaacaattccgtcattctggcctggaacagtggcaggtgaactctgcccagttgtggaggggtctgtcaggaagatggggcttctggtttcagaggagcccagagatgtgctcaggcagatgagggtcctcatgggataggcatgggagaggcagctgcaacttggggaccactggtggtgggctgagcccctgagacctctggagtgagcaggaaagaaagtgaggaggagccagccagggagccagaggcagagggaagagaggaaagtagaccccgggaggagcagacaggaaaggatgaaaatttcccctcacctgcctcagcagcctctgcccctgcccacacacccttgtgcactccccctgagyccctgctcacctctgcctacccagccatcccaggatggtgtgggctcaagctctgggggtaactgaagagccactttaagaaggcacagtctagaagtgagcagcattgagtcactgttgtctcccagtcctgggaacatcctgtgc

SEQ ID NO: 163034 - DNA, 375 bp, Homo sapiens
tctcagagctgagcacctaggtgatgtaactccttttttgggagctgtcaatggaagggattgtgacatatgtttggccaatcaccyagatgatgtgactctcttgcctataactcaaattggggagaaattatatcttgacaatattgagattttatgatcatgcacattaaatgtctttctatttattaagatcttttgtgatctttcatggctctttcattagaaatttgtagtttccattgtatatagatctgtgtgtcacaaaggtctatatgacaaaactgagacaaagacaaactgacggattcttccagtttttgtggatggctctgggctggggcgttcctttaacacatgtgcagactgttgaaa

SEQ ID NO: 163035 - DNA, 375 bp, Homo sapiens
tctcagagctgagcacctaggtgatgtaactccttttttgggagctgtcaatggaagggattgtgacatatgtttggccaatcacctagatgatgtgactctcttgcctataactcaaattggggagaaattatatcttgacaatattgagattttatgwtcatgcacattaaatgtctttctatttattaagatcttttgtgatctttcatggctctttcattagaaatttgtagtttccattgtatatagatctgtgtgtcacaaaggtctatatgacaaaactgagacaaagacaaactgacggattcttccagtttttgtggatggctctgggctggggcgttcctttaacacatgtgcagactgttgaaa

SEQ ID NO: 163036 - DNA, 375 bp, Homo sapiens
tctcagagctgagcacctaggtgatgtaactccttttttgggagctgtcaatggaagggattgtgacatatgtttggccaatcacctagatgatgtgactctcttgcctataactcaaattggggagaaattatatcttgacaatattgagattttatgatcatgcacattaaatgtctttctatttattaagatcttttgtgatctttcatggctctttcattagaaatttgtagtttycattgtatatagatctgtgtgtcacaaaggtctatatgacaaaactgagacaaagacaaactgacggattcttccagtttttgtggatggctctgggctggggcgttcctttaacacatgtgcagactgttgaaa

SEQ ID NO: 163037 - DNA, 375 bp, Homo sapiens
tctcagagctgagcacctaggtgatgtaactccttttttgggagctgtcaatggaagggattgtgacatatgtttggccaatcacctagatgatgtgactctcttgcctataactcaaattggggagaaattatatcttgacaatattgagattttatgatcatgcacattaaatgtctttctatttattaagatcttttgtgatctttcatggctctttcattagaaatttgtagtttccattgtatatagatctgtgtgtcacaaaggtctatatgacaaaactgagacaaagacaaactgacggattcttccagtttttgtggatggctctgggctggggcrttcctttaacacatgtgcagactgttgaaa

SEQ ID NO: 163038 - DNA, 505 bp, Homo sapiens
gtggttactgctaatgtgggaggagagtgtggtaaagagagcagaggtctaaactgggtgtctctctgagcatttatttrtgtgtttcagctgctaactctgacagttaacaagcttgcgtgtctttgtctgcgtgtatccacctttatgtgcagtgaaaagtctgcttttgtatttatgcctgggtgctatgtgtgtatttgctttaaaatcactaatacttttatgttcttgcctaatttcctagctaacagctttttttttaccatgttgaatagatgtcgtgagaacagacatctttgtcttatttctgatcttaggtagaaagcattttgtcttttaacatcaagtatgatgttagctgtggggtttttatagatgtcttacaatatcttttctatttccagtttatttaatgtttttatcatgaggagtgttgaagattttcaaacctttttactttgtattttccctatattaataccttgccagatgtattattaga

SEQ ID NO: 163039 - DNA, 505 bp, Homo sapiens
gtggttactgctaatgtgggaggagagtgtggtaaagagagcagaggtctaaactgggtgtctctctgagcatttatttatgtgtttcagctgctaactctgacagttarcaagcttgcgtgtctttgtctgcgtgtatccacctttatgtgcagtgaaaagtctgcttttgtatttatgcctgggtgctatgtgtgtatttgctttaaaatcactaatacttttatgttcttgcctaatttcctagctaacagctttttttttaccatgttgaatagatgtcgtgagaacagacatctttgtcttatttctgatcttaggtagaaagcattttgtcttttaacatcaagtatgatgttagctgtggggtttttatagatgtcttacaatatcttttctatttccagtttatttaatgtttttatcatgaggagtgttgaagattttcaaacctttttactttgtattttccctatattaataccttgccagatgtattattaga

SEQ ID NO: 163040 - DNA, 505 bp, Homo sapiens
gtggttactgctaatgtgggaggagagtgtggtaaagagagcagaggtctaaactgggtgtctctctgagcatttatttatgtgtttcagctgctaactctgacagttaacaagcttgcgtgtctttgtctgcgtgtatccacctttatgtgcagtgaaaagtctgcttttgtatttatgcctgggtgctatgtgtgtatttgctttraaatcactaatacttttatgttcttgcctaatttcctagctaacagctttttttttaccatgttgaatagatgtcgtgagaacagacatctttgtcttatttctgatcttaggtagaaagcattttgtcttttaacatcaagtatgatgttagctgtggggtttttatagatgtcttacaatatcttttctatttccagtttatttaatgtttttatcatgaggagtgttgaagattttcaaacctttttactttgtattttccctatattaataccttgccagatgtattattaga

SEQ ID NO: 163041 - DNA, 472 bp, Homo sapiens
tgggcatgcagccaggccttcctgaaactgttttttcatctaggaagtgtgatgagaacaacaccttcctcacagtacctcctgaggactcagttgcatgtggctatcaccattgttctcaccatcatccctctcargaagaggtgggcacaagaattctgaagtttccttcatcctttgccccttatcatgaccctgtgaggcctgcacaacaggctttctgcattttccagttgaggagacaggcccaaagagggtgttgacttgcccaggagcccacaggagaggctgtcttctcctcccacctgaagagtctgccctacctggcttcacaccacacaccagcaccatcactgaccagggtcccatcctctggactctgggatagatgttcacatcccaatccaggcccagctgtggtggaaagaaacctggtatcttgggaggcctggttgagcagtgccagcttgtc

SEQ ID NO: 163042 - DNA, 562 bp, Homo sapiens
acctggcatgtggtaagggattcatgaatgttggcttctatcattaagggtgggggagccacataagtagccagagggagtcatagaaagttcttgagccagagaagtaagacaatcttttcagctttttgtgcagcataaaaggcgggtaatttgcttgcctttgaccaaggaaatttgggacgtgccaggcctggggtgaatggtgggaacccaagtagagggatatttctcattggctgaattaactgtgactccgttttgcggagcagccaggttgcttcatggtggacctgctgcatgcctacatgatggtgccgtggatagctcttgtttgtgccagccctgtacctgatacctcttgtggtaattgcatccctattttccagaaggaagcatccctcctcccactttctggttttccccatgtccttctggaggggatgaccccaaccgcttcctgaaggagcttcatgaaagccaggtctggccaggctggatgtggtggttggctcaggcaggggcatrtggcccaaacgggtccagtgaaagtcagtcctgg

SEQ ID NO: 163043 - DNA, 522 bp, Homo sapiens
gaattcagtgtcatcacaggttttgcctgttttgctctcagatgtgctctagctcataagacagcrtcaggcatacagtagatgctcagtaaatagttgccagttgtgtgaatgtagaaccatacatcaccacaatgctgtactaatgaaagcagggtctcagagatgctgaagcccagccttattcttaagggttcactgagaacccctagccccatctgtggtcctgaaggtcctgcatgacatctctgctccccaccctcaacctgttctcttcctcacagcacaggggatgaacacagccgggggaactggggtcacctggaccaggtggctgccctgcgctgggtccaggacaacattgccagctttggagggaacccaggctctgtgaccatctttggagagtcagcgggaggagaaagtgtctctgttcttgtgagttttcctgtcaccaggcccaaccccacgcttgatgtgatgctgatgagacctcttggacacctgtcaatccagctatgg

SEQ ID NO: 163044 - DNA, 517 bp, Homo sapiens
tttaggtccagaacattttcatcaccccaaacagaaacctcagacccatttagcagccactccccattggccccacttctcagcttctggaaaacacaattctactttctgtgtctatggctttgcctaatctgaacatttcgtataaatgggatcatacaacatgtggccctttgtgcctgacttctttcacttagcaaaatgtttacaaggctcatctgtgttgtagcatccgtccgtatttcatttctttttatggcaaaatgataatccattgtaagtatatactgaattttgtttatcgattcatcagttgatgaacatttgggttttaaccattttgrcctataatgaacaagagtgctatgaacattcatatacaatttttgtttgaacgtcagttttcaattatcttgagtatatccctaggactggatttgctaggttatatggaaactctacgtttacctttttgaggaacggccacaacttttttccacagtggctgcactgtttt

SEQ ID NO: 163045 - DNA, 517 bp, Homo sapiens
tttaggtccagaacattttcatcaccccaaacagaaacctcagacccatttagcagccactccccattggccccacttctcagcttctggaaaacacaattctactttctgtgtctatggctttgcctaatctgaacatttcgtataaatgggatcatacaacatgtggccctttgtgcctgacttctttcacttagcaaaatgtttacaaggctcatctgtgttgtagcatccgtccgtatttcatttctttttatggcaaaatgataatccattgtaagtatatactgaattttgtttatcgattcatcagttgatgaacatttgggttttaaccattttgacctataatgaacaagagtgctatgaacattcatatacaatttttgtttgaacrtcagttttcaattatcttgagtatatccctaggactggatttgctaggttatatggaaactctacgtttacctttttgaggaacggccacaacttttttccacagtggctgcactgtttt

SEQ ID NO: 163046 - DNA, 608 bp, Homo sapiens
attttctgtgtcactagggcctacctaatgcataatcacagttcaataatttttttttatttttcccattatgacatattctcatgtccgctaaaaaacctccacaggaatacgtgacttaggatgtgacaatttcctgtactttctgcatctagcactaactcattgaaaggtttatgtacattatttcagacatttgcaaaatgtttraaatgagatgtgagcaaataatgatgctgacactctatcaaaaccacagattttttttaaaataagagaagtaaacatactgcattggatgaaagcaaactacatttctgttttaaagaaaatgtagaaaaatttgcttctataaagaagcagtactgttattgtataataccttctgcttttacaggatgcttccccatcataatttccctttttgcttgaaaaaggaaactatgaatgcataaagatggtgaggagagtaatttctcttttgaacctaagggaaaagcacatgcatctaccaaacttccatttagctttgaaggcagaatgatttttcacttggaatccaacagaatttcaaagatgttcggcactggtgcgcctcttggagtggt

SEQ ID NO: 163047 - DNA, 611 bp, Homo sapiens
tctattttctgtgtcactagggcctacctaatgcataatcacagttcaataatttttttttatttttcccattatgacatattctcatgtccgctaaaaaacctccacaggaatacgtgacttaggatgtgacaatttcctgtactttctgcatctagcactaactcattgaaaggtttatgtacattatttcagacatttgcaaaatgtttaaaatgagatgtgagcaaataatgatgctgacactctatcaaaaccacagattttttttaaaataagagaagtaaacatactgcattggatgaaagcaaactacatttctgttytaaagaaaatgtagaaaaatttgcttctataaagaagcagtactgttattgtataataccttctgcttttacaggatgcttccccatcataatttccctttttgcttgaaaaaggaaactatgaatgcataaagatggtgaggagagtaatttctcttttgaacctaagggaaaagcacatgcatctaccaaacttccatttagctttgaaggcagaatgatttttcacttggaatccaacagaatttcaaagatgttcggcactggtgcgcctcttggagtggt

SEQ ID NO: 163048 - DNA, 572 bp, Homo sapiens
gcaggaaccatggattgtaagatctttgtctattttctgtgtcactagggcctacctaatgcataatcacagttcaataatttttttttatttttcccattatgacatattctcatgtccgctaaaaaacctccacaggaatacgtgacttaggatgtgacaatttcctgtactttctgcatctagcactaactcattgaaaggtttatgtacattatttcagacatttgcaaaatgtttaaaatgagatgtgagcaaataatgatgctgacactctatcaaaaccacagattttttttaaaataagagaagtaaacatactgcattggatgaaagcaaactacatttctgttttaaagaaaatgtagaaaaatttgcttctataaagaagcagtactgttaytgtataataccttctgcttttacaggatgcttccccatcataatttccctttttgcttgaaaaaggaaactatgaatgcataaagatggtgaggagagtaatttctcttttgaacctaagggaaaagcacatgcatctaccaaacttccatttagctttgaaggcagaa

SEQ ID NO: 163049 - DNA, 639 bp, Homo sapiens
tattgcaactgatctgcacctctcccttatttgctttggtttggttggacctgagctgcggaaagttgagttcatcttacccctctgtgcatagcatcttatcttcatgggtcaatgccaggatcctctaatatgtttgaactgttcataaacatgtgtgtaccctcctaaaataagacatgctgcctcaagtatagttggttttgttctggaaacctcactctttttttcacttcaaatttcttttatgatctatccacacaactaaaattaaatcaaattcatttcatctacccactgcatagcatcccttagagggcacttaccaccacattttactcttcttttcccgtcttaatggatatctagtttgccctgaattctctactgccacaaggaggccacactgaacattctcttaggtggcccctggtggatccatatgataatttttttagatatatgccagagaatgtaattacctagccatagggaataaactctcttagtttctccagatactgtcggaatgctytctggactagctgtgcagttacacctcacttctggtcttaggcactcacctcctatagtgtacttatccctggtgaggattatggtcccataaatcatgctggc

SEQ ID NO: 163050 - DNA, 591 bp, Homo sapiens
gtcagtacccatgcacgcctcatgtgagtgtgctgaacacaagagcctatgtcatggattaaggaacagccaattcacctccagctaacgttttactatgttgaagtgaaagctcaacattgttatatcttaatttaaaaaaaagaaagagaaatctaaaatctacatggtatccaaaatttcccaattatttaatactatgtagcctaaacagaatgactatatgggtcacatacaccatcagtttgcaaccttaactataaaccaagtctagtgatccttcccattctctgaattctgagcatccctgtaagcttgacagcctgattcctcgaagcgcacttctcacctcgattaattagatcactgagatgcatttagatgagctactcaaaataggcaaggcgccagctggctccagtgttcgcttcctccagacagaggggtcagatttagtctctgctggactcagcccatagagaagaargcagtgaaaaaggaaaagcacatcttcctttatatgacgaggaaagccagcaaaagacacaaccaacctttgggaaaatcttgaagcctacatttgtctctgag

SEQ ID NO: 163051 - DNA, 557 bp, Homo sapiens
tacatcttacatggcagcaggcaagaggcatgtgtgtggaaaatcccctttataaaaccatgagatctcctgaaacctattcaccatcatgagaacagcacaggaaaaatccacccccatgattcaattacctcctacaaggtccttcccattacacatggagattattacaattcaaggtgagatttgggttgggaacacagagccaaaccatatcatgagttgttattctacctctctggaatgaaatgtgaccaaagttcagggtttagcgtgtctaatatctacgccatcatccttaatcacttaccacttagctgagagatgacaaatggtttcattttacacattatctttgatgcactggtaatgactgcctagagtactgctaataagatttctgggctcagtgagataaaaagttttgccatggggtggcattaaacagtgtagtttccagccctgattttgcccartctcctttgttctagtgctgtattgttccacaataagctacccccaagttagcggcttaaaacaccagttcttagttttcc

SEQ ID NO: 163052 - DNA, 521 bp, Homo sapiens
tctggagagagacttcagattcaaacagtccccaatagctatgatttgaatgtttggcccctccaaaacttgcgttaaaatttaattgccattgtaacagtattaagaggtaagacctagcagggcacagtggctcatgcctataaccctagcactttgggagaccaaggtgggaggactgcttgagcccaggagtttgagaccagcytgggcaacatggcaaagccccatttctgccaaaaatatgaaaattagctgggtggcatacatccgtagtcccagctacccaggaggctgaggttggaggtcacctgagcctcagaggttgaggctgcagtgagccatgattgtgccactgcactccagcctgtgtgacagagtgagaccctgtctcaaaaaacaaacaaataaataaataaaaggtgaggcctttaagaggcaattagaccacgagggctccaacttcattagtgagcttagtgccattttaaaagggctggtttggcccttcttgccctctc

SEQ ID NO: 163053 - DNA, 592 bp, Homo sapiens
tgttggcgccttgattttggaattcccaacctccagaactgtgagaaatttctgttgcttaagcaactcagcttatggcatatttgtgatagcagcccgaaccaaataagatgtgctctatttttgaaatctttctttagtacctgttagggscttgagccaaggcacaaagatcctcgatgtataaaatccatgttggagatctggtgggagctcccatacgggttccttgcattcactatcagtgccagctgcagctgcctcccaaaaagtcagctgtttggaataatccattccaactcaggaatcagaaactgtatctcagaggcattgagtttaacaagaacacacggttatttagtaggagaactggcactggaatctggattttctgacatccactttcatgctctttgctttacacgtgtgtggacagacaggtggatataatcaagaatatttattgagggcattccatatgctctaagccctttgtatgtaataactcaattctcataagcatagcaggaggtattattattattcccaattcacagttaaagaaactaagactcatagaggttagaatcct

SEQ ID NO: 163054 - DNA, 573 bp, Homo sapiens
gaattcccaacctccagaactgtgagaaatttctgttgcttaagcaactcagcttatggcatatttgtgatagcagcccgaaccaaataagatgtgctctatttttgaaatctttctttagtacctgttagggccttgagccaaggcacaaagatcctcgatgtataaaatccatgttggagatctggtgggagctcccatacgggttccttgcattcactatcagtgccagctgcagctgcctcccaaaaagtcagctgtttggaataatccattccaactcaggaatcagaaactgtatctcagaggcattgagtttaacaagaacacacggttatttagyaggagaactggcactggaatctggattttctgacatccactttcatgctctttgctttacacgtgtgtggacagacaggtggatataatcaagaatatttattgagggcattccatatgctctaagccctttgtatgtaataactcaattctcataagcatagcaggaggtattattattattcccaattcacagttaaagaaactaagactcatagaggttagaatcct

SEQ ID NO: 163055 - DNA, 544 bp, Homo sapiens
attacaaatggtatcccaggtgtgttgtcattgtctgtcttaattttgtgtgtttcttgaaggcaattttyaatttttgtagagttgtatacattttattctttatggttcctgggatttttttttttctcatacttaggtctttccatttctaagattataaaatatttttccgtgtttttctagtgacttacacccatcaggaatttactttggtctgatggataaatttagtaatcctgctttatttttttcctaaatggctacctagttgtctcaacaccatttgcttaactatgtgtttttcaccactgatacaaaatgccacctctgtcatattttacattctcatatgttttggagtctgcttctggattttattttttaaatcaggcccatgatgttttaattactctagctttatgttataccagctggtacatccagtctgtctttcttacttttctttttcagaatttttctaaatattctcattgctatatatttaccatatacgatttaaaatctgtttagtgaaaaaagt

SEQ ID NO: 163056 - DNA, 544 bp, Homo sapiens
attacaaatggtatcccaggtgtgttgtcattgtctgtcttaattttgtgtgtttcttgaaggcaatttttaatttttgtagagttgtmtacattttattctttatggttcctgggatttttttttttctcatacttaggtctttccatttctaagattataaaatatttttccgtgtttttctagtgacttacacccatcaggaatttactttggtctgatggataaatttagtaatcctgctttatttttttcctaaatggctacctagttgtctcaacaccatttgcttaactatgtgtttttcaccactgatacaaaatgccacctctgtcatattttacattctcatatgttttggagtctgcttctggattttattttttaaatcaggcccatgatgttttaattactctagctttatgttataccagctggtacatccagtctgtctttcttacttttctttttcagaatttttctaaatattctcattgctatatatttaccatatacgatttaaaatctgtttagtgaaaaaagt

SEQ ID NO: 163057 - DNA, 486 bp, Homo sapiens
tgaaagtagattagaggtttccagggactggggagaggcagctgaaagggattatttaatgagttcagaatttccatttgggatgaytaaaaagttttggaaatactaatgatgggtacacaatattatgaaggtcgttattgctaataaatttgtacacctaaaaaataattaaaatggaaaattttattttacgtgcatcttcccacacaaaaaaaagaaattccaaatagacttctgttgatactccttctcccctccagcaaccatcctatgtccttgaaaacagttactaggtctcaacgccagaaattcattcctcccctcctcttttcttttgaaccaacttcaagcagcctttccttctgctgctgcacccacctggaggaggtgatgggaaagcgtggccagggctgcagagagaaggagagaagtggggcagtgaggcgtgaacacctcgctgctgtgagagcggcaggaaacata

SEQ ID NO: 163058 - DNA, 486 bp, Homo sapiens
tgaaagtagattagaggtttccagggactggggagaggcagctgaaagggattatttaatgagttcagaatttccatttgggatgattaaaaagttttggaaatactaatgatgggtacacaatattatgaaggtcgttattgctaataaatttgtacacctaaaaaataattaaaatggaaaattttattttacrtgcatcttcccacacaaaaaaaagaaattccaaatagacttctgttgatactccttctcccctccagcaaccatcctatgtccttgaaaacagttactaggtctcaacgccagaaattcattcctcccctcctcttttcttttgaaccaacttcaagcagcctttccttctgctgctgcacccacctggaggaggtgatgggaaagcgtggccagggctgcagagagaaggagagaagtggggcagtgaggcgtgaacacctcgctgctgtgagagcggcaggaaacata

SEQ ID NO: 163059 - DNA, 486 bp, Homo sapiens
tgaaagtagattagaggtttccagggactggggagaggcagctgaaagggattatttaatgagttcagaatttccatttgggatgattaaaaagttttggaaatactaatgatgggtacacaatattatgaaggtcgttattgctaataaatttgtacacctaaaaaataattaaaatggaaaattttattttacgtgcatcttcccacacaaaaaaaagaaattccaaatagacttctgttgatactccttctcccctccagcaaccatcctatgtccttgaaaacagttactaggtctcaacgccagaaattcattcctcccctcctcttttcttttgaaccaacttcaagcagcctttccttctgctgctgcacccacctggaggaggtgatgggaaagcgtggccagggctgcagagagaaggagagaagtggggcartgaggcgtgaacacctcgctgctgtgagagcggcaggaaacata

SEQ ID NO: 163060 - DNA, 576 bp, Homo sapiens
tgcgtgagcgcaggagttataactacctgatgattttcaagtccaggggccctttcacacccactagctcagtcctcctctttgaagcctttgtcactgctgggcgccatcctccacaagggatgcgaggctccttgccttctccctctctcatcgtccctctcctgcatamgaacagctcaccacaccatattccccatagccaactttgatctttttctttctccctgaacatttgtccccctgtgtccacagcttccactattaccaagcgaggctgtagccctggacctctgccccagctcagaccatgctcctgcttcccctgggaacacacacccagctctcccacactcagcataaccaaaaccattcattatgtccccagaaaacttgaaacttgttcttcctagagattcctcactatgattaccgaacctatcaacttaatgggtctatcatatgtgccccccacacacacacatgcaaacacacacgcgcacacacacgcacacatgataaagacttccctaagcagagactggcaaacgtttttctataaaaggccagatagta

SEQ ID NO: 163061 - DNA, 576 bp, Homo sapiens
tgcgtgagcgcaggagttataactacctgatgattttcaagtccaggggccctttcacacccactagctcagtcctcctctttgaagcctttgtcactgctgggcgccatcctccacaagggatgcgaggctccttgccttctccctctctcatcgtccctctcctgcatacgaacagctcaccacaccatattccccatagccaactttgatctttttctttctccctgaacatttgtccccctgtgtccacagcttccactattaccaagcgaggctgtagccctggacctctgccccagctcagaccatgctcctgcttcccctgrgaacacacacccagctctcccacactcagcataaccaaaaccattcattatgtccccagaaaacttgaaacttgttcttcctagagattcctcactatgattaccgaacctatcaacttaatgggtctatcatatgtgccccccacacacacacatgcaaacacacacgcgcacacacacgcacacatgataaagacttccctaagcagagactggcaaacgtttttctataaaaggccagatagta

SEQ ID NO: 163062 - DNA, 576 bp, Homo sapiens
tgcgtgagcgcaggagttataactacctgatgattttcaagtccaggggccctttcacacccactagctcagtcctcctctttgaagcctttgtcactgctgggcgccatcctccacaagggatgcgaggctccttgccttctccctctctcatcgtccctctcctgcatacgaacagctcaccacaccatattccccatagccaactttgatctttttctttctccctgaacatttgtccccctgtgtccacagcttccactattaccaagcgaggctgtagccctggacctctgccccagctcagaccatgctcctgcttcccctgggaacacacacccagctctcccacactcagcataaccaaaaccattcattatgtccccagaaaacttgaaacttgttcttcctagagattcctcactatgattaccgaacctatcaacttaatgggtctatcatatgtgccccccmcacacacacatgcaaacacacacgcgcacacacacgcacacatgataaagacttccctaagcagagactggcaaacgtttttctataaaaggccagatagta

SEQ ID NO: 163063 - DNA, 576 bp, Homo sapiens
tgcgtgagcgcaggagttataactacctgatgattttcaagtccaggggccctttcacacccactagctcagtcctcctctttgaagcctttgtcactgctgggcgccatcctccacaagggatgcgaggctccttgccttctccctctctcatcgtccctctcctgcatacgaacagctcaccacaccatattccccatagccaactttgatctttttctttctccctgaacatttgtccccctgtgtccacagcttccactattaccaagcgaggctgtagccctggacctctgccccagctcagaccatgctcctgcttcccctgggaacacacacccagctctcccacactcagcataaccaaaaccattcattatgtccccagaaaacttgaaacttgttcttcctagagattcctcactatgattaccgaacctatcaacttaatgggtctatcatatgtgccccccacacacacacatgcamacacacacgcgcacacacacgcacacatgataaagacttccctaagcagagactggcaaacgtttttctataaaaggccagatagta

SEQ ID NO: 163064 - DNA, 566 bp, Homo sapiens
gtgtgcacacgtgcataagaagcttgtatcctttcttcttctagtgaaaggaaatyccctgtacctggggattgggggagatagtgaggtgttggggagcaagagagactacaggaaaagatgaggtgctgaggcccaccaacctgtttgtcctcaccctttccatctgctgaaaggtgcctattgggcgtagaattgtctccagcccacttcattggaccaggtcatcccagttagcctgactgtcctgtttgcaggtcaagtatagagggaattttgccacagtaaaacatgctctattttcaagtcatatgtgaagaaaaaataaatgaaggaaggatgaggaaaagaccaaatgctgccaagtgtccactacaagctctggttttctgcgggggccactgaaaggtgtacaaattgttcaccataagccaaggacacaaacatgtgtgtgcgtgtgtgtgtatgtatgtgtgtttgatgccttagcacagctcgtgtttgatgcttgtgatggttctatttataaactttgtgctctcagatgggacaaccagaggcacttc

SEQ ID NO: 163065 - DNA, 481 bp, Homo sapiens
catttttacagacaacaaaatcagagctttctaccttaagtaaggcactcaacaatgcctagctattaagtgacaggatggaactcaggctgagagactctagggccattttttattctcatagaaatttttaaaatatgtatcagcctgggctttggagtttttttgtctgtttragaagagtcccacatacatttgatgaaacagggcaatgagcatagattccaaaaccttccacattatcctctacagagtcttcatcatctcgtagaaaacacagagcatgagaaatttctaggaagggcattttattttccccgtctgagagcctggaaaattctaatgccgttttactgggaattaagcttgttgttttccagaaagcaattatggcaatatttcataccagcattttgcatcacttaattcctgcctgctccctggtgggtcgtggccaggacagaatactgtgcacagatct

SEQ ID NO: 163066 - DNA, 515 bp, Homo sapiens
ttaacataattcaatgacaaaaggatttttttaatattgaaggagagtttaacattcagaacaaaaaaagtatgaaataagtaggtatgtaaaattatgatgagtctatgaaaattcagcacataaactgatcagagttttgagtttgcaacaacaatgaaacactcatgggagtgttttccaacatggcccttggttgctttgctagagttggaatagcaaaggaccacaggctgagctggctggttygaacaacagataatgtattttctcacaatttggaagctgaaagtacaagatcaaggtgccagcagggttgatgaccacctcttttttgcctcttgatgttgtcatcatcagtcctctgtgcacatgtgatcctggtgtctctctgtgggtctaaattttctcttctgataaggacaccagtcatattagattggggcctacaccagtgatcctcttgtaacatattatctctttcaagggcctatctccaaacaaagtcacattct

SEQ ID NO: 163067 - DNA, 515 bp, Homo sapiens
ttaacataattcaatgacaaaaggatttttttaatattgaaggagagtttaacattcagaacaaaaaaagtatgaaataagtaggtatgtaaaattatgatgagtctatgaaaattcagcacataaactgatcagagttttgagtttgcaacaacaatgaaacactcatgggagtgttttccaacatggcccttggttgctttgctagagttggaatagcaaaggaccacaggctgagctggctggtttgaacaacagataatgtattttctcacaatttggaagctgaaagtacaagatcaaggygccagcagggttgatgaccacctcttttttgcctcttgatgttgtcatcatcagtcctctgtgcacatgtgatcctggtgtctctctgtgggtctaaattttctcttctgataaggacaccagtcatattagattggggcctacaccagtgatcctcttgtaacatattatctctttcaagggcctatctccaaacaaagtcacattct

SEQ ID NO: 163068 - DNA, 614 bp, Homo sapiens
aaatgtctgaatgctgacacagttctttggccacagggaaaggctgatrtttcaattgaacatcaaattaacttcagtttacattcaacataagaattcaacaaaagaatttggggggacacaattccccataacaggccctttaagctatccacagctgcctctgcattctcagtgttggcttccagttaacattggtctgtggaaggttctaagggctgggtcctaaaacctgtggtcttctctaacgcgtcactaacatcctgatctgctcacagacatctgcgccattttccatttgtccacacccttacatgtggcctccaccaaccctgcagacccgatacacattttccttccagcttttctgcctctgcctgctccagggagcatcttccctctgtgtccccacatcctacctgctattgcttggttagggcccatcaattatgatcttctggcttctttggggtcaagggactgcaactcatatcatggataagctttatatgtggaatcaaattcaatgagattactctgaaaaataagcttgtttgcaggtctattttaattgtaatcacttaaattaaattttaagtgtgaacatttacacc

SEQ ID NO: 163069 - DNA, 552 bp, Homo sapiens
ggtcaggatcataacacagaaacaagcccagtgcacaggcagtgggaaggccaggagggcaggagtcagtagtcagggctgacatgagtagaaagtagccagaccaggctccctgagcttgggtagggagcttggattatgttttgtgtgtggtgggaattcacaggagtgagacactggtgtaacattatttgcatttcaataaaatcactccaactactatgtatggaagaattgaagggaagcataggtctaagcagataaaccaggcgaaaggcagtctgagttgcccaggaagagagggggtgacagtagaaaagacagaacgtatcagatagcactgaatgtgcttaggagacattttatagcaagtttgtccaacccacagcccatgggctgcatgcagcccaggacggctttgaatgaagcccaacacaaatttgaaaactttctcaaaacattacrtgtggttttcttttttttttttttttttttttttggcgattttctttaagctcatcagctatggttagggttagcgtatttcatgtg

SEQ ID NO: 163070 - DNA, 486 bp, Homo sapiens
ggctgggcctccatcacccaagcactgtggataggtgggaaagagaccagcaacaagcactggaatgagttcaggatatttccaaatgtctggctcctttgctccatgggttttggattgcaatgatctccattcccttatgtcacccagaaagggcttgagtggtgggtatgggtccgatgttgagttgttgcttcatgaggtgctttaaggagctgactgcatccgctaaactatgaatttcctgaccgcacctgtgtctgtgaatttcctgactgcaccattctaagagctgccscaaggaaacaggccaacaaccttaggctcacaacttgggtgatcccagatattttgctgatccttctagtgaaagaagggggacattttagcccagaacactagaatgtggcagcctaaagtatagggtgagttgggggcagcctggcattgacaggaggatatttagctccttgaccagaacccccc

SEQ ID NO: 163071 - DNA, 460 bp, Homo sapiens
ggaagtccattcttggagtattagaacctggagagtgaggtgatcacattcactccttgagccactgtagttcctccttgagccagtataggatggctagaaggggaaaaggctgatgcccaagacattgcaattttaaataccaaaggagctacagaggttgagcttgaccaaaggacagagggacagagggacagagggcagctcataatgttttccgcagcttaaaggagcctatcctattcctcctgcagccactgtctctaagccagctgcctctctgtccccagggcatgtctctgtgtcttctcttgctatatcccatcttccgcagcamaggcataaatccagaggtccctaccaggtgtgaaaaatggtagccctgcctgactggactgggaagagattcattctttattgattttggctttgggaggctttatcttccttactcatttct

SEQ ID NO: 163072 - DNA, 653 bp, Homo sapiens
atcactgcgggcctgtctaatagtaccccttccgcaaaggctctgatcagttctctgaatgtgaagaatgtgtgtgcgcgcacacacacacacacacacacacacacacccaacttacatcattcaatacattgcrcggtacaaagaatgagctatacatgccttaaaaattgtactcacctaattcatctgctttgtttttcaaagtacctaaaacaatggtttcatacacaggtagtttatttatttatttatttattttttgagaggcagtcttgctctgttgcccaggctggagtgcagtggcgtgatcttgactcactgaaagctctgcctcccgggttcatgccattctcctgcctcagactcccaagtagctgggactataggtgctcaccaccacgcccagataattttttgtatttttagtagagacggggtttcactgtgttagccaggatggtctcgatctcctgacctcgtgatctgcccatctcggcctcccaaagtgctgggattacaggcgtgagccactgtgcccggccacacaggtagtttctaacgtttgttgaatgagtaaaagcatcacctaatcaatgagggaaaaaaatatctcctttgtagagtattttttaacccacctggggaagaaa

SEQ ID NO: 163073 - DNA, 536 bp, Homo sapiens
ctgtctccaattccagcagcaatcaaagtgtggccctgatcaacagcaccagcctcaccttggaatttattaaatatgcaaatgtctcatggctcctcctagaccttgtgaatcagaaacctaagttcaggtagttaaagttacttttgcaagttcacatggcastaagtgagggtctgaccccaaagcgcctgttcttttcatacatctcactgtctaccaggaagaagggggaagggaaacaagcagagttggcaagttagtcaatattttcttaaatgaaaatgagagttaaaagcacttcccaagtatgcagacagctccattcatgtgcctttcacctcttgccaagcccacattccagtggtggtatttggttaatcatcctttgtgcagaaacttgatcccaaccctcaggtccttcactgtgatttagtctatttttgttttctgaaatcatgtctgtttcctcggtgacttccaggccctcccagacctggaagaggaatagtgaggcctcttgacaggtaaaagcc

SEQ ID NO: 163074 - DNA, 536 bp, Homo sapiens
ctgtctccaattccagcagcaatcaaagtgtggccctgatcaacagcaccagcctcaccttggaatttattaaatatgcaaatgtctcatggctcctcctagaccttgtgaatcagaaacctaagttcaggtagttaaagttacttttgcaagttcacatggcagtaagtgagggtctgaccccaaagcgcctgttcttttcatacatctcactgtctaccaggaagaagggggaagggaaacaagcagagttggcaagttagtcaatattttcttaaatgaaaatgagagttaaaagcacttcccaagtatgcagacagctccattcatgtgcctttcacctcttgccaagcccacattccagtggtggtatttggttaatcatcctttgtgcagaaacttgatcccaaccctcaggtccttcactgtgatttagtctatttttgttttctgaaatcatgtctgtttcctcggtgacttccaggccctcccagmcctggaagaggaatagtgaggcctcttgacaggtaaaagcc

SEQ ID NO: 163075 - DNA, 632 bp, Homo sapiens
tttagtgaaaactacatttctgcagacttggatgctccaatagcactgtttctcttcttggtaagaattcacgctggttgcaatttgcttagaaayagtggccataagccaggcaatacataggttggtggcaggcagtgaggagttgtgtatgcagcttcaggacttgctctcaatccacttacattctcatgggctgggacagataaaaacatgtgcacaaataaaaaactaagtagatacaaacatactgctactactactaacttctgtgaagaggaaaaataaagtagcgtgatagcaatggaagggagttgctttagtttggacaggatctgaggacctctccaaagaaatgacaagtgaatggtccattaaggaaaaagtagggggtaggggcagttgcactcaaattgtggaaaattcttggttacagagggggaagtgttgctatgaacctgaaaaatggcatggtagttgaagaggatgtcagggcatggggaattttattttggatggataattttgtagcaaatttgtaagcttatgagaatgatccagcagagaaggaaaaattgatgatactgaataaaatgagaaaaactggaggcatacagttcttgagaaagcaa

SEQ ID NO: 163076 - DNA, 632 bp, Homo sapiens
tttagtgaaaactacatttctgcagacttggatgctccaatagcactgtttctcttcttggtaagaattcacgctggttgcaatttgcttagaaatagtggccataagccaggcaatacataggttggtggcaggcagtgaggagttgtgtatgcagcttcaggacttgctctcaatccacttacattctcatgggctgggacagataaaaacatgtgcacaaataaaaaactaagtagatasaaacatactgctactactactaacttctgtgaagaggaaaaataaagtagcgtgatagcaatggaagggagttgctttagtttggacaggatctgaggacctctccaaagaaatgacaagtgaatggtccattaaggaaaaagtagggggtaggggcagttgcactcaaattgtggaaaattcttggttacagagggggaagtgttgctatgaacctgaaaaatggcatggtagttgaagaggatgtcagggcatggggaattttattttggatggataattttgtagcaaatttgtaagcttatgagaatgatccagcagagaaggaaaaattgatgatactgaataaaatgagaaaaactggaggcatacagttcttgagaaagcaa

SEQ ID NO: 163077 - DNA, 496 bp, Homo sapiens
acgttcccctctccccacccacttttggtgttctcagtcttaaatggaggttaaatgtttcaacttgaaatcgcagaagtagaaatggcagtcaggcatggggtgatactcatgtggtatccatttttttgtttgtgcaattgtttatctcatggctgtatttgacacaatcattataatcattcatattttccttctccaactatgttaaccctccggtggtttatttttcattggggtgccaaaacttcttttatttatttaattcatttattcacctagaaaggcaatttttaccagctgcctggcaggttcttctaaacccaractcaaactccacccctttgtatttttatggattgctctttctgtgaatacaggtggggcaattaaaccctgaacttagcatttggtatttggttatttactgtgtttgctaatggtttccctagttaattaatataagcttatcatattagagatttcaactttcctg

SEQ ID NO: 163078 - DNA, 627 bp, Homo sapiens
ccacccacttttggtgttctcagtcttaaatggaggttaaatgtttcaacttgaaatcgcagaagtagaaatggcagtcaggcatggggtgatactcatgtggtatccatttttttgtttgtgcaattgtttatctcatggctgtatttgacacaatcattataatcattcatattttccttctccaactatgttaaccctccggtggtttatttttcattggggtgccaaaacttcttttatttatttaattcatttattcacctagaaaggcaatttttaccagctgcctggcaggttcttctaaacccagactcaaactccacccctttgtatttttrtggattgctctttctgtgaatacaggtggggcaattaaaccctgaacttagcatttggtatttggttatttactgtgtttgctaatggtttccctagttaattaatataagcttatcatattagagatttcaactttcctgaaggaaactaagaacttctatcatgacctcaagcctctatagaaatcccagatttgttttaggttacaccaagacaaatcaataccaaatcaatcgttcagagtcaaatagcattttactgaatttacagaattttatagaattc

SEQ ID NO: 163079 - DNA, 403 bp, Homo sapiens
tcccatgtcataagcctgaaaatgtttttcaacatagmaaattttggagagaatccttcctccattacaaatgccttcctttgtttcttgactttttaaaaatagatggatggatcaagaaaatatggtacatatgaacagtagaatactattcagccatgaaaaagaatgagattctgccatttgcagcaacatggatggaactagagggcattatgttatgtgaaataagccaggcacagaaagacaaataactgcatgattttacacatgtctgtaatctacagaagttgatcatatagagttagaaaggagaataatggttaacagaagctgagcaggggttgagggagagaggatgaggtgatattggtcaatgaatacaaagaaaggtcttcctttt

SEQ ID NO: 163080 - DNA, 597 bp, Homo sapiens
aagcttgacacatgctcttaaattttaaagacatkgccatccattttcacaactacttttgtgggaccaaatccacacactcatatgttaacaaagtctgtggtttcaacattgaaataggcaaagtccctattatggctcgtgtatttctgttttctcattgttcttcatcaccatctctttcctgccaataagagtaatagtaattactctgtgttgggttctttcaatgagccaagccctggccaagcgctttacctgccatcttgcttcatcctcagcaaatctaagaagaggatgtgagggctgttggccatttatcaatgagggaactgtggttccgaggagaaaaaaagctacccaagcacactctcagtaaatttggagcccagaactgtgaggactaaaaggccatagttagctgctgtgccttctggaactctcttttccctagagtgtccaagtctaggtcatcctgggttgttcctctggtcagctgggctgagtgcagaacattcccagctcatagctggacgtcccagctcaaggctgaacaatgccagtcctcttctctgtgcccatctagcatctcatctg

SEQ ID NO: 163081 - DNA, 595 bp, Homo sapiens
ggctgtttgcctctcactgaaaagaacagcatcgtatcagggtctgctggggttttacaaagcccagatagagacaagagttgccgcacaacccataggagaaaaattaagcaaactaaaacctttcttggagagcagagcttccatawaaagattgccacttggttgcttgctggcatctctccgcgatggcagattttcacccgaaaccaccagagcccgccccaccccttatctctgcgctggccctggtggagactccaaaggacaaaaggcacaccgtcatggtgcttccagcccacagccccctaaaaataacttctcattctttgagtcttgggaagaagaagaaaaacacctggtttgtgtgagacattcaggttgcgttgttctttgtggttgtgttgttgtttttttccttgctgaaaggagaaagttaacatttgttcctcaaaacaagtctcttctccatctggaatcaatgggggcggccctcagcggatcacccctgaggactggctgatgtttataagatcttaatcctggggggaacgggctggcttaggaggctggtaatgggataagaaacctctcc

SEQ ID NO: 163082 - DNA, 595 bp, Homo sapiens
ggctgtttgcctctcactgaaaagaacagcatcgtatcagggtctgctggggttttacaaagcccagatagagacaagagttgccgcacaacccataggagaaaaattaagcaaactaaaacctttcttggagagcagagcttccatataaagattgccacttggttgcttgctggcatctctccgcratggcagattttcacccgaaaccaccagagcccgccccaccccttatctctgcgctggccctggtggagactccaaaggacaaaaggcacaccgtcatggtgcttccagcccacagccccctaaaaataacttctcattctttgagtcttgggaagaagaagaaaaacacctggtttgtgtgagacattcaggttgcgttgttctttgtggttgtgttgttgtttttttccttgctgaaaggagaaagttaacatttgttcctcaaaacaagtctcttctccatctggaatcaatgggggcggccctcagcggatcacccctgaggactggctgatgtttataagatcttaatcctggggggaacgggctggcttaggaggctggtaatgggataagaaacctctcc

SEQ ID NO: 163083 - DNA, 256 bp, Homo sapiens
aaaaccttgaaatgggaagatgatcctagtacacctgggaggacactaaatatagtcacaagggtccttgaaatccacgaaccattcctggctgagttcagagtcagagggrgagaggaccatgaagaagggtcagagagaaatgatgttgctgactttgaagaaagaggaaggggtccatgagccaagggatgtgggaggcatctgtgaccttaaaaaggggacacatttttccacctagagcttccagaaagga

SEQ ID NO: 163084 - DNA, 256 bp, Homo sapiens
aaaaccttgaaatgggaagatgatcctagtacacctgggaggacactaaatatagtcacaagggtccttgaaatccacgaaccattcctggctgagttcagagtcagagggagagaggaccatgaagaagggtcagagagaaatgatgttgctgactttgaagaaagaggaaggggtccrtgagccaagggatgtgggaggcatctgtgaccttaaaaaggggacacatttttccacctagagcttccagaaagga

SEQ ID NO: 163085 - DNA, 448 bp, Homo sapiens
ccgtctctactaaaaatacaagaattagctggatgtggtggtgygtttctgtagtcctggctactcgggaggctgaggcaggagaatcgcttgaatccgggagacggaggttgcagcgagccgagattgcaccactgcactccagcctgtgcaacagagtgagactcatctgaaaaaaaaaaaaaaaaaagaagtaaaattgtgtaggaaaagattgtatttccttcaagcccagattaagggttttgcaaaaatcagtttaggaagaaaaagggatggaacagagccttctgtaatattttaaatcaaaggggttggctataaaatatggagaccaaaataactgctgagaacacaatgctttcacataaaataaaaacttgggaagaagactccagataagaaagactaacagttggcacttacatttcagtgttatttaccagca

SEQ ID NO: 163086 - DNA, 498 bp, Homo sapiens
ctccccagctgccacaatgtctaactcagagtttgtccactggtgggccacaaatgtgcttagctgctcttgcacagagattcattattttttaaaacattaactggcatcatttaaaaggtaggatgtttcacattaaaaatctgggctctgttaaaaaaatcagatctgggctgggcatggtggctcacgcctgtaatcccagctcttcgggaggctgaggcaggagggatcacttgaacccaggagtttgagaccagcctgggcaatatagcgagacctccactctacaaaaaacaaaacaaaacaaaaattaaccaggtgtgatggcatgcgcctgaggtcccagctactcaggaggctgaggtaggaggattgcttgaggctgggaggttgaggctgcagtgagccgtgatcgtgccactgcrttccagcctgggtgacagaatgagtaagaccttgtctaaaaaaaaaataaataaaacaaataagtaatca

SEQ ID NO: 163087 - DNA, 578 bp, Homo sapiens
ccatttttaagggaatgtactgtatttaaggaaggatgatattaattatctactttcaaagagacttttttttcttttttgagatggagtcttgctctgtcccccaggctggagtgcagtggcacaatctcagctcactgcaagctccgccccccgggttcacaccattctcctgcytcagcctcccaagtagctgggactacaggcgcccgccaccacacctggctaattcttttgtatttttagtaaagatggggtttcaccatgagagccgggacggtctcaatctcctgacctcatgatccacccgccttggcctcccaaagtgctgggattacaggcatgagccactgtgcccagcccaaagagacatattcttatttgccagtgtctagagagaatcccgctggactttccgagtgattttactggacctcatgctaaaaactcaacacacaattccttcatgtaaaacggaaaacacctgacaacccagtctcctgtatgtaaagaatagaagcaccagaaaagattgatcatcatgacagtaggagaaatttcattaacctgctcctgag

SEQ ID NO: 163088 - DNA, 631 bp, Homo sapiens
taattatatgagaagagtacatttctcattcgggaagtgaaaattaattccgcattgagataacacattacactcactaggagttatgaaattaagactgaaaacagcaaatgtaggcaacgatgggaagcaactagaactcatacattgttggtaagatgtaaaaagatacagaaaatcagaaaacagtctcattatttcttaatctttctttatgacctagcttcctccttcccacatatttctccaggatacatgaaaatgtatgttcacacaaagacttttactcaaatgtacatagcagtttcattctcataagccccaaattagatacaacccaaataatgtaaatgtgaatggtaaataaatgggtgctttatgatataatggacaacttctgagcagtaaaaaggaatgaactactgccataaaaatataagatgccacacaagcattaggcaaagtagaagcagccagacataaatatgatatacctacttatttgaaattctagaaaagacaaatctagagacagaaagtggaygtgtggttgtcaggaactgaacattttaatgaaaagaggcatgaggagactttgcgttaattaaaatgttctatatctatgttgtac

SEQ ID NO: 163089 - DNA, 487 bp, Homo sapiens
aagttacaggcagacatcaatcaatacatgtgaggtatacattggttcagtctggaaaggtaggacaatgaagcaggagcttacaggtcatagatggattcaaagatcttctgattggcaattggctgaaagagttaagaatttaactctgaagacctggaaacagtagaaaggagtataaggggttgtggagaccaaggttcttgttatgttgacaaagtctcgtaggtggctgcccttagaggcaatagatgggaaatgcttcctattcagtcctttaaaaggtactagactcagctagtctcttcaggatcagaaaaacgcctggataaagaaggagatyatcatccaaacgtaaatttcccccacaagaggcagctttgcgggatcatttcaaaataggtcaaagaaatgtattttggagtaaaatatttttatttatttgacagcctgctgtcattttgtgatttctttttttttttttttt

SEQ ID NO: 163090 - DNA, 447 bp, Homo sapiens
atacgtatgccattaatccatatcaatggcagcaaagaaacaactcaaagggaaaagaagtacatccctttattatggattcatttttcaacacagtcttttcagctggctgttaatttgaaattcaaggcagaaataaaaaatagcatcttgtcatgtagcttcagataaacagatgtgagcctgggcttcattgccmtgggaccttactctccttaatttcagtgaccttctgggataattacagtcaccatttacagagtttattgattaagtaattaataaatgatgataaacccaggcattcgtacgtgtgtgtactgcagcagcagcaaagcaggtgttgaatacaaaacttccacctatgtaatagcagagtcagaataaaatctaggaagcacaagcattctaacagtctctgctatagttgaagaaattaaagaattc

SEQ ID NO: 163091 - DNA, 635 bp, Homo sapiens
tggacaacctgttgctgtagaagaatgaaataaacttaagaatataccttgattgaaactctgtggagcagtttgacttctggcacgcccactgatctagtggcagcttaagccattctattctccaatcatcatagaaaatctgagtttttttccttatagaaatttgttctgagttgagaatactaggctggtaagaagaggcatagggatgacatggtatttcagcaagctgaagagtataagccacatcgtttatgaaccaattgacattaagttcccaatattcactgttagaccagcaaaagcctggcttacttcctcttcccattgcaggaagcttatcaygctccaagtacatcccaccacaatctgagcttgcaagaaacttttaaattcttcatgatgagatatgagtggagagcaatgatttttatacatttggtgagaaaactaacatcaaacagagtgacaaaaacaattgaattaataacaagaataattaatggcaggtcaatgagctcattccaattcagtgttttacttctggtgcttactataagtaatcccaagaaagggaagcaacgagacagcatttaagttctgatactaagtggtaaagatctaacaccact

SEQ ID NO: 163092 - DNA, 588 bp, Homo sapiens
gttcccttgagagtgagtggtgtgttaagtagaatatggagagaaggaaaataaaaattatagagcattacaaccatagagagtgtagacaagcaaaatgaacctgatccatacaaaatgcttttgtgagaattaaaggatcacaagctctccctggcttagctggtcccagctgcacattcagccattaagtaatgactggagatgcaatgagaaaaggaaatctatcctgaaggttttackgcaatgattgattttggtttttgcaaccaaaattcaaaaggtttggtaagaattgatcttaggcaagcatttcctttttatcctgctgaataaataccaattttggaatgtactgaagaattttgaaacgttcagctcaaatcatgcagcaaaatacattttgaatgagatcatccctgaaaaagctaatgtaagtccagaagaggttagaatttgaaatacagaatattgtattttgaatctccaaaaccatgttgggtcatgtagagattactgaactctctctcttttctgttagtgaactgttcattctctgggggaaaaaaaaaagaaagaagaaagact

SEQ ID NO: 163093 - DNA, 588 bp, Homo sapiens
gttcccttgagagtgagtggtgtgttaagtagaatatggagagaaggaaaataaaaattatagagcattacaaccatagagagtgtagacaagcaaaatgaacctgatccatacaaaatgcttttgtgagaattaaaggatcacaagctctccctggcttagctggtcccagctgcacattcagccattaagtaatgactggagatgcaatgagaaaaggaaatctatcctgaaggttttactgcaatgattgattttggtttttgcaaccaaaattcaaaaggtttggtaagaattgatcttaggcaagcatttcctttttatcctgctgaataaataccaattttggaatgtactgaagaattttgaaacgttcagctcaaatcatgcagcaaaatacattttgaatgagatcatccctgaaaaagctaatgtaagtccagaagaggytagaatttgaaatacagaatattgtattttgaatctccaaaaccatgttgggtcatgtagagattactgaactctctctcttttctgttagtgaactgttcattctctgggggaaaaaaaaaagaaagaagaaagact

SEQ ID NO: 163094 - DNA, 599 bp, Homo sapiens
tctccttaaaaaactagacatgcgtctgggtgctctagtctctaagaggagcaaagaacacagtcttctcagtacatactttctcttctgaattttattgtgytcatacaaagaaaggttaaagtgtattacggcatggcgtttgtgtaattgacaaaatctactcacagcttggtctaattttaacatttgtagtacgtaactaaaaatggtccaggagaaagctatctttaaagagaaaatattttatccctctgtcaagggtctccatactctataatatctaaccatcatgtcacactattgtgttattgtgtttaattatgcatgtttgcttttaaatattataattaacatgtgtatgtttatgacatttgcacagggtaatatactaccagattgatggaaaatagtttagacatttagagaatgattaatgttattatgcttatttgaggggctgaatacaagcctatctatttgattttctcaaatctaaatgcctggattataaaatacatcattattttatgtgccacactggaaagaaaaaaatgtctaaaccgtaacttttagttttagcactaaactataggata

SEQ ID NO: 163095 - DNA, 553 bp, Homo sapiens
aagcaagtaccttcttcacaaggcagagcaggagaaagagagtaaagggggaagtgctacaaacttaaaaaaaaaaaaaaaacagatctgatgagaactcactcactatcatgagaacagtaaggggggagtctgcccccacgattcaatcactttttaccaggtcctcctctgatacatgagaattacaattcaacatgagatttaaatggagacacagagccaaaccatatcattctgcccagcccctcccaaacctcatgtccttttcacatttcaaaatgcaatcatgccttctcaacattcccccaaagtcttaattcattccagcagtaattcaaaagtccaagtccaaagtctcatgtgagacaagtccctttttcctatcagcctgtaaaaatcaagccaagttagttacttctaagatacaatcgggttataggcattggataaatgatcccattcccartggaataaattggccaaaacaaaggggctacaggcctcatgcaagtctgaaacccagcaggggagtcattaaaccttaaagctc

SEQ ID NO: 163096 - DNA, 545 bp, Homo sapiens
acagtgacatctcagacctggtcttctagggtgtagctctaaagtgacacatgtccattttgctcacagccctttgaccagaatgtgacatatggcctcaattaattgcaagacagaagatgaacacatggatgaaaattaactcattgctaaacagtacagcctctgaacagtacagtctccaatatatttctagggtccataagaatctttagggcttatacaggattggacaaaaggcattttaaaagtagccacataaactgttttcctgcggatcaattgcctaggacattcacagattcagagaatgaaggtaaatctaataacatctaagattaaaactaytgccatccacccagagtggagactaagaatcaaaaatgacctcagttaaagaaaataatgcaatattcttcttacctaactgggtttctggagttactcatgcatactactgtcaaaggatttgacaaaagctgtgatcttaaaaaattataaaatgaaaaggctacctctgctcactcaagatttaaattataaaa

SEQ ID NO: 163097 - DNA, 562 bp, Homo sapiens
tcttggtagtatatgcaaatagttattatatactctaaattcttataaaacggttgtttaaaaattgatagtaattgttttctattgctgaaataaaagcycctaatcatatttgccagatgtacaatggtgagctctctaaacgtgcaccctcataaaggtgagctatcttattttaacttctatcttgtagaagcttttttctgtgtgtttcaacctaggatacatgatgagaatgtctaagaatatgctgaattgagacttaccaaatttttggtaaaacaaattttttatctctcaataaatatattgattttttaaacctaatctctacactttatttttgtatgttttgtgtgtatctcaaatatttttcctggtgaaatattcacattaatattttagctccaatagaaaagcctcaaatattcttatctttatattctaggaaactaattaatattaaaaatgtaattattgtactttatgttgcgaagagatataacaaaaaagaaataaaaaaagcacggagattttagtttgtaaatttaactttataaaa

SEQ ID NO: 163098 - DNA, 562 bp, Homo sapiens
tcttggtagtatatgcaaatagttattatatactctaaattcttataaaacggttgtttaaaaattgatagtaattgttttctattgctgaaataaaagcccctaatcatatttgccagatgtacaatggtgagctctctaaacgtgcaccctcataaaggtgagctatcttattttaacttctatcttgtagaagcttttttctgtgtgtttcaacctaggatacatgatgagaatgtctaagaatatgctgaattgagacttaccaawtttttggtaaaacaaattttttatctctcaataaatatattgattttttaaacctaatctctacactttatttttgtatgttttgtgtgtatctcaaatatttttcctggtgaaatattcacattaatattttagctccaatagaaaagcctcaaatattcttatctttatattctaggaaactaattaatattaaaaatgtaattattgtactttatgttgcgaagagatataacaaaaaagaaataaaaaaagcacggagattttagtttgtaaatttaactttataaaa

SEQ ID NO: 163099 - DNA, 431 bp, Homo sapiens
atttactagtgattgaaattaaaaatatgaataggattcagaggataaaggttaaggtgacacacgattgctacagttattgctaacagaaaatagtcattacttgttaacatttctaaagcrttgatataagccacaggctatcagcactactgctgctctcattatgacagattaaataataatcatataaataatcactccgtccaaaacttgataacaaattcgacaatgccaaaaacaaaaacaaaaaccatagcctatatgtacaccaaccttctttgcaaagctctcttataaactactttttcaaagctccccaccatacccagtatctagtgaatggctttaccattggtgtcattaaaattgtactgactggccattgtcagagggaagcgcttcttcacctttctggtgaagggagctca

SEQ ID NO: 163100 - DNA, 536 bp, Homo sapiens
agcccctccttcctgcagtccatatactcagccctcaagacaggcagaagggaaactcctaggcacccaagcccagggactgatgagaagtgggagacctctgggcaggagacaggaggagtggttcttcctctccaaggggtcctgggctctgggacccagcgagggatggaagccagtcagcccggcaatattctctctctaccctgttagctttttttgttgttgttgttcttaaatttcctatctgrtcataaaccacaggtagcaggcttaaaagtacaagaatcctgggctatccttgaagacacccaggttccagaacaggagctccagcaaggatggtacaaacctaggatggtgcgtttcagagcagtcagataccaagaattatcatgaaattcacacaagtgccagaagtgcatgtcactaaaaagacctctatgtttgaaaatccccataagaagattttcataacatctgctcatatcccggtgattaccaaaaaaaatttaaaagtgccctttaaacttgtg

SEQ ID NO: 163101 - DNA, 416 bp, Homo sapiens
cccattatgctgttaccatcttacatcattctcttgtaacatgttccttaaggttactatctagccagcccatattagggccgagttttctctcacacatcctcatttagtctcttaggaaacacctcctctcactctaccatggctgccactgatgcccttcagtatgtgcctttctggaataaaagagacacctgaggactcaccctttcctcatagataggcacccctccaacctgcaacacacaccaaatctcctattccaggcatgactgtatccttagattatatcagcatggtattatrttttccagaatataactggaacaattaaatggagatattaattggtgtgatctggctctgtgtccccacccaaatctcatgttgaactgtaacccccaatgttggaggta

SEQ ID NO: 163102 - DNA, 494 bp, Homo sapiens
acaacccctgaaacccattatgctgttaccatcttacatcattctcttgtaacatgttccttaaggttactatctagccagcccatattagggccgagttttctctcacacatcctcatttagtctcttaggaaacacctcctctcactctaccatggctgccactgatgcccttcagtatgtgcctttctggaataaaagagacacctgaggactcaccctttcctcatagataggcacccctccaacctgcaacacacaccaaatctcctattccaggcatgactgtatccttagattatatcagcatggtattatattttccagaatataactgsaacaattaaatggagatattaattggtgtgatctggctctgtgtccccacccaaatctcatgttgaactgtaacccccaatgttggaggtaggcctggtgggtggtaattggatcacggggcggggggggggttctaacggcttagcaccatctcc

SEQ ID NO: 163103 - DNA, 609 bp, Homo sapiens
tgttctcttgaaatacccagtagtgctgcccaaatggccagcagtgagcaccagcggctgcaagtccatttaygcaaggctgttgtaggaaagtaagacagagaaatatgtctgctgacatgtgaggtcactaaagtatagattctttgtgtactgtttagagagatccacttgatagagctgctgatttatggagaaatgagcgctagttgccttccacccgtgtggctgtaaccttctgttgctgtggttgttaacagtccccatgttgagcaggagcatgcagagtttgccctacgctttcagagcctcacttagttaaggcacttttggttgctggagcaaaaaaggaaatttattttcagaataaagaatcctctgagctaacccgagggaaggtggtataaccccacctcaccccaagaggaactgctgcgagtgggaacaggcaagccccagcaaagctgctccaagtttgtttctgtttcctgtttctccctaggggtcggctttatgcccgcctgcctctctatctacccagtcaacttcctctcaccttcctagttcaagacaggattgatgagcaaccctgaaaagtttcacatttct

SEQ ID NO: 163104 - DNA, 597 bp, Homo sapiens
gatctctcaaaatgttgttcatgctcatcacttcaaaactgtagaagttactagaatgactgctattttcatttaatgtgtggtaaagatgcacatattactttaaaatcttttgatgatcattactattttttttagatataattggttttctggttaagtttctctatgcacttaaaaacagtgttctgagaagagcttcataagtttcaccagattgccactagttagaaatatactactcccccaaaattgctggttggaattgagattacagttttctctttatggctgtcaggatttaaatttttctttttttcttaaagttttgggatacatgtgcagaatgtgcaggtttgttacatagcacatatacatgkgcaggattcaaatgctttctaaaaggcgttttctaattcctttccagttttttccactccttacttagaacttctttgtccctttcaacaattcctacttcctttaatgttttaatatctagtaatagattccattttttgtttgctttttgctgcgtaaattatacattctttggagctaaagattctagattattatagtattgaaagttagaga

SEQ ID NO: 163105 - DNA, 617 bp, Homo sapiens
tgtctcttggcaggaccctccagggccatgttggaccattttttaattaatattctttaaaaaatgatcaggsaaacctagtccactgtaaattcttcttgtccagtctttattctttttttctctttccaaaataccttaattgaatgtgcgatgctctgaaagtttcagggataaatatgttgacagggtccaagttccttttctcaaggaatttataatctgataagagcagattatttttagcagatagttttgtagtctactaaatttgactgtgccaggctcatctgcaacactcatgtctttggttattgtggagtataatttgctaaggcataaatttgaatcctccttgtcaaggtgctatcaggagtgaggggtgaatgaaacttgcgacctcttctgtggtgtctgattgccttgcagcatacacattttgatggggcatatctacacttcagtgatttgtgcaaatttgagtgttcctgagagctttttctgaattcttctcaaacgtcaagggtctaatgcacaaggaaaaatgaaaggtcctatagtagaggggcaagtagcagctatcatattgagggctactaggaatatcttcgtggaag

SEQ ID NO: 163106 - DNA, 617 bp, Homo sapiens
tgtctcttggcaggaccctccagggccatgttggaccattttttaattaatattctttaaaaaatgatcagggaaacctagtccactstaaattcttcttgtccagtctttattctttttttctctttccaaaataccttaattgaatgtgcgatgctctgaaagtttcagggataaatatgttgacagggtccaagttccttttctcaaggaatttataatctgataagagcagattatttttagcagatagttttgtagtctactaaatttgactgtgccaggctcatctgcaacactcatgtctttggttattgtggagtataatttgctaaggcataaatttgaatcctccttgtcaaggtgctatcaggagtgaggggtgaatgaaacttgcgacctcttctgtggtgtctgattgccttgcagcatacacattttgatggggcatatctacacttcagtgatttgtgcaaatttgagtgttcctgagagctttttctgaattcttctcaaacgtcaagggtctaatgcacaaggaaaaatgaaaggtcctatagtagaggggcaagtagcagctatcatattgagggctactaggaatatcttcgtggaag

SEQ ID NO: 163107 - DNA, 617 bp, Homo sapiens
tgtctcttggcaggaccctccagggccatgttggaccattttttaattaatattctttaaaaaatgatcagggaaacctagtccactgtaaattcttcttgtccagtctttattctttttttctctttccaaaataccttaattgaatgtgcgatgctctgaaagtttcagggataaatatgttgacagggtccaagttccttttctcaaggaatttataatctgataagagcagattatttttagcagatagttttgtagtctactaaatttgactgtgccaggctcatctgcaacactcatgtctttggttattgtggagtataatttgctaaggcataaatttgaatcctccttgtcaaggtgctatcaggagtgaggggtgratgaaacttgcgacctcttctgtggtgtctgattgccttgcagcatacacattttgatggggcatatctacacttcagtgatttgtgcaaatttgagtgttcctgagagctttttctgaattcttctcaaacgtcaagggtctaatgcacaaggaaaaatgaaaggtcctatagtagaggggcaagtagcagctatcatattgagggctactaggaatatcttcgtggaag

SEQ ID NO: 163108 - DNA, 401 bp, Homo sapiens
tagaggttgtggattcaaagaccacgaaacagaaacactatcccgtctccctccccgtcactagtttaggctcggcggggtggagaaagagggacgcatccgggccagagatttcagggaaaggaggtgggatgatgtaagatcacgtgactgcccgcggccttgtcaacaatccacccctgagtgggagggggagaagtatctagaaccacgtgtccctatgacgcgtttagaacgggtcacgtgagcgcctcgcctggatgtgagtttcagccaggtctgtgaagcgggtttaagagggtgagggcgggataaacctttattagttgttttctgtttatcacaggtatagaracaacattacccaagaggtcatggcagaatcaacagcttgttttgtt

SEQ ID NO: 163109 - DNA, 606 bp, Homo sapiens
acaaaaaactgaatctagacacagaccttatccctttcacaaaaattaactcaagatagatgatagacctaaatataaaatgcaaaactgtaaaacctctagacaatcacataggaaaaaatctagatggccttaggtttggtaatgagtttttagatacaacaycaaaagtataattcacaaaagaaaaaattgatagttagaacttcactaaaactaaacttttctgctccatgagagatactgttaagcaaataaaaagacaagccacaaactgcgagaaaatatttgcaaaataataaagaacttgtatccaaaatacataaaactcttaaaattcaataagaaaataacccaattaaaaaatgggcaaaatataagaatatacatttcaccaaagaaaatatacagatggcaaatgggcatattaacagatgcccagtatcatatgtcatcagacaattgcaaattaaaacaacgagataccactacacacctattagaatgcctaaaatccaaaatactgacaacatcaaatgcaggtgaggatggcaaacaacaggtactctcattcattgctggtagaaacacaaaattatacagtca

SEQ ID NO: 163110 - DNA, 588 bp, Homo sapiens
gaattcgagaccagcctgggcaacatagcaagactccatcactatttaaccaaaaagaaactaaaaaaagaccagaggccaaagattgagtgctgagtaaaaaaagttttactgccaaacagggaaactattctatccagagtctaggctcagaggttggggatacagggggaagatatggggttggtcgkgagctatttctgttctgtattcaaaaagcaaggtttctgcaggttgctgattgactgtggatatggggctgtgagtcaggtgatcactgggttgtctggaggtggtcagctatgtacctgggccattgtgccaggattaaggtatcaagcagcctcctggccaaatcaagatttgggtgccaagtcaggtttttactgatgtcagcaggttagatggcaggtcagggcttctcacttgctactggccttcaatttttcacctgtgaaacaacgtggggacccccagctccccactctgtgagcccaaaccagttagcaactgtttgctaaattcaactgtgggcctgggatttatatccccaacaacaaagccagggttgccttcctctccctcacc

SEQ ID NO: 163111 - DNA, 545 bp, Homo sapiens
tggcatggttgatttcttctgaggcctctctccttgacttgtagatgaacatctttctctcgtgtgttcacatggttgtccctctgtgcatgtctatctcccaatctcctcttcatagaaggacaccagacatatwgggttatggcccacttatatgacctcactttacctcacttaactctggaaagggcctatctccaaatgcagtcacattctgaggtactaagggctaggacttcagctaaggaattttgtggggatgaagttcagttcataacgtgatgttatgcttcctgttaaggagcctaattgaaattacttcagtgaagttccacaagcagttttaactataatataggtgatttttttttggtgccagggtagggaaaacgaaactaatagggtatgattgttgtcctcaaatgcacaatatagttggggagcaagacacatacactagactagtgacatagagacgacaggtcgaggtaaaatcctggcccatccacttactggctaagtaaacttggacagttatcatattt

SEQ ID NO: 163112 - DNA, 545 bp, Homo sapiens
tggcatggttgatttcttctgaggcctctctccttgacttgtagatgaacatctttctctcgtgtgttcacatggttgtccctctgtgcatgtctatctcccaatctcctcttcatagaaggacaccagacatattgggttatggcccacttatatgacctcactttacctcacttaactctggaaagggcctatctccaaatgcagtcacattctgaggtactaagggctaggacttcagctaaggaattttgtggggatgaagttcagttcataaygtgatgttatgcttcctgttaaggagcctaattgaaattacttcagtgaagttccacaagcagttttaactataatataggtgatttttttttggtgccagggtagggaaaacgaaactaatagggtatgattgttgtcctcaaatgcacaatatagttggggagcaagacacatacactagactagtgacatagagacgacaggtcgaggtaaaatcctggcccatccacttactggctaagtaaacttggacagttatcatattt

SEQ ID NO: 163113 - DNA, 428 bp, Homo sapiens
tttggtcccattttagtaatgaatatcttagaacaagctctatgaagcatttatgactttattctcagttttccaaaataggatataacttgtttcaattgcttaaaacacaggggcaaaccacatatgatgaatgcattctgtttgaaatcaatttccttcatcattttattagatcgaatgctctsaactgggaagtattattttcccattgtgcttttgcaaaactgcccactcttggagctttgtggctgtgagctcctgattagtttaattgtttttttcttcttctgctttcctggctacaaggacttaacactttactcacctttgagtagcagggcagcaccacaaggaaggtagaataaacaggatgattaaacaaccagcatgcagcaagggggcaatatttcaatagcaaatattgc

SEQ ID NO: 163114 - DNA, 564 bp, Homo sapiens
ataatactaaagcagcacacgacaactggatgcctcatacccaaaatactcaacaatagagaaatcaccagagaacttgtaaataaaaatgttctgtaggtaattcccacagaagtcatatatttgctaatatttgtggattttcctcacaaaagtgcctctcacgtaatcattaacgtctctatgctttctttagatacggatacagtagttcaaatttaaatgccagtttctaaaagccttggcaagatagaaaacrcagtctatggcaaggattcaggcaaatcaaaatgcttgctcatgaggggcaaggaatcaaaacaactgcagaaggcactgctagaacctaaattcagtcagcagatatttattagggccctactccctgctgattgctgaagataaaacaatgagaaaaacaaacttggtgcttgccctcctgaactttagagcctatagaagggtgcacattctaatgtaaattttatgcaaataacatttaatattgtgataaataagaaaaaactgggttctgtaaaagttttaaatatatataaaaaaggc

SEQ ID NO: 163115 - DNA, 617 bp, Homo sapiens
tcgtgttaaataaagtaattatctcactatgcaatatgatatatttttgaagacatgctgctgatttacagtacaaggagctggctctttgggcatatttttacccctggaattggctacagactgcaactcactcatcctttcagtgcccagtggcaactatttgccaactgatttgtttgagatgagaaataaatctgggcccttggaattgaatgtttttctttctgagtgaattgggcagattcataagagacagagtgaagacctcaggtccaacaggcccatattttaacccactaaactaactgatctacacctaagctcaaaatttcatattaatattgtacctgatgctttcaaatgcctaaaaccaaaatatttttattcctttcttgcacatgattccacaaataytttgtgcaaaagatgctggtctgagtagcataacaagtcctgagcattgggatggagagtcttgaagacaggcattctgctgccctaccctgactttgtatagtcataatgccctgtaaggtatttctagaaatatcatagagacttgacaaatgcctttgtccatgagactgtgtacataatacagaggaaacaaagct

SEQ ID NO: 163116 - DNA, 601 bp, Homo sapiens
atgagttaagtgcctagcacaaaatgagtgctgaatgtatgcaaacaaattaatttaatattattttggggacatgggtttgagtttcacttttgccaatatgtactcttgggcaataacgttttatcctctaggcctcaatttcctcctctgccaaatgagatgatgaagctagattagaagttctcaaactttgttttaaggagctgtcatatcctacaaaaatgcctctaatggtatgacttgggtctccttttaaaaatatattttaaaaactttaatagaataacatgcatctatatgtgggctatacatccatatgtatatggatccatatggacatatgacatccatatgccaactaagttgacagaacctaataacctaataatctgtaaatattgtacttggaacttgtaaaatggatttatctagtgtccatattaactactggggatttttcatcaggttgcctttgaaataaaggatttgattgctaaaatattttcaagccatggagctaatgatctctgmggatccatccagtctaaaattctaaataattgatttcattaaattcatgtgaataaagacaaataca

SEQ ID NO: 163117 - DNA, 527 bp, Homo sapiens
cgtatgttaaaacattcacggtaaaaaaagacatacagtaaaaatcagccttgagtttcttttcctagaagcaccccttttgctagtttcttgtgcatccctttagatattcagtgcatgtgcaaatatttgtaaacattccctctttttctttttacataaatggaagtatcacaartacgctgttttgcccttgctttttaaaaaatttaatatattttaagacttttaagtatatttaattaatgtaattttagtacaggaaaatcagtcttttgccatatgtgctgtaaatattttctcagtttatcatctgtcttttgactttgtttaggtatttttaccatgcagaatttaaaatattgtatttggtcacatttatcaattttttttatgacttttgttttttgtcttttttttttttttggtaagcctgtctcaaatcagagatgaaaaataaatccttccatgtgttcttcaaatgcttttatggtcttaactattttttgcggttaaatcttttctcc

SEQ ID NO: 163118 - DNA, 458 bp, Homo sapiens
aatcagtccatacatccagtatgataagacttccatcatgaatgctatttctaatagatgtacctagagttgaagtttccattcactgattcatcagcaaatacttattcagcacctgttatagatcaggccctgcactaggcactgagacttcaaagatgaatattaaaatttacacrtgagtatacagtggcattacattttaacaaatgtcactctggaagaacgaggtagcagatgggtgaccagttaactcctcgggagtagggagaaagagaacagagaagtgatggcatagaacaatgactaggagtttgccactgtgcaacagtaggaagagcttctcgggtgtgtgtgatgggaaataaacccagaaaaatcaggtagggtgatatgttttggctgcgtccccatccaaacctcaccttgaattgcaataatcctcatgtgtcaagggc

SEQ ID NO: 163119 - DNA, 458 bp, Homo sapiens
aatcagtccatacatccagtatgataagacttccatcatgaatgctatttctaatagatgtacctagagttgaagtttccattcactgattcatcagcaaatacttattcagcacctgttatagatcaggccctgcactaggcactgagacttcaaagatgaatattaaaatttacacgtgagtatacagtggcattacattttaacaaatgtcactctggaagaacgaggtagcagatgggtgaccasttaactcctcgggagtagggagaaagagaacagagaagtgatggcatagaacaatgactaggagtttgccactgtgcaacagtaggaagagcttctcgggtgtgtgtgatgggaaataaacccagaaaaatcaggtagggtgatatgttttggctgcgtccccatccaaacctcaccttgaattgcaataatcctcatgtgtcaagggc

SEQ ID NO: 163120 - DNA, 458 bp, Homo sapiens
aatcagtccatacatccagtatgataagacttccatcatgaatgctatttctaatagatgtacctagagttgaagtttccattcactgattcatcagcaaatacttattcagcacctgttatagatcaggccctgcactaggcactgagacttcaaagatgaatattaaaatttacacgtgagtatacagtggcattacattttaacaaatgtcactctggaagaacgaggtagcagatgggtgaccagttaactcctcgggagtagggagaaagagaacagagaagtgatggcatagaacaatgactaggagtttgccactgtgcaacagtaggaagagcttctcgggtgtgtgtgatgggaaataaacccagaaaaatcaggtagggtgatatgttttggctgygtccccatccaaacctcaccttgaattgcaataatcctcatgtgtcaagggc

SEQ ID NO: 163121 - DNA, 555 bp, Homo sapiens
  misc_feature (1)...(555): n = A,T,C or G
gctacctctcatgcaagacttcctggtacctgggaaagaccaggaagtagtaggggcttcagctatccagagcttaaggggaaggcttgttctaccagagaaagaacatttgatttgcctttctgacaattatttggttctaaaagtagaggaaacaatgaatacaattgctatgttgagtttgctaatcagcacgagagagayaaatcaccagtggtgagaaagtagcccatcacgtcaaccacatgaactaaagtgatgccctagactttaagaaattaaacatctgaatgttctgaggaaagatagtcaagactatagagccatgccttgaaaggaaatatggctcaagaggctttaaaaataaaattctaactataaaatcacaaatgactccaaagtgaaagaaaaagaacagatanctagagaagcagcatggtttcagagggaactacctgataagcctagattttaaatatgaaagaacatggttcccaccttcaaggacatcacaatctggtggagaagataaaactcttaacctaataattcaaa

SEQ ID NO: 163122 - DNA, 572 bp, Homo sapiens
ttgttagtatattatttcatctccaacaattcacctaccttcttgttatgtgaggaaaataaattcctatttgtttaggtcactattgattgggcttactgctacttcacccaatgcattctgaaggtaattttacttttccacttttatttttaaagtatgaggtattaagagtaaatgggaggttaagttaaaaatttccagtactccaataaatattaagccccttcttatcctccattccagattgcaagctcaagacaccatgctaccctcattatatttgcatcttcattgcttaaacaaacaattcagtccagttcactggatattttttgaatgccaatttataggctaggttttctgctaattgttaactagcaggatatcaataaatatakgttgaatgtgtaggtgtataaaagctgaagataggtgagtaaaaattaataatgatggctgccttaaaaaatcaaattaacaaagtaccttttctatttttttacagtgttaatacagcttttgcagggttcagaatatgcttcttatcatctttcaccatcttccttgct

SEQ ID NO: 163123 - DNA, 579 bp, Homo sapiens
aagcttctagaggaaggatcagacagcaatatttcctgttctgcaatatttgctgttctgcagcctccactggtgataccgaggcaaacagagtctggagtggaactccagcaaactccaatagacctgcagctgagggacctgatwgttagaaggaaaatgaacaaacagaaaggaatagcatcaacatcaacacaaaggacatctacaccaaaaccccatctctaggtcaccaacagcaaggaccaaaggtagataaaaccacaaagatggggagaaaccagagcagaaaagctgaaaaattctgaaacccagagcacctcttctcctccaaaggaacgcagctcctcgccagcaacggaataaagctgtatggagaatgactttgacaagttgacagaagtaggcttcagaaggtcggtaataacaaacttctctgatctaaaggagcatgttccaacccatcacaggaagctaaaaaccttgaaaaaatgttagaagaatggctaactagaataaacagtgtagagcagaccttaaatgacctgatggagctgaaaaccatggcactagaacttc

SEQ ID NO: 163124 - DNA, 579 bp, Homo sapiens
aagcttctagaggaaggatcagacagcaatatttcctgttctgcaatatttgctgttctgcagcctccactggtgataccgaggcaaacagagtctggagtggaactccagcaaactccaatagacctgcagctgagggacctgattgttagaaggaaaatgaacaaacagaaaggaatagcatcaacatcaacacaaaggacatctacaccaaaaccccatctctaggtcaccaacagcaargaccaaaggtagataaaaccacaaagatggggagaaaccagagcagaaaagctgaaaaattctgaaacccagagcacctcttctcctccaaaggaacgcagctcctcgccagcaacggaataaagctgtatggagaatgactttgacaagttgacagaagtaggcttcagaaggtcggtaataacaaacttctctgatctaaaggagcatgttccaacccatcacaggaagctaaaaaccttgaaaaaatgttagaagaatggctaactagaataaacagtgtagagcagaccttaaatgacctgatggagctgaaaaccatggcactagaacttc

SEQ ID NO: 163125 - DNA, 563 bp, Homo sapiens
tcaatgataaatactaatggaattggactcctgggcaaattgaaaagagaaaatgaggcagaaacaatatttgaagacataatagctaagaatgtacccaaactgatgaaagacatcaagctacacrctcaagaaatgctgcaaaatcaaaggaagataaatcaaaagaaaactcgcctaggcacaaagtaaaaatgctttaaaacaaaaacaagctgagcctggtggctcacgcctgtaatccctgcactttgggcagccagggccagcagatcacttgaggccaggagttcaagaccagcctggccaacctggtgaaaccccatctctactaaacatacaaaaattagctgggtgcacacctgtaatcccagctactcaggtgactgaggtgggaggatcacttgatcccaggaggcggagggtgcagtgagccaagcttgtgccactgcactctagcctgggcaacagagcaagactctataccaaaaacaaaaaacaaacaaacaaaaacaaggagaaaaatattaaaggtagtcagagatattataaattgccttcaa

SEQ ID NO: 163126 - DNA, 590 bp, Homo sapiens
attataagaaaccttaaccctaaacactaaacgctatttgaccttttgaagggaaggtaatctgtacttaatacttgtaaaacagcaagaaacwttcaatagatagtggaacataatctgaagtggctttatagcctttctcattgagcatttgttactatttagtattataaaattaaccatatatatattatatgaagaaagtaattgtacaggaaaatctgatgttgttgccagatctctcttttgtttagtaaaaatgtcagaatggcattttgtatttagaatgaggagttctcagcagtattttcgaattttgttaatatccccttatgaattattaaagtctttaataaaagttttcaaattggtatcacagaggttttatttatatagaaatttctttataattctgctcattgtttcttgatattttctctagtacagtctctttcattttataaaagtactctttcttccttttgctccctgtctaaagagtgtttggctcatatcaccatcacttcaggtaaaaaatggttcgttttcatttagtggtcattgatgtttggccattaggaaatgataca

SEQ ID NO: 163127 - DNA, 590 bp, Homo sapiens
attataagaaaccttaaccctaaacactaaacgctatttgaccttttgaagggaaggtaatctgtacttaatacttgtaaaacagcaagaaactktcaatagatagtggaacataatctgaagtggctttatagcctttctcattgagcatttgttactatttagtattataaaattaaccatatatatattatatgaagaaagtaattgtacaggaaaatctgatgttgttgccagatctctcttttgtttagtaaaaatgtcagaatggcattttgtatttagaatgaggagttctcagcagtattttcgaattttgttaatatccccttatgaattattaaagtctttaataaaagttttcaaattggtatcacagaggttttatttatatagaaatttctttataattctgctcattgtttcttgatattttctctagtacagtctctttcattttataaaagtactctttcttccttttgctccctgtctaaagagtgtttggctcatatcaccatcacttcaggtaaaaaatggttcgttttcatttagtggtcattgatgtttggccattaggaaatgataca

SEQ ID NO: 163128 - DNA, 590 bp, Homo sapiens
attataagaaaccttaaccctaaacactaaacgctatttgaccttttgaagggaaggtaatctgtacttaatacttgtaaaacagcaagaaactttcaatagatagtkgaacataatctgaagtggctttatagcctttctcattgagcatttgttactatttagtattataaaattaaccatatatatattatatgaagaaagtaattgtacaggaaaatctgatgttgttgccagatctctcttttgtttagtaaaaatgtcagaatggcattttgtatttagaatgaggagttctcagcagtattttcgaattttgttaatatccccttatgaattattaaagtctttaataaaagttttcaaattggtatcacagaggttttatttatatagaaatttctttataattctgctcattgtttcttgatattttctctagtacagtctctttcattttataaaagtactctttcttccttttgctccctgtctaaagagtgtttggctcatatcaccatcacttcaggtaaaaaatggttcgttttcatttagtggtcattgatgtttggccattaggaaatgataca

SEQ ID NO: 163129 - DNA, 341 bp, Homo sapiens
attttctcatctctaaaatgggcacaataataccaaccttgcagatagcctctaaaaatatatttctttrtgtgggtctgcccacagcgcgacaggaaaaaggccagactccctttgctccctgcttccctgctgcactagggtcacattacagcaggattcactctccacagacagctggctccaggactcctagagctagagcacctgccgtgtttgagcgaggctgcagctggagtaccgcacagaggtgcctggacacggcaggtgcagtaggacctgggccctcgttctaactcctccacaccaagggggcatcattttgcaatttctccagccag

SEQ ID NO: 163130 - DNA, 439 bp, Homo sapiens
taatgtcttcatatgagtatcaatcaacaccttccccaactcaattgtactaggttgtagagcacaaggatggtctcgtgctgctctgtggcacctgtgcctacactsctctgagctttgaggaggctgctctctttgctgaccccatgatcttttctgcccttctgttaagggcattggccacagcaacggggcaaatgccccaagctggctgtaagtgacccatccctttggctcccatgattagaccaaggagaggcatggggtccagctgagccattcagaaccattccttagcattttccactcaaaggttagagatgagattttctcttcccaaggctacctctggccatggttccagcttcatgggggcaatgggattaggaaaatgaggtcaacctgcaaaggaaagcagatgcaagagatggagacagaa

SEQ ID NO: 163131 - DNA, 486 bp, Homo sapiens
gaagaactggtttgaagtataattggcaattaaaatgtggactaggctggggtgacttctaagcctttgtgtccccatccagaatgtggagactgtggctcctacatcctggtggtccctacctcataggtgtttgcagagggcctggcacctgtgaagaccctccttactgagtggcctctattctgagagcatggcctcaaggactctggagagaattatggagagaccacgtgtggaactttcttcctcctgtcccaacgccccctcttyctcttcctcctcctcctccctctaccgcctccttcctcctccacagagctttattcttaatccattttacttatcactgatcgttatttctgtagcttgaagtgtctccttcgtgtagaaaactccaatatccctttctcctgcttcaatctctcctgggctcaaaattcctatttccaattttctattgtatgtctcaattccagtgtctga

SEQ ID NO: 163132 - DNA, 486 bp, Homo sapiens
gaagaactggtttgaagtataattggcaattaaaatgtggactaggctggggtgacttctaagcctttgtgtccccatccagaatgtggagactgtggctcctacatcctggtggtccctacctcataggtgtttgcagagggcctggcacctgtgaagaccctccttactgagtggcctctattctgagagcatggcctcaaggactctggagagaattatggagagaccacgtgtggaactttcttcctcctgtcccaacgccccctcttcctcttyctcctcctcctccctctaccgcctccttcctcctccacagagctttattcttaatccattttacttatcactgatcgttatttctgtagcttgaagtgtctccttcgtgtagaaaactccaatatccctttctcctgcttcaatctctcctgggctcaaaattcctatttccaattttctattgtatgtctcaattccagtgtctga

SEQ ID NO: 163133 - DNA, 579 bp, Homo sapiens
tccttcagctctagggatggtggtagctccactgttcctatccctgggattctgcaccttcccttacagtttccctatgccctgcctgcactattgtaaacagtctctccttagatcatcctcgtatgagcacacttctgcttcctgctgggttcctgattggtactaattgtaatgcttctcctaactggtgcttcttcctgtgtcccctcatactgcatcatttttattggcaagcaaacctgctgtcctgtggtcagtgctctctgggagagtccagtcattcaattggatattcaacaggcaagcagttgctctgtggatgtatatcacattaggccagccaggaatcataaaytcacattcagagagaagataaggctggtgtgagtgcgatttacagaaatcattcattacattcccttcccactcatgccttttaatggtagcactgtgtgtatttttgggtggcatgctaccagtctttctgtagaaaggagagggggaactgcggatgttgatgctttttgtacaaccactaattgagttggctctgaaaattgagttctatttgaattc

SEQ ID NO: 163134 - DNA, 415 bp, Homo sapiens
tagagaagtctctcagctaggaagtcrctctgtgtctacttcttcccttgagttacgagcttgccaaggatcagccatgtttgtagccctatgtccttacatcagtagtgctttcacttaatagataaatttagagcacgtgaattaaaaaactgtttctacaaaaactgatttgaatgctgtgaaaagacacataaaattgaaccacacatacacaaaaacttcattctcaaattaggtgtgagaaagacaattcaaataacatagggggaaatatacgaaaaatctgtaagtcatccacagtcagcttgcatgaaaactgtctttatgttgttgagtcacttgaaagaaaccaaaactggaaataatagattattcactatggatatgatgtattccagaaagatcatacgga

SEQ ID NO: 163135 - DNA, 491 bp, Homo sapiens
attgatgacccttgaaaatgttatgctaagtgaaggaagccattcataaaagaccaacacagtgtatgattccatttacatgaatgtgcagaagaggcaaatttagagacacagaaaccagattaatggttgcttagggccagaggaaaggtggggtargagtggcatggggattgactgctaatgggcatggggtatcatttaggggagatgaaaaccttctaaactgagattatcatgatgattacacaaacctgtgaatatctaataaacattgaatcattcacttaggtaggtgaattagatatgaatcatatcttaataaatgtttttttaattaaaaaatatatcagaaggcttaattgttaccaaaacaccaggggtttggtctaggtcctgctgctcactgcacagaaagccagtcactgaaacaacgaatattgtcccagaggaaggtactgcagccaaggagatgggagatcagtgtcaaa

SEQ ID NO: 163136 - DNA, 403 bp, Homo sapiens
gatatgcatccctctctctctctctctctctctctctctctctctctctctctatatatatatatatatatattcctttacaaagcatagtggacatatgyacaagcaaaaataactcgaagttactttgggatccaaaaacataagtcatacaaagtgactgttacatgtaactgtatacataataggaaaaaaagcaggataatgctactactgaatgttggctgaatcatggtgaatgtaatattaccctttttaagttattgattgatgcagatgctggtggagaggtactacaggaatatttacctaatgaacccatacccaaaggaacaggtgaaactgctttcagtaatattttacctaatgtaactaatagaatctttcaatatgtaatcagttg

SEQ ID NO: 163137 - DNA, 433 bp, Homo sapiens
ctggtcctgttttctcagcgcagtgatggtgttggatcacatactctccctgatttccaagccaggatatgctttcttggtcactctccttttttttttttttttttttttgagatggaagtcttgctctatcacccaggctggagatcacgccactgcgtgatctcggctcactgcaamctccacctcccaggctcaagagattctcgtgtctcagcctcctcagtagctgggattacaagcatgggctaccatgcccagctaacttttgcattttcagtagagaccgcgttttgccatatttgccaggctggtcccggcaaacctcaaggtctgccaggcagacctcaagtgatctgcccatctcagcctcccaacatgctgggattgcaggcgtgagccaccatgtctggcccacactccttcatctggt

SEQ ID NO: 163138 - DNA, 412 bp, Homo sapiens
aatcttcctgacgaaataagctgaaagagcccagtttaaataacaaacagaaatgtttaaggatctatattcatgatgcctttttaaatgttcatagaattgaataatgtatataacaaatttaayttctggcagattcctgtcctctctcatgcctcagggaactgtttccatctccaacttgaacttggacctgtatttctaggcctcagatgctgtactcctcagttcccgaatggtctgtttctgctcaacttctgccttcctgtcttccacagccttggaactgcttggcaacttagcagacttctacccaaagtatactttctctgcataggcacatagataaggatgcaacacacacaccacacacacatgtgcacacacacacacacatgcccatatatatgcg

SEQ ID NO: 163139 - DNA, 620 bp, Homo sapiens
ccaaacccccttccatctcccatacccttggtaagacactggtattaagtgctctatgagcaaaataaaagaagagattgatttttttctgagaaagctacagataaaataacasggtcatggacatttaaactggattttgaaaagaactgagttcaccaagttaactggaattagaatataataaaacattattccctacttttgtttttggaatctactgttttatgtacagtagcactgtttgtttatacttgtaaccagtatttcctccagctacatcagctaaaaggtgtcccagttttgcttcaagatgagaagaaaaaccttgaatgttactcaagtgcaggttggtttctccaagaagctgactttgagggagagcttagcacatggactgtttattagggagcgcccatgtaggagaggaaaaggaaagaattagcagaggaggaaggcaggctatcatacaggacaggtaagcagcctgtctttgtctgtttgggctgctataacaaaataccttagactgggtaatttataaacaacaaaaaattatctcttacagttctggagattgagaagcccaaaatcaaggcaccagcagatttggtatctgg

SEQ ID NO: 163140 - DNA, 620 bp, Homo sapiens
ccaaacccccttccatctcccatacccttggtaagacactggtattaagtgctctatgagcaaaataaaagaagagattgatttttttctgagaaagctacagataaaataacagggtcatggacatttaaactggattttgaaaagaactgagttcaccaagttaactggaattagaatataataaaacattattccctacttttktttttggaatctactgttttatgtacagtagcactgtttgtttatacttgtaaccagtatttcctccagctacatcagctaaaaggtgtcccagttttgcttcaagatgagaagaaaaaccttgaatgttactcaagtgcaggttggtttctccaagaagctgactttgagggagagcttagcacatggactgtttattagggagcgcccatgtaggagaggaaaaggaaagaattagcagaggaggaaggcaggctatcatacaggacaggtaagcagcctgtctttgtctgtttgggctgctataacaaaataccttagactgggtaatttataaacaacaaaaaattatctcttacagttctggagattgagaagcccaaaatcaaggcaccagcagatttggtatctgg

SEQ ID NO: 163141 - DNA, 620 bp, Homo sapiens
ccaaacccccttccatctcccatacccttggtaagacactggtattaagtgctctatgagcaaaataaaagaagagattgatttttttctgagaaagctacagataaaataacagggtcatggacatttaaactggattttgaaaagaactgagttcaccaagttaactggaattagaatataataaaacattattccctacttttgtttttggaatctactgttttatgtacagtagcactgtttgtttatacttgtaaccagtatttcctccagctacatcagctaaaaggtgtcccagttttgcttcaagatgagaagaaaaaccttgaatgttactcaagtgcaggttggtttctccaagaagctgactttgagggagagcttagcacatggamtgtttattagggagcgcccatgtaggagaggaaaaggaaagaattagcagaggaggaaggcaggctatcatacaggacaggtaagcagcctgtctttgtctgtttgggctgctataacaaaataccttagactgggtaatttataaacaacaaaaaattatctcttacagttctggagattgagaagcccaaaatcaaggcaccagcagatttggtatctgg

SEQ ID NO: 163142 - DNA, 620 bp, Homo sapiens
ccaaacccccttccatctcccatacccttggtaagacactggtattaagtgctctatgagcaaaataaaagaagagattgatttttttctgagaaagctacagataaaataacagggtcatggacatttaaactggattttgaaaagaactgagttcaccaagttaactggaattagaatataataaaacattattccctacttttgtttttggaatctactgttttatgtacagtagcactgtttgtttatacttgtaaccagtatttcctccagctacatcagctaaaaggtgtcccagttttgcttcaagatgagaagaaaaaccttgaatgttactcaagtgcaggttggtttctccaagaagctgactttgagggagagcttagcacatggactgtttattagggagcgcccrtgtaggagaggaaaaggaaagaattagcagaggaggaaggcaggctatcatacaggacaggtaagcagcctgtctttgtctgtttgggctgctataacaaaataccttagactgggtaatttataaacaacaaaaaattatctcttacagttctggagattgagaagcccaaaatcaaggcaccagcagatttggtatctgg

SEQ ID NO: 163143 - DNA, 439 bp, Homo sapiens
gtatggcaaggaaagactgctactagttaatacaaaagcacacttaaatatacaggcaagtgacactataaagcaaccacacaaacaagtcaggataataaccagctaacaacatgacaggatcaaatccacatatatcaatacaaaccttgaatgtaaatgggataaatttctcacttaaaaggcacagagtgacaaactagattaaaaagcaagactcaatggtatgctgccttcaagagagatacctcacacataacaacacccataagctcaaaataaagggatggaagaaaatctacwaagcaaatggaaaccagaaaaaagcaggagctgcaatcctaattttggaacaacagactttaaactaacaaagatcagaaactaacgaagaagggcattaaataataataaggtgttcaattcaccaagaagatct

SEQ ID NO: 163144 - DNA, 613 bp, Homo sapiens
ctagtttagatcgctatcaaattaatttggatagtataaaaaaactttgctccaaaatagattcactctctccaatcctttttgctattactgttatacgaattgcatctttatgaattataagcttatcaacatagctttatgattattgctttattcagttatcttttaactcatataggaggagagagttaaaaacaaaaatacattcatattatctttatatttacttatgtagttacctttacttaatctttttatttttttaatgtggatttgaatttccatctggtatcctgtcattgttacctgaatgactccctttattatttctttctttctttcttttttgttttgagacagagtctctctcttgttgctcaggctggagtgcagtggcatgatyttggctcattgcaacttccactgctgcctcagcctcccaagtagctgggattacaggtgtctgccaccacgcccaactaattttttgtatttttagtagagttggggtttcacaatgttggccaggatggtctcaaactcctgacctcaagtgatccacctgcctcagcctcacaaagttttgggattacaggcgtgagccactgca

SEQ ID NO: 163145 - DNA, 588 bp, Homo sapiens
taagagcggaggggatgtagtgctccaagagaggtacttatcaaaattcacaatgtttttcttagtgtttttcctatataattagtaattagttttatgtagtcttttaaatgtataaacaagcatattaacaaattattcaaatgtagatatataactttttacatgttcttctaataacttgcagataagtaaccttcacttaggggggactcttatttggagaaatgtgaaaacaagcttgtccaacccatggcccatgagccacatgtggcccagaacagctctaaatgcagcccaacaaaaatctgtaaactctcttaaaacattgtgagattttttgtgattttcttttttctttttctttyttttttttttttttttagctcatcagctatcattagtgttagtatattttatgtgtggcccaagacagttcttcttccaatgtggccgaggaaagccaaaatattggatacccctgctaaagtggactcctttgcatatttaacaagaaaataattaaacaactttatttcagattaataagacagatctgtacagtgaggcacgcctccatagaaagca

SEQ ID NO: 163146 - DNA, 544 bp, Homo sapiens
cctcgtctacaaggatgtgcgtgtgtgtgtgtgtgtgtgtgtgtgtgtgtgtgtgtgtgtttattgttacagttaactgcacttagagaaaatctcaggttaacctgagtaaggagatgaacttaaaaactgaaggataagaacacacttatagaaaggtaaaaacagacaagcaaatccactctgaggcatatttgttcattgcctcattagcatcttgccaatgacayccttaagaaactgccccttcacattctggccatgtgctttgtgtgggaacttaccaccccttatccctaccattgtcaaatgatgagtttatagaaggcctatgatgcagtttatgtcagcaaaatgcaaggatttgtttgggggccctcggatagaaacttcctctatcttcagtggaagtttccagaaagaatgccctctcatcctctggatgatgtgtggtgagattataaaactagcaaagccttacccatcttttctgcttggcagtgagacagaaatgacatcatatgcttctgaatcaaatgagatc

SEQ ID NO: 163147 - DNA, 544 bp, Homo sapiens
cctcgtctacaaggatgtgcgtgtgtgtgtgtgtgtgtgtgtgtgtgtgtgtgtgtgtgtttattgttacagttaactgcacttagagaaaatctcaggttaacctgagtaaggagatgaacttaaaaactgaaggataagaacacacttatagaaaggtaaaaacagacaagcaaatccactctgaggcatatttgttcattgcctcattagcatcttgccaatgacacccttaagaaactgccccttcacattctggccatgtgctttgtgtgggaacttaccaccccttatccctaccattgtcaaatgatgagtttatagaaggcctatgatgcagtttatgtcagcaaaatgcaaggatttgtttgggggccctcggayagaaacttcctctatcttcagtggaagtttccagaaagaatgccctctcatcctctggatgatgtgtggtgagattataaaactagcaaagccttacccatcttttctgcttggcagtgagacagaaatgacatcatatgcttctgaatcaaatgagatc

SEQ ID NO: 163148 - DNA, 408 bp, Homo sapiens
tttatgatgcagaattgctatgctttcttccatggcaacttgaatatagtgtttacaaatcagagcttcccaatctacacaagaccttcagcgtcttagtgaaaaattggtttgtttccagacaggtggggttctgtctctaatagactgcacattgattgaggagccagatgcaagcgatgatgactgtaagtcaccttcgatcacttaggattctattagaattagaggygggagagagaggctgaggataaactccctaaagtcatttatgtatgaaaaattgaaccatttagcccatgagccttgttaaaccatctttggaaattcacattttactgaatttgttttgtgatagtgactattcagtggcagatagagaagaaggaagagttgaattagagtgtt

SEQ ID NO: 163149 - DNA, 408 bp, Homo sapiens
tttatgatgcagaattgctatgctttcttccatggcaacttgaatatagtgtttacaaatcagagcttcccaatctacacaagaccttcagcgtcttagtgaaaaattggtttgtttccagacaggtggggttctgtctctaatagactgcacattgattgaggagccagatgcaagcgatgatgactgtaagtcaccttcgatcacttaggattctattagaattagaggcgggagagagaggctgaggataaactccctaaagtcatttatgtatgaaaaattgaaccatttagyccatgagccttgttaaaccatctttggaaattcacattttactgaatttgttttgtgatagtgactattcagtggcagatagagaagaaggaagagttgaattagagtgtt

SEQ ID NO: 163150 - DNA, 408 bp, Homo sapiens
tttatgatgcagaattgctatgctttcttccatggcaacttgaatatagtgtttacaaatcagagcttcccaatctacacaagaccttcagcgtcttagtgaaaaattggtttgtttccagacaggtggggttctgtctctaatagactgcacattgattgaggagccagatgcaagcgatgatgactgtaagtcaccttcgatcacttaggattctattagaattagaggcgggagagagaggctgaggataaactccctaaagtcatttatgtatgaaaaattgaaccatttagcccatgagccttgttaaaccatctttggraattcacattttactgaatttgttttgtgatagtgactattcagtggcagatagagaagaaggaagagttgaattagagtgtt

SEQ ID NO: 163151 - DNA, 527 bp, Homo sapiens
ttcttaccggcatattcactcttttattagaacattggtgtttagggtagaccctgagttcaggacctatgtgaggtcacgttgcaatcagcttcactgcactatttaattatagccacaaaacactatatagtatcatagcgactagaagctattttttattttaaaaattgattatattttttcattttcctgttttgttcaaagggaatatgtataagtcaaaataaattcttctctaacccaaaataattacagagagaaaaygcaaattgataaggcatagattaaataatgaaggcagagaaaattagcacagcttcctgaactctcctcttggaaaagagaaaaagatgatacaaggctttaagcatgccagagacaggagaaattacacactgtcccttcaccaaacagcattagtatcagtaggggctgccagaggtactagtaaaatgtgggaatttattggcaaagaatacctgagaagcagaggcagagcttactagtgagacagaagatgaatt

SEQ ID NO: 163152 - DNA, 600 bp, Homo sapiens
tgggcaatactggtcgtgaatagttttaggaaagtcatgsatgaacactacttcagcatgagtctgaaagttgtgtgggtgtgtgtgtgatgtctgtaagagccaaaagtgctgctgtgtgaaccctgctgtctagtcttaaaaatttgagttgacaaagaaaaaggagacattgatccatctttaatttgaaagatgtttgcgtgtatcacataatgttaacacttaaaacagttggcaaacttgaatatgaatcccgtgccaagaacttacacattttctgcttttcacttaagaatacaaccccacaccacctcattgtataatatcagttttgccaattaggtccctattgatgccatacgtctccctcactgccatccagctattcatttcagggcatgttttttgaaaagtgctagtgacctttgtccatttttattgtcattgcaatgataatgccagccttgcaaaattttctggcaggagaacgtcaaacaatgtgaggagaaagaagcgaaataggaaatatcctttaaaatgagtgaggcaatgaacttagggaaaaaataattcaatttaatttccctccaactcatt

SEQ ID NO: 163153 - DNA, 600 bp, Homo sapiens
tgggcaatactggtcgtgaatagttttaggaaagtcatgcatgaacactacttcagcatgagtctgaaagttgtgtgkgtgtgtgtgtgatgtctgtaagagccaaaagtgctgctgtgtgaaccctgctgtctagtcttaaaaatttgagttgacaaagaaaaaggagacattgatccatctttaatttgaaagatgtttgcgtgtatcacataatgttaacacttaaaacagttggcaaacttgaatatgaatcccgtgccaagaacttacacattttctgcttttcacttaagaatacaaccccacaccacctcattgtataatatcagttttgccaattaggtccctattgatgccatacgtctccctcactgccatccagctattcatttcagggcatgttttttgaaaagtgctagtgacctttgtccatttttattgtcattgcaatgataatgccagccttgcaaaattttctggcaggagaacgtcaaacaatgtgaggagaaagaagcgaaataggaaatatcctttaaaatgagtgaggcaatgaacttagggaaaaaataattcaatttaatttccctccaactcatt

SEQ ID NO: 163154 - DNA, 368 bp, Homo sapiens
tggatcaaagacaaaatctaagggaaaattatgaagtattttgaactcaatgaaaatgaaaatacaacacagcaaaatttgttagaatacagctaaagtagtgctttgaaggaaatgtatagcactaaatacatatattaaaaaagaaaggtctgaagtcagtgactcctgttcacaccttaaactagaaaaagagggcaaactaaatccaaaagaagaaaaagaaaataaataatraagagcagaaatcagtgaactaaaaaagaaaaattgatgacagtgaaatctgatttgagaaaataaattgataaacctctagcttgactgatcagaataaaaagaaggaagacacaagttaacgatattat

SEQ ID NO: 163155 - DNA, 523 bp, Homo sapiens
gaattcgaagacccagcagcgaacacaagtcccggaggcacagaaagggcaaccattctaaatccttggtaagggctccgtgcagtagttaacmccccaaatccgactaaggagagcaggacggcggaacccgggtgccctaatcaaatatgggcaccaaggtaagccggcgcgatcacgtgacatgcaccgcgcgcccgcgtccgcgctctcctccacgcctcgtgctcccgaggtctctatggcgcccgcgcccctcccccagccgagctccagcacttactccgcggcgtggttgtagcctgctacgcctcctctgattttctcctacggaaggaaataaacgcgttccggcgatctgactcgctgggtcaccgccgacgacagattctgctcacctgaactcaccgtacgtgggggtgaggccgaagcctaagcccaaaccgaagccgccgccgctgttcatcccgatcccgctgccgttgccttcccgctccccaacgtctacgacgcgtcagcgacg

SEQ ID NO: 163156 - DNA, 525 bp, Homo sapiens
tcccggaggcacagaaagggcaaccattctaaatccttggtaagggctccgtgcagtagttaacmccccaaatccgactaaggagagcaggacggcggaacccgggtgccctaatcaaatatgggcaccaaggtaagccggcgcgatcacgtgacatgcaccgcgcgcccgcgtccgcgctctcctccacgcctcggctcccgaggtctctatggcgcccgcgcccctcccccagccgagctccagcacttactccggggggtagagccgcagctcctcgatttctcctaggaaggaaaaaagcgtccgcatctgctcgctggtcaccgccgacgacagattcgtcacctgaatcaccgacgtgggggtgaggccgaagcctaagcccaaaccgaagccgccgccgctgttcatcccgatcccgctgccgttgccttcccgctccccaacgtctacgacgcgtcagcgacggagccgggaaagcggagaacgcgcggccgcgagcgcgctcccgctggcgaattc

SEQ ID NO: 163157 - DNA, 604 bp, Homo sapiens
agtgatcctaaagcccctactcgtaaattacattattaggtgtggtctatctggtatggttcaaacaccctcaggcaaacaaagatagtcttatcaggcaggaaattccaaacacttaatcacctcccaggagaccaaaggccagatgcatctcttkgggcaaacttcctttactgcccagtaaataatcttgcatttttggaatacaggcaggagtggggggcaaggaggtgggcaagggaggcaggctaataagacaagtcggattgagactgcaaagggtcttgcaaaaatgtaggcttcagtagctggagaaggaaggaaagggaactctcctctgcagacgaaatattgtccatatattatttcctttgattctcaaataagctgttaagctctctgaaattcagagatgtcaaatgatggcccagaactggtcaagccaggacttgagctaagtcctatatgacctcatagtctgtgttggactagctacaaccagcaaaatatgtttattgagcacctactatgccaggctctgagcttgatgctggataaacaatggtaaataaaatagatacagcctgtgcagtccagtgagatt

SEQ ID NO: 163158 - DNA, 634 bp, Homo sapiens
gttggcaggaatagagctagaacatgaacacaagggggagtcctctggggccttctggaaatacctggggtagggacttagctggggctggttgtcaccagtcaggcatggggggtggggggcggtgagacggtgcagctggaatgagtactgttctcagtggcctcatttatactcccaggcacgcggggcttaaggaaatttggttgtatgatattacactgcacttgcaaatgtaagaaattgttgacaataataaaaacaaraaggggatttactctactcaatgcccagagttccctcttgcatttagatgtgatgaatctgagaagaattttcctttgaatattggtagaacttcgcattcaaaaacgtgttcaatttccctcacgattaattatgataattgttctctccttgttgtcatgctctgctaactatgaaatgatgagattagattacaatttgcatatattagccttgaaataaagtttttttccccttgttctggccctctttttaggcttagcaataggagaatccctccccgtatgccctgtctcctgacccaggtgcaggtggtgagaagggagtgatggagagattcacagacaaggtgacttcagctgggttt

SEQ ID NO: 163159 - DNA, 634 bp, Homo sapiens
gttggcaggaatagagctagaacatgaacacaagggggagtcctctggggccttctggaaatacctggggtagggacttagctggggctggttgtcaccagtcaggcatggggggtggggggcggtgagacggtgcagctggaatgagtactgttctcagtggcctcatttatactcccaggcacgcggggcttaaggaaatttggttgtatgatattacactgcacttgcaaatgtaagaaattgttgacaataataaaaacaagaaggggatttactctactcaatgcccagagttccctcttgcatttagatgtgatgaatctgagaagaattttcctttgaatattggtagaacttcgcattcaaaaaygtgttcaatttccctcacgattaattatgataattgttctctccttgttgtcatgctctgctaactatgaaatgatgagattagattacaatttgcatatattagccttgaaataaagtttttttccccttgttctggccctctttttaggcttagcaataggagaatccctccccgtatgccctgtctcctgacccaggtgcaggtggtgagaagggagtgatggagagattcacagacaaggtgacttcagctgggttt

SEQ ID NO: 163160 - DNA, 571 bp, Homo sapiens
gagatcatgccactatcagaggctttcaccataagagaagaaagcccacacgttccagaaggcccactgtatcacttcaggcccatatatgtgtacatgggcttaactttgccctctgccttaatgtgagttggcattaagcaaaattagattagtrtcctccagacaaagacaatttacctaaacagcaaggttcagttcacagtagctgcaaatagaatgactcttgtaagcttatttgaattgaggcatcaaattcctttgaaactaggtcatcttgtggaagtgcaagtccatccttgcttggtgtgcctggagaaaggcagaggagctttggcaatccctaaggagtgtacttcatgcaatgggaatcacttgcaggcactagtgggaacagccagggatgctcacattcactaacacttactatgtgagaggtactttgtggtcttcattcatttaatctttacatctttatgaggctggtactattactgtccacattttacaaatgggaaaattgaggtacagagaataaagggaaccctaagatctgtttcatcccagaatt

SEQ ID NO: 163161 - DNA, 546 bp, Homo sapiens
gtaggtgaagaaactgggaccaaggccccacagcttgatagtaattggagccaagattcaaacccaggtctgtctgacccactgttcctaccactgcagccccaggctcatctcctgaattgggatacctgaagctgggggtgagagtgaccagtgcttgtgttctagggaggggaagtaattaaatcattgcagaggcaggctgagaggaaagccctttgtgaattgaaggatactctctgggctcctccagtgatatataatctcatgggccgagcagacaaattagcagctttcatttcttcgcaaagcattgatttccagcctcaagagcccacttcagcatttttcactgcagagactctcccctgggcttcattcatgtwttctataaatggcctaaagaagactctctaaggtgacttaaatagattctatgtttacacaggataaacaatttttgtggattagcctgtctttcatctcagcttaggttatgactttgctagcaagtgcatttttctttttcaacgaaatcaaagctta

SEQ ID NO: 163162 - DNA, 543 bp, Homo sapiens
agaaaacaaaatggaatcgtatataaaaagggatgccaagttattctgatggacgatcaggggatgggctccctttaaggtgatatttgagagatgagaatgagtatgaaaataaattagtgatactattgagagtttggccgaaggatggaatatgggaaaggagtacaacttttttttattacaattttttttcgagacggagtctccctctgttgcccaggatggagtgcagtggcgcgatctctgctcactgaaactttcgcctcctgggttcaagcgactctcctgcctcagcctcccgagtagctgggactacaggtggatgcctccacacccggctaatttttgtgttttttttttgttttttttttttggtagagacagggtttcaccatattggccaggctggtcttgaacttctgacctcrtgatccacctgcctcagcctcccaaagtgctgccattacaggtgtgagccacctcacccggccgcagtacaacctttttaagcaactagtatgtgctagggaccatgctatg

SEQ ID NO: 163163 - DNA, 618 bp, Homo sapiens
caaacacaatatagtcaaactgctgaaagtcaaacaaaaaagaatcgtggaagtagagagaaaagcaacgtattatacacaagcctctataaggttattagcaaatttctcaccataaacctcaaaggccagaaggcagtgagataatatactcaaagtactgaaagaaaaaaatgtcaatcgagaatgctatatttgacaaaactgcccttcaaaaacaaaggagaaattaagactttcccaaataaacaaaagctgagggagttcgttaccactagagctgtgtcagtcagatggtgaaaatgataatgggttaaactccatagtacagtcaagtgttgcttaacaacagggatacgttctgagaaatgtatcattagtcaattctgtcagcaagtataatagaacgcacttatgtaaacctagatggtatagcctactacacacctaggctctctggggtagcctagtgctcctaggctacaaatctatawacagcatgtgactgtcctgaatactggcggaaattgtaacacaatggtaagtatttgtgtatctaaatatagttaaccagaaaaggtacagtaaaattacggtacaaaagacaaaaacatgtta

SEQ ID NO: 163164 - DNA, 546 bp, Homo sapiens
tacaaacatacttgaaacaaaaaaaatagaaagtagaacaaagagaaagtatcaacacagagataggagatataaagaaaaaaaaacaaatagaaattgtataactaaaaagtacaaccaccaaaataatgaaactcactggatgggctcaacagcagaatggagaggacagaggaaagaatcagtggccatgaagatgaaacagcagaaattacctagtctgaaaaaacagagaaaaaataaaccaaaaaataatgaacaaagccatttgttcatatagggacatattgaactataataaartatccaacattcatgtcatcagcatctcagaaggagatggatcctggtaagacaatgaaaagacaagctacagactgggaggaaatatttgcaaaccacctatctgacaaaggacctatatctggaatatagaaaggactcccaaaactcattttttaaaaatcaatccaattataaaatggacaaaagacatgaagagacattacataaaaaataaacagatgtcaaactgttatatgaatg

SEQ ID NO: 163165 - DNA, 546 bp, Homo sapiens
tacaaacatacttgaaacaaaaaaaatagaaagtagaacaaagagaaagtatcaacacagagataggagatataaagaaaaaaaaacaaatagaaattgtataactaaaaagtacaaccaccaaaataatgaaactcactggatgggctcaacagcagaatggagaggacagaggaaagaatcagtggccatgaagatgaaacagcagaaattacctagtctgaaaaaacagagaaaaaataaaccaaaaaataatgaacaaagccatttgttcatatagggacatattgaactataataaaatatccaacattcatgtcatcagcatctcagaaggagatggatcctggtaagacaatgaaaagacaagctacagactgggaggaaatatttgcaaaccacctatctgacaaaggacctatatctggaatatagaaaggactcccaaaactyattttttaaaaatcaatccaattataaaatggacaaaagacatgaagagacattacataaaaaataaacagatgtcaaactgttatatgaatg

SEQ ID NO: 163166 - DNA, 599 bp, Homo sapiens
aattctggggctcacctgtccacctacatcattactctgctcatgcagcactgccaaaaaacttttcacatggccacatctggaggtaaagggaaacatatccctggccagccagcttcacaccacagaaggaggcacaggctttggggtayggctagctgacactgccatgggtcataatcccccttcaaaaacagatgaaaaccgagagctgtcttcccatggaaggagaaaaagacatggctccctaagggacccattcattcatcaacattccattgattaaatctgctactgaaggtttttgagcagagtaaacacattcatatattatattcatattcctcccccctctgtctctctgtctccccacctcttcccctaaagagagaaaaatgaattttaaaaatagaaagaaaggagggacaattcagaaacaagatatttcaaccaatatttctggaacaccaagtagagggaaaagtatttactgatgtagaaagaagaaagttggtcccaagaactgtggaagagaggtcagctccttaaaacaacagaatgctttttaaaataagaaatcagccaacaagggagattaa

SEQ ID NO: 163167 - DNA, 599 bp, Homo sapiens
aattctggggctcacctgtccacctacatcattactctgctcatgcagcactgccaaaaaacttttcacatggccacatctggaggtaaagggaaacatatccctggccagccagcttcacaccacagaaggaggcacaggctttggggtatggctagctgacactgccatgggtcataatcccccttcaaaaacagatgaaaaccgagagctgtcttcccayggaaggagaaaaagacatggctccctaagggacccattcattcatcaacattccattgattaaatctgctactgaaggtttttgagcagagtaaacacattcatatattatattcatattcctcccccctctgtctctctgtctccccacctcttcccctaaagagagaaaaatgaattttaaaaatagaaagaaaggagggacaattcagaaacaagatatttcaaccaatatttctggaacaccaagtagagggaaaagtatttactgatgtagaaagaagaaagttggtcccaagaactgtggaagagaggtcagctccttaaaacaacagaatgctttttaaaataagaaatcagccaacaagggagattaa

SEQ ID NO: 163168 - DNA, 312 bp, Homo sapiens
cctttgacgcgcaagtgaaactctttgctgtcaggggctgtgtgctagtgaatggacctagcaccctgacatggcagaagcaagcacagggggcaaagtgaccccatttcccacctaaycgggcagctgtgttctgcttctctcagctgtgcccagtatgagacccagaatttctggaaatgcacttgtatttgtgccaggaatggaggcatttactccatttccaaaatttcttagccctgagtaaaaatacatctacaaagtcaaccccatccacccttttcatgactgtgttaaccaaacaggcacatt

SEQ ID NO: 163169 - DNA, 312 bp, Homo sapiens
cctttgacgcgcaagtgaaactctttgctgtcaggggctgtgtgctagtgaatggacctagcaccctgacatggcagaagcaagcacagggggcaaagtgaccccatttcccacctaacsgggcagctgtgttctgcttctctcagctgtgcccagtatgagacccagaatttctggaaatgcacttgtatttgtgccaggaatggaggcatttactccatttccaaaatttcttagccctgagtaaaaatacatctacaaagtcaaccccatccacccttttcatgactgtgttaaccaaacaggcacatt

SEQ ID NO: 163170 - DNA, 525 bp, Homo sapiens
gccttccagtatgagaagacagcagtcatggcatctcatggtcttttctcctctgtttcagacactctccttctgccatgaaacgcaggtctcctctgccctgggccacttgtctctgaacatcatccctatgaccaatgtgaccttttcaaagctgggtgctcagacctggataagccaaatgtggctgcccagggcataaagtggtgtcttgccaacagctctaccaacatgactggccctcaaaatattttttgtagagtaatagccgaatgtgttgagtaactgggcaaatgacaagcatgacctgaacctcatcattaactttctgagattatgtccttatttgaaaaatggaggtgataatctcagtctttcccacttcaaagkttggcgaagaggaacaaataaaacagcacatatgggaattgcaaaacataattagaagtcatgtgatgtatcaatttaatctcttcactatcacagccaggggaggaccaaacttgccaaccgcttgaggggaaa

SEQ ID NO: 163171 - DNA, 553 bp, Homo sapiens
  misc_feature (1)...(553): n = A,T,C or G
atccatgaatcagtgcaaatggaagacctcagctttgagaaggccrcaggaatttcagtcagtcacaaaccaaggctggggtcagggctcatttccagtgggaccaatgaaggtcctgtacttaaggggtgaagaaagacaaacaagaaggaaagaagaggctccctttgagttgctgagtaaaatcagaaattaaaaaatactctgactgtaggtacatggagtacataaagttgaataactagtttaaaatgagctttacttttcaactgatggtcttaatatcttttagactcaaccatgactgtgaagcgaaggaagaaaggagtgaatagtacagaatctgtcgatacatggatatagatccagatctatgcatagatgtctatatatctnaatgtatgtagatatatccatttccatccctatatatctgtgtgaaaccacttctcaattaaaactactcttgctgctgccagacacatctcccttaatgacacctgcattggagaatgtataggcactgtcgaatgctcaaatgtgagctcattac

SEQ ID NO: 163172 - DNA, 524 bp, Homo sapiens
cttgtctttattagtggcccagtactaaaagccttgggggagggaggagcatttgcctgtagcatttactagtgtttcaacgggtacagctgcccgaggtaatggatagcatttggggcaaacaatagactaatgaaaagcttaaaggaaaagctgaggaatgagatgtccataaggaccctgaaaagctttgtcacattcctgggaatytataagaccctgagaatctgtccagtagggctttgcacatgtccaggaaccggagaaggccctaagcactcaccactgactgaagttgaggccctgcaggagcgggaaggaaagttgagacagagttgccaatttcctggcagagtgctgaccatgtgccccaacagacgcagaaaacccatctgcaaagactgagagatatttcattccaggcatttaaagaaacctctgtccagttattagctggccactaagctaaataagtagagactttgttaccaaaaaggggtcccgatccagaccccaagacaggg

SEQ ID NO: 163173 - DNA, 453 bp, Homo sapiens
gaccagcatcaacattaaaacagagatcttaagactttttgtagcaataagacaccaaattccagcctgaatgtagtgtagcatcacatgaaaggtatcaggccctgaaagaaatcaaaatattttaccctaaaatagatttctttacacattttaaaatggccctgcaaagctgtctcctgtgggaaaaatytacattctgtagcgaatccccttttccttccagatcttttctctgatccaggagagaattaactaagagtctggcactttttaaaagtcagatagaaacattcacaatctattctttctgaagtctgcaacctggaggcttcatctgcacaataagaatcttggtctccacagccccttatctgaacttgggcactcccttctgttgattctagatcttaactctttcaaccaattgccaatagaaacatctctgaattc

SEQ ID NO: 163174 - DNA, 453 bp, Homo sapiens
gaccagcatcaacattaaaacagagatcttaagactttttgtagcaataagacaccaaattccagcctgaatgtagtgtagcatcacatgaaaggtatcaggccctgaaagaaatcaaaatattttaccctaaaatagatttctttacacattttaaaatggccctgcaaagctgtctcctgtgggaaaaatttacattctgtagmgaatccccttttccttccagatcttttctctgatccaggagagaattaactaagagtctggcactttttaaaagtcagatagaaacattcacaatctattctttctgaagtctgcaacctggaggcttcatctgcacaataagaatcttggtctccacagccccttatctgaacttgggcactcccttctgttgattctagatcttaactctttcaaccaattgccaatagaaacatctctgaattc

SEQ ID NO: 163175 - DNA, 453 bp, Homo sapiens
gaccagcatcaacattaaaacagagatcttaagactttttgtagcaataagacaccaaattccagcctgaatgtagtgtagcatcacatgaaaggtatcaggccctgaaagaaatcaaaatattttaccctaaaatagatttctttacacattttaaaatggccctgcaaagctgtctcctgtgggaaaaatttacattctgtagcgaatccccttttccttccagatcttttctctgatccaggagagaattaactaagagtctggcactttttaaaagtcagatagaaacattyacaatctattctttctgaagtctgcaacctggaggcttcatctgcacaataagaatcttggtctccacagccccttatctgaacttgggcactcccttctgttgattctagatcttaactctttcaaccaattgccaatagaaacatctctgaattc

SEQ ID NO: 163176 - DNA, 453 bp, Homo sapiens
gaccagcatcaacattaaaacagagatcttaagactttttgtagcaataagacaccaaattccagcctgaatgtagtgtagcatcacatgaaaggtatcaggccctgaaagaaatcaaaatattttaccctaaaatagatttctttacacattttaaaatggccctgcaaagctgtctcctgtgggaaaaatttacattctgtagcgaatccccttttccttccagatcttttctctgatccaggagagaattaactaagagtctggcactttttaaaagtcagatagaaacattcacaatctattctttctgaagtctgcwacctggaggcttcatctgcacaataagaatcttggtctccacagccccttatctgaacttgggcactcccttctgttgattctagatcttaactctttcaaccaattgccaatagaaacatctctgaattc

SEQ ID NO: 163177 - DNA, 382 bp, Homo sapiens
gactccaggtctctctgaccccaaaattgtgctgctaatcactaggctgtgctttccactgagagaaagcaggtgtcacaagtttgctgccctctgggtaaggcagtagcctgtcatgatggtcagacccccagctgttgaatctgggcatggcattcctgcccatcccatgctgagccggcccctgagcctctgctcttctgggtcagctgccaggccagcctcgggcctccaccaggccctgtttgggtccacctgggctgggctgggcagggcatgctgatctggcctccgacctggtctggctgaaccgatgcacccgccgctgcagctgtgacagaacggggcatttcygctgcagcccggcgtgctgccccactgg

SEQ ID NO: 163178 - DNA, 409 bp, Homo sapiens
gaattcaccacctctctctacttttgctcacctcagagcccccaccagccccagaagctgaggtcgamgtgtgtgtgacctctcttcatctggccgtgacccccagcatggtcccccttggtcgcctgctggtcttctacgtcagggagaatggagaaggggtcgccgacagccttcagtttgcagtcgagaccttcttcgaaaaccaggtagagcatcgtgcactgaacctgggacacagccaggggccatcggggcttctccaaggtgctggccagggggtctgtgcacacctgagactcatgttgtgtcgcagcatgatgtaaggaattatgggaacatgagttgcatctttactgaagcatctccaaaagtcacacaaaaggagattgcattcaaaacacatggg

SEQ ID NO: 163179 - DNA, 409 bp, Homo sapiens
gaattcaccacctctctctacttttgctcacctcagagcccccaccagccccagaagctgaggtcgacgtgtgtgtgacctctcttcrtctggccgtgacccccagcatggtcccccttggtcgcctgctggtcttctacgtcagggagaatggagaaggggtcgccgacagccttcagtttgcagtcgagaccttcttcgaaaaccaggtagagcatcgtgcactgaacctgggacacagccaggggccatcggggcttctccaaggtgctggccagggggtctgtgcacacctgagactcatgttgtgtcgcagcatgatgtaaggaattatgggaacatgagttgcatctttactgaagcatctccaaaagtcacacaaaaggagattgcattcaaaacacatggg

SEQ ID NO: 163180 - DNA, 461 bp, Homo sapiens
aatgacttaacaaactgtgcattcaagccttggaatactactcattaataaaaaggacaaactattgatacataaaacaacttggatgaatcttgaatgaagggaattgagtgggaagaaaatcccaaaagatacatgaattattccatttatatttttgaaatgacaaaattttataaatggaggtcatattagtggttgccaggggttagggagagggagaaggaagtaggggatggatatggttataaatgggcaacggtgagaatctctgtggtgttgggaatgtttagtaccttgactgtggtagtggawtcgtgtacctacatatgtgataaaattacatggcactcacataaaaagtacaaatagaattggagaaagctgaataagattgatggattttatcaatgtcaatattcctgattgtgattttgcaagatgttaccatggggagaggg

SEQ ID NO: 163181 - DNA, 424 bp, Homo sapiens
ccacaaacaccaaggacccaccaaggcaatgatgggccctagaggggaaccaggttttactaatgagcatcacatttcacctggcgggggaggtgattctgcccccaggggacacgtggccatggctggagtcattttcagttgttaccccttggaggggatggaatactactggcatctcatgggtgacagccagggacactattccacattctacagtgcacagccccaactgtcaatggtgatgygggtgagaaacggccctggagatttgggtttccccagttaaaggttactaaggatcctgcatgtttctagaaagctcaaggaaccatctctgaagtcatcacctgcctgggcctgtttctgtatcaggaagataagaacaaggaccctcgcactgccggttggcagaatgagagag

SEQ ID NO: 163182 - DNA, 574 bp, Homo sapiens
tgatgacagttgcacaactgtaagtatactaaaatctattgattaaatagatcttaatcaatagtaaatctattgaaccagacactttcactgggtcaactttgtggtatgtaaattataccccaattatactcccaaaaaaagatggctggaggaggggcagtgtgggtgccctccagagccaaagcttattggagccctggcaggtgaggggctgctggctgggaagcgggaatgagccagccgggctcacagggcaatgagagtccaagtcccagggtagggcagggatggcagaggctgtgggctggatgggggcctggggagctgaatggcgagggtgcctcagaaggtttgcatgaacaagtgatgaaacaaacgtctcctcctgcaacayccccccgacccccacccctgccccaccaccatgatccagcaggagccaactcctccctcccactcctgggctgcctggtcccagtgtccctaggctgccgtttatggaacattgactaggtccaggctcagggctggccttacattcctgggttcccatcctcaccggtgccctgtg

SEQ ID NO: 163183 - DNA, 593 bp, Homo sapiens
cctagggccactgtggggattaaatcgctaaatccttggtaaagagttctgtcttcacaacatatgcggaatcagaccccagaatcagaggatctttctccccacgcccaggctacttccctgacctggctcccatctccctcttgaacgattacagtgtcctcccctccagcctccccatttctgccttcacccccactccccgtgcgttccccacgggcagcgaggggtatcctgtcaacaccccatggaccctgccccgcctctgctccacagccttccacagctcccgtcccactcagagcagagrtgaggacttcagttttcaggtctccactctccaccccagctcctcctctgacctcatcgcttccctcctccccctgctcactcgctgtttccagaacaggccgtgcacaccccggccccaggggcctttgcacctgctcttcccttttcctggaatgctctttgccggttgtccacagggctcttgccctgctctctatcaggtccgtgctccaatgctaccttctcagtgaggccgtcctgaccgccccgcatcaaacagcacccctatccctctccagaac

SEQ ID NO: 163184 - DNA, 568 bp, Homo sapiens
ttcttgaaaattaacaaactgcatgtgcttaggtttacttctgggctctctagtctgttccattggtctaactggtccatatgtcwtttggaatatagctagcaccatacggctttgattactgtagctttgtaatgtaatttgaaatcaggaatgtgattcctccaactttgtttttcttgcttaaaattgtttggctattcagagtcttttgcaattccataagaatttggcaattatttttttctgtgaacatgccattggaattttgatagagattacactaaatccgtatatcactttgggtagtatggatattttaacaatattaattcttctaatccacaaacatggatatttttcatttatttgtgtcttcttcaatttcttccattaatattttgtagtttttcactgtacagatctttcacttctttggttaaaatttattcctaagtattttattctttttggtgctattacaagtgggattactttcttgatttcctttttggatggattattcttggtgtaaagaaatgcaactggtttttgtatgttgattttg

SEQ ID NO: 163185 - DNA, 565 bp, Homo sapiens
ttttgttaattggcagtttggatagtcattctagacacaagaataaaggagatcacactcctgattaaaacctgtcagtgaccttcattcctccagccaaagccctcagccattttcccacataaaccctaagcagactaagaatctcattttcataggcttggccaaagtttgtcttcaggccacatgcaatttccaagggctcctcttcctttacttctgtggaaggtgcaatatcagaatatgaatgaatcagaatgatgttcttagaatcttaatattggatccatttgaacagatcagtaattgaactttgggaaaacttcagcacacttccttagcatacaatttcttgtgatgcgaatcacaactgttaatttgtattttgctttygaatcctatatctcagagtgatgaagtctctttttaccagaggtcttagaataggtttgcttaaaatgagatatatgaaagaaaagggtcattttagtcagtgggcgagcatttatccttagctataaatgaaggtgataaacagtttcatttctgtatatagaatggtctg

SEQ ID NO: 163186 - DNA, 532 bp, Homo sapiens
gaattcaagtccagtccataaagtgaaagcaagtttattaggaaagtaaaggaataaagaatggctactccatagacagagcagccccgaggactgctggttgcccatttttatggttatttcttaatgatatgctaaacatcgggtggattattcacgcctcccctttttagaccatatagggtaacttcctgacgttgccatggcatttgtaactgtcatggccctggtgagagtgtagcagcgaggacgaccagaggtcactctcatcgctatcttggttttggtgggttttgggcggcttctttattgcaagctgtttwatcggcaaggtttttatgacctgtatcttgtaccgacctcctatctcatcctgtgactaagaatgccttaacttactgggaatgtagcccaaccggtcttagccttagtttagagagtccctattcaagatggaattgctctggttcaaacacacctgacactaccccccaggccgaggacggggtccccaggggcaggcgagcctcca

SEQ ID NO: 163187 - DNA, 587 bp, Homo sapiens
acatgttctctgcaaggttcaagcttcacgtaccattggaagaaaatgtgtccacgtctggagctgggatgacctctggggtccaataggcgtcacctgcctggtgccgctgtgccaggaggctcttggctgccacctgtggataagccgcagaagatgagttgagggaggaaaaaggagccgggagaggcccgctgggtcggcagccccagagctccagacgccrgcctgaatcccccgcccctgcagccctcgacccaggcaccctctgtcgggagggcccacccagtcccacccagtcccacccagtcccacccagtcccacccagttccaccctgcccgtacctgcgaggtactataagttccctcccagctctgcagcaggagagcctcccgacaagctcagacccagccgggcgctcctgcaggggaaacctgactggaccggccttccccgtccctgaggccggagagatcccgatcccatcaggcccctgcccttgctcggcctcgccgcatgagggacccccgcaggccctgctcgtttctccggcacgcccagatcacttggggcggctctggcctg

SEQ ID NO: 163188 - DNA, 531 bp, Homo sapiens
tggaagaaaatgtgtccacgtctggagctgggatgacctctggggtccaataggcgtcacctgcctggtgccgctgtgccaggaggctcttggctgccacctgtggataagccgcagaagatgagttgagggaggaaaaaggagccgggagaggcccgctgggtcggcagccccagagctccagacgccagcctgaatcccccgcccctgcagccctcgacccaggcaccctctgtcgggagggcccacccagtcccacccagtcccacccagtcccacccagtyccacccagttccaccctgcccgtacctgcgaggtactataagttccctcccagctctgcagcaggagagcctcccgacaagctcagacccagccgggcgctcctgcaggggaaacctgactggaccggccttccccgtccctgaggccggagagatcccgatcccatcaggcccctgcccttgctcggcctcgccgcatgagggacccccgcaggccctgctcgtttctccggcacgcccagatca

SEQ ID NO: 163189 - DNA, 587 bp, Homo sapiens
acatgttctctgcaaggttcaagcttcacgtaccattggaagaaaatgtgtccacgtctggagctgggatgacctctggggtccaataggcgtcacctgcctggtgccgctgtgccaggaggctcttggctgccacctgtggataagccgcagaagatgagttgagggaggaaaaaggagccgggagaggcccgctgggtcggcagccccagagctccagacgccagcctgaatcccccgcccctgcagccctcgacccaggcaccctctgtcgggagggcccacccagtcccacccagtcccacccagtcccacccagtcccacccagttccaccctgcccgtacctgcgaggtactataarttccctcccagctctgcagcaggagagcctcccgacaagctcagacccagccgggcgctcctgcaggggaaacctgactggaccggccttccccgtccctgaggccggagagatcccgatcccatcaggcccctgcccttgctcggcctcgccgcatgagggacccccgcaggccctgctcgtttctccggcacgcccagatcacttggggcggctctggcctg

SEQ ID NO: 163190 - DNA, 445 bp, Homo sapiens
gtggcttctcttcccctgaggtagaccagagaagatrttgaagccatggaggggcaacaaacatcttggaaaaggcacagccttaagtcagagttggtgtgaagacagcttcacccctggagagtgtgaccttgggttgctcaaatcactacttggagtccccatttttcttcatctataaaatagaggtcattggccgggcacagtggctcatgcctgtaatcccagtaccgtgggaggccgaggcaggtggatcacctgaggtcaggagttcaagaccaggctggccaacatggtgaaaccctgtctctactaaaaatacaaaaattagctggatgtggtggcgggtgactgtaatcccaattactcaggaggctgaggtgggagaattgctgaacctgggaggcggaggctacagtgagctgagatcacaccactgcactcc

SEQ ID NO: 163191 - DNA, 527 bp, Homo sapiens
gcgagtctaagctatgaggacgcaaatggcaaaagaaagatacaatggattttaggggcttcgggggaagggtgggaggggttgagagataaaggctacaaatagggtgcagtgtatactgttcgggtgactgggtgcaccaaaatctcacaaatcgccatctaaagaacttactcatgtaaccaataacctatggaaaaaaataccccaataacctatggaaataaaatatatcttccagggtaatcttgaggcggaagtggtgctgtgaaggattttcycaaggtcaccatacccttaaaggaatactgctagcaggcataggaggccaggtggcacaactccacaagtcaccataaaaaaaaaaaaaagctcaacatcactaattatcagagaatgcaaatcaaaaccacaatgagataccatcttacaacagttagaatggctatcactaaagagtcaaaacgtaatagacactggtgaggctgtagagaaaagaggatgcttatacactgctggtgggaatg

SEQ ID NO: 163192 - DNA, 355 bp, Homo sapiens
atgagggacggtgcattctggcccagatactatgcttttcccatggtctttgcaatctgcagaccagaagattcctttggctgccaacaccaccagggccctgggtttcaagcacaaacctgggcagccgtttgggcagacaccaagctagctgcaggaggttttttttttttcatatcccagtggtgcctggaacaccagtgagagagaactgttcactcccctggaaagggggctaaagccaggsagccaagtggtctatagcggatcccactcccatggagcccagcaagctaagatctactgacttgaaattgttgctctgccagcacagcagtatgaagtcgacctggga

SEQ ID NO: 163193 - DNA, 397 bp, Homo sapiens
cttccttgcagtcatagagttaacttcttgttggggagcttgttttcacaatagtaataattgttgttgctgttgttgttatatyagcaatgacaattgaacaggaacagtgtagcaggcactgtgccttgccctttacctgcattcagggtgctattattatactcattttacagttggaaagaactgagtctctgagaggttaagtgacttacccaaggtcacaaaggcaggctgtcattggaccaggaatttatacacaggcagcttccctccagaatcagcacactgaactatgccatgctctactgcctcctggtagatgtacatcatgacaaaccagactgggaccccaacatcggtttgctgtgtcaaatagacttaaagggaggctata

SEQ ID NO: 163194 - DNA, 531 bp, Homo sapiens
aaaaggacaaatgttagtgaggggcttgggaatttctgattttataagaaggaaacaaacttagaattatttttatttaaatgaaggtttgaaaatacaaaaataacagccctgcttatccacaaaggaggaagttcaggatagagattagaccaaaggacgagagatgctgaaacaactgagaatgaatggaccattgtgctaaaactggaaaatatgcatctaggctgaaaatagcataggcaattactacttattgaatattacctaaatcataactctctccattacacaccatgaaaacactttagatatgtgctaaattatgtccttgctcytttgttgttattgttaatttattagctgagtaacacctgttcattgtaaacttgtgggaaaatacataaaagcacaaataggaaagtaaatactcaagagactgtttgcttcagatcactatttttaacccacagggatccaaagagttctcaataactatatgtagagggaactatttattgggtgctagtc

SEQ ID NO: 163195 - DNA, 616 bp, Homo sapiens
gaataatgttttattatattctaattccagttaacttggtgaactcagttcttttcaaaatccagtttaaatgtccatgaccstgttattttatctgtagctttctcagaaaaaaatcaatctcttcttttattttgctcatagagcacttaataccagtgtcttaccaagggtatgggagatggaagggggtttggagaagagcagtcagtcctgggcaggtaacaaaggggtacgttgtctgtggagaatttaaaaactataataaaaatgactagaagtcagcctgctttgtattatcactgtgcttgtacaattttaaatgatgtcagtaacaaaatactccttccatccatggaaagtcgttccccctttctaccctcacaacacttacacacatatactcccttacaccttgttatactatgactcagtgtataccttagttatggcatacatcagccgccttgccttatagtattaactcccagactatgagttcttaatgtcaaacttaactacggctgatctttgccctctccttttcatctctgtatgatccttattaaagtagctgatccagagtagacaccaataatttttagttgaagaaata

SEQ ID NO: 163196 - DNA, 616 bp, Homo sapiens
gaataatgttttattatattctaattccagttaacttggtgaactcagttcttttcaaaatccagtttaaatgtccatgaccctgttattttatctgtagctttctcagaaaaaaatcaatctcttcttttattttgctcatagagcacttaataccagtgtcttaccaagggtatgggagatggaagggggtttggagaagagcagtcagtcctgggcaggtaacaaaggggtacgttgtctgtggagaatttaaaaactataataaaaatgactagaagtcagcctgctttgtattatcactgtgcttstacaattttaaatgatgtcagtaacaaaatactccttccatccatggaaagtcgttccccctttctaccctcacaacacttacacacatatactcccttacaccttgttatactatgactcagtgtataccttagttatggcatacatcagccgccttgccttatagtattaactcccagactatgagttcttaatgtcaaacttaactacggctgatctttgccctctccttttcatctctgtatgatccttattaaagtagctgatccagagtagacaccaataatttttagttgaagaaata

SEQ ID NO: 163197 - DNA, 616 bp, Homo sapiens
gaataatgttttattatattctaattccagttaacttggtgaactcagttcttttcaaaatccagtttaaatgtccatgaccctgttattttatctgtagctttctcagaaaaaaatcaatctcttcttttattttgctcatagagcacttaataccagtgtcttaccaagggtatgggagatggaagggggtttggagaagagcagtcagtcctgggcaggtaacaaaggggtacgttgtctgtggagaatttaaaaactataataaaaatgactagaagtcagcctgctttgtattatcactgtgcttgtacaattttaaatgatgtcagtaacaaaatactccttccatccatggaaagtygttccccctttctaccctcacaacacttacacacatatactcccttacaccttgttatactatgactcagtgtataccttagttatggcatacatcagccgccttgccttatagtattaactcccagactatgagttcttaatgtcaaacttaactacggctgatctttgccctctccttttcatctctgtatgatccttattaaagtagctgatccagagtagacaccaataatttttagttgaagaaata

SEQ ID NO: 163198 - DNA, 616 bp, Homo sapiens
gaataatgttttattatattctaattccagttaacttggtgaactcagttcttttcaaaatccagtttaaatgtccatgaccctgttattttatctgtagctttctcagaaaaaaatcaatctcttcttttattttgctcatagagcacttaataccagtgtcttaccaagggtatgggagatggaagggggtttggagaagagcagtcagtcctgggcaggtaacaaaggggtacgttgtctgtggagaatttaaaaactataataaaaatgactagaagtcagcctgctttgtattatcactgtgcttgtacaattttaaatgatgtcagtaacaaaatactccttccatccatggaaagtcgttccccctttctaccctcacaacacttacacacatatactcccttacaccttgttatactatgactcagtgtataccttagttatggcatacatcagccsccttgccttatagtattaactcccagactatgagttcttaatgtcaaacttaactacggctgatctttgccctctccttttcatctctgtatgatccttattaaagtagctgatccagagtagacaccaataatttttagttgaagaaata

SEQ ID NO: 163199 - DNA, 348 bp, Homo sapiens
aattctagggaagggattagtgcatttttggttgtatgcaggatagttatatcatgtcaggagaaattattatattaccttgttattgtctttatttggaaatttaaatacggtttaaaaacatgcatatgggtgccaagttgcaaggggtagacctgtagacttaattttaggtgtcaacatgactggattaaggaatacctagaaacctaatagagcattatttggggcacgtctsagagtgtttctagagaagattaatgtgtcagcgtgagtggatgaggtggggaagatctgccctcattgttgatgggcaccatccaatcagccaggggcccagagagaaca

SEQ ID NO: 163200 - DNA, 608 bp, Homo sapiens
acaagtcacactgcatatcaacattaatttaattatgttaaacttcacaggctttattgtattaatscaaaagccaaggaaaacatgctcttttctcattctttaacacattactcatgagtggaagaattctcagattcccttctgtgaaagactactgagttcttaatgaaaattttgacttgtgttgtagtttaatttgatttggaatcaagaactgattcttctgattctaaatgtgagatattatgagtcatagagtagttctagaacgcaactctgctctctgccttgtctttcagttcagatagctagtggtgggttgaacagctggaagaaccatatttactcactactggaaaatcattttataattgacaagattattataaagaataagaaaaggagatttagtgcagtagcatctcacagatgcttttccaacagtcttctgtgcaactttaaaatctcatgcagatatttaaatctaattgctaattagtttaaggcaatgcataaccatggaaaaggccaaaaaaaaaaatatattgaatgagctttggcagtctctccttacatttggatcgtcagcccttcatgactggaga

SEQ ID NO: 163201 - DNA, 577 bp, Homo sapiens
accgctctagctctcaacatatctaaagctcttggaaatttttttaaaaaattaatcctaaatgttctaaacatctaaaacacagcatagatgacatgagttaatatttattattactttggtctagcttacaaatttctgtatctatgctgtgctacaacacagtgagatttcagggttcatagcccctatgccctcaagtgccctaacagaaaagattctgagggctccagaattgtggacttggtccagggcaaagcaacagtcaggtcatcagcgagcaaagttatgagactctcatgaagttgaaaatctgaccaaaatacaaggcastgaaatctggtgcatttagatgggagagaagaatcaagggttaatttcaagtgtggggcaagggtcacaaggggaagaaagatgtcctttgctgagatggggaacttgccaaggaagtatggcagcgggtcagggtagagcacaaaaatgtccagttttagacctgttaagtttggaaatccttataagtcatccaagtggagatctcaagtagaccactagatagatctaagttgtgaagctt

SEQ ID NO: 163202 - DNA, 577 bp, Homo sapiens
accgctctagctctcaacatatctaaagctcttggaaatttttttaaaaaattaatcctaaatgttctaaacatctaaaacacagcatagatgacatgagttaatatttattattactttggtctagcttacaaatttctgtatctatgctgtgctacaacacagtgagatttcagggttcatagcccctatgccctcaagtgccctaacagaaaagattctgagggctccagaattgtggacttggtccagggcaaagcaacagtcaggtcatcagcgagcaaagttatgagactctcatgaagttgaaaatctgaccaaaatacaaggcactgaaatctggtgcatttagatgrgagagaagaatcaagggttaatttcaagtgtggggcaagggtcacaaggggaagaaagatgtcctttgctgagatggggaacttgccaaggaagtatggcagcgggtcagggtagagcacaaaaatgtccagttttagacctgttaagtttggaaatccttataagtcatccaagtggagatctcaagtagaccactagatagatctaagttgtgaagctt

SEQ ID NO: 163203 - DNA, 577 bp, Homo sapiens
accgctctagctctcaacatatctaaagctcttggaaatttttttaaaaaattaatcctaaatgttctaaacatctaaaacacagcatagatgacatgagttaatatttattattactttggtctagcttacaaatttctgtatctatgctgtgctacaacacagtgagatttcagggttcatagcccctatgccctcaagtgccctaacagaaaagattctgagggctccagaattgtggacttggtccagggcaaagcaacagtcaggtcatcagcgagcaaagttatgagactctcatgaagttgaaaatctgaccaaaatacaaggcactgaaatctggtgcatttagatgggagagaagaatcaagggttaatttcaagtgtggggcaagggtcacaaggggaagaaagatgtcctttgctgagatggggaacttgccaaggamgtatggcagcgggtcagggtagagcacaaaaatgtccagttttagacctgttaagtttggaaatccttataagtcatccaagtggagatctcaagtagaccactagatagatctaagttgtgaagctt

SEQ ID NO: 163204 - DNA, 577 bp, Homo sapiens
accgctctagctctcaacatatctaaagctcttggaaatttttttaaaaaattaatcctaaatgttctaaacatctaaaacacagcatagatgacatgagttaatatttattattactttggtctagcttacaaatttctgtatctatgctgtgctacaacacagtgagatttcagggttcatagcccctatgccctcaagtgccctaacagaaaagattctgagggctccagaattgtggacttggtccagggcaaagcaacagtcaggtcatcagcgagcaaagttatgagactctcatgaagttgaaaatctgaccaaaatacaaggcactgaaatctggtgcatttagatgggagagaagaatcaagggttaatttcaagtgtggggcaagggtcacaaggggaagaaagatgtcctttgctgagatggggaacttgccaaggaagtatggcagcgggtcaggrtagagcacaaaaatgtccagttttagacctgttaagtttggaaatccttataagtcatccaagtggagatctcaagtagaccactagatagatctaagttgtgaagctt

SEQ ID NO: 163205 - DNA, 457 bp, Homo sapiens
tgcaccaacatttttacattctggttccatcatggagagcaagcttctaacctggatgaaatgattttgtggcaagcaaagaaatgattatatatwtacccggtaaaagttgcgataataattctgataatgttttcatctgaatactatgtattaatttcaaatatggaaactatgcaatgggaaaagtgatagctcacatcacagaaatcttcctatgaaccaaggcaagtattttacatgtaatatatcataacaagcttatgaaacaggggtcatcattactgactgataagggatcgggcatagagggctcgttatttgtccaaaatcatgcagttagtgtgtagcagaagcaggtaatccctacagtccacacagaatttccaagaaaaatgtacaatattatatccctgattggttatgcattataacgaggttatcacccattcagata

SEQ ID NO: 163206 - DNA, 401 bp, Homo sapiens
  misc_feature (1)...(401): n = A,T,C or G
cagtgaggggacataagtgagatcgtgaatggggacataatagggggcatcatgtgaatatatgggatgtagagaccgtgctaaagactgccrtactctcagttaattgattgaactctgagtgaaacacttgaatttacaccgggaaataaattngccagcatctagaagatgattaatatttcatgtaaaccaacttggtcacactatgaagatggaaatgtaaaacttgttacttttctatccattattaattgcttaaagctcttccatgctttagataccgcactaagcatttatgttttcagcaaagtattggcataaaataaagcttacaggatggtgtgaaggcaatattttttgagtgtctacagcatgccacaaaatgacttcaatgctta

SEQ ID NO: 163207 - DNA, 560 bp, Homo sapiens
ttatcatttgcatttcccactttacacaaaactagccataatctcactatcacttgtctggtaactcaggaatatgctgtataaatagtgtattttttattttggtaaaatatttgcaaaagtatcttgtggtagctataatggatgtgtgaattggataaaaatactattaagtgtgttttttcctagttgaacaacatagataagaatactgagtaaagactaaatatttgcctggatggaagaycgttcatccaatcaaacaaatatacagaaacataaagagatagtaaatacactggaatgcaaagtcagagtcaatagttatttaagcttgctaataaaaatgactgcaatttcaagtgcacagttaattagaattggatggtagaggcccaagggtgatggcatgtaaatgaagaatatgtgaggaattctgtcttaagccttattcatagatgtacagcagagaaattaagctgactgacattctgtgccctgcaatcgtcatatcacacctggggtgtgggattcatttcagataccacaggttaagagga

SEQ ID NO: 163208 - DNA, 566 bp, Homo sapiens
ctaagggcttcctcccacgttcaatcataggaccatggaaacaaggttgaagcctatgttttaaaccattatgtgtctggtgctttgtctgggtcctggtacataatagatattcaataaattcttgtaaaattcattttttttcaactgagagtacaaaagtaatcagacagtaaatatatgtgtacccttttggagaaacattaaattcattccattagcaggcaatgagttctttatttaaaaaaaagttctttcagcaacttccaaatgtacatctcaagctctgaccactcctcccctttagactcctactaactgcttggaaattatttcagttgttctcatggccaaaattgaactcatcatcttactcttrccatctggtctttttcttctatttctttgttggattgattactacagagttatctaaactagaaacacaggagtcaccttagtcatcttcctttatcttaacactgtctctcatcatcaagtcttcttttacctataatgttcttatatgagtcccttccactctgtctttattaatattgccaact

SEQ ID NO: 163209 - DNA, 575 bp, Homo sapiens
cactcaaaaaatgccaaaaataaaagacacacctcagtgaaataagagtacttctcacacatttccacaaaataatctctaataaaggagaaaaaaaaaacgtataaccctgtggagtggggggtggcatcrccagtggtcacttgctccaagataaaaaaattctctgaaatctttggttacattcaaaatttctatgtttgaattctgcttttcactttacagttcctccatgattaaaacaatgttccactctattttccagtaaatttgtgtatcaaagaaggtacatttcacttaatctttaggttcacatactatctggcacactactgtacaatcccagggtatgggtaccacagtttaggatgtacaggtataggtgaaaattatataaactttactttgaatgctattttaagagatccttgcctttattcgtcagtcactacaaatggctccctgaatatactggttcaagagagtctgctggaatgtaagaaccagatcctgtaacctaataaaagcccttttaacttctatctgcacagggaatacttttggaattctgttcc

SEQ ID NO: 163210 - DNA, 575 bp, Homo sapiens
cactcaaaaaatgccaaaaataaaagacacacctcagtgaaataagagtacttctcacacatttccacaaaataatctctaataaaggagaaaaaaaaaacgtataaccctgtggagtggggggtggcatcaccagtggtcacttgctccaagataaaaaaattctctgaaatctttggttacattcaaaatttctrtgtttgaattctgcttttcactttacagttcctccatgattaaaacaatgttccactctattttccagtaaatttgtgtatcaaagaaggtacatttcacttaatctttaggttcacatactatctggcacactactgtacaatcccagggtatgggtaccacagtttaggatgtacaggtataggtgaaaattatataaactttactttgaatgctattttaagagatccttgcctttattcgtcagtcactacaaatggctccctgaatatactggttcaagagagtctgctggaatgtaagaaccagatcctgtaacctaataaaagcccttttaacttctatctgcacagggaatacttttggaattctgttcc

SEQ ID NO: 163211 - DNA, 509 bp, Homo sapiens
agggaatacttttggaattctgttccctccctctacttgagcaaaaacaaaacaagaaaagggttactaatctgaaacaagaacctggaataattcccagaaatgcaatyttcaggatatttactgaaaaaaaaaaaaaaaaaaaacaaaaaaaaaaacaaaaaaaaaccaagaggcaatataagctaaaaatgtaaccagattaaagaacttaaaagattcaattcatgatgaacccagtattttattgaggaaaggtgtagatatcctagggataaattcttcatgtttaaagatacataatcccataaacatagccactgtctaagctatcacagttgaaagaaactgactcatatccctaggaaatggatgtatattttccttcagattacaagatcaagtttactattacagtctcctttactaaaaggtgaaaatacaaaccaagaattactcaggtatgaaaatacatcaatattcactccacagggaaaacaatacaacaa

SEQ ID NO: 163212 - DNA, 451 bp, Homo sapiens
ttgcttagtattgctttggttatgtgggctcctttttggttccatatgaactttaggatgttttttctagttctgtgaagacttatgctggtattttgataagaattgcattgaatctgtagcttgctttggcagtatgatcattttcacaatattgattcttcccatccatgagcattggatgtttccatttgtttgtcatctatgatttctttcagcagtgttttgtagttttccttgtagaaatgtttcacctccatggttaagtatatttctaaggtttgtttgtttgtttttttgttttgcagctgttgtaaaggggattgagttcttgatttgattctctgcttggtcgttgttggtgtatagcagtgcwgttaatttgtgtacattgagttttttatcctgagactttactgaattcatttatcagatctaggagctttctggg

SEQ ID NO: 163213 - DNA, 551 bp, Homo sapiens
tctgctataaggttattgaaaaaagttagacatcttgggtggtaaaaacatactgctgccacccaaaagatgttcatggcctcacttgagctatctgtagagtgcacagtttttaaaatggaaggtagcttagagaaagcatcaaagtaagtggcatccaatatttttgctttaaagcaatcatttattctctttccctttycatggtttccagcctttgaaagattttgtttattaaacaacaaaatcttacttggttttatgattactaatttttaagttactatcttatactgttcatgcatgtatataaattttaagattatttttaacaatatctaaaataacttttcttagaattaaaaaataacagtggtaataacatctttgttttgtttctgacttaaatgggaatatcttgtactttatagttacaagactgatagcttttcttttatatacactttttattaagaaggattcatagctatgtatgttcccctttcccccatccttaggattaataaataaaaagagagttaaacgtaaag

SEQ ID NO: 163214 - DNA, 576 bp, Homo sapiens
tttacacacttatgttacctgcatggccctgtagacaagtttgtttgtgatactccagggtttcagcattcattggctgaaaatacctctgtaaatttttagaatgataattcagaccatmtcataagaacctgtgatatcattctcataatttatatgtcaaacatgtcaaaagcctattcaaatgaacaaaaactataaaatatatgaaaatcaaaatataccaaaataacacctagctgagtacacagtgttaacaatttatcctaagagaaaaattatggaatatctaattgtagagcaagatatgtatacacatatatatatatattttttttcaaatagcactttttatttgccactatttgaagtctgaactttaaacagattcttggactggtggttcatatccatcagctcgttcaactttagcacttgtctcatccccagtggctcttccagaactactgccttcaccatgaagctccatgagctttcccaattcaaacttgggcttcttcagcatttttacttttctaacgaagacatcatggagaggataaataggttggcaag

SEQ ID NO: 163215 - DNA, 450 bp, Homo sapiens
aagataaacgtaagtcagagaaagcaactaggtacatatttgtctcaggtgagcagagagatgatttttgagttctgttctttgtcctatacstgtgaagatgagctataaatgtcagggtgaaatttagcagaactgtttgacagtaacgatcttggggcccacaaggaatttcttagtgggaaaattgtggcggaggcatgtagttttgttttgttttttatctttttagctcttgtttaggaataaaatgagaggcaggtttgactgatgcagttcccaacttgagttttccctttggcttagtgattttggggtttgttttcctttcatagtggaaaggtcccttctggatagtcatgatgtgctcagcgattgagcccagcagatgtgctgaattatgccacatgtgcgggacacagccccatcgcatgcacagcattgtttgat

SEQ ID NO: 163216 - DNA, 464 bp, Homo sapiens
tacatatgctggggaaaatctggagggagttctacctacaaggcagcccaaatgactgaagccattaaaaaatacaaataaagcctatttcaactaaagcaatgtagatgaggaaagggttgtgttctttagtaagccagaagtgaattttattattatttagaatggtggaagataattaatcaatttggctggaacgccattttggatactactgcagcagcttctgagatatgtcaattttattcacaaggagcaataatataaggcaatttatttttctaggccattcatgctttaatgtacccaatatttatcagctctttgcagtgtaagtartaaaaagcaaattaaaacaaataagaaataagagctgagaaagtagtcagtcctctttttctctatgattaaaattaaaattctatctggacataatatttttgtaagctttaaggcagggcaat

SEQ ID NO: 163217 - DNA, 529 bp, Homo sapiens
attaaacatgtccataaatgcctagaactgcatgaattcatcatcggaatcaagggtcaattataaaacatctcattttcaagtttgccaatcaatgcacagctttaaatagcacatataccgttttggcackgggttttctccatgctcttttataaaataaatgaagaagtattatgcctcaaagtttcttagagaataagtcttatggccaggcacagtggctcatgcctgtaatcccagcactttaggaggccaaggaaagagggttacttgaggccaggaatttgagaccagcctgggcaacacagtgagactcagtccctacaaaagaaataataaataaataaataaattttaaaacagaataagtcttacaaccaaaagataataataataataatatattttgggaggttctgaaaattaactttccttggaaccacttagtctaaagaaagatttaatagtctttcttgccttgttttttcctctagctaaaacattttatatgataaagctagcaaaa

SEQ ID NO: 163218 - DNA, 464 bp, Homo sapiens
tccccaacaccccccactcactcatgtgagtcaggggccccactctcgttttagtctgcaggtcccatcctactatcatccagaatactagagggagcccccctccttccctagagtagctctgtcrtctgagagcttccctccccgagtcagagaagacctgaaaatctaaggggagaatatgagggaacccagagccccttcccgggaagggctgcggcgaggtgcagacggtcaggcttccagttagacttaaggtgggacttccgagcagttagtgtgtgaacccactagaccaagaggtgagaagcctagtgtctctgtctctgtctctgtctctctctctctctctttgtctctctctctctctctcagcttcccaggcctctgtcttctggaggatgaagagagcctctctcttctttagggtagaaagaggctaagggataggggttaaacagcca

SEQ ID NO: 163219 - DNA, 552 bp, Homo sapiens
agctgacaaatcaaattgtcattttagccttaacttattagttatattattttgttgaatttaatactatgaattgtgtcattttactaaaactacattggtgtttccaacaggaatatagtagagactactatggtgcaggttctacttggcttggcaagtcccatcgtacaacccaccctgtgccctgtgataaccccattctccagccattaccctggattccaatagttatgaagctttcattcctttagcactttgtgtcatttttaactttctcaatgaattcaaacatatcatttgctaatcaaatcctccaatatggatgcgggtgagctaatttggatccttcttccactacaaagacaaatggaagctaaattagatgcaacaaaataaataaataataactaaggcagtcaaactcacaatgaaagaatgtcttcaggtactagacacataaagagaactcaaagtcagggcaatcaaatgtgagagcttgccrtgccccagaaaaacaccaggatgtagcaagtagatatgagactaaat

SEQ ID NO: 163220 - DNA, 558 bp, Homo sapiens
cttggcaaatgttccctgtgagcttaagaagaatgtgtattctgttactgctggctgaaatatttttaaaaatgtcaattagatcaagttgattgatagcgctgttcaggttgtccgcatctttactgattttctgcctgcttaaactgtcaattctggcagtggctaactataatagtggagctgtttatttctcctttcggttcagtcagtttcttcctcatgtatttggatgctctgttgtgtgatatattcatgcttataattatgtcttcctggaaaattgacccttttattgttaatgtccctcttcatcactgatcttccctgttctgaagartgctgtgtttgaaattattacagctattcctgcttttttattcaagagtgtcagcatgttacaactttctccatcccttcaattttaatttgtctgagtctttctatataatatgtgctttttgtaaacaacatatagttggatatttaaaaacaaactcatctgacaattttttaaaaataatttcttaggccgtacactttaaagtgcttatcgat

SEQ ID NO: 163221 - DNA, 421 bp, Homo sapiens
caactttctccatcccttcaattttaatttgtctgagtctttctatataatatgtgctttttgtaaacaacatatagttggatatttaaaaacaaactcatctgacaattttttaaaaataatttcttaggcygtacactttaaagtgcttatcgatataactggatgaatatctactgtttttaacagttctctatttactccatttattcttatttttaaaaaaattttcctatttttctgctgtcttttgctttattgagcattttatataattctattttatctcttctctgagcgtgtcaattttaattcttttagcttttttttcatgtttgccttagaatttacaatatttatttttacatgatccaaagcaaccttctaatgctgctacacttcgtcacatgtggtgcaggaa

SEQ ID NO: 163222 - DNA, 421 bp, Homo sapiens
caactttctccatcccttcaattttaatttgtctgagtctttctatataatatgtgctttttgtaaacaacatatagttggatatttaaaaacaaactcatctgacaattttttaaaaataatttcttaggccgtacactttaaagtgcttatcgatataactggatgaatatctactgtttttaacagttctctatttactccatttattcttatttttwaaaaaattttcctatttttctgctgtcttttgctttattgagcattttatataattctattttatctcttctctgagcgtgtcaattttaattcttttagcttttttttcatgtttgccttagaatttacaatatttatttttacatgatccaaagcaaccttctaatgctgctacacttcgtcacatgtggtgcaggaa

SEQ ID NO: 163223 - DNA, 646 bp, Homo sapiens
gctaggcatgtatttcctgttaataaagattttcctgtgttcttcccatctccatgggaatagtcgatgttagggaagtcaaaatgccatagctaaggagtgttgtcacttcctaggtatttttctttagaaagtttggtatttttgtttgttttagccttgaaatgagcaagcttcctgtgcctggcttatttcacttaatataatatcttccagcttcatctatgtggtggaaaatggcaggacttccttccttttcaaggctgaatagtattccacggtgtagatgcaccacattttcttaaccactcatcttttgatggacacttaagttgattccgtaacttggctattgtgactagtgctgtaatacacatgaaagctcaagtatcttttttacatactgattttatttcctttggctatatacccagtaaaaagttgacctcatagaagtagagagtagaaccacccagaggctggggtggttagggcagagagagggttggggagrtgttggtcaaagagcatatatttacagtgagataggaggaataagctcaagtgttctactgtacagcatggtgactatagtgaagactgactggtaagtactctcaccccaaagatgaaaaccacataggta

SEQ ID NO: 163224 - DNA, 642 bp, Homo sapiens
ctcgccccaacctcgctcttccaggccggcagcccgccgcggcctctgcgcatgcccggctctggcgccccgcggacccgcgccccggccgccgggttgggcgggtggctttgtctttcgttttctgaagctccgggcgaaggggtttatgggaatgccgggtgctgggcgccgcggccggcaggcggagcggtcctgaggtgggaggctggggagggcgtgggctgggagcaaagacgaggggagaggtaaaatgaaggggtgctcgccgtgggtgcgamcctggcaccgtgggaacccagcggtgataggttaggagtgtcccaccaaagattatttttttccaggttctcaacaccctggaatgaaacctgatgctaggttgatttttcttaggctgctgacattcctttcacatgtaaccttgtattgaactcttctgagcatcttcattatcgctttaaaagcttccctttaggaacggctccacagttaacgaaggaaatataaatgtagagcgtgcatagatgttagatggctaagaatatcaagaacatttgcatagcactttgttgtttttaaagtgaattattgaaacagtgcatgaggtagttgtttttaccccgttttacagacgaggca

SEQ ID NO: 163225 - DNA, 437 bp, Homo sapiens
attagttttgtcaaagaggtgttataagttgacaaaccccatggtaaggtaagcaaataatatcaataaatttactgacagatgtgtatatatccttaggcttatgagttaaacagctatgataaacctaaatatttcacatctgcaatgtatgtctgatgagaatgtgctgggctcctgaagatcccacgtttagtattcgctacattaaggaaacatttaacattcatggcccatcatgatactcactaacctttgtttatttccattcaaccttagtagttatcatttctgcttctactttgctgctaattgggtttttataggttgtgagtttttaaattaaattttttcttattatacaaaatcagtgcatataattgtagmaaacattacaaaataaagataaacacaatgaagaatatttaaataccctt

SEQ ID NO: 163226 - DNA, 440 bp, Homo sapiens
aaaccatgagaccacatgagaactcactcactatcaccagaacagcatgggggaaaccactcccatgattcaaccacctccacctggtctctcccttggtacatgaggatcayggtgattacaatttaagatgagatttaggtggggacacaaagcctaaccatatcaccaatcctgccagcaacttgattttagacttcaggcttccggaaatatgaaagcatacatttctgttgttttgaggcatgtagctcatggtaatttgttacagcagttctaggaaactcataactgaggataattgaggactttcatttatttattcttccgttaacctgactctccctatttccagtttcagcagctgaaaccatcattttctcagtttaaatatgattgacaagtttaaatgacacaaaagaatgctcatgctgtctcag

SEQ ID NO: 163227 - DNA, 523 bp, Homo sapiens
cctactgtcttcttactctttttaaaaagggttggggttttatgagaatacattagcactaacaggaaaacatacatacccaacccatatgagtcaatggggcataagagctttctgcaaaaataaatcttgaaaatgtttttgctactttataagtctgaaaaataattcaagccactctaaacccttgaaattctgttggataatgaacttaaggagctgttgacatccatgtcgcctggtgtccacacttggcctcatatcagacagccactggaaagcgattkgcatgaacatgtatctgagaaccctctgttttatttttaaatgataacaaaagtaagtacaaccatgatagtagcctactaataataaagggagctatttatacatttttaagtgactgtggtagatatagttagctatcaacatgaagttcttgtaccttagagatggcatgtcactgaaagaaacagactccaggtcatgggagttccaaatctcctctcagatgattggaacc

SEQ ID NO: 163228 - DNA, 606 bp, Homo sapiens
aagataaatcctgcaaggagctaatactagcgttcaagataaagcaccaagaaacaaccacagattaagatcatgtgtaacaaagggcacagctatgccttgcagagagaaaaggaactacaatttaggagaccttttaaacctatgttttccacacaaagatatgcgtatatagaatataacataatggttcccagtctcctctgggatatgattttatggatgctagtgttcccatttgtgttgcaaacctttcagaggcaggaaatgttcattcctagcactccagtgtctatcatattggtgactatgctgttaattctcaatggtgttggctgaattttaatatcctttacctttgatcctgttgaactgtacataattcacagcatgkataaacagaggtgcttagatgtacggtctaatttggatgtgtgcagttaatacaaatgtgttcctcatcttctgtaagtatatgggcattatcatatctatattttttaaagtcagagaaactttagagtgagggctgtcaaataccagtgtgaaaattccagagtttatcacagctcatcaacatttatagcagagtacctggcatactga

SEQ ID NO: 163229 - DNA, 605 bp, Homo sapiens
acttgttaacctgcactgatatttctacatttagccttgtttttacagtatttcagaggtgtctgatcatctttcaaatgattaggtgagaagaaaatcaagagagagaaaggggtggtaacaccatataaggagtcaccacagctacttgaatgtgagcaaatgaagcagcttattctgctcccaaatcgtagcagcagaccaaagcagtatcacggtcagaactcaatcagactctgcgttgacacctcagccccctcactcccatcccagggaaaacacattagaaattgagttgtgataatttagtcctatattcctmtgtttccattaagagactcaattttaatttaggtatcaaatctactcaacaagcatgtgccctgtaattgacaccttggttctacccacagtcctgaagaaataactgtatgaaaacctctcccagtagcctgaaagagccggaagctcacacgtgcactcaggctaggttttagaaaggcgtttaatctaggcagcagatgtcatacctctgtaagaaacatacatagttacaagagttgccatattcaggaaagcctaaaactatgccacatcatatagtt

SEQ ID NO: 163230 - DNA, 629 bp, Homo sapiens
cactgatatttctacatttagccttgtttttacagtatttcagaggtgtctgatcatctttcaaatgattaggtgagaagaaaatcaagagagagaaaggggtggtaacaccatataaggagtcaccacagctacttgaatgtgagcaaatgaagcagcttattctgctcccaaatcgtagcagcagaccaaagcagtatcacggtcagaactcaatcagactctgcgttgacacctcagccccctcactcccatcccagggaaaacacattagaaattgagttgtgataatttagtcctatattcctatgtttccattaagagactcaattttaatttaggtatcaaatctaytcaacaagcatgtgccctgtaattgacaccttggttctacccacagtcctgaagaaataactgtatgaaaacctctcccagtagcctgaaagagccggaagctcacacgtgcactcaggctaggttttagaaaggcgtttaatctaggcagcagatgtcatacctctgtaagaaacatacatagttacaagagttgccatattcaggaaagcctaaaactatgccacatcatatagttgcatatagggttgctcctagtccagattcagtttaga

SEQ ID NO: 163231 - DNA, 501 bp, Homo sapiens
cccaggccatctgaaggaggctcaagtgtagggcacctcactttatggccaccttttttcccagcagttttatccttgtgacaaggacctaaaactgagcatcaacagcagcggttgaaagagaagcaaacaaaagtcagtgccatatagaggtaacgtgcagcataagaaaagaaagttgggaaaggaaatgtggttgccacacagtcagccacatcttccctattcctctgtagcagctaattgtataagacgttgatatcttttttatgccaccttctcccccgatttctccactggagcctccwggtggtggcagaccctgcagtttggggcagtcttgagtatatgtaaccacaggagcagctcttatgtgggaagacagaacacatagcctgggcaaatgggggagggcagattagataaaaacaagtccatatcactaaaaccaactattctgaaagacaatgactcgattgtgttttccctctaagaagaaaa

SEQ ID NO: 163232 - DNA, 209 bp, Homo sapiens
aaaccttcctcgttcaagtccctataggaccctattctgtccctgttctgtccctgtcaagtttctgctggcttctgctagtctctactagtctttgctagtctctgctagtctttatctatccctatctgtccgtatggyccctgttagttcctgtgaattcctgcaaatccctgtctttccctacctatctctatttgtctctatct

SEQ ID NO: 163233 - DNA, 403 bp, Homo sapiens
tcacattctgcagccttcttctctagcagcattcatggcaggagctttacatcccctgacaacctttcttttcttgagaaagggccaggacgggtcacataggtgtgtgtttagggctaacttccctctaaggcagctatggttatcttcctcctactcttcttcctcctctaaatggcagcatgggtgtatagcctgagacatgcattgaagatwagtcctatctgcccactaggactgcaagtgcagtccactttctctccactagctaacaagccataggggagttccaggaaagcatagcaggaaattaatatgaccatttatcataatccactttgcctcatgaaataaaaatttttcaagtgaatgaaggaaccaaattttcatttataatgataat

SEQ ID NO: 163234 - DNA, 468 bp, Homo sapiens
tgtacaacccaacataacattttctaagaataaaaatgaaacggtatggaaatcttgaactccacttaataaattgttgatagtgtgtactgcaggaccaggcaaatgggtaaacataacaaggttgttgggaacctggattctcactgtggaaaaagaaaggtacaaatgtggactgggatatcatggcccctgcctgaattaattatcaytatgatggttacaaaatgacaattttctatttctaaatttcctactcatttattagttggtattcttctctaaagaggagtgttccattcttcttcccaccttgatttttcaaaatatcagaaaatatatttgttccctctaatatgttataaccacttctgtcatttgtcattttgatgtttaaattatcccagttttcccagtgggaatcctttcaagaagaatcctgtgtcttcttgacatatctccatcttc

SEQ ID NO: 163235 - DNA, 322 bp, Homo sapiens
tggagtcaactcaagcagctgtgggatcttacccttggcagaagccaagaaccctccttgggtcacttttggacttacagtrctagcagctttctaatctgacccatcgtggcattttaaacactgccagcaaatgcccaactgatttatccatggcaattaatgaaatcatatcttgggatctgcagacgtcgttgggcatgcatcagttgacctcagctgtagtctgtggccactacggagagcaccatcggttcagttagctcggtgagcatgtgctgctgagtcttctctcactgtggtgaggggccggggcaggttg

SEQ ID NO: 163236 - DNA, 322 bp, Homo sapiens
tggagtcaactcaagcagctgtgggatcttacccttggcagaagccaagaaccctccttgggtcacttttggacttacagtactagcagctttctaatctgamccatcgtggcattttaaacactgccagcaaatgcccaactgatttatccatggcaattaatgaaatcatatcttgggatctgcagacgtcgttgggcatgcatcagttgacctcagctgtagtctgtggccactacggagagcaccatcggttcagttagctcggtgagcatgtgctgctgagtcttctctcactgtggtgaggggccggggcaggttg

SEQ ID NO: 163237 - DNA, 322 bp, Homo sapiens
tggagtcaactcaagcagctgtgggatcttacccttggcagaagccaagaaccctccttgggtcacttttggacttacagtactagcagctttctaatctgacccatcgtggcattttaaacactgccagcaaatgcccaactgatttatccayggcaattaatgaaatcatatcttgggatctgcagacgtcgttgggcatgcatcagttgacctcagctgtagtctgtggccactacggagagcaccatcggttcagttagctcggtgagcatgtgctgctgagtcttctctcactgtggtgaggggccggggcaggttg

SEQ ID NO: 163238 - DNA, 528 bp, Homo sapiens
ctgggttggctcttcaaaagtgaccaagacattgccacattttgaccttctgttctatttgggttgaggctaaagaaaaagtgagagaaaaaaatcatctgccttcagtttctaggactagtagctttatgttgtgcttatacagacattaacctgtcaggagtattactgagtcctaccaataatttcaataaactgtaaattattggggaaaattagtattagttaacctaattaactctaaggatactaatcaattatatggctgaattagaaaaaaaaaaaaaatcaaggccaggcacagtggctcctgcctgtaatcccagcactttgggaggccaaggagggtggatcacctgaggtcaggagtttgagaccagcctgaycaacatggcaaaaccccatctctactaaaaatataaaatttagctgggcatggtggcacatgcctataagttcagctacttgggaggctgaagcaggagaattgcttgaacccagtaggcagaggttgcagtgagctgagat

SEQ ID NO: 163239 - DNA, 501 bp, Homo sapiens
aataacaaaaatgtacaaagcatttagtaagtgtcatacagtgtgctgagcacttcacatgctttatctcctttaaatctcataaagactcatcacataggtactgttttcattcccatttttaaaatgaaatttaaagagactaaatgacttgaagaaggtcacaaaactaaatagcagtagggtcattattttaggccaggttatctaactccaaagcccttagcttaatcactaggctatactgaactttatggaattacatccaaaaggggtgtgtgtgtktgtgtgtgtgtgtgtttgtgaatttttccgaagactcacatttccaaagatttataagtcatgtcgttctcaaaggggtctctggtctccaaaatttgaaactctttgcaacagggtggctatgttttagaatgacataaacagatacaatgttctccagagtccagagcagggtctaaacctattgggatactatacttgtgttatcaactgaac

SEQ ID NO: 163240 - DNA, 437 bp, Homo sapiens
aagctttgcttaaggtcccctagctggcaagtaacagaacctattcaaattcagatctgatttcaaagtgcatgtagtttttgccacagtacgatgcttggggagctaaatggcatttgggaacctagagttaaagcatcagtattttttactaaggggccattggatcctagagaggcaacgaattataatggataaaaatacaaatttcaggcaagttacttctcttagcaccattgctttatccggcatagtaataaaaatcaaatgagacaatggatatgaaatgctaaaaatagtacattctctgttgttattatctattgtgattattgtgttacccttggaaaaaggcctgtagaatagyggcagctgggtcccctggacagtgaactaccaacctaaaaactgtctgggcaggcttgcctttgggagtt

SEQ ID NO: 163241 - DNA, 590 bp, Homo sapiens
tggcacaaaaatggatgaatatattcaaatgtttgagaaatattacttcataaaaatgagagaaattttaatggctggagaagtaaaacttgattttttatttgagaacatagttaatgtcaaaacaaagaaagtcagcaatgaacattgcttctcaacttgaggtgattagagaagaggtcaaatgcctttagaaaacagctgtgcatttatcttggctgtggacctggcaagtcaacaggatttatgaatagcctcaccatgaatttggtcatcctgaggggaaggaaaaccccaaattaattttggagcagaagatcagtgtaactactaccatccttacgtcttctcaatgagcttcattattcctcccagagtggctagagtaggtagttgatgagcatttgtggaatggataggtatctcttttctatgacctactctatcaccctcaggatctattaatcctttgagtttgatctctaaggtggcaatgaaatatttcttayaccagaaatacactgaaactcagagaaagagggctcaaatttgaggagagtgctatactggcaagaggatgccccaggtaa

SEQ ID NO: 163242 - DNA, 603 bp, Homo sapiens
tgtcagttcctgcattgttttatcatgatttttagcttccttccrttgggtttcaacatactcctgtacttcaatgatcttcattccaatccatattttgaattctatttctgtcatttcagccatctcagcctggtttagaagcttgctttagaagggacgcggttgtttggaggaaaaaaggcactctggccttttgagttttcagggttcttgtgctgattctttctcatctttgtggacttttctacctttaatgtttgaggttgctgacatttgaatgtttttttttttccttttatcctatttgatgaccttgagggtttgattgtggtattaggtggattcagctgattggcttcatttctggaagattttaggggtccaacactcagctcccaacttctggactgtgtgcactaactctgggggacttgtatgaggcccaaactttgtcttctcactcttcaagttttggaatccactcagctaggggtgctgagatgggacagctgcagtgaagtgctagtgggtgtgggggtgcctgcctccttgcagatgttcaccagagtggcagaggcaatgcagcttacagaggtgggc

SEQ ID NO: 163243 - DNA, 603 bp, Homo sapiens
tgtcagttcctgcattgttttatcatgatttttagcttccttccattgggtttcaacatactcctgtacttcaatgatcttcattccaatccatattttgaattctatttctgtcatttcagccatctcagcctggtttagaagcttgctttagaagggacgcggttgtttggaggaaaaaaggcactctggccttttgagttttcagggttcttgtgctgattctttctcatctttgtggacttttctacctttaatgtttgaggttgctgacatttgaatgtttttttttttccttttatcctatttgatgaccttgagggtttgattgtggtattaggtggattcagctgattggcttcatttctggaagattttaggggtccaacactcagctcccaacttctggactgtgtgcactaactctgggggacttgtatgaggcccaaactttgtcttctcaytcttcaagttttggaatccactcagctaggggtgctgagatgggacagctgcagtgaagtgctagtgggtgtgggggtgcctgcctccttgcagatgttcaccagagtggcagaggcaatgcagcttacagaggtgggc

SEQ ID NO: 163244 - DNA, 530 bp, Homo sapiens
caaaataaaatagaaaggttagggaytagttgaattagtcagaactgttgagattccaagagaaaaacaaaattcacattttctgtgttgatctattattgcaaggtgcattagtcagctattgctacagtaatgctaccgaacaatcaactacaaaataccaatgacatttgcttcttgctcatagtcctactaatgggtcagaatagtgctgcttcaggctgcaggttgccttcatgcttgttcttcatgtttctccttcttggaccagtgatctcccagggcgtgtccttgtggcacagtttacaactcccaatgtggcaagtagaaatgttcaatactttgtaaggcctcagtttataaagcagtatcatttgtgcccacattctgttagccacagcacataatgtgactaaacccaatatcactgagggaggagagcatgaggaagaaaaggatggtgaatatatgctgcaatgcctaaaacataatgtaaatatagatagcattggatttgacccataagccat

SEQ ID NO: 163245 - DNA, 530 bp, Homo sapiens
caaaataaaatagaaaggttagggattagttgaattagtcagaactgttgagattccaagagaaaaacaaaattcacattttctgtgttgatctattattgcaaggtgcattagtcagctattgctacagtaatgctaccgaacaatcaactacaaaataccaatgacatttgcttcttgctcatagtcctactaatgggtcagaatagtgctgcttcaggctgcaggttgccttcatgcttgttcttcatgtttctccttcttggaccartgatctcccagggcgtgtccttgtggcacagtttacaactcccaatgtggcaagtagaaatgttcaatactttgtaaggcctcagtttataaagcagtatcatttgtgcccacattctgttagccacagcacataatgtgactaaacccaatatcactgagggaggagagcatgaggaagaaaaggatggtgaatatatgctgcaatgcctaaaacataatgtaaatatagatagcattggatttgacccataagccat

SEQ ID NO: 163246 - DNA, 530 bp, Homo sapiens
ttgaataggcaaaataaaatagaaaggttagggattagttgaattagtcagaactgttgagattccaagagaaaaacaaaattcacattttctgtgttgatctattattgcaaggtgcattagtcagctattgctacagtaatgctaccgaacaatcaactacaaaataccaatgacatttgcttcttgctcatagtcctactaatgggtcagaatagtgctgcttcaggctgcaggttgccttcatgcttgttcttcatgtttctccttcttggaccagtgatctcccagggcgtgtccttgtggcacagtttacaactcccaatgtggcaagtagaaatgttcaatactttgtaaggcctcagtttataaagcagtatcatttgtgcccacattctgttagccacagcacataatrtgactaaacccaatatcactgagggaggagagcatgaggaagaaaaggatggtgaatatatgctgcaatgcctaaaacataatgtaaatatagatagcattggatttgaccc

SEQ ID NO: 163247 - DNA, 594 bp, Homo sapiens
tgacaggacaatccatctgccacccgtgggaatggtagaaaataagggatattcatggaaggctgcttttgtrcagtctcacaaacagcagcccttagacctaagaggacattgcctatcagtcttctcagtgtagaggaagaactgtcagggccagggagtttgggatgagagaccacaaaaggcagagaaagaattgtcctctccccaaagtgcagatagctctagaaaggaagtaggagttgctcttaatggaccacatacagatgccctatggagacaaacaaatgacctcaagagccactggaaaacctggtctcaatgtgtagcaggatttaaaaattcatgataggaaataaagaattggtggagacagagtcttcccaatattaagcagagaaagaagttgcatgatatgcagaatagaagcagggaagaggttgacttgcccccaagacagacagtgtggccagcatataaggccatctcaaagtccacagaaaaaaaggaagcataatagggtgtagacttattggggaaaagtccactttggttaaggaaatgaaggtctccagtctttgaatggcctaggct

SEQ ID NO: 163248 - DNA, 565 bp, Homo sapiens
tacttaaaaaattatcaacaaaaagaagtccaagaccmgacagattcacagcagcattctaccagacattcaaagaattggtaccaatccttttgacactattccacaagatagagaaagaaggaaccttccctaattcgttctatgaagccagcatcaccctagtaccaaaaccaggaaaggacataaccaaaaaagaaaactacagatcaatatccttgataaacatagatggtaaaatccttaacaaaatactagctgactgaatccaacaacatatcaaaaagataatccaccatgatcaagtgggtttcataccaggggtgcagagatggtttaatgcacacaagtcaataaatgtgatacaccacataaacagaattaaaaacaaaaattccatgatcatctcaatagatgcagaaaaagcattcaacaaaatccagcatccctttatgattaaagctctcagcaaaatcagcatacaagggacatacattaatgtaataaaaactatctatgacaaacccacagccaacgtaatactgaatggggaaaagttgaaaga

SEQ ID NO: 163249 - DNA, 565 bp, Homo sapiens
tacttaaaaaattatcaacaaaaagaagtccaagacccgacagattcacagcagcattctaccagacattcaaagaattggtaccaatccttttgacactattccacaagatagagaaagaaggaaccttccctaattcgttctatgaagccagcatcaccctagtaccaaaaccaggaaaggacataaccaaaaaagaaaactacagatcaatatccttgataaacatagatggtaaaatccttaacaaaatactagctgactgaatccaacaacatatcaaaaagataatccaccatgatcaagtgggtttcataccaggggtgcagagatggtttaatgyacacaagtcaataaatgtgatacaccacataaacagaattaaaaacaaaaattccatgatcatctcaatagatgcagaaaaagcattcaacaaaatccagcatccctttatgattaaagctctcagcaaaatcagcatacaagggacatacattaatgtaataaaaactatctatgacaaacccacagccaacgtaatactgaatggggaaaagttgaaaga

SEQ ID NO: 163250 - DNA, 416 bp, Homo sapiens
actaaaatgaaatggcattgtttccatatttaccaaaaacagacaaacaaacctaatcattcctctcattttgatcagctttcatgtatattttctaggcctaatcaaaatcttctttggtgtcacaaaataatggaagagacatgtattggtttaggctcctgcagcagtagaccccaatataaggaatattagttgtttatttaggaaattcaagaaacataagtaaaggagtagggaagtgagacaggaaatggaaggatctctgaaaaaatacacatcatcaagtccgttcccacagagggaaacaggagctcagtccccattgytgggttctggaagacagtgtggaacagaccccagagttatcccaactgtgagatgaggaagctggggtgcttttcaccaactcttca

SEQ ID NO: 163251 - DNA, 391 bp, Homo sapiens
ttacatgtttggaagattattacattgtatttcatatttttgtctcatgacatgtatctataaacatgaactaatattaaaagttttttatgtttataaataaaacatgctcttaaatagttgaaagtttatcaaaatagttaatcgtttaaaatgaattttttctactctccttgatgtaattttaaaacctgttatatttaactatgatgatcattaaaacaagtcagttattatttttcaaatgtaattatttcwaaattctttagataaataaaattctgcagaactttgttgtttaaaatatatgcttattgaaatgctatttttatgtagtatcaagctgtgtaaaacttacatgtactaaatatcacaaagaaaatgaatgtta

SEQ ID NO: 163252 - DNA, 535 bp, Homo sapiens
taatttctaatattcaggttcaacttcaaaaaaagtttaagtattattatatttaatgacttcctgaagcatatattctctatttaagagcttaaagtggctcaactcctgggaagtcctcaatgtttaattcctcctttgaattcactgtaatacttgcaatctgccatagtagtttattatttaatattatatatctttagattaatctgtctcgtttcctcagctacagcttaagctgggtataaacaaacactataagcatgttatagaattatggggtggggcatcttttccaaattccaaagcatcccctctgttctgagctgagctcataaaagctggagctgtaagttatgtctatttttaaaactatatgaaaggaaacacattaaactcttaacactggttacctcaggaagattagaggaaacacttttactttacctacttctrtactgtgatgcatatatgccaaagtgattaaaaaacttaagattttaaactttttcaagttttgaaaaaaattgaaata

SEQ ID NO: 163253 - DNA, 593 bp, Homo sapiens
attgtgattagaattgttaatagctcaatgtgaggataaaatacaaaaaagataaaagacacaagtctaagataataaaaagccatagttcaccagagattagattccccatattgcagattttgctatgtagcctttagttaggcatgagacatcactaaatgtatcccatttacttgttatgatggtctatttaggaaaagagaaagctatagtactttgatattttaccagttatactccagtctgggaataaactttctccaaggaaggtaaattatttcaaygttcaattgataaaaagatggttttctaaaatgtgcagttaattatccacttgctttcaaaacaatgaattccctttggctcaagtttgcatcaagatcactttatattttattatcacatcatcaatctccttttgttctctatctcatgaatcccatctatgcattaactttcatgacaatattccagttttaactcagtcatattttctgttggtatgattgtaaatttagaatatacttatgctatttattttcacaaaaattccacataaataggaaaaaaatcagggagatttttgtggg

SEQ ID NO: 163254 - DNA, 550 bp, Homo sapiens
aaataatatttgttgatttcaaaacacatcacagaagcataagcctttgaaaataaagatgcataatcaaggtataaaatattcttaatgccttgctaattatgtttagaagcacagaagcttaataaattcaaaatagcatgagaaatagaagtgcaattccatcagtcaaaataaagaatgggttcaaagtgtttaaacttcaaaagcactataagatgcagtagtcttatagacatcattaaatcacagatattggagagctcattagattagatttctttaaaggactttaaattcaggcatgattattactatgagcaaagtgaagagagttaatatattagccctaagaggttaataacttatcagccaaatctcttataaagtggatttgttaggtaaaaatctaataactttgaatacaacttaaacaaataaataagtttaaattaaaatggaataattttaasaagaccaagaaatgtaattagaattggaatgccaaatcatcaatagctactgttcatcgagtagtttatatgtggca

SEQ ID NO: 163255 - DNA, 583 bp, Homo sapiens
gcacttctacagaaaacgacctgagactggcttatttatttaaaaaaaaaaaaaaaaggtttaatgagctcacagttatgcaggctgtacatgaagcatgatgtacatagaaatttacaatcakggagaaaggtgaagaggaaggagacacatcttcacatggccagagcaggaaaaagagaagggggaggtactacaaactttaaaaaaaaaatcagatcccatgagaactcactatcatgagaacagcaaagggaaaggccgcccccatgatctaatcacctcccaccaggcctctccttcaacactgagggttacaattcaaaatgagattttggtggggacagaaatccaaaccatatcaatatcaataaatagtattcaataaaatataaacaatatttaaacattattagttgtaattaccaatacagtaaatagagagacagaaatagtaatttagactatttagaacttctataatagttttaaatataaaggcatcctgaaagcaaaaagtttaagggcttctggttaatatattaaaatattcctatacaattattaagcacttaatgtataa

SEQ ID NO: 163256 - DNA, 583 bp, Homo sapiens
gcacttctacagaaaacgacctgagactggcttatttatttaaaaaaaaaaaaaaaaggtttaatgagctcacagttatgcaggctgtacatgaagcatgatgtacatagaaatttacaatcagggagaaaggtgaagaggaaggagacacatcttcacatggccagagcaggaaaaagagaagggggaggtactacaaactttaaaaaaaaaatcagatcccatgagaactcactatcatgagaacagcaaagggaaaggccgcccccatgatctaatcacctcccaccaggcctctccttcaacactgagggttacaattcaaaatgagatttkggtggggacagaaatccaaaccatatcaatatcaataaatagtattcaataaaatataaacaatatttaaacattattagttgtaattaccaatacagtaaatagagagacagaaatagtaatttagactatttagaacttctataatagttttaaatataaaggcatcctgaaagcaaaaagtttaagggcttctggttaatatattaaaatattcctatacaattattaagcacttaatgtataa

SEQ ID NO: 163257 - DNA, 548 bp, Homo sapiens
cataaatactaagcagtcactcagccaaaatcaggggatggacattggccttgctttttctgtgtgtagacatgattacaaaacaaaatgttgattcagtatggtcacagaatggccttgtctgtcgttgatgttctgtgacttatgtccaacagaacaccatgtcttgcctgtggatgtgaggcaaactcctggatattagaggctgcttttctctttctcagatatcatgggattcctgaaagtgtcaatccttctgaggtccatgaaccatatttacatatataacaaatattttcaatggtgcagcaaartatttctgactccaatatactctttttattcatattttggcttttttcggggtgcttaaagtgattagactgcaagaactctaaaatcacattgaaaagtgtgaaagaaaccttagaaagggatcaagttgttttgagatacatgctttataaaactatggagatgtataaatttacaaaacactacagaggtagagaagcaagaggataattaatactaaggaaaatagcaga

SEQ ID NO: 163258 - DNA, 406 bp, Homo sapiens
atgtgcataactaaaagggagccaagtgctaacaaccaagacagtagaaaaatggcctcaaagtcatttcagagacccttgtggcagcccctcctatcacaggcctggagtcctaggaggaagaaacagttttatgggtcaggcccatgggcctgatgtgctgcacagcctcgggccactgcttccagcatcctgactgctctgwctccagccttggctcaaagggccccatttacaactgtggctgcttcttcagagggtgcaagcagtaagccatggtggctttcaggtattgttaagcttgcaagagcacagaatgcaaaagtgaagaagcagcctctacctagatttcagaggttatgtggaaaagcctgtgtctacagatggaatcctgctgtaatggtgg

SEQ ID NO: 163259 - DNA, 586 bp, Homo sapiens
aaaactaattgcttaatataaataaaaattttatggattgccttccattttcctaggtactgtgttaaaagtggcaacagaaagataaatacatcttagyatcttcttttaatatttcataatatcgtgatgtgaatttgtaaatacataatcttaacatgccaaaatttttgctaaatgcatgttttggtatgtgtggatactgacacaactatggggacaaggacattttcaaatatacattttggggttcacagctatactaataaaatgtaccagcaaacactaaacaattcttggtacaattcaagttgctgaatgaaaaaaaatataagtatcttttaatctcctaatataataaattttacactgtgaaattacatcagatatgatcaatctctattattttatatagaatatacacacacacagacacacatagactgctctagatctagcattaaaataggaacaagaaattaacatggctaaaaagatcatagacatggatcataattgatgtaatctcacagtgtaaaatttattagcagattaaaagatatttataatagtatatatatatata

SEQ ID NO: 163260 - DNA, 586 bp, Homo sapiens
aaaactaattgcttaatataaataaaaattttatggattgccttccattttcctaggtactgtgttaaaagtggcaacagaaagataaatacatcttagcatcttcttttaatatttcataatatcgtgatgtgaatttgtaaatacataatcttaacatrccaaaatttttgctaaatgcatgttttggtatgtgtggatactgacacaactatggggacaaggacattttcaaatatacattttggggttcacagctatactaataaaatgtaccagcaaacactaaacaattcttggtacaattcaagttgctgaatgaaaaaaaatataagtatcttttaatctcctaatataataaattttacactgtgaaattacatcagatatgatcaatctctattattttatatagaatatacacacacacagacacacatagactgctctagatctagcattaaaataggaacaagaaattaacatggctaaaaagatcatagacatggatcataattgatgtaatctcacagtgtaaaatttattagcagattaaaagatatttataatagtatatatatatata

SEQ ID NO: 163261 - DNA, 586 bp, Homo sapiens
aaaactaattgcttaatataaataaaaattttatggattgccttccattttcctaggtactgtgttaaaagtggcaacagaaagataaatacatcttagcatcttcttttaatatttcataatatcgtgatgtgaatttgtaaatacataatcttaacatgccaaaatttttgctaaatgcatgttttggtatgtgtggatactgacacaactatggggacaaggacattttcaaatayacattttggggttcacagctatactaataaaatgtaccagcaaacactaaacaattcttggtacaattcaagttgctgaatgaaaaaaaatataagtatcttttaatctcctaatataataaattttacactgtgaaattacatcagatatgatcaatctctattattttatatagaatatacacacacacagacacacatagactgctctagatctagcattaaaataggaacaagaaattaacatggctaaaaagatcatagacatggatcataattgatgtaatctcacagtgtaaaatttattagcagattaaaagatatttataatagtatatatatatata

SEQ ID NO: 163262 - DNA, 619 bp, Homo sapiens
tttcaaactcatcctatgaagtcagcattaccctgataccaaaaccaaagatatacacacacaaaaataaaactagagaccaaaatccccrtgaacatggatgaaaaaatcctcagcaaaatatgagtaaactgaattcaataacatatcaaaagtgtcattcaccataacaaagtggtattcatctcaggtatgctaggatggttcaacatatgcaaatcaataaacatgatacaccacattaacagaaatggaggacaataatcatacagtcatcttaataaatgcaaagaaagcatttaatacaactgaaaatctcttcataataaaaccctaaacaatttaggcataaaagaaacagacctcaacacaatacagtcaatacataagaaaccatcaactagcatcatactgaatggaaaaaaagttgaaagctttttctctaaaacttgggaacaaaacaaggatgcccagtttcaccaattttattcaacatagtactgaaagtccttgcccgataaattcagtaagaaaaatataaaaatttcatccatattggaagggaggaagtcaaattgctcttttttgtagatgacataatcttagatgtattcaatcc

SEQ ID NO: 163263 - DNA, 572 bp, Homo sapiens
aactaatgtacacttatcacatggtttacagtttctgtgaattctgtgtttatgaaaacgttaagtcctgtgagagattttcaatccccaattgttttggctgtctacatatgcaaagtcttgtcttaatttaataaggaattgaaatttacagcaaagcctgtttacacagcatttaaaacagtatagatcaactggtttctgcagtctttgaaaaaagaaaaaaactaaaataaaatcagtatttaatacttagtgaaattctgttaaactatttaaaattatgatcgctgttaatgtatcaaaaagcaaaaccaatatactagtatgatacattagaaagagaataggctttggggtcaggctggctttttccctgactagctatgtaaccttggacaatttatctaccctgttctttggcaaaatgttcctaataccacttaactgtagagtcaggagggttaaacaggatcctgttttctatgtcttagaccaagagtttgcacacttttcctgtaaagggccagaaagtaaawatgctttgtaggcctgggttctctgtcacagct

SEQ ID NO: 163264 - DNA, 620 bp, Homo sapiens
ggactacattagaacttaaaatttctgttctgtgaaagacaatgggaagtgaataagaagaaaagctgcagacttggagaaaatatttgcaaaagatatatgtaataaaggactgttatctaacatagtcatagaactcttaaaactcaacaataagaaacaactggattgaaaaagacctgaagggcaaaagacctgaaggaacacctcactaaagaagatatacagatgacaagtaagtatatgaaaaggtgttcaatatcatgtgtcattagggaattgcaaattaaagcaataatgagataccattacacatctattagaatggccaaaatcgaaaacactgacaccaccaaatgctagtgaaggtgtggagmaacaggaactctcattcattgatagtgggaatgcaaaatgccacttcaaaagacagtttggtagtgtctcacaaaactaaacatagtcttactatatgatgcagcaagcatgtcccttggtatttgcctaatgaattgaaaacttatgttcacacaaaaacttgcacacaaatgtttatagcatctttattcataattgacaacatttggaagcaaccgtgactccttcaataggtgaataga

SEQ ID NO: 163265 - DNA, 562 bp, Homo sapiens
tgtgaacatatttggaggtggggcctgtaattaggttatgagggcagagccctagtgaatgggattagtgcctctttataaaagactccaaggggctctcttgctccttttgccccttccaccatrtgaaatgacaatgagaagatggcagtgtatggacaaggaaattgatcctcacccgataatgaatctgcaattaatcttagactctccagcctccaacatgctgagaaataaatttctgttgtttataagccaccttgtctatggcattttgttatagcagcccaaatggactaaggctgcctccttgatgtttaggctattagatggcttctcttgggctcttactgttctgccattattaatcccttccctgtccagtccgttggaccacatgcagattcagcccaaatcaagtcctgattcaaaggtatcaaggctcagtgatgtgctatgagcttttccctcaacctggtttgctggccatctgctcaggctcctagtttctaattgtcactgttcttttctatggcattggagtctagattctagccttaag

SEQ ID NO: 163266 - DNA, 562 bp, Homo sapiens
tgtgaacatatttggaggtggggcctgtaattaggttatgagggcagagccctagtgaatgggattagtgcctctttataaaagactccaaggggctctcttgctccttttgccccttccaccatatgaaatgacaatgagaagatggcagtgtatggacaaggaaattgaycctcacccgataatgaatctgcaattaatcttagactctccagcctccaacatgctgagaaataaatttctgttgtttataagccaccttgtctatggcattttgttatagcagcccaaatggactaaggctgcctccttgatgtttaggctattagatggcttctcttgggctcttactgttctgccattattaatcccttccctgtccagtccgttggaccacatgcagattcagcccaaatcaagtcctgattcaaaggtatcaaggctcagtgatgtgctatgagcttttccctcaacctggtttgctggccatctgctcaggctcctagtttctaattgtcactgttcttttctatggcattggagtctagattctagccttaag

SEQ ID NO: 163267 - DNA, 587 bp, Homo sapiens
tgtgggttgaataatctgaagaaaattcagcctcacacagacatgcagttggaaaaggcaggcatatttttataccagtttcagataatggtggattttcttatttgatattatgatgatgatggacaagtggtagtttctgaaaagttagtgcaatgcgttgaatctgaaaccaggtcagtgaagttttcacacgttgctgtattaaaatccatgatagcatcttgcattttgaaagaatccctgtatccatgcataatttkgttaacatcatatgttggtcatagtggaagaatattggttcactgagttaggcagatctcccagaatctgtgacacgttttcaattatacatataccaaagaaatcatattatggtaatatttccatgcacctcatcagaaaagtctttcggtattagaagctgtcaagctcacagtgctggacacatgttttttaaaatcctgattttcacttgaaagcttgaattttattattagtgacaattattgtcagctattctccttgaagtgacaggctttccttgtttatttttgagcaaatagttgtcaaatacccaggtttga

SEQ ID NO: 163268 - DNA, 587 bp, Homo sapiens
tgtgggttgaataatctgaagaaaattcagcctcacacagacatgcagttggaaaaggcaggcatatttttataccagtttcagataatggtggattttcttatttgatattatgatgatgatggacaagtggtagtttctgaaaagttagtgcaatgcgttgaatctgaaaccaggtcagtgaagttttcacacgttgctgtattaaaatccatgatagcatcttgcattttgaaagaatccctgtatccatgcataatttggttaacatcatatgttggtcatagtggaagaatattggttcactgagttaggcagatctcccagaatctgtgacacgttttcaattatacatataccaaagaaatcatattatggtaatatttccatgcacctcatcagaaaagtctttcggtattagaagctgtcaagctcacagtgctggacacatgttttttaaaatcctgattttcacttgaaagyttgaattttattattagtgacaattattgtcagctattctccttgaagtgacaggctttccttgtttatttttgagcaaatagttgtcaaatacccaggtttga

SEQ ID NO: 163269 - DNA, 296 bp, Homo sapiens
actaatgaaactgctttgtcaagcatgcagtgtgcttgacgaaacaattccgttktaagacttattttcaagtacctgcctttcaaataaaattatcctctggactcacatttcttctagttttcctagctaagtggaattttcttctaaacagaaagctttatttcagccccttctatgactattactgtattttaatgacaagcttgcagaaaatattttttaaatgattgctttcttattatgaactgaaaacatttcttaaaacttgttctctccccaggatgatatttttt

SEQ ID NO: 163270 - DNA, 605 bp, Homo sapiens
gggctttccggagccccagtgtgatttgcacatctgatcttcatcgatcccagtatcagatgtgctgtggagaggtctcagccctgtcatttaacatatgacctgaaatgatatgagaactggagttactgctgtatgtttctgattaggaaattgcccattttgcaactctcatttcagaaagatgcctaataatgccaagagtactaaatagatattcaccaatcaccaaaaaatgtaagtttaactgactcatattcaagatgaatgtgctcagaactagacacctagagaccacctattaaaaccaggaaggctgacaaatggagatgcactctacaccccatggaaaagccctcaaagttttgtagtgatattgagaaaaattttttaataagttgaattcaataaacagttccttttcccttgtgcwgcctagttacgcactcttattttctttgtccttgctcataagctgttaagagaaattgttgagaagctgagcagaccaatacactagaccaagagccttagaggccatcagatagcttagatagataggcaatatctgctgtattattacactacttggaaatgaggagggt

SEQ ID NO: 163271 - DNA, 581 bp, Homo sapiens
tagattatgtaaatgaacaaaccagagataagttaatttttcaagtgaaaagcatgcacaatgtttattcaatgcacaatgtttattcaagcataaaggtgttttattcaggaaccgctgttttactcataacgagtgtcatagtaattmtctatattaatcttcccaaaatacattctcaatgagtaattttgtaagttttttggtttgtttgtgctaggtttattatcattatatgtatggaaatgtaattttgtgactattgaatttaacaatcaaagatcagacctgtattttgtatattgcttttttattttattttttccagttatccatttttgttaattattaaaaaacattagtccatgatcgattagggaaaaaaaaaaaaaaacctaacagccaagtaaagcaactccttcctcacagcttaagaaacaccaaggttcctgccttggggcttatggtgaggggaagcagatgatttgtctctttagtcctcaggaaccagattagtgccacatccgggtaggactgatgagtaggacacagtcctacccatagatcctgaaccatagctg

SEQ ID NO: 163272 - DNA, 547 bp, Homo sapiens
tattttaagttaaaatgtttaaaaatattttaaatctccagtaaaattggaaaacaagagtttaaagatgagaataagaacagggagacagtcctgccttggaagctaggaaataaaataatttcaaaatagaagtcagtagtcatctgtgccagatattgcagcaaggctaatatagtgaggaataaaaattgtctgttgggttgagggatagaaggccattttttgccttgagtgaaagtggtttctaatgtcttctggagccagtggtttgaaggtggatggagggtaaagaattgcaaagarcaagacacaattattctttcaggaatgttggtgctgaaagaggaggtagatagcttgagggagatgaagtgtcaaagggagagcattgtttttcctctaagatggtaaaaactgttttctatgtggataagagagaatccgtgaagaagaaaatggtgaagaaacaggaaagaaaaaatacttggattgaggcccaggagactgttgaggatatgaggactggagcatttaccgctgggtg

SEQ ID NO: 163273 - DNA, 547 bp, Homo sapiens
tattttaagttaaaatgtttaaaaatattttaaatctccagtaaaattggaaaacaagagtttaaagatgagaataagaacagggagacagtcctgccttggaagctaggaaataaaataatttcaaaatagaagtcagtagtcatctgtgccagatattgcagcaaggctaatatagtgaggaataaaaattgtctgttgggttgagggatagaaggccattttttgccttgagtgaaagtggtttctaatgtcttctggagccagtggtttgaaggtggatggagggtaaagaattgcaaagagcaagacacaattattctttcargaatgttggtgctgaaagaggaggtagatagcttgagggagatgaagtgtcaaagggagagcattgtttttcctctaagatggtaaaaactgttttctatgtggataagagagaatccgtgaagaagaaaatggtgaagaaacaggaaagaaaaaatacttggattgaggcccaggagactgttgaggatatgaggactggagcatttaccgctgggtg

SEQ ID NO: 163274 - DNA, 577 bp, Homo sapiens
tccaacacataaacttttgggggcacatccaatccatagaacctgagcttctctgtcttggcccagtgggtgcatagacaatgtgtccatgatagtagggataaaagttctgtatgggatcaaacagatttatttccagggctgatatcactctggcatctactgagtgcaccattttccaaccacagatatgacactaagctattggtggcactactcccacagggtcatcagttagacatcctaatggcaggttgattctattggattgcttccatcattaaaaggacagaacttggttctcactagaatagagatttttatcttcyctgcctgcaaagcttttgtccaaaccattatccataagctcatagaagccttattcatcatcataatattctacaacattgaatatgatcaagaaactcatttcacaacaaatcaaaggtggcaataagctcatgcacatgaaatttctaccatgatgcacacattttcatttgtccattggctgttcatatatatgctcttgtaaagtgttttttgaagtattttgctcactttttaatagtgttaa

SEQ ID NO: 163275 - DNA, 237 bp, Homo sapiens
gaattcttttttgaaaaaatgaaccactgaggacatgttgacatgttactcacatgttgttgacatgttgcccacagtgctccctatgccaggcaggtctgttttttttcttttttctttttttgagacagggtcttgtctgttgcccargctggagtgcagtagcatgaacatggctcactacagcctcaacctcctcctcctgggctcaactgatcctctggcttcagtctccca

SEQ ID NO: 163276 - DNA, 501 bp, Homo sapiens
gaggacatgttgacatgttactcacatgttgttgacatgttgcccacagtgctccctatgccaggcaggtctgttttttttcttttttctttttttgagacagggtcttgtctgttgcccaggctggagtgcagtagcatgaacatggctcactayagcctcaacctcctcctcctgggctcaactgatcctctggcttcagtctcccaaatagctggaaccacaggtgcacactcccatgcctggctaattttgttgttgttgttgtttgttgttgttgttgttgttgttttgagatggagtttttctcttatccccaggctggaatgcaatggtacaatctcggctcactgcaacctctgcctcctgagttcaagtgattctcctgcctcagcctcccaagtagctggcattacaggtgcccgccaccatatccagctaattttttgtatttttggtagagatgggatttcaccatgttggtcaggcttgttttgaatt

SEQ ID NO: 163277 - DNA, 596 bp, Homo sapiens
tctttagcacttttgagttggttatataattttttcttttagtttattaatgttgtttcacagttacataaattcatttaaaaaattaattcatttaaaatttggactattatttgattcctagatagaactttttaatcataatatattatgtactgtaggattcaattttctaataacttatttatgacttttgcatttaagattgtaaataagattaggggatttcaattcctctgggaggccactggtggtcctgatactgcagcttctgttgcatgggacctgctgtggctgcctgaatcgtagagaggatgccaggacaccaggaagctggaaatggactcagtaggctttgagaatgtggytgtgaacttcacccaggaggagtgggctttgctgggaccttcctggaagaatctctacagaaatgcaatgctggaagccttcaggaatctggtgtctgtaggaatcaaatggaaagccaggacattgaaaatctgtcccaaaatcttgggagaaagctacgaaataatatggtggagagactctgtggatgtaaagaaggagtcaatgtggagaaacccgcagccaga

SEQ ID NO: 163278 - DNA, 623 bp, Homo sapiens
tcctagatagaactttttaatcataatatattatgtactgtaggattcaattttctaataacttatttatgacttttgcatttaagattgtaaataagattaggggatttcaattcctctgggaggccactggtggtcctgatactgcagcttctgttgcatgggacctgctgtggctgcctgaatcgtagagaggatgccaggacaccaggaagctggaaatggactcagtaggctttgagaatgtggctgtgaacttcacccaggaggagtgggctttgctgggaccttcctggaagaatctctacagaaatgcaatgctggaagccttcaggaatctggtgtctgtaggaatcaaatggaaagccaggacattgaaaatctgtcccaaaatcttgggagaaagctacgaaataatatggtggagagactctgtggatgtaaagaaggagtcaatgtggagaaacccgcagccagaaagcagattgtcatctgaacaagaaaattcgtactggagtaaaaccatgcaaggcagtgtgtgtggaawagtctttgtacatcattcattccttcataggcacatgagctcactctggacacaaacaatatgagtgtggtgggga

SEQ ID NO: 163279 - DNA, 474 bp, Homo sapiens
atgttaacagatataagtctgcttcttgcactggctaatagaactaatgagtctttcagattgagcttttacaaaaatctgtgatagatttwtttttaaaaagtttactcttgtttgtgttattttattgctctattaggttttgaaaatgtaacttttgagtatgtgtatctggtgaaataatctacagttggatttctgagcacacttattcttctgaaatgatagattgctaacataattattaaagtagtttatgatgacagttaattacaagttttcatattcttgaacacttacccaaatttagaggaaatgtatttgaaaagtacttggtttcttgttgatatatattaactgtgtgtgtgtgtatatgttcacattaataaaaaatgttgcagactatggaattaattatttactgaaaacaagttttaaacacttgcacttctgtggttgaccactagatgtcat

SEQ ID NO: 163280 - DNA, 538 bp, Homo sapiens
aagggcatgttcattgcttccagttttgagcagttacaggtaaactttctataaacatttgtgtgcaggtttttgtgtagatgtaagtttgcaactcatttggataaatatcacggagcacagttactggatcatgtggtaagactagctttttaagaaactgctggccaggtgtrgtggctcatgcctgtaatcccagcactttgggaggccgaggcgggtggatcaccaggtctggagttcgagaccagtctggccaacatggtgaaaccctgtctctactagaaatacaaaaaactagccaggtgtggtggcacgcgcctgtagtcccagctacttgagaagctgaggcagaagaatcgcttgaatccaggaggcggaggttgcagtgagttgagattgtgtcactgcactccagcctgggtgacagagtgagactctgtttcaaaaacatttcaaaaacaaacaaacaaaaagaagctgccatattgtcttttaaggtgactgtaccatgttgaattcctaccagcaatgagtg

SEQ ID NO: 163281 - DNA, 538 bp, Homo sapiens
aagggcatgttcattgcttccagttttgagcagttacaggtaaactttctataaacatttgtgtgcaggtttttgtgtagatgtaagtttgcaactcatttggataaatatcacggagcacagttactggatcatgtggtaagactagctttttaagaaactgctggccaggtgtggtggctcatgcctgtaatcccagcactttgggaggccgaggcgggtggatcaccaggtctggagttcgagaccaktctggccaacatggtgaaaccctgtctctactagaaatacaaaaaactagccaggtgtggtggcacgcgcctgtagtcccagctacttgagaagctgaggcagaagaatcgcttgaatccaggaggcggaggttgcagtgagttgagattgtgtcactgcactccagcctgggtgacagagtgagactctgtttcaaaaacatttcaaaaacaaacaaacaaaaagaagctgccatattgtcttttaaggtgactgtaccatgttgaattcctaccagcaatgagtg

SEQ ID NO: 163282 - DNA, 538 bp, Homo sapiens
aagggcatgttcattgcttccagttttgagcagttacaggtaaactttctataaacatttgtgtgcaggtttttgtgtagatgtaagtttgcaactcatttggataaatatcacggagcacagttactggatcatgtggtaagactagctttttaagaaactgctggccaggtgtggtggctcatgcctgtaatcccagcactttgggaggccgaggcgggtggatcaccaggtctggagttcgagaccagtctggccaacatggtgaaaccctrtctctactagaaatacaaaaaactagccaggtgtggtggcacgcgcctgtagtcccagctacttgagaagctgaggcagaagaatcgcttgaatccaggaggcggaggttgcagtgagttgagattgtgtcactgcactccagcctgggtgacagagtgagactctgtttcaaaaacatttcaaaaacaaacaaacaaaaagaagctgccatattgtcttttaaggtgactgtaccatgttgaattcctaccagcaatgagtg

SEQ ID NO: 163283 - DNA, 387 bp, Homo sapiens
tctccacagagctgtttgggtgtccccttgacatgacacctgctttctcccagagggagtaatcccagggacagacgacaaggcagaagccacaggttttttgggkttttttttgagatggagtctcgctctgtcacccaggctggagtgcagtggcgcgatctcggctcactgcaagctccgccccccgggttcacgcgaagccacaggtcttttatgaggtagcctcagaagccacatgtcatcatttctgccatcttgtattaatcatgcagactaacttggatccagtgtgggagatgactacctaagggatgtgggctatcttgaagtctggctaccaaaaagctaaatccaaaacagcatagtaaaagggaaatggtagcc

SEQ ID NO: 163284 - DNA, 578 bp, Homo sapiens
aatttctttcttgcagttatagagactgggaagtccaagatcaaggcgctggcagatttggtgtctggggagggcctgttgcctggttcatagacaaygtcttctctctgtgccctcacgtggcagaggggccagggagctttctggggcctctttcactacaggactaatcccattcagaaccttcatgacctagtcacagccccaaagaccctgcctcctaatatcatcaacttgggggttaagatttcaacctatgaattttggcagtagacagaccatcacagctattgttattatctcattttagtcctcataataactgaagaggtgaatatagctattatcatctcactaggatatatggttatgaaggcagatattttttctgttttattcattgtgtatccctagaacccaaaatgtgcacggcatatagtagatatttaataatatctaatgaatgtccacatcccaattttgcaaagaggacaccatgacttgaagaggtggcgtattatgccatattcagtcacccggcatccaaaccatcaagctccatcagtgtggctccagga

SEQ ID NO: 163285 - DNA, 565 bp, Homo sapiens
cccaggtgctgctagccaagacaatgggataaagccctggaatgcatttcagagatctatgaggcagcccttcccatgacaggcccagaggtctacaaagaaagaacaattttatgggtgagactcagggctctgaagccaggaatgcaaggtggctgttccctgcatccccactgctccagctctatccatggctcaaagtgccacaggtacagctcatattgctgcttcagagggtgcaatccataagcttggcagcttcaacayagtgtgatattaagcctgctagtgcacagaatgcaagaataaaggaggcttggcagcttccacatagatttcagaagatgtatcagaaagcctgagtgctcaggcagaaggctgccacaaaggtagagtcccacacagatatttgaatagggcagtgccaaagggaaatgtggcattggaaccccatggaatgtccccactggaacactacccagtggagctgtgggaagaagaccactgccttccaaactgaggaatggtagatctaacagcatcatgcaatctcgtcatggaaaag

SEQ ID NO: 163286 - DNA, 565 bp, Homo sapiens
cccaggtgctgctagccaagacaatgggataaagccctggaatgcatttcagagatctatgaggcagcccttcccatgacaggcccagaggtctacaaagaaagaacaattttatgggtgagactcagggctctgaagccaggaatgcaaggtggctgttccctgcatccccactgctccagctctatccatggctcaaagtgccacaggtacagctcatattgctgcttcagagggtgcaatccataagcttggcagcttcaacacagtgtgatattaagcctgctagtgcacagaatgcaagaakaaaggaggcttggcagcttccacatagatttcagaagatgtatcagaaagcctgagtgctcaggcagaaggctgccacaaaggtagagtcccacacagatatttgaatagggcagtgccaaagggaaatgtggcattggaaccccatggaatgtccccactggaacactacccagtggagctgtgggaagaagaccactgccttccaaactgaggaatggtagatctaacagcatcatgcaatctcgtcatggaaaag

SEQ ID NO: 163287 - DNA, 565 bp, Homo sapiens
cccaggtgctgctagccaagacaatgggataaagccctggaatgcatttcagagatctatgaggcagcccttcccatgacaggcccagaggtctacaaagaaagaacaattttatgggtgagactcagggctctgaagccaggaatgcaaggtggctgttccctgcatccccactgctccagctctatccatggctcaaagtgccacaggtacagctcatattgctgcttcagagggtgcaatccataagcttggcagcttcaacacagtgtgatattaagcctgctagtgcacagaatgcaagaataaaggaggcttggcagcttccacatagatttcagaagatgtatcagaaagcytgagtgctcaggcagaaggctgccacaaaggtagagtcccacacagatatttgaatagggcagtgccaaagggaaatgtggcattggaaccccatggaatgtccccactggaacactacccagtggagctgtgggaagaagaccactgccttccaaactgaggaatggtagatctaacagcatcatgcaatctcgtcatggaaaag

SEQ ID NO: 163288 - DNA, 540 bp, Homo sapiens
aatataaaacttttacattttgtgacctccttaattataatttatttgccattattttaatggcaaaaaccacaattacttttgcaccaacctatatggaacaatcttaaatactagagacattgtatttcctcagcatattactactcaattctcggcaggctttgattgcgtttttgttttttgctcaaattaagccatacagaaagtaatattttgcttagaatttaagaaaataaagtgacccttgtgatatgaacttcatgaactacacacatattatttatatttacaatttatttaaccactgtgacagcaaaaaactaaaaaatggtgcatcgttccaatcatttgccaagctaagaaagctggagtgtttgggggttgttaaatatgcaaattgataaacactccctactcatcaatgtgcttctggaaaattaaytgccccactgtttatatcttgtcattgaagagcattcgattaatttctttcctctttaaatagttggccaacacttaattatttgaaaggtatta

SEQ ID NO: 163289 - DNA, 605 bp, Homo sapiens
acatttatgttattagtgccagctgacggataagaaaaactagatttagagtgattatttaacttgcctcaaaatctgagcacttatctagtgccagcttactactcacccttgagtgtaagtttgtgctcactacacgttgaatacgacggtaagaaatcaaattgcttgcctatcttccatggaccacatttatgtttgtatccatggatggytaacagactaagaacagggaaaaaaattaagtccatgttctggcaatgcccttgtcctcaggtgtgaagcagaatcaatcagctagaataattaaaacaaagaaaacaggtatactagcaaagttttcgttgccatgcaatataactgaaaacctcagaatgtatctgcttttattatttttcacaggtatttttgtaatccaaatgaatttaaggactaatatttacttcattactcatgtttcaagcagaaagaccagaatggttttcattttatcttaaccctaaggctagaagagcacactaagacacacaaagcccagcggctgctcgagttaccttcctcgacttcaaagctgtctggatgaagagaaaagctcgacagaaact

SEQ ID NO: 163290 - DNA, 610 bp, Homo sapiens
agatgacaaacacatagatacatagaacaaactatgacttgatcgtggtagttttttattgctaagaggtcacagaaaaatccacttaatgcatgccaactaatgccaatggcaacactgtattgcaaccytgtgtcattgtatcttcgcttaattggaaccattggactttaagaaatataagcataggtcattccagagtcaagtgcagcctactgtgaggttaatgtggaatgagcagggaaagaaagagaaatcagctaagtgaagaaattctgggaaaaaagaaaatcaagatgattcctctagaatagagtctaatgaactttcagtgaacttccttatgttacccagaaattatctgctgcctgaagaaaaaggtagctaatcaacgaggcatttagaggcccttcattttaagggctgcacaaagcacttggtgaataacaggatgatctaccctttacttcaactccaaccatgcgaactcaaagtgggagggatgttttttccattttacctatgccttaggaaaaaagaaactgtaaaacttcgttaaatcatccgttattcaatggacaaagaatctagaatctgaaaaatgcaacta

SEQ ID NO: 163291 - DNA, 613 bp, Homo sapiens
gttaacataaggaatttcaaagtctaagtcagagctgcccaagtacatatacaatttatgatgaaactacatatgcaatattaaatgtttagtattcacactagaaattataaaggaaacaggtaaaatttatttcagcaacatattttatgtaattgtgtgtatatatatgtgtgtatatatatatacacacacacaccaagtaacacgatttcaagatgtaattaatgtaaaaattgacttttacattttgtttccattagttgttcaaaatcccttgtgcattttacactgaccatgctttcctgttctgaagagcccactttgaatgttccatagtctcctgtgacctcctggctactctggtagacaccaaccttcagctagtcccttagatttcgctttcatagtgacttttttcatttcctttwcgtgtagaagactcttttgcatattcactgaatacatttacctgcagtctgattaacaaacacatacttctgctaataatcactctgggctccgagatacaacatactgtgtattctgacaccaaactgctactcacaatgataaagggaggtgagtgtggaagctaataatgcaactttgg

SEQ ID NO: 163292 - DNA, 460 bp, Homo sapiens
gccaataatatatgtctaaagaatattcaaatttaaaagctttctattgattgggaaattaatgggttttaattctcacaggattagtcagtagcatattaggcatttaggaaatgccatggactcttctagccacaaaggtatcataaagtcagctgagaattttaatctcatttgtgcagcagacatgtcctcgattcaccttcatgttgatttcactaggaaaccagcacagaagtttataaggattagaagaattatcttcacrtgccaaaggctggtatatttgcattccttttcaagcaaatagtactctaaaaatagtgcatataacaatagataattacatagatttattagaatgcactttgtggttcactgatgttgcagcctatgactattgcagacatcctgtgtgagccattaagatgcttagatctcatgccagtcagaatgatgc

SEQ ID NO: 163293 - DNA, 464 bp, Homo sapiens
tcctgcttgccaataatatatgtctaaagaatattcaaatttaaaagctttctattgattgggaaattaatgggttttaattctcacaggattagtcagtagcatattaggcatttaggaaatgccatggactcttctagccacaaaggtatcataaagtcagctgagaattttaatctcatttgtgcagcagacatgtcctcgattcaccttcatgttgatttcactaggaaaccagcacagaagtttataaggattagaagaattatcttcacgtgccaaaggctggtatatttgcattccttttcaagcaaatagtactctaaaaatagtgcatataacaatagataattacatagatttattagaatgcactttgtggttcactgatgttgcagcctrtgactattgcagacatcctgtgtgagccattaagatgcttagatctcatgccagtcagaatg

SEQ ID NO: 163294 - DNA, 501 bp, Homo sapiens
ggcaaagatctcatgacaaagactacaaaaatgattgcaggctgggcactgtggctcaygcctgtaatcacagcactttgggaggctaaggcgggtagatcacttgaggtcaggagttcgagatcagcctggccaacatggtgaaaccccatctctagtaaacatagagaacaattagctgggtgtggtggcatgtgcctgtaatcctagctattcaggaggctgaggcaggagaatcgcttgaacccaggaaggcggaggttgcagtgagccaagatcgcaccactgtactccaacctgggtgacagagcgagactccatctcaaacaacaacaacaacaacaaaaacaaataaacaaacaaaaaacaaaagcaattgcaacaaaaaaaaagttgacaggtgtgacttaattaaactaaagagcttctgcatggcaaaagaaactatcagcagagtaaacaaacaacctacagaatgggagaaaatatttgcaaactatg

SEQ ID NO: 163295 - DNA, 581 bp, Homo sapiens
attggccttagaactgaacttgccctttgatactgctttagatgggagatgaccagaggctacaccatgggttgaggattactctaggtcagagtgrtatctttacctttccccttcctccatatccttcaaaagcaaaaacctatctaccttcttgtttcttacaagaagtaagaatctatccagtcattctacttagaagcctgagcttcacccttaattcctctttttcttcatcccgtcatccaatttgttttagatctctttactctacatctgaaatgaatttctctcccagtgtctccactaccttccccatttagatcctctttgtcttttatttggattgctgcagtgaccctaactgatctgctgtcactgtccttcacctccccagtccatccactacactgcagccaattacctttggaaagagcaaactagatcatgtcaatgcctgcttaagcaaaagtcaaagaatacacacacacaagtgcacacacacacacacacatacacacacatacaataaagaataatgccaaaatctttatcaaggcactcaagggcctccaaaatct

SEQ ID NO: 163296 - DNA, 581 bp, Homo sapiens
attggccttagaactgaacttgccctttgatactgctttagatgggagatgaccagaggctacaccatgggttgaggattactctaggtcagagtgatatctttacctttccccttcctccatatccttcaaaagcaaaaacctrtctaccttcttgtttcttacaagaagtaagaatctatccagtcattctacttagaagcctgagcttcacccttaattcctctttttcttcatcccgtcatccaatttgttttagatctctttactctacatctgaaatgaatttctctcccagtgtctccactaccttccccatttagatcctctttgtcttttatttggattgctgcagtgaccctaactgatctgctgtcactgtccttcacctccccagtccatccactacactgcagccaattacctttggaaagagcaaactagatcatgtcaatgcctgcttaagcaaaagtcaaagaatacacacacacaagtgcacacacacacacacacatacacacacatacaataaagaataatgccaaaatctttatcaaggcactcaagggcctccaaaatct

SEQ ID NO: 163297 - DNA, 523 bp, Homo sapiens
ctgtcttccacaatggttgaactaatttacactcccaccaacagtgtaaaagtgttcgtatttctctacatcttcttcagcatctgttgtttcctgaatttttttttttttttttttttctgagatggagtctgtcacccaggctggagttgcagtgggacaatctcggctcactgcaacctctgcctcccagattcaagcgattctcctgcctcagcctcctgagtagccaggattacaggtgcccgccaccacacccagctaatttttgtatttttagtagagatggggtttcactatgttggccaggctrgtcttgtactcctgacctcaggtgatccacccgcctcagcctcccaaagtgctgggattacaggcatgagtcaccgcccctggcctttcctgactttttagtgatcaccattctaactggtatgagatggtatctcattgtggttctgctgtgcatttctctaatgacccatgatgataagctttttttcatatgtttgttgggcgcata

SEQ ID NO: 163298 - DNA, 523 bp, Homo sapiens
ctgtcttccacaatggttgaactaatttacactcccaccaacagtgtaaaagtgttcgtatttctctacatcttcttcagcatctgttgtttcctgaatttttttttttttttttttttctgagatggagtctgtcacccaggctggagttgcagtgggacaatctcggctcactgcaacctctgcctcccagattcaagcgattctcctgcctcagcctcctgagtagccaggattacaggtgcccgccaccacacccagctaatttttgtatttttagtagagatggggtttcactatgttggccaggctagtcttgtactcctgacctcaggtgatccacccgcctcagcctcccaaagtgctgggattacaggcatgagtcaccgcccctggcctttcctgactttttagtgatcaccattctaactggyatgagatggtatctcattgtggttctgctgtgcatttctctaatgacccatgatgataagctttttttcatatgtttgttgggcgcata

SEQ ID NO: 163299 - DNA, 539 bp, Homo sapiens
ccttcttagctaaatcttaacttactattattgctcagacctctgtctgaaaacctgggccctgcagaaacagcagctattggaagcaatactcctgtaatgacctactgtgcttatttttctagatgaagtaaattatgtctgaggtaatgtcttgcagggcgttagttaaggaaaaattcccattaggtaggcctccctacaggtatccagaattggtgtcttatcctacaatgtttattttaattttcttaatttaagctccttggattccagacctccagaccaatggtggatctgctcatcaagtcccaactcagccactcatctgtcagcttgtgcaggttttgggacaggatctgaagacctccatgacctttctasttcttggagtcatgatttctaaaatctggctggccttggtcttcttggctcccaaggtcctctactgcccaagttcctgtgtcacaaaatcaactgtttccatgtgttagaagcatacacttcatctccactagcagcagcaaagaatgatcacc

SEQ ID NO: 163300 - DNA, 600 bp, Homo sapiens
tgaagtcaaaacaaactttgttcttggatatgatttgggggttcaaatgaggagacacaattatctctttgagctttaaatatcgttttgctgacagaagacaactggctcttttcatagacatcttcccttattaaaaaaaaaaactcctaaagtgccaggaactggggtgttacattcagtaataaaatccatgtttcaaaacttggtgtgctcatggccatatgctgtagtgattaaatcagactagctggattcaaatctcatcttctgccatttaacagctgtgcgactatggacaaattatataaccttcctttgtctcagtttccccatctataaaatggggctaataataattcctcactygtacgattgttgctgtgaagattaagtgaggtgatttttgtaaagtttcataagaaatgctatagaagagttagctctcattggaaaccaaacctaatctcaactcacacccatgcaatctcccattaagatctatttacttatccaaaagaccacctaaaatgaactgcaaatctgctagaggacagaataacagctggccaaggacaaaataacctaatggttgtggaa

SEQ ID NO: 163301 - DNA, 489 bp, Homo sapiens
gagaaatgctggggagcgccatggggccaacagaacagaaggccctgttactgctcaagcagctgccaccaagcctgcgagctcaaggatgctgggctggctgagggacagatgtggcaggcatgcacgcgattcaacaatgcaacagtccctttcttgtttgtttggaaaggttgtacccgcctcgaatgctagcagcaatcacgaaggagccactaactgtggcatttcttcacaacatttcccctgcaactgcggtcaaggyggagggatggccacaaccagtcatcttttctgagtgttcctctgcaaggggtggagtggggacagcatacgttagtgggctaagaatttgcttatctaacagaaatacagcttaactaaccaagggatacatacaattgttcttacaaattctgcaacccatactgagcacttataaaggccaggccctgtgagagatactgaaaatgcaaagctgaataaggc

SEQ ID NO: 163302 - DNA, 562 bp, Homo sapiens
tgttttgcaatatttgctgttctgcagcctccgctggtgatacccaggcaaacagggtctggagtggacctccagcaaactccaacagacctgcagctgagggacctgactgttagaaggaaaactaacaaacagaaagaaatagcatcaacatcaacaaaaaggtcatccacaccaaaaacccatctgtaggtcaccatcatcaaagaccaagggtagataaaaccacaaagatggggagaaaccagagcagaaaatctgaaaattgtaaaatccagagcacctcttctcctccaaaggattgcagctcctcaccagcaacggaacaaagctggacagagaatgactttgacgagttgacagaaataggcttcagaaggtcggtaataacaaacttctctgagctaaaggaggatgtttgaacccatcgcaaggaagctaaaaaccttgaaaaaagattagacgaatggctaactagaataaacggcrtagagaagaccttaaatgacctgatggagctgaaaaccgtggcacaataactatgtgacgcatgaagaagctt

SEQ ID NO: 163303 - DNA, 562 bp, Homo sapiens
tgttttgcaatatttgctgttctgcagcctccgctggtgatacccaggcaaacagggtctggagtggacctccagcaaactccaacagacctgcagctgagggacctgactgttagaaggaaaactaacaaacagaaagaaatagcatcaacatcaacaaaaaggtcatccacaccaaaaacccatctgtaggtcaccatcatcaaagaccaagggtagataaaaccacaaagatggggagaaaccagagcagaaaatctgaaaattgtaaaatccagagcacctcttctcctccaaaggattgcagctcctcaccagcaacggaacaaagctggacagagaatgactttgacgagttgacagaaataggcttcagaaggtcggtaataacaaacttctctgagctaaaggaggatgtttgaacccatcgcaaggaagctaaaaaccttgaaaaaagattagacgaatggctaactagaataaacggcgtagagaagaccttaaatgacctgatggagctgaaaaccrtggcacaataactatgtgacgcatgaagaagctt

SEQ ID NO: 163304 - DNA, 619 bp, Homo sapiens
attccattgtagagatacagtacactttgtttatccactcacctgtctgtggacattttggtttctagttttgggctgttaagctgggatgaacgtatgtgtatgtgtgcagctttgggatgaggtgtctaacatgagccacatacttggggtggatgtactagtctttgtgtggacatatgctgtctttccttttggaaaacacttcaaagtagcatggctgggtcatactttttaacgttttaagaaactaccaaactgtcttccaaagtaaatgtgccattttctattccaaccagcaacgtatgagagttccagttgctccacatctttggcaaaacttgcaaatataaaaggaattttgtgttttgtgtttatatgtatataaatatatwaggtagtgtaaatacacatagtatataattttgtgttacagatttgtttgtatgtatatgtatatatacagtaatgcgtcacttaacaacagggatatattctgagaaatggatcactaggggatttcatcattgtgcaaatatcatacaatgtacttacacaaacttaaatggcataacttactagacacctaggctgtagactatttttctaggctacaaac

SEQ ID NO: 163305 - DNA, 619 bp, Homo sapiens
attccattgtagagatacagtacactttgtttatccactcacctgtctgtggacattttggtttctagttttgggctgttaagctgggatgaacgtatgtgtatgtgtgcagctttgggatgaggtgtctaacatgagccacatacttggggtggatgtactagtctttgtgtggacatatgctgtctttccttttggaaaacacttcaaagtagcatggctgggtcatactttttaacgttttaagaaactaccaaactgtcttccaaagtaaatgtgccattttctattccaaccagcaacgtatgagagttccagttgctccacatctttggcaaaacttgcaaatataaaaggaattttgtgttttgtgtttatatgtatataaatatattakgtagtgtaaatacacatagtatataattttgtgttacagatttgtttgtatgtatatgtatatatacagtaatgcgtcacttaacaacagggatatattctgagaaatggatcactaggggatttcatcattgtgcaaatatcatacaatgtacttacacaaacttaaatggcataacttactagacacctaggctgtagactatttttctaggctacaaac

SEQ ID NO: 163306 - DNA, 568 bp, Homo sapiens
ggcaggtaactgtaacacaatggtgtattcgtgtatctcaacatagaaaaggtacagtaaaaatatggtataaaaggtaaaagatgaatagggcacttcccatgaatggagcytgcgggactggcagttgtcctgggtaagtcagtgaatgagtggtgagtaaatgtgaaggtctaggaatcactgcacactactgtagactttagaaacactgtacagttgactacatttataaaaaatatttttctttcttcaataacaaattaaccttagcttactataaattttctactctataaacgttttgattcttttgcaatagcagcttaaaacacattgcatagctatactaaatattttctttctttatatccttatcctataagcttttttctatttttaaacttaaaaaatgttaacttcataaactctttattaaaaactaagacacaaacgtatgcattggcctaggcctacacagggtcaggaccctcaatatcactgtcttccacttctgcatctcatcccactggaaggtcttcaggggccataacacttatggagctgt

SEQ ID NO: 163307 - DNA, 568 bp, Homo sapiens
ggcaggtaactgtaacacaatggtgtattcgtgtatctcaacatagaaaaggtacagtaaaaatatggtataaaaggtaaaagatgaatagggcacttcccatgaatggagcttgcgggactggcagttgtcctgggtaagtcagtgaatgagtggtgagtaaatgtgaaggtctaggaatcactgcacactactgtagactttagaaacactgtacagttgactacatttataaaaaatatttttctttcttcaataacaaattaaccttagcttactataaattttctactctataaacgttttgattcttttgcaatagcagcttaaaacacattgcatagctatactaaatattttctttctttatatccttatcctataagcttttttctatttttaaacttaaaaaatgttaacttcataaactctttattaaaaactaagacacaaacgtatgcattggcctaggcctacacagggtcaggaccctcaatatcactgtcttccacttctgcatctcrtcccactggaaggtcttcaggggccataacacttatggagctgt

SEQ ID NO: 163308 - DNA, 626 bp, Homo sapiens
tacatgtgcaggtttgttacatgggtatatttcgtgatggtgaggtttggggtacaactgatcccatcactcaggtagtgagcctagaatccagcaggtagtttttcaacccttcccctcctctgtcccttcccctcaggaatccccagtgtctactgttgccatctttgtgtccatgagtacccagtgtttagctcctacttataagtgacaacatgcagtatttggttttctgttctctgttaattcacttaggatgatggcctctggctgcatccatactactgcaaaggacataatttcattctttttaaatgactgcatagtattccatggtgtatatgtaccacattttctttgcctaacccaccattgatgagcacctaagttgcttccatgtctttgccataaaacaaatgttcttacaccctacaggagagaggaataaaactgtctttctggaaggctctttggcagctcctttcaaaagccttgaaggtgaatatattttaaccctggacttccattcctgggaatttatctgtaggaaagaaggatgcattcagagatttagccacaaaattrgtggtggctgacggtttataatattgaaaaattggaaacaa

SEQ ID NO: 163309 - DNA, 546 bp, Homo sapiens
aaagtctttgaaatgcatagaagaaataatggcataagctgtcctctctctcygccttactgccaaacagggagggccccctgtccggtggacacgtgactcatgtgaccttatcaatcattggagatcactcacactccttaccctgccccttttgccttgtgtccagtaaataccaacacagccaggtatttggggccactataggtctccgcgtctaggtggtagtggtctcccgggcccagctgtcttttcttctctttgtcttgtgtctttatttctacgatctctcatctctgcacacgaggagaaaaatccacagaccgtgtagggctggaccctacacccgtcccgtgcggcgtgccctttgaggggaaggagctcactagatcctctgtgccttaccaccaaaggggctaaattcaagtttttttgatgatggtacattgttcttttctacttatatttttctaaaatacactaggttcttcttttggccatcttcaccttaatctcttgcccataaacctgacattaataaagatt

SEQ ID NO: 163310 - DNA, 546 bp, Homo sapiens
aaagtctttgaaatgcatagaagaaataatggcataagctgtcctctctctctgccttactgccaaacagggagggccccctgtccggtggacacgtgactcatgtgaccttatcaatcattggagatcactcacactccttaccctgccccttttgccttgtgtccagtaaataccarcacagccaggtatttggggccactataggtctccgcgtctaggtggtagtggtctcccgggcccagctgtcttttcttctctttgtcttgtgtctttatttctacgatctctcatctctgcacacgaggagaaaaatccacagaccgtgtagggctggaccctacacccgtcccgtgcggcgtgccctttgaggggaaggagctcactagatcctctgtgccttaccaccaaaggggctaaattcaagtttttttgatgatggtacattgttcttttctacttatatttttctaaaatacactaggttcttcttttggccatcttcaccttaatctcttgcccataaacctgacattaataaagatt

SEQ ID NO: 163311 - DNA, 565 bp, Homo sapiens
gaattagtgaaagtactaaaagtctttgaaatgcatagaagaaataatggcataagctgtcctctctctctgccttactgccaaacagggagggccccctgtccggtggacacgtgactcatgtgaccttatcaatcattggagatcactcacactccttaccctgccccttttgccttgtgtccagtaaataccaacacagccaggtatttggggccactataggtctccgcgtctaggtggtagtggtctcccgggccyagctgtcttttcttctctttgtcttgtgtctttatttctacgatctctcatctctgcacacgaggagaaaaatccacagaccgtgtagggctggaccctacacccgtcccgtgcggcgtgccctttgaggggaaggagctcactagatcctctgtgccttaccaccaaaggggctaaattcaagtttttttgatgatggtacattgttcttttctacttatatttttctaaaatacactaggttcttcttttggccatcttcaccttaatctcttgcccataaacctgacattaataaagatta

SEQ ID NO: 163312 - DNA, 565 bp, Homo sapiens
gaattagtgaaagtactaaaagtctttgaaatgcatagaagaaataatggcataagctgtcctctctctctgccttactgccaaacagggagggccccctgtccggtggacacgtgactcatgtgaccttatcaatcattggagatcactcacactccttaccctgccccttttgccttgtgtccagtaaataccaacacagccaggtatttggggccactataggtctccgcgtctaggtggtagtggtctcccgggcccagctgtcttttcttctctttgtcttgtgtctttatttctacgatctctcatctctgcacacgaggagaaaaatccacagaccgtgtagggctggaccctacacccgycccgtgcggcgtgccctttgaggggaaggagctcactagatcctctgtgccttaccaccaaaggggctaaattcaagtttttttgatgatggtacattgttcttttctacttatatttttctaaaatacactaggttcttcttttggccatcttcaccttaatctcttgcccataaacctgacattaataaagatta

SEQ ID NO: 163313 - DNA, 581 bp, Homo sapiens
agcgaacagccctgacatcatgtccgcgcatccttgatccgtgttcatgaacatcttttaccataacagaattcacactattcaaagcggctgtctcctgactctagtagggctgtgagaggacaaagagtgattttctgtttagtcctattcactgtaaaagttttgaagaatataaaattttacascactagtagcctatcctctctacttaacactaaatttaaatgaattctttcaaaatggaaaggaacaggagacatctcttgagatacaattcttaatatttgagcccactttctattctggaatcttctttgagtcttgaatttaaagacataagccatctttgtaaaggaatcatgtctggttctcctaagcattgatgcagttttttggctacatcaaacaggaaataaatgtaaacatcactaattgttggggtgatcagacccaacaccaggttgtgggggtgacaaagtccggcggagtcaaaggattgagaaaagacagtttgagagacagaagtgggaccaaggggccatcgcaatcatggaggctgcaaaggccccaagctctgg

SEQ ID NO: 163314 - DNA, 581 bp, Homo sapiens
agcgaacagccctgacatcatgtccgcgcatccttgatccgtgttcatgaacatcttttaccataacagaattcacactattcaaagcggctgtctcctgactctagtagggctgtgagaggacaaagagtgattttctgtttagtcctattcactgtaaaagttttgaagaatataaaattttacagcactagtagcctatcctctctacttaacactaaatttaaatgaattctttcaaaatggaaaggaacaggagacatctcttgagatacaattcttaatatttgagcccactttctattctggaatcttctttgagtcttgaatttaaagacataagccatctttgtaaaggaatcatgtctggttctcctaagcattgatgcagttttttggctacatcaaacaggaaataaatgtaaacatcactaattgttggggtgatcagacccaacaccaggttgtgggggtgacaaagtccggcrgagtcaaaggattgagaaaagacagtttgagagacagaagtgggaccaaggggccatcgcaatcatggaggctgcaaaggccccaagctctgg

SEQ ID NO: 163315 - DNA, 333 bp, Homo sapiens
tggtggcacttttgaatcactcagtagcctgaaacttactactgcccaggacgcatccatatcaattacatcagaatctcaggggtagaggctgaactggatacagtcytaaaagctccatagctaatgctaaccaatggcaaaattgagaatcactagcattgggttctttctatttcaaagttcaaagtgttggtaaattcccccaaagaagtagattgccatcttagtagccaaaaaaaaaagaaactccaatcacaaaagagtcttaaaaataagtatttgaaaggagagggggttaatgcatttcaggtgactaggcaggttctagtt

SEQ ID NO: 163316 - DNA, 609 bp, Homo sapiens
aagctttattctttctgttttcacaataaaccttgctactgcagggtccctgccatctttaagagctgtaacactcaccagcaaggtccatggcttcattctygaagaccaggaacccaccggaaggaaccaactccagacacaagaggattgttcaagcccaagagtttgatacctgcctaggcaacatatccagaccagatctctttaaaaaaaaaagagctgggcatggtggcaaacctatagtgggctagtctaggcagagatgaaggatggcttgagcttaggaggttgaggctgcagtgagtggtgattgcaccactgtaatccagcctgggcaacagcaatactgctctctaaacataaaaaattaaataaagacttagtgctaggtgctgatttctggcaagttccaggtgggagactggcaggcagcattatagtcctctaagagaattcaaaccctaatttctgggactatgaatctgttactttacaaggcaaaagagccttgtggacaggtttctaatcagttgactttaaaatagggaggttatcctggatttatctgggttggcctggtggaatcacccttaacccctaaagagc

SEQ ID NO: 163317 - DNA, 609 bp, Homo sapiens
aagctttattctttctgttttcacaataaaccttgctactgcagggtccctgccatctttaagagctgtaacactcaccagcaaggtccatggcttcattctcgaagaccaggaacccaccggaaggaaccaactccagacacaagaggattgtycaagcccaagagtttgatacctgcctaggcaacatatccagaccagatctctttaaaaaaaaaagagctgggcatggtggcaaacctatagtgggctagtctaggcagagatgaaggatggcttgagcttaggaggttgaggctgcagtgagtggtgattgcaccactgtaatccagcctgggcaacagcaatactgctctctaaacataaaaaattaaataaagacttagtgctaggtgctgatttctggcaagttccaggtgggagactggcaggcagcattatagtcctctaagagaattcaaaccctaatttctgggactatgaatctgttactttacaaggcaaaagagccttgtggacaggtttctaatcagttgactttaaaatagggaggttatcctggatttatctgggttggcctggtggaatcacccttaacccctaaagagc

SEQ ID NO: 163318 - DNA, 609 bp, Homo sapiens
aagctttattctttctgttttcacaataaaccttgctactgcagggtccctgccatctttaagagctgtaacactcaccagcaaggtccatggcttcattctcgaagaccaggaacccaccggaaggaaccaactccagacacaagaggattgttcaagcccaagagtttgatacctgcctaggcaacatatccagaccagatctctttaaaaaaaaaagagctgggcatggtggcaaacctatagtkggctagtctaggcagagatgaaggatggcttgagcttaggaggttgaggctgcagtgagtggtgattgcaccactgtaatccagcctgggcaacagcaatactgctctctaaacataaaaaattaaataaagacttagtgctaggtgctgatttctggcaagttccaggtgggagactggcaggcagcattatagtcctctaagagaattcaaaccctaatttctgggactatgaatctgttactttacaaggcaaaagagccttgtggacaggtttctaatcagttgactttaaaatagggaggttatcctggatttatctgggttggcctggtggaatcacccttaacccctaaagagc

SEQ ID NO: 163319 - DNA, 408 bp, Homo sapiens
atgagatggggaaagtgggctcaagaggtctggatctgtggtgagatggggraagtgggctcaggaggtctggatctgtgatgagatggggaaagtgggctcaggaggtctggatctgtgatgagatggggaaagtgggctcaggaggtctggatctgtgatgagatgggggaagtgggctcaggaggtctggatctgtgatgagatgggggaagtgggctcaggaggtctggatctgtgatgagatgggggaagtgggctcaggaggtctggatctgtgatgagatggggaaagtgggctcaggaggtctggatctgtgatgagatgggggaagtgggctcaggaggtctggatctgtgatgagatggggaaagtgggctcaggaggtctggatctgtgatgagatc

SEQ ID NO: 163320 - DNA, 408 bp, Homo sapiens
atgagatggggaaagtgggctcaagaggtctggatctgtggtgagatgggggaagtgggctcaggaggtctggatctgtgatgagatggggaaagtgggctcaggaggtctggatctgtgatgagatggggraagtgggctcaggaggtctggatctgtgatgagatgggggaagtgggctcaggaggtctggatctgtgatgagatgggggaagtgggctcaggaggtctggatctgtgatgagatgggggaagtgggctcaggaggtctggatctgtgatgagatggggaaagtgggctcaggaggtctggatctgtgatgagatgggggaagtgggctcaggaggtctggatctgtgatgagatggggaaagtgggctcaggaggtctggatctgtgatgagatc

SEQ ID NO: 163321 - DNA, 408 bp, Homo sapiens
atgagatggggaaagtgggctcaagaggtctggatctgtggtgagatgggggaagtgggctcaggaggtctggatctgtgatgagatggggaaagtgggctcaggaggtctggatctgtgatgagatggggaaagtgggctcaggaggtctggatctgtgatgagatgggggaagtgggctcaggaggtctggatctgtgatgagatgggggaagtgggctcaggaggtctggatctgtgatgagatggggraagtgggctcaggaggtctggatctgtgatgagatggggaaagtgggctcaggaggtctggatctgtgatgagatgggggaagtgggctcaggaggtctggatctgtgatgagatggggaaagtgggctcaggaggtctggatctgtgatgagatc

SEQ ID NO: 163322 - DNA, 408 bp, Homo sapiens
atgagatggggaaagtgggctcaagaggtctggatctgtggtgagatgggggaagtgggctcaggaggtctggatctgtgatgagatggggaaagtgggctcaggaggtctggatctgtgatgagatggggaaagtgggctcaggaggtctggatctgtgatgagatgggggaagtgggctcaggaggtctggatctgtgatgagatgggggaagtgggctcaggaggtctggatctgtgatgagatgggggaagtgggctcaggaggtctggatctgtgatgagatggggaaagtgggctcaggaggtctggatctgtgatgagatgggggaagtgggctcaggaggtctggatctgtgatgagatsgggaaagtgggctcaggaggtctggatctgtgatgagatc

SEQ ID NO: 163323 - DNA, 645 bp, Homo sapiens
ttggatgcatatatatttagaagagttaagtcttcttgttgaattgaacactttaccattatgtaatgcccttctttgtattttttgattgttgttgacttaaagtctgttttgtctgaaattagaatagcagcccctgctawttttttgtttgtttgttttgtttttgttttctgtttacttggtagattttcctccatcccgttactttgagcctatctgtgtcattgcatgtgtgagatgggtctcttgaagatggcatacagttgggtcttgtttgtttgtttgtttgtttttaattttttgagaccgttctgtctctttcacccatgctggaatgcagtggcacaattatggcttactgaagcctcaatctcctgagttcaggtgatctttacacttcaacttctggagtagctgggactacaagtgcaggccaccgtgcctaactaattttatattttttatagagatgagtttttcccatgttgcccaggctggtctcgaacacctgggcttaagcgatctgcccaccttggtctcccaaagtgctgggattacagacatgagccattgcacccaagtgggtctcgcttctttattcaacttgccactctgtgcatttcaattggggcatttagccca

SEQ ID NO: 163324 - DNA, 421 bp, Homo sapiens
ctgtagtcaatgttcggttcctcgaaaggtcttgctgctgtcaggtgttatacactccatccatcataactgtatgaaacacatttcatatgtaaataaacgtgggacatttgaaaaaaatattttgttctatgtagttgaaaatcattggctaagttcattataacctcctttctgcatcttaccctcatccacacccttacagcctttcattaattgtaaattcttatgtctrtattttccatatctacttagtactactttttggaatgaatcttttatgccctgctctggtcaataatcttgggtgaaatgagaacacaaagccagagagaccaggtttctgtagttctctaacatcggatgctaatacaaattctgctgtgcagtgcccaggcattgccacccctctggagagaat

SEQ ID NO: 163325 - DNA, 402 bp, Homo sapiens
tttacaagctgagagcaagtgggttctctccactggcttccctcctcttcctccctgagcccctctctagggaagcctgcccagctcagcccagccacacctgttctgcaccgccaggaaccctctgggaaacactcaggaatttaacttcagaaaaagaaagtaaattttgattgttaagttgttaaataacctaaccaattccaactctctgctaatatcaccaacacacagctttaattgtgatgaggtgcaactatcatctatcaattaatcaatctatatttatcatttctcaaataatcaatcaattatctatcatctatcaatcatctatgcaycaaacgatgtacttacaacaattattaatgcttacctagtatccctctaggttgataagct

SEQ ID NO: 163326 - DNA, 213 bp, Homo sapiens
aagttacctgtcagaacctcaaagccaggggcggtttcaggcccgtttctgaaactcagacctgacctgatactcagacctctcccagattccaagggagggcagctagggctgcaggcgagcaattatgtggccccactgtgggccaggccctgttcttggcctcttcccacrtgcaaccctgcctagcggtgtcctctttgtgaatgcagg

SEQ ID NO: 163327 - DNA, 500 bp, Homo sapiens
catctactacctctagcgtccctcaagagtttgctgcgcacaaatacaaaatcaagtcgtcctggtttctcggtgtctttcctgatgctgttttagatgagtaatgcctgcttgctttgcctaggctcagggcactgtgctcctaggactagtggccacaaccttgtcctgctgaaggcccgcaggaagcccttgggacacgagcacttccactgtctggtgctcttgaactggttattttagggagatagggtgtgtccagctatgggctggtctctgtggggctgtgacaattcaaagtgacagtaaasggactcagtgttaaaaggttctctgtgccaggggtgcctggtggcagaggctgagatggatgggtcccaacccatcagccctgccttacctgtgctctctagctacgccctcatccatctgaagcatgtgggttgaagggggaggcaagtaaggctatccatgcacaaggctgccccaccctgtggtct

SEQ ID NO: 163328 - DNA, 500 bp, Homo sapiens
catctactacctctagcgtccctcaagagtttgctgcgcacaaatacaaaatcaagtcgtcctggtttctcggtgtctttcctgatgctgttttagatgagtaatgcctgcttgctttgcctaggctcagggcactgtgctcctaggactagtggccacaaccttgtcctgctgaaggcccgcaggaagcccttgggacacgagcacttccactgtctggtgctcttgaactggttattttagggagatagggtgtgtccagctatgggctggtctctgtggggctgtgacaattcaaagtgacagtaaagggackcagtgttaaaaggttctctgtgccaggggtgcctggtggcagaggctgagatggatgggtcccaacccatcagccctgccttacctgtgctctctagctacgccctcatccatctgaagcatgtgggttgaagggggaggcaagtaaggctatccatgcacaaggctgccccaccctgtggtct

SEQ ID NO: 163329 - DNA, 539 bp, Homo sapiens
caatcatggcagaaagtgaagagaaagctggtacttcacatggctgagagcaggaggaaggtggcaggggaggtgctacccacttttaacaaccagatctcatgagaactcacttactattcagtatcaagggggtaatggtgcaaaactgttcatgagaactctgcccccataatccaatcacctcccaccaggccccacstcctacactggggattacaattcaacatgagacttaggaagggacacagatccaacccacatcagctgggatggttggaagagctgggagatgacttggcctcactctgcatagactgtcataattcagtagtctagcctgaacttatctatagggcagctggattccatgaaaataaacttagaagctgctaggcttctgaagacccagacctagaagtcaaagcaagtcatggggccagcccatatttagggggaagagaagtagactctactttttaatgaagaagctacagattcacattgcagaaggagactgaggtaagaagaattgttgt

SEQ ID NO: 163330 - DNA, 539 bp, Homo sapiens
caatcatggcagaaagtgaagagaaagctggtacttcacatggctgagagcaggaggaaggtggcaggggaggtgctacccacttttaacaaccagatctcatgagaactcacttactattcagtatcaagggggtaatggtgcaaaactgttcatgagaactctgcccccataatccaatcacctcccaccaggccccacctcctacactggggattacaattcaacatgagacttaggaagggacacagatccaamccacatcagctgggatggttggaagagctgggagatgacttggcctcactctgcatagactgtcataattcagtagtctagcctgaacttatctatagggcagctggattccatgaaaataaacttagaagctgctaggcttctgaagacccagacctagaagtcaaagcaagtcatggggccagcccatatttagggggaagagaagtagactctactttttaatgaagaagctacagattcacattgcagaaggagactgaggtaagaagaattgttgt

SEQ ID NO: 163331 - DNA, 599 bp, Homo sapiens
aatatttcagcattgaccttcacttcactcttctattttttttttttttttttttttttttttgagagggaatctcactctgtcacccaggctggagtgcaatggcacgatcttggctcactgcaacctctgcctcccaagttcaagcgattctcctgcttcggcctctcgagtagcttggactacaggtgygcgccactacacctgactgattttttgtattttagtagagacagagtttcgccatgttgtccaggctgatctcgagctcctgagctcaggcagtccacctgcctcagactcccaaagtgctaggataacaggtgtaagtcaccacgctcagcccactcttctttatgcctaaagctatatacattttttctgcaaatcaggtttatactgtatattcaattttgcatggtgatcaattatatcatgtatcataaatatatttaataggcgttcttcatgtcatttttatgtctgcagagaattatattaatatgaatacagcataattttgcacaccaaacttgtggctcagttatgacgtttccagttggctggtttcgtatacattgctctactcaacttacttg

SEQ ID NO: 163332 - DNA, 499 bp, Homo sapiens
tgaaaattaaataagaagtcagggcaaaaggaacatgggaaaagaaatgtaagatgtagccagagtttattttaatatacaaagtttatgtcatcatagtttcctcattgcttaagtaaagctataaatccttgacatataatagttcctcattaaatgtacggtggtcatcattactgcaagtatacacaacttgtcactgcaaaaactgcagagatgtatttgtttctgttttatgcttagtgttcaatactactgaggttctcatgagaagatagaaatgaatggattttgaaataaggatggaatgagcaggataactgagctgtcttgatggataatagataaagtataatctgaactaaaaagaaagctctctgaatcrcctatagagacaaatattatagacaggggaaatacagtatgtgattacttacacaaaaaagtaaatataaaattattgtagaagaaaaaggaggtattaaaagtaaataatatg

SEQ ID NO: 163333 - DNA, 560 bp, Homo sapiens
gtgcttgatgtataaacatagattcaaaatagttctttagacataccccgtcctctcscatgactgatacatgttgtttataagctctaagaaaggaagctctaaagaatagagaattttggaagcactgaggatatgaactatgtttaaagaattgtattagggaaatttggttttgatgcttattctctgataatatttagcagcaggaactggagaacagccaagccctcagcaaaggcattcatgttctggcctgtttatattcatttgccccattgtcagggaggaaaataaaattttagggaaatgtatataaagaccaaagtacttaacttagggcatgcttaaatccagcattaagtgtccatctatttaaaaatagatggatctgtagagctgatacaaaattatttgatttttctcgttggcatttctttatcatatgatttacattttgcttttcccttttgaactccatcctttatgtttccagttcagcaagtcttccttttggttctccgtcctgagccacatggtttaaacatttttatcttagc

SEQ ID NO: 163334 - DNA, 571 bp, Homo sapiens
atgcctgtgcaactgcccctgagctgctactttgggcatactgcttatggatggggtagccctgctcctcaaggagcaatccctctgctgctgctggtcagtaccacttcaataaaagttgctgtctaaccccaccagctcaccctagaattatttcctgggataggccaagaaccatcccaggccaagccccagttctggggcttgcctgcccggcatcagtactacacrcagtctaaacactgtttgacttgcttacttaccttaatcaaaatacagagccacaatttctaagagcctccagaatttgtagaagtccactgcttactctgtaaagacagaaaaacgttcttgctcaaaatgcagctccatctattagagctggtaaatatgtagaaaacagcatgtagagatttctacacattttaatgagatgccgagtctttttgacaaggtgactttgttttcttcatgtgctaggaaaatgtgaatggaagaattatggaatgtcatttttcatttaacatcattctgtagctctcttttcaaatgaaaagccagattaaaatac

SEQ ID NO: 163335 - DNA, 571 bp, Homo sapiens
atgcctgtgcaactgcccctgagctgctactttgggcatactgcttatggatggggtagccctgctcctcaaggagcaatccctctgctgctgctggtcagtaccacttcaataaaagttgctgtctaaccccaccagctcaccctagaattatttcctgggataggccaagaaccatcccaggccaagccccagttctggggcttgcctgcccggcatcagtactacacgcagtctaaacactgtttgacttgcttacttaccttaatcaaaatacagagccacaatttctaagagcctccagaatttgtagaagtccactgcttactctgtaaagacagaaaaacgttcttgctcaaaatgcagctccatctattagagytggtaaatatgtagaaaacagcatgtagagatttctacacattttaatgagatgccgagtctttttgacaaggtgactttgttttcttcatgtgctaggaaaatgtgaatggaagaattatggaatgtcatttttcatttaacatcattctgtagctctcttttcaaatgaaaagccagattaaaatac

SEQ ID NO: 163336 - DNA, 581 bp, Homo sapiens
aggcttggagagtccaaagcgggtcaccaaatttgcaaaaccctttcctctacccaggagactggagcagtggggttgttgacaccatctgctatgaactttcttggtctgggaatcactatagcagtcaggagattattagtcagtttatctgatataggtacttaggagggtgtaggtatttttgctctagacaatactagtgttcttaatagagacattaaacaaaaaggacttctttgtgaataagataygtactctggagcaacttcaatgaaattctcgaccaggtaagttaaccatgtttttttaaaaagcaaagatatctcaaaggagtgtgatttatattctctctgttttctactcgccgtgccttctgattttctcaagttgctgaaaagataatggcttttcattgctcttctgtcgtgtttcacaataagttgcctccacctgttttgacatctgtagtttggagcttgcaaggacctgcttttactcagtagatggatattttaccagtaagcattggctgttctaacaccttgtttctccaggttatgtgtttatttcctgttaat

SEQ ID NO: 163337 - DNA, 521 bp, Homo sapiens
ctgggtcagtaggtaggcaggcctggtgactgagtccacatggaccagccttgtgccttggtttgtggggctagacctggagcttgagtccastttagtgccatgggacaagcctgaagtctcggtctgcagggatggacctgaacaagcctagggtctaggtctgcagagttgtgcttggactcttggcctactggatcaagcctgacactggggttgacctggagcctggatccatagaacctggtctggatactatgtcagtgggggtgctgggctggattctggggccaaaaggactgctttggagcctcggtctgtgaggaatagactaaacctggtgtgggagtagagcctatgtctgtgaaagccatgggggatagcctggttctggggcagacctgaggtcaggtgtccatggggcaagcctgctgctacggttcatgacaaagatgcctgctcatttcactccctttctcccatgcagagagtacctctctccatgctatgctgcctggact

SEQ ID NO: 163338 - DNA, 458 bp, Homo sapiens
ccagaacctacagatatcaacagacagaatataatacatactcacatacttcaagtttgtcttatccttggccaccacaagtaacagacactactggttgcctaaaaaaaaaaagtcctttacttttctcactctagggtaggcttcaattcacaattaaatcagactcctttacctttcccaatgtgctttctgtgtttwtgaagtctattctttttctcattgtccatacaactatttcacattatctgccacctcccatgaacctcctactatccttcattatctacccaaccaaccatcccttcattctgtgctaaagacctgcctccaatgcaacagtcaaaagagaaggtctcagataggaaccccttctgtgtcttgccacaccgactacatattaacctgcacctccactcttcctttcttccttttcactggaaaacaatatcatacct

SEQ ID NO: 163339 - DNA, 630 bp, Homo sapiens
cactgggctatctctgccttgcatccctggggctctctattctctctcctcagctctcgagggtcctctgatggcagaataaaaaagcgctatgatttgtgagagccctaggaaggctacagtattaggtaatggaaagggtcatcatcttacctcctgactcactggccagaggacggagcgactgcccaaatcagacagctcagcgattcacctckgagctgctgctttgggtggaatggaagaaactggttggtgtcttaggtataacatgaagtgctcagtaagtggcaggaggacttgtggcttgcatctcttttcccatgtgaagggccaaatgtggaaataaaaggaggatacggaacatttttgctgttgcagagctgttttgtccttcagagtcatagcaaagggctctgtgagagggatgaagtatatcacctaagaacatgtgatgagatcagaatacctattatgagtctatagcctaccagaatcactatcacgaaacggtggcttgctgtgccgcccttgacttttatgaatgggtcctatctgaaacaggcttgggaaactgtcattgtattggtggagaaatgtggtggacactgcccagtagcccctgcagca

SEQ ID NO: 163340 - DNA, 445 bp, Homo sapiens
gaattctttaattcaaagccacgttttcaattctgagcagcccagagacctgccatcgctttctcgcgccgagtcacgtggtctggcaaggcgcgcggtttcctccctagccgcccccagctgccctgaaccttcaaagtcacatttcagtcactccccagtctgaccaacaacgctcacaatgagggcgctgccagcacaggcgacggcctgcgctccagtcttacgaggaaccccaaattcaagacccctgtgacccaggcctgtgtgccccgacaggctaaacctccgcccaggggcttcccgatgtcggctgcagcgrgtctgggttttcggcctgcagagctcgcgtctgacggctgaggaacaaaacaccctccctctagcggctcaagcgcacacaccctcttgccttccgcagccaccgagcgagtcacgggagaca

SEQ ID NO: 163341 - DNA, 592 bp, Homo sapiens
cctgtgacccaggcctgtgtgccccgacaggctaaacctccgcccaggggcttcccgatgtcggctgcagcgagtctgggttttcggcctgcagagctcgcgtctgacggctgaggaacaaaacaccctccctctagcgrctcaagcgcacacaccctcttgccttccgcagccaccgagcgagtcacgggagacactctggagccattttgcggggctggaattccttcgcccggcggagctcggcgcgcacccgtcagctgtgccgaggaccctgcgcccggggggccccgcggccacgtgacccccatctggctctcggcctggactgagggggctgagctcatcgcgttgctattcgaggggcagagactgcctggccttcctcaaatcctgagctcccggctctcctccctcccccacctacttgacatctcaggctttttgtggaaggggcagggcgattgagaggtcggtgacctttgtcccaatggcgctggctcttttcctttttggctaccctaatggaatgaggatataatcagtcatatcttaacattcattgagccccggctcaggctgggaggcactg

SEQ ID NO: 163342 - DNA, 428 bp, Homo sapiens
atttaaaaatacatatggagaacaaagttacaataaggctaaggatgtccaacacaatgaccctgcatgctcacatgagaaaatcacaaatttggctctaagctttctagtaactgatgcaaaatgggaatcctggtaagcaatacagttcacaatatgtgtaaaataaaaacagatttggttgcttagaaaaagaactgtattcttggccttatgttcagacagcaatttgtcttcggataccttttaaagtggatactgcgatgtaagaccatgtatatgaaatagcaatccagggataacaggttctgaatgagaaattgctgagatgacctttaagaagcagataaaacatgtttaggtgatgaaataggagaggcgcgctctgatatatgtrtacgttttgtgtgatatatacacatacatat

SEQ ID NO: 163343 - DNA, 593 bp, Homo sapiens
agaaagaggctcaaggaaatttcaagttaaatctccctcatttattgctactgaaaattaaaatctaaaattcaaaaatctaagtttgttactttttctccagaaatgaacactttgccagaatataaatgttctaattcacttgttgagaattttagtatgaaaaaagaaatgtggttgggatatgaaatacttggctttattagatatgcatggcagttatacattggaaatactagttcattcttttccttagaaaaataaaacagtagcctgtttttctgatcaagagagtactgtttctcactagccttttaataacaagattcttggttgaactagaaaactagggtcagaaaactcagtttaatctgttaaaatttttataaatattatgaaaagatggcaaagtacttaaaacgaatatcaatgatgctttatatatctttacttagctataatagttaactgtaacagttcattttcatttagaatctgtttaatataaacatttcaaaaactgyctttcttgtaattttaacaaactacctgaaagtgctctgttggaaataaaatatataagaggtttgctt

SEQ ID NO: 163344 - DNA, 496 bp, Homo sapiens
aatcataaagtagtatcttctggccttcgccatgtgaataccttagagttatttcatctgtaacatgtccaccatggaattcttatctctgtatcccttccccatgcttgctcctttcccaatctgcctgtgtcgatcaayggtattgtcatccacccaacatctcaggctagaaattgcatccctcccttgattcttgtcatcttcttgccttagaaatgcatggagggatccccacatctaatctgtcaacacatcgtggcacctttttggaatctcaggtacattgaattggcttaatcacgacactctcttatcatttgtccatgcgtggtttatttttatttataagcacacctcattttattgtacttcactttattatacttcacaaatattgattttttacaaattgaggggttgtagcaaccccttagtgaggaagctggtgggtaggactagaatccagcaccctcacagcatcctgcatacagta

SEQ ID NO: 163345 - DNA, 496 bp, Homo sapiens
aatcataaagtagtatcttctggccttcgccatgtgaataccttagagttatttcatctgtaacatgtccaccatggaattcttatctctgtatcccttccccatgcttgctcctttcccaatctgcctgtgtcgatcaacggtattgtcatccacccaacatctcaggctagaaattgcatccctcccttgattcttgtcatcttcttgccttagaaatgcatggagggatccccacatctaatctgtcaacacatcgtggcacctttttggaatctcaggtacattgaattggcttaatcacgacactctcttatcatttgtccatgcrtggtttatttttatttataagcacacctcattttattgtacttcactttattatacttcacaaatattgattttttacaaattgaggggttgtagcaaccccttagtgaggaagctggtgggtaggactagaatccagcaccctcacagcatcctgcatacagta

SEQ ID NO: 163346 - DNA, 570 bp, Homo sapiens
agctaagagttggacttaagtttttttaaaaattaatattatattgctaaaatttaagcatatttgtgttgatatagatttttgtttttgctattgtctaacttttcactatgtgagtgactatgccacagtttgtttgtcagctcttttgatgatgtgcacctccattttttccatatgttccttttgtaattaatgctgctataatcattcttatacatgtctactattgtataggtgcatacgtttgggcattatatatttagtgccaaaattactgagtcattttctcataacttttgtttcctaagcaccccttctctccatctgtaccacccattcatctatatcttcatcatctctacctagtctcctacagtctcttccctggtatattttctggtttctcctggcaatttaggcttcwcaatgcagccaatgtaatagtctttatgaagagaatgagatttttttcctctcaaattaaaactcctcactcatttcttattatttttcaacaaaatctaaactccttgcaaaggccaagtggccctttcctgcccactgctc

SEQ ID NO: 163347 - DNA, 193 bp, Homo sapiens
cctccttcacaagctctctctctggcctgttaccatgttaagatgtgcctgcttcctcttctgccatgattgtaagtgtcctgaggcctcccagccatgcataactgagtcaattaaatctcttttttaaataaattacccagtytcagggaaatcctttatagcagtgtgaaaatggactgatacaggctgt

SEQ ID NO: 163348 - DNA, 618 bp, Homo sapiens
tttggcaggcaattcagtgaatctgtgaatgtattcatgcgaataattgttcatgatcacactaaatctcttgactgctattgttagctcaaaccacacaatgccatagcagggtttttggaattatttttgaatttttctgaatggaatacatacccaggggcccagagtgggattttaactgggttgcatttatttttggctctctatctatctgtttgctcatacctcacagcacttcaatccaaagcacatttttataaaatgtagaattacttggttcaggtaagcattatttgaatgctgctttcatggtaccaaagagatagtyagagagtcaattattttcctattttgagaggccataacaatcccaacaccacccctcactaatattgaccaagtgtatgggtcttcttaataatgtttttctttgtaaatgatcttttggccagagccatgagaccacaatcaagtcactggaaatccctgagaaagaaaacattttgttataaagggtttatgaaaaatgacactttgttgcagtttttccaagcaaattataactgcctgtcatgcagacaagggttgccatggtaagcggttttttgaataggt

SEQ ID NO: 163349 - DNA, 618 bp, Homo sapiens
tttggcaggcaattcagtgaatctgtgaatgtattcatgcgaataattgttcatgatcacactaaatctcttgactgctattgttagctcaaaccacacaatgccatagcagggtttttggaattatttttgaatttttctgaatggaatacatacccaggggcccagagtgggattttaactgggttgcatttatttttggctctctatctatctgtttgctcatacctcacagcacttcaatccaaagcacatttttataaaatgtagaattacttggttcaggtaagcattatttgaatgctgctttcatggtaccaaagagatagttagagagtcaattattttcctattttgagaggccataacaatcccaacaccacccctcactaatattgaccaagtgtatgggtcttcttaataatgtttttctttgtaaatgatcttttggccagagccatgagaccacaatcaagtcactggaaatccctgagaaagaaaacattttgttrtaaagggtttatgaaaaatgacactttgttgcagtttttccaagcaaattataactgcctgtcatgcagacaagggttgccatggtaagcggttttttgaataggt

SEQ ID NO: 163350 - DNA, 532 bp, Homo sapiens
ccagcacagtactgtgagtgtggaacagtggtctgtggggctgtaagcgagggccttaaatcctgcatgaaacacctgcctcctccccatggagacttgcgaccacsctctccttgccagagtctctcaggggacagtcatcttttcttaggaaccataactggttggggacaaacacattacacatttgactctccggattctcaaaaatgtttggggaggacacactcagaaaaaataaagacgctatactaatctaggaattagaggctcacagtgttgaaatttggggattctcagaactgagacatgtcttgagggtacaaagatataaaggcatagtttctctacttatagagaccaaaattaattagagtaaaaataacagtgatgatgaaatgcagtattgattcttctgtgtcaaggtctctgctaaacactgtacacactttatccattttaacttttcagcaatcatatgaatcaagtacaattattatcaatttttagatgaaggaaatgaagcttgtaa

SEQ ID NO: 163351 - DNA, 382 bp, Homo sapiens
cacaattaaacctgaagttgccccttgaattcctgggggcagagcatggctaccacacacagaatattgaggcggtatctctatagaagggcttcattagctagtggatgcttggccacccatctccaagaggcaaaagaggaaccaatgcttggagcagggctgcagctgatttggtggtgtaggaaatacaagtttccatgggaatgcccatgtttggctggggaagtcaagggaaggattatcagaagcaataacatttgaattgactctggactaaaaatacaacatgagaggactacrgtcccatggcttaggttgaggacagcactctattccatgcaaaaataaatgtgaggaaagcagagcaccagggctggaa

SEQ ID NO: 163352 - DNA, 624 bp, Homo sapiens
acagaagattccttagcattattttgtaaattgatatttggtaaaacaaatgatttatgaactaagtggctccgtttttagccattccattgagcactgctacctacaccaaaagcaagttgcaagctgattcatgtgatttcaaagcaattaatgggctatggaatcccactaggacttcagagaattattctgtttcaataaatatatttggtaatgtaatcaagagaatttaaaggaaattaaccaatttcctataatagttatatctggcgtgaaaaattcaaccatcatcagtawctaatacatgaattacatgtagctatagtttaaaactcagaggtaagatttgaggcagttaaagttttttggtttgtttggtctattttcctgttaatatttgggtagcacacaaggagactcaggagctaccatttagatggagactatttccaaaataataaagggaaggatatttaacacacactcagggaaactgctaactactactgtactatttatgccattgagtggctcattgacgtttgatgtctaacatctgtttgaatgataatgaacttttaatgcataatcatacattctttattaatatctattgaatga

SEQ ID NO: 163353 - DNA, 523 bp, Homo sapiens
tgataactgctatgaaaagaagatgatactgcaatagcaacagtgtcacggggcccctcaaaattgtgttgtttagggcccctgtctcagcaggtcacaatgtgatgataaggagaaggtggctgtacgaagagcaatcccaatcaccagtaataacaaaaatcagtacaatttggaggttgctttcattcgttatcatattaaaatcattattcttaaataagaaaacccatattaactatcaacacattcttagatgtggaatgagcaactgagaaatttctcgtggttctctgtgaccaatgatcctaagaataaattattacttgcgagaattttaattaagttgttcttctgcctgccaggctatcgtttagctggataaggggacaattagttttattctgaaaagcatcttggattcacatatctgtaatcaatgtactcacrtaagtgtctacaactagaaatttgtggttgtctggaagagcgtttaacgcagaaaattcattaaaacagggag

SEQ ID NO: 163354 - DNA, 550 bp, Homo sapiens
caggtactgtgcctattgttttaaattcttctcatttgttctataatgtggtcagtaacaaaagcatgtgacaaaaagttaacaaaatggaaaaacaaatgtctttacgattaatatgttaaatttcaaatgactgctactctatgtagaagaaaatagattatggatattagaaatgggtgtgatgtaaatgtattcattttaatacattttattattaacatatttaagtgtaggttgcactgaactctttaatattatagaaatatgtcaaaggkagcttataaaaacacaatatttcaaaaaggcagatcaggggtgtggctggcaagatggccaaatagaaacagctctagtctgcagctcccagagagatcaatgcagaaggtgggtgatttctgcatttccaactgaggtacccagctcatctcactgggactggttagagagtaggtgcagcccaaggagggtaagcctaagcatggtgggacatcgcatcacccgggaatcacaaggggtcggggaactccctcccctagctaagggaagc

SEQ ID NO: 163355 - DNA, 326 bp, Homo sapiens
acatgcccttgcttctcctttgccttctgccatgattatgaggcttccccagccctgtggaaatatgagtcaattaaacctctttcctttataagttactcagtcttgggtatgtctttattagcagtgtgagaaggaactgatacaattgtcaaaaataaaataaaactaaaatcagagtgcaaaataratactttaccagataaacaaaactgaaagaatttatcagaagcattcacacattgaaagaaagagtgaagagaatctataggtggaaagaaaatgatcccagaaggattcacagaaattcagaaagaaagtacaaa

SEQ ID NO: 163356 - DNA, 535 bp, Homo sapiens
ggttttaatatctaattagatactcaaaaagatgcctgaataaccaatcatatttattcaagtatatgtaggtactgtatgtgttttttggggtgggggggtgggagggggtacagagtttcactcttgttgcccaggctggagtgcaatggagtgatctcagctcactgcaacctcctccttccrtgttcaagtgattctcctgcctcagcctcccgagtagctgggattacaggcatgagccaccctgcctggctgattttgtgtttttagtagagacgggatatctccacattggtcaggctggtcttgagctcccgacctcaggtgatccacccgcctcagcctcccaaagtgctgggattacaggcgtgagccaccgtgccctaccctgtatgtagttcttaataaagcaaacatattgtctgccttaaatgaaatgttgttggtttagtggactacttgcttttaaatatatttgatgtttttagtcctatatactcccagtatatgtcaaagaatacatagatatgaa

SEQ ID NO: 163357 - DNA, 396 bp, Homo sapiens
acttgggaaaaataagggaaacttaagcataattcattgaartaataaaactttgaaactgtagtttaatcccactgtctaactatccatagtcacatcagagttaaccatacctgtgtatcagtcagaataggctagatagtgaactattcataccacagtcatgtaaaacaacagcagttttgtttcacttgtgctaaaggtccatgcctactgaggcatttaggcacccagaacaacaaggcaaccaccatttaaacttcaacagtctccatgaaagactgttatatacagttatatacaaagtaaatgatgttatttccagtaacagcctaatggtcctgtttacccaaagagcatgagatagcacagacctacatgtttttagatggtgta

SEQ ID NO: 163358 - DNA, 671 bp, Homo sapiens
cagtcccttttccaatgggcctcttgcttaaagaaggcacagtgattatgacccaggggctgaagagtcgtgggctattgtctggacatcccagacaccactctcaagacacttcctcaggctgggtaaccttgaggtrgcatgtggcttaaggacaccactaacaattgtgctttttggctatttcttttggtttttctccacctcctccatcccgttcctattgttgtaaatacctaaggccatgtttaagagtgggcttatgggggtttgaagtcccattctgccttttgtagcctcctgctaatgtgagtggcagattgagtgataaaatatatacccaggagagcttgtccttccaaggagtctgggtttgcattagtatatttcctgagtgcatcaaccaaatggtcctgaaacagagtggaattttcatccttcccctgaattgcttctctaagcttgtcataattaactggctaaacctcacagcttttcatactcctattaaacaaattacagatgatttctgtattcaaaatattggatacctctctgataatcctgcttaaggtttagatctggaacttgatctcctcccacacagtaagtggcatggccatctgaatatccatgggtagtaaccagaatcctttgtttttcctctacag

SEQ ID NO: 163359 - DNA, 727 bp, Homo sapiens
tttctggttcaccccaaaaagtcaatatcgaggggcaacaaagggaacactcactggtccaaggaagtgatatgctgttgattggtcttaatttggggtctgggtgaaggtttccctcaggttcccttagctttttagtcatcargaataatgatgactctgaaaagagcctttggctcatgtacagttttacagcattaggagccctatagagttacagctttacagtgttacagctccacagcttcaatctatcctgagccccttatctcatttgtcttgttcatgttgttcatcactttgccccttcataattgccaggatgatgcaggtaaaccccaaaattgtggctcagctagggagaggtcttggctttgctcaagaaagaattcaagagtgagctgacagtgaaagaaggcaagtttattaggcaacaatgtacaccaaaatggctgtgctgtagacagaacagggccatccaacaggcggagtggtccagagtagccctcatgaattgtagctagctatacttcttagacccactcttaattatatgctaattgaaggtcaggttattcacaaactttgtagtgggagggcagtgcagagctccaggaactatataaggtaaattctgggtatttgccatggcatttttaactgtcatggtgctggtgggagggtcttatgcaaatgcattataattcctaatccttgctggttttgg

SEQ ID NO: 163360 - DNA, 553 bp, Homo sapiens
ggaattttcagaagtttgcttgtcatgtacatgctgccactttgagaaaatctaccttgaaaatttacattactcttcacaaatagtttaggattctgggggagttgataaactcttgtttcttcattgcaaaaatataacttcctaggccaggagggagttggatagtgcttttattttgttcccaatcacagaatcacaaactatatctttatccagggcttccctcttttcttcttttgatcagtgtttccctagtagtatctgttctctctgaaatggacaaaacagacattaactttagggcaagtgagaaggactgttattcaatgacttaagaaaaggatctgacaaaagtgacatttttctgggcatagtggctcatgcctataatcccagcactttgggaggccaaggcaggtagattgcttgagcccaggagttygagaccagcctgggctacatggcaaaactctgtctctgcaaaaaatctaaaaattagcctggtgttgtggcacatggctatattcccaactactcaggaggctgaggt

SEQ ID NO: 163361 - DNA, 385 bp, Homo sapiens
aagatgaagaaaacaaaaatcaaatattaactaactctggaaaccaaccaaatgcctacagtttcagaggaatgtactaactacaggtgatagaaagtctttgaagaaaaaacaatttgtggactgcctattctccrtccatctacaagtaatatagaaaaaacaatttagtcttctcgtactttctgcccagtaattcagagaaacatattaataccagtgagaaagctgagtagtcatccttctatcctggagggaatagttccatgtcacccttcgttaccttccctcacaacactctgatgcccaagattgccaaactgatttctccagttgctgcctcattgtggaaattgaaactcccagaaagtctccattaaggtcc

SEQ ID NO: 163362 - DNA, 527 bp, Homo sapiens
tgaaactttactgaacatgtatatcaagtctaggagtctttgggaggagtatttagtgctttccaggtatacagtcatgttatcagtgaaccgagataattcgacttactctttcacattttgtacgccttttatttctttttcttgcctgattgctctggctgggacttgcagtgctatgaacaggagtggtcagagtggacatccttgtcttgtttcagttcttaggagaaatgctttaaactcttccccattctgtatgattttgaccttggggttgtratatatgactttcattatttttagatacgttccttcaatgcctagtttattgagggttttcattataagggatgtagaattttatgaattttttctgcatctgctgagatgatcatatgatttttgtttttacttctgtttatacattgtgattattataatgtgatatagatgtaagtgtatgtgtgcgctcattgcttttttaatcaaattttatgccttgtattataaccataaatgcatat

SEQ ID NO: 163363 - DNA, 515 bp, Homo sapiens
aagaaaaaaacgaaaatccttatgactttgctataggtaaatayttaatatgctaaacatagaatccctaataattgagatacattatattaagaacttccctccattgagagaacaaatcatgaagccactggaaggaaaatttatttgatatacatatgtattgcaaaataattgtatcctgaatagcacaaaccaattaaaaatgcagacaaacgccacccaaaaatgtacaaaatatacaagcatttaacgaatataatattgaaatataacaaatgaaaaggtgctctaaatccacaatgaaataccatgaaacacccaccagaaaggctaaaatgacaaaaaaaaaaaaagttaaaaaagaaaataacaaagcagtggcaaggatattcagcaactagaactctcatatgcttctgaggagagtctgcaacatcatctgaaaaagtgctcactattatccatgaacacagacacagcctacaatacagtgattccaccctatggtatat

SEQ ID NO: 163364 - DNA, 605 bp, Homo sapiens
agatctcattccatcccaaattccacttattaatgtgttggtaaaactaacaggctatttaagcagagaacaatcaaagctatttatttctggttatagtaaatacagaagcagatttagatgataacatagcatttataaaatagcagcagtttcatatttactgagctcttactatgtgccagatacctttctacaaattttatgtgtactaagttatgtcttctgttatgtaattctcacaacaatctcttaaagtatgtattattataytgttatctctctcagataaatagtttattatttttcttaagctcacttaactagtaaatagactattaacacagaaaatcagactcaagggcctatgctcttaaccacaatattgtgtttgactgtatcaggatatacctgcttgaagaggtcacgagaggctacctgattataagaaggctcataaaaaattgatttgtgatccagctgatgataaggcatattaaacttgccagcaaacttagatattaccacttgcacatggctctttctgatggacagttcgaacaaaaccccaaattaggttgaatcataattctattatgaatgtg

SEQ ID NO: 163365 - DNA, 524 bp, Homo sapiens
cctacttctgtcagctcatcaaattcattctccatccagctttgttccattgctggcgaggagctgcaatcgtttggaggagaagacgmactctaatttttagaattttcagcttttctgctctggtttctacccatctttgtggttttatctaactttggtctttgatgttggtgacctaccgatggggtttttgagtgaatgtcctttttgttgatgttgatgctattcctttctgtttgttagttttccttctaacagtcaggtccctcagctgcaggtctgttggagtttgctggagatccactccagaccctatttgcctgggtatcatcagcggaggctgcagcacaccaaatattgcagaacagcaaatattgctgcctgcctgatccttcctctggaagctgtgtcccagagggacacccacttgtatgaggtgtctgtcacccctactgggaggtgtctcccagttagtctacacgggggtcaggcacccacttgaggaggcagtctgtccattc

SEQ ID NO: 163366 - DNA, 436 bp, Homo sapiens
aatttacatttttagctgactccaatgagggtttgccgacctcgctttgagtatatctgcatggatgaccttgtactcgtcacttctgccctttcacttccactgtaactctatgtgggcagaaaacatgtcttcttgtctctttgtggatcagcccccaggcaccaccaattaattgcctagcacagagaaagtgctccccaaattttactttttcttgttcagaatacaatgccatccaagttctyatttggcacttacaacagccgcgccaggtaggaagaaagggcgtccttcttacagacagatggggagagagtccaagccaccagagagcagagactggctgacgcaggcttagttagaaatcatagtgcaagccacacagttgctttagttgtgggctccctggcactagcttcctggactggtgttg

SEQ ID NO: 163367 - DNA, 444 bp, Homo sapiens
gggccagggaatttacatttttagctgactccaatgagggtttgccgacctcgctttgagtatatctgcatggatgaccttgtactcgtcacttctgccctttcacttccactgtaactctatgtgggcagaaaacatgtcttcttgtctctttgtggatcagcccccaggcaccaccaattaattgcctagcacagagaaagtgctccccaaattttactttttcttgttcagaatacaatgccatccaagttctcatttggcacttacaacagccgcgccaggtaggaagaaagggcgtccttcttacagacagatggggagagagtccaagccaccagagagcagagactggctgaygcaggcttagttagaaatcatagtgcaagccacacagttgctttagttgtgggctccctggcactagcttcctggactggtgtt

SEQ ID NO: 163368 - DNA, 295 bp, Homo sapiens
acccatcctttgtaatgacaggctggaggttgggggtctctgtggagagacagcattccagttagtggccctgctgtcatggacagcaagaggggtagggatattgtactgatggaatgtggacattggtgttccttgacagtatcttgaatggtatcatgatatggcatgccaagccctgaaatatatattagcttggcagtgaatatttatgtttttcttttctgataacacatgragttataggctgttaatgtgggcaaggtacatgtctttaatgttgttaactattctc

SEQ ID NO: 163369 - DNA, 410 bp, Homo sapiens
cagaattcaacatacacttgaattttccaagttaaaatgggaggtgtggaggtgttgtcacttgcatagagggcccaaccttctagatcccagggcaaagaaggctctttgtgctatactccgtggtttcaactaatctgtgattttccagaagagatgatgarcaattacaattaagcatattccaaagcactaatgcaaaccagtaattttaccctcctcaccgaaatttatttgaaatttgagaaccaataggaaaaggagcccttttcagtccttatctctttttgttgtcagggtttactctcttaggaatgtgagaacaccaaaagtagaacctatgatacttgaagttggcccctgacttgtgatcttgtgatctcaatgcagaatcaaaaattcccggtgtt

SEQ ID NO: 163370 - DNA, 424 bp, Homo sapiens
gaattttccaagttaaaatgggaggtgtggaggtgttgtcacttgcatagagggcccaaccttctagatcccagggcaaagaaggctctttgtgctatactccgtggtttcaactaatctgtgattttccagaagagatgatgagcaattacaattaagcatattccaaagcactaatgcaaaccagtaattttaccctcctcacsgaaatttatttgaaatttgagaaccaataggaaaaggagcccttttcagtccttatctctttttgttgtcagggtttactctcttaggaatgtgagaacaccaaaagtagaacctatgatacttgaagttggcccctgacttgtgatcttgtgatctcaatgcagaatcaaaaattcccggtgtttgccttctggacacaatgttgtcactcgaattc

SEQ ID NO: 163371 - DNA, 453 bp, Homo sapiens
atgcttcccaggctggtctcaaactcctggcttcaagtaatcttcctgccttgttcccccaaagtgttggggttacaggtgtgagccaccaygcccggcctagttgctcccttctaatgggaggagagagatgccctttatgtctaccatggctctgataaaaatgtatcaatgtaaagtaaaatcatttgcattttaatcttgccaattaattctgtagagttgtagctttttactttatcagtgattgtttcttgaaattgagttggatcttatttatatgcctatattatgtctcaattttaatagtagacttaattagatttcaaggatagagtttattccactttccgaatgaacttactctctgatttaattataacattggaaagttgggtggctctggtgaaatgtagtcttccaactgaaaaaaaaaaagaaaagaaaatgagt

SEQ ID NO: 163372 - DNA, 448 bp, Homo sapiens
taagggcttttaaaactttttaatgacatccctctttcttcaccaaccttctattttccaagttgcttctggaataacgggcatttctgtttgtggtctctaggtaggaaaaatgatagacttaattgctcttgctcttggcaactattctctttccacagaactctagccagctgktttacactgaccttcttttgtttcctgatatttccaccacctgctggctgcccttgtattctctggttgtgacactataggcactattagtttgaagatattaagtgtttgaagcttctgattttattttatttttgtatattatttacccttaggactcatgattctacaaagtggaaaggagtaaagatattttgatagatgccatgaattcaagcagtgatcccaaagctcatagcttatatcagtgacgcatgcatgtcaattttct

SEQ ID NO: 163373 - DNA, 477 bp, Homo sapiens
aagctgtgcaaattatctactcttctgaacatgtccatgaatgattatgaatgtactgaaagtattaacttgggaattacagatgaattttattgattagtcaaattcagaaatataaaatctataaataattaggattgactgtgtgtatgtgtgtgaacatgtacacaatatctccctttggaagtttaaaaggactctcaactttaccatatgcaagacagaacactgattttcccaccaaaactctttgtcctatggattttcccatctcagtacatgacaatttttactgttgccaggaccaaaacaccttaagagtttcttctctcaccctgagtatatccaaagtctgatcactgctcacacacccatctggtccaagcacaatgacccctttgcctgttttattrcaatagcttcccaaatggcctatcttctattaaggagacagaattttctttagacaattatttc

SEQ ID NO: 163374 - DNA, 600 bp, Homo sapiens
cttatttcagattatgtcttcccagaaacagatgtcaagttggaattaggatgagcaagagatttattgggggaaatgtgtgtgaaggagcaagggaagacaattggataggtgggagaagcttttgattacaatgtaggcctgccatctgtcaaagaagagaaagaagaaaggagaattgagtatgaagagcctcagactatcacacacttctsagactatcacagccaggctaatggaggctcactgaggaaaggttgctcattagaagcagaaatttcccaattctcataaccccatcatgctgggaacagtgtgagctccatgttgcatctgaaggtatagctggaagtgactgactacctatgctccctacagaagatttgcttgaacagagattgagcagcaaatctccatggccaccatagcccagctttgctctgcacagatccacacctccacacatgccatggttccactgaccttctttcctttgggtaaacttagcgagataaactatagtccctgttgttgcagttggtcttaggtccacaattgatacccatcatctcctccatcattcactctaaatttccctcc

SEQ ID NO: 163375 - DNA, 488 bp, Homo sapiens
gcaaggaagcactaggaggcatccaagcatatagcctgggtgccacagctatttcttcctacctccattgtgtaaaagcagacctgcctcttcctactgtcaggatcaatcaccccttccaagattattactcttctttttacctggcccttatataaaggaatccaatatgccctggcagcatatatagcatgtagttcaataagatcctcttgcatactttagcaagagtatggcttgtttggggtgccaaggtctccaatcttgcagaacccacagttgcagggatgggaagcagagactcttccaacaggacattagatttcattcaatgtttctctaaacttaaaactgctyaaaaaaataaagtctattaattttaaatgtggaggggaggagtcaggtcatgtcgctcctttgctcaaaattttagtcactgcctatgttattcagaatctcagccaaagatttctataaggcctacaagg

SEQ ID NO: 163376 - DNA, 588 bp, Homo sapiens
ctccacttacatcctcatccttctccagggactgtggtgctgcttcttccctaggaggctgcaactcaccctcctggggaagaactcctctttccttccatggaaattgagagttctaggttatgttcctcacctttcttctttgtggaagaaaaaaggtaactccaattctcccagtaaacctaattgagaaatatttgtcaagcctctagagtgcagggactaacttgcaatatatacctatggagttgacccctgaacaatatgggcttgaactgctccaatccactcacaagcagaagtttttcaataagttacactgagtgtgtccgcccttcctgtctctccttctacttcttccaccccttctgcctctgccacccctgagacagcaagaccaatacctcttttctttctcctcctcggcatactcaatatgaagactttcatgatgatccatttccacttaatagcaaatatatttttcctttcttatgattttcttaataatttttttctagctttattataagaatgyagtcttaaatacatataacacacaaaatatgtgttaattggctgtttatg

SEQ ID NO: 163377 - DNA, 561 bp, Homo sapiens
tggccagtgagttctttaaagagctgcatggtagtgcctacatttttgtgaatggtgttggaaagcagaaagaactgcaaaatagacactgtgcccaagggtcaaactctgttggcctgccatttatatgacacactgtcctcaggactaggaagtggtcagatttcatgtaacctactcacttatgaggttagtgatgaatggaagagatattatctgaaaacacattttaaaatgcagcagatgctttaaaagggcattattttctgcaccaaagataaagtctgacttaaaaattcatgtattaaatgtcacctcgaaagagcaaggacagctgcatagaatattaaatacaattaaaaacaatgygtaatatgaacagaactcagtaaagacccaaaaccaaaaaaaaaagaaatagaggagtgggaggatacacattcaacattaattcatgaaaataaaaggatgatttatttgcaataactttaagaaaacatatttcctagaataaaggtcattgatgtttaattaaaggaaaaacaaaacagtaaaggtaag

SEQ ID NO: 163378 - DNA, 575 bp, Homo sapiens
aactgtccctgtaatccaatcacttcccaccaggtttctcccttaacactgggagattacaattccagatgaggtttgagtggggacacaaagctaaaccatctctccaactttctaaccattcttttattctgaatatagaaaaggcaactrctctcttagccacttttccagtgatgttctaggaaccattcctgaaggatccctggaaagcctccacagagctctcttcagctactcccacaattttaagagtacataatatgttaaatgcctttattattaaaatagctagagtggtttctgttatctacaacagaactcaacattaaaaagaatttggtagcagggaagattataggcaacagaccaacaaggacaggaatctaaaactatcttccccccttcttggatttggaggttttaaagtttggactccaaatagtggcataacagcaacttaaagaattacttgtgatcatctgaattacagtgctttttgatgttatgatttaatcagactgaatatcaattgttatagcatagtgaaaagattgtcaggatgattagaattc

SEQ ID NO: 163379 - DNA, 613 bp, Homo sapiens
ctacagtgtctatttattttgaaatgtaattcatctaataattatcattgagttgtacttgttacacagtagtgggctattcagtgcccactaaatgttagtttttagcatcatcatcatgttttgtcagtagtattgtccataagggatgcaaatatacatcaaatcaggatcatgcctttcagcatcttaaagactaatactgaatgtgctagtaccatcatgtccagtaattactctaatacaaggtagaaagtgatgcttcacgagaaataaaggtaaagagctatrtaagttacaaagatagaaatattgtttttaactaaaagaattaaaatatatttgaaagaaaattaactaagttttattatgagatttgaccacgatggttattctagagacagcacctgctaagaaagcattggattcacgaggagacttagtttctggtgctgtactggatatgccatcagtgagctctgtgatcttaggtaatgcacctatgttcactgggtgtcagctttctcgtctatatgataagggagttgggccaggtctaagaatctaaatctaacattctgcaactgtgaggttaccagcaactttcacacat

SEQ ID NO: 163380 - DNA, 495 bp, Homo sapiens
ttatgctaaacactttcaaatcttaattggtttatattgagatacatcgtttaaaatttttaaatggcaagtctctactttgtaaatatcattaaatgggggaaattcaacaatattgatagcattttaaagtaacatgaaagtatttgcaatactgatgagaaatggtaaatattgacactataagaraaaaaataagtgcacttggattctgttattaaactctttttctatacttacgattccttattatgtgtttagaccttgatgatgacagttttccatattgctgtcaagaagctgcatcatttagatttacccagaaaatgtaaaaaaccatatttgatgatgatataaagattttgtttagcaaatctttgattcatcaatgctttttccatttttcagaatctgcagtccctcagaacagtatattttgtgagagtggattcattataaatagatattttaactaataatttctagagagatgat

SEQ ID NO: 163381 - DNA, 593 bp, Homo sapiens
ggtgctcttaatcaccctgctgtgcattctttcaaatggtctatgatttaataatttaatacagaggataccagtgtgtctgtgtgtgtgtgtatgtgcgtgtgtgcatgcatgtgagcatataatctcatggggtaaggaaataaaacrttacttcctctatttttgttgtccatctaaagctaaaaattaaccattattaatattcaatatccagatcaacctagcaatctcagtccatatttgagatgtcacatgtaacatatctcaggaggagggaagtttacaaaatggaggtgctgactgtgtcaccatcaatgcagtcgaggtgtgcctggtttaatggatttatggattttattatcccttcctccctcccttccttccttctgctgaatacatgataagaactatgccaaaccgtgattatacagcctgaatataaataagatacacaggagtttctagtgtcatagggataacatgcatatttatgtatttgtttaatttataatcaactgagaatctactatatgccatgcattgttccagggaatcagcagagaaccataaagacaacatctgtaaaataa

SEQ ID NO: 163382 - DNA, 583 bp, Homo sapiens
atcaccctgctgtgcattctttcaaatggtctatgatttaataatttaatacagaggataccagtgtgtctgtgtgtgtgtgtatgtgcgtgtgtgcatgcatgtgagcatataatctcatggggtaaggaaataaaacgttacttcctctatttttgttgtccatctaaagctaaaaattaaccattattaatattsaatatccagatcaacctagcaatctcagtccatatttgagatgtcacatgtaacatatctcaggaggagggaagtttacaaaatggaggtgctgactgtgtcaccatcaatgcagtcgaggtgtgcctggtttaatggatttatggattttattatcccttcctccctcccttccttccttctgctgaatacatgataagaactatgccaaaccgtgattatacagcctgaatataaataagatacacaggagtttctagtgtcatagggataacatgcatatttatgtatttgtttaatttataatcaactgagaatctactatatgccatgcattgttccagggaatcagcagagaaccataaagacaacatctgtaaaataa

SEQ ID NO: 163383 - DNA, 453 bp, Homo sapiens
atcaccctgctgtgcattctttcaaatggtctatgatttaataatttaatacagaggataccagtgtgtctgtgtgtgtgtgtatgtgcgtgtgtgcatgcatgtgagcatataatctcatggggtaaggaaataaaacgttacttcctctatttttgttgtccatctaaagctaaaaattaaccattattaatattcaatatccaratcaacctagcaatctcagtccatatttgagatgtcacatgtaacatatctcaggaggagggaagtttacaaaatggaggtgctgactgtgtcaccatcaatgcagtcgaggtgtgcctggtttaatggatttatggattttattatcccttcctccctcccttccttccttctgctgaatacatgataagaactatgccaaaccgtgattatacagcctgaatataaataagatacacaggagtt

SEQ ID NO: 163384 - DNA, 593 bp, Homo sapiens
ggtgctcttaatcaccctgctgtgcattctttcaaatggtctatgatttaataatttaatacagaggataccagtgtgtctgtgtgtgtgtgtatgtgcgtgtgtgcatgcatgtgagcatataatctcatggggtaaggaaataaaacgttacttcctctatttttgttgtccatctaaagctaaaaattaaccattattaatattcaatatccagatcaacctagcaatctcagtccatatttgagatgtcacatgtaacatatctcaggaggagggaagtttacaaaatggaggtgctgactgtgtcaccatcartgcagtcgaggtgtgcctggtttaatggatttatggattttattatcccttcctccctcccttccttccttctgctgaatacatgataagaactatgccaaaccgtgattatacagcctgaatataaataagatacacaggagtttctagtgtcatagggataacatgcatatttatgtatttgtttaatttataatcaactgagaatctactatatgccatgcattgttccagggaatcagcagagaaccataaagacaacatctgtaaaataa

SEQ ID NO: 163385 - DNA, 640 bp, Homo sapiens
acatcagagagaaattttaaggcttcagcagaaaccttaagaaatatggtgcccaaatcctaactgggcaaattttaagactttacccaacaaaaagggtcaaaaagatcaatgagattccactggtagagcatcctttcaaagaagagagacatttgaggacaggcmttattcctctcaaagtggcaaagccaatgattatcatactaagtggcatggtatgaacaaacctcacagatcagagattgtttcctggaattcagctttgtgccctattcatgtctaaagaaaatagaaatattccagctgagcatttgcactaaaataatggtactagcacaaaactaaaagaatttttggaatatcctactactcattgatctttattcatggtcctaatacatctgtctatcttacaatacttccttttaagctatagaaacagcaccttaaatatatagcactttgtctgctttgctatttatgctatggataaatctgctcaaattttaaggatctacatcgcccccattcttccttcttttctgataatggagcaccaaatgaaaccaatttggctacatttgagtgtctattaaatatatataaaatatatagttttatatataggcattttatt

SEQ ID NO: 163386 - DNA, 640 bp, Homo sapiens
acatcagagagaaattttaaggcttcagcagaaaccttaagaaatatggtgcccaaatcctaactgggcaaattttaagactttacccaacaaaaagggtcaaaaagatcaatgagattccactggtagagcatcctttcaaagaagagagacatttgaggacaggccttattcctctcaaagtggcaaagccaatgattatcatactaagtggcatggtatgaacaaacctcacagatcagagattgtttcctggaattcagctttgtgccctattcatgtctaaagaaaatagaaatattccagctgagcatttgcactaaaataatggtactagcacaaaactaaaagaatttttggaatatcctactactcattgatctttattcatggtcctaatacatctgtctatcttacaatacttccttttaagctatagaaacagcaccttaaatatatagcactttgtctgytttgctatttatgctatggataaatctgctcaaattttaaggatctacatcgcccccattcttccttcttttctgataatggagcaccaaatgaaaccaatttggctacatttgagtgtctattaaatatatataaaatatatagttttatatataggcattttatt

SEQ ID NO: 163387 - DNA, 640 bp, Homo sapiens
acatcagagagaaattttaaggcttcagcagaaaccttaagaaatatggtgcccaaatcctaactgggcaaattttaagactttacccaacaaaaagggtcaaaaagatcaatgagattccactggtagagcatcctttcaaagaagagagacatttgaggacaggccttattcctctcaaagtggcaaagccaatgattatcatactaagtggcatggtatgaacaaacctcacagatcagagattgtttcctggaattcagctttgtgccctattcatgtctaaagaaaatagaaatattccagctgagcatttgcactaaaataatggtactagcacaaaactaaaagaatttttggaatatcctactactcattgatctttattcatggtcctaatacatctgtctatcttacaatacttccttttaagctatagaaacagcaccttaaatatatagcactttgtctgctttgctatttatgctatggataaatctgctcaaattttaaggatctacatcgcccccattcttccttcttttctgatwatggagcaccaaatgaaaccaatttggctacatttgagtgtctattaaatatatataaaatatatagttttatatataggcattttatt

SEQ ID NO: 163388 - DNA, 640 bp, Homo sapiens
acatcagagagaaattttaaggcttcagcagaaaccttaagaaatatggtgcccaaatcctaactgggcaaattttaagactttacccaacaaaaagggtcaaaaagatcaatgagattccactggtagagcatcctttcaaagaagagagacatttgaggacaggccttattcctctcaaagtggcaaagccaatgattatcatactaagtggcatggtatgaacaaacctcacagatcagagattgtttcctggaattcagctttgtgccctattcatgtctaaagaaaatagaaatattccagctgagcatttgcactaaaataatggtactagcacaaaactaaaagaatttttggaatatcctactactcattgatctttattcatggtcctaatacatctgtctatcttacaatacttccttttaagctatagaaacagcaccttaaatatatagcactttgtctgctttgctatttatgctatggataaatctgctcaaattttaaggatctacatcgcccccattcttccttcttttctgataatggagcaycaaatgaaaccaatttggctacatttgagtgtctattaaatatatataaaatatatagttttatatataggcattttatt

SEQ ID NO: 163389 - DNA, 538 bp, Homo sapiens
agtatctagaatagctctccctttttgctatgagaaagatatgaagctattaatacaagttattccttacataatatacaagttttagagaaggattttaataaatatttttgtagttcatgtgttcgttgtattcaaatatgtgcaatgtacttttgtaagcaagtctgtgagtagagtgctcagtggcagtcttttatgttgtggctttgggctcttagtctaggttcccaagaaataaagcctgagatatggatttttgttcaagtaaattagcaaaagaatcctctcaaaagggggagaagagaagtggtttatccactagctataatctgatcccatgaaaacctctggcatatgaaccgcacagcagagttkttgccaccttaagacaaagcagccagtcttgtactcctgaatcagtcagtcattttacagggactgcaggctggtgggagggagcactttggactcctacggctagttctatttggctaagagcaaagttctgaaaagccatgggttgttatttgccaac

SEQ ID NO: 163390 - DNA, 538 bp, Homo sapiens
agtatctagaatagctctccctttttgctatgagaaagatatgaagctattaatacaagttattccttacataatatacaagttttagagaaggattttaataaatatttttgtagttcatgtgttcgttgtattcaaatatgtgcaatgtacttttgtaagcaagtctgtgagtagagtgctcagtggcagtcttttatgttgtggctttgggctcttagtctaggttcccaagaaataaagcctgagatatggatttttgttcaagtaaattagcaaaagaatcctctcaaaagggggagaagagaagtggtttatccactagctataatctgatcccatgaaaacctctggcatatgaaccgcacagcagagtttttgccaccttaagacaaagcagccagtcttgtactcctgaatcagtcagtcattttacagggactgcaggctggtgggagggagcactttggactcctayggctagttctatttggctaagagcaaagttctgaaaagccatgggttgttatttgccaac

SEQ ID NO: 163391 - DNA, 383 bp, Homo sapiens
cccctcatcctactgtgtacccaaggtagtgccttcactgagcagctgttaacaagagagtgcaaaactactacttctcctmtaaatctctagcaatgtcaccattgctcacatctttggagaggacagctgggagcttccctaaattgtctcacatcactcaacatatattcttatataggaagaataagtatccacagttcatgaaagagtctgaatgagggaaatttatcatgtttcatatgtgtagaatgatagggttctggatcattgcccaatggaactgatatttggggattatatcaggctcttgacttccataagaacctgctcatcagctcttctgacttgagatgaccaacactaattaaagagcagaattc

SEQ ID NO: 163392 - DNA, 617 bp, Homo sapiens
acatatgaaattaaatgtataattctatttataaaaaatagagagatgaattttatctcataaccaagttaatgtagaataatgaaatattttcaggtacgggaaattttcttgtaggctataggttttctatcatcttatatcttgtatcatatccaggataatagccaagagccaaaccacatgacatcatttctcatacattttaaaaatgttcattcgttttgatttagagtaagatacatataaatatcaccataatgtttttacagtatcaaatagtattctgaggcttccctaccttatcttctggaagtccagtctggctaaaataaatagcataacggtcatcaccyttgatgtagaatctataaacatcagaatctggagccaccaaaaatccactaaagcgtgcaacaaatgtgtcttgttccatgagccaaatataggaagctgaatctacccaactggcacccatgtacccaggcgttttttcattgtattccagtatctcttccaaacgtattggacggctattattccacacctcaagcttcaggcctctccctcctaagtgtaatgaaataaaataagactttcatcaggatcataatgca

SEQ ID NO: 163393 - DNA, 423 bp, Homo sapiens
gtaatattgccatttttttcagacttctgatcattgttcagagacaaaaaagaaattaccggatctttcctattattaatctactatagctatattaggattgagtgttaaataatgcaatttatatgggtttctgtcaactcgctttctcaatgggagacactatgacatcttgggcagaacaattaatttgggtttggcacatcatgatactgcccactaaaggccattaacatacccagttactatgacagccaggggattctycacacatttgcaaatgctcccaagagtggggaaatcctgctatggtatgaaatcctggatcaggatggtaagcagtgatgaaatgtggtactggttgctgaactgctccatcagtcatggcaaagcactggaataaaatgctcaggtcctagagtt

SEQ ID NO: 163394 - DNA, 582 bp, Homo sapiens
tgtattgacatgttaatgaactaatgtttcaagttctgctgaacatttaattttaaaagatgtgagggggccgtttaagaggtctgtttttggctgcttgggaaaccactttttgactttctatgtgacttcattctccctcctacaccgtggcaggcccaggtccttgctagcatcaggctgtgcacagcttgggtggagctgctgggagctgcaaggctgctgctctcctcctttccaggtgcattaacctgaattcgcctatagagtgaagcgattaaccgaattcaaaattatctcaaataggacagagcttttgtagacatacctgacatttttatatttcaagggaggctggaggagaaagaacatcatagacaacagaactaactgccaagattagctgctgctctgttgttctgytgagagagaaagaaaaagaactagaatttttatatgtagatgcccctgatacgcatacatatttttctctgaaataaagatgatggcaattgatctagagaataacagcatgtatagaaatagaaagaacttgattcttggctcatgaagtctggctta

SEQ ID NO: 163395 - DNA, 566 bp, Homo sapiens
tttcttactgttgtaatttgtgtttccgtgattaccagtgagtttgaacattaggttctgccttaaatcctaagaaaattacgaaacaagatgtgggatgcagtcaaataaagcctagaacatcttagaagattaaaaagaaaacataaacaaattaggtagcaatctccgtggcattaaatactataggattttggagtgttttatattaatctgagttgtagtatttgaccaaagcttcatatakaaaatagtattccaatttattctattgaaatggcttagagaaaaggcacaatttcaggccagataacatgagtgacaccatggagatgagaatgagttgcgcatacggctgagacagcagaccaggctggggaggggagaggatcatggaggaggcaccatgagctcatcttaagcaggaaggaagccacatcacagagacaattaaaagctttcatttgcactaattttaaataaacaatgagagctgctgtggtttctttataaaaagcatcagttgaaatagaaatttaacttgctctacctctttggtttgcaaa

SEQ ID NO: 163396 - DNA, 651 bp, Homo sapiens
ccttaaatatgagatactagaactgtaagataataaatttatgtagttttaagctgctacatttgtggtgatttgttacaggagcaacaggaaactaatgtaacactctattgctgattttggcccaaggaaagcacattttattacccaatagaatagatctgcaatggagaactttaatttaccaggttggctcttaattctttttttttattattatacttttagggtacatgtgtacaatgtgcaggtttgttacatatgtatacatgtgccatgttggtgtgctgcacccattaactcatcatttacattaggtatatctcctaatgctatccctcccccctacccccatcccacaataggccccggtgtrtgatgttccccttcctgtgtgcgttatcagtaagaattttttgaaacttgtgcttggcttgtttcttcccaaagagaactagtgtgtacacattgtaaggaattgaggaagggaaatactcatgtaatatacatttctttattcgtgtcaaatagagacagaaatctcttccaatagtaacagagttttaatatcaatatttttccaagttttgctaaaggagagaattgatgccaggttcaacgctcgtccactctgtggaattcttctaaaca

SEQ ID NO: 163397 - DNA, 651 bp, Homo sapiens
ccttaaatatgagatactagaactgtaagataataaatttatgtagttttaagctgctacatttgtggtgatttgttacaggagcaacaggaaactaatgtaacactctattgctgattttggcccaaggaaagcacattttattacccaatagaatagatctgcaatggagaactttaatttaccaggttggctcttaattctttttttttattattatacttttagggtacatgtgtacaatgtgcaggtttgttacatatgtatacatgtgccatgttggtgtgctgcacccattaactcatcatttacattaggtatatctcctaatgctatccctcccccctacccccatcccacaataggccccggtgtatgatgttccccttcctgtgtgcrttatcagtaagaattttttgaaacttgtgcttggcttgtttcttcccaaagagaactagtgtgtacacattgtaaggaattgaggaagggaaatactcatgtaatatacatttctttattcgtgtcaaatagagacagaaatctcttccaatagtaacagagttttaatatcaatatttttccaagttttgctaaaggagagaattgatgccaggttcaacgctcgtccactctgtggaattcttctaaaca

SEQ ID NO: 163398 - DNA, 640 bp, Homo sapiens
acacagggaattgagagagaagagctggtttgggtgagaagtaaataatccaatctccatgcaagctttcccctgaaatttgagaattttaaaattgtatagctttagagttcttawgatatgacagagcttttatttaaagttaaaatttcatcgactatatccacagcatcagttgccaaaaggaaagttagacaatgaatatttgttgaaataatggttgtgtgttttacaccatgacacactatgcaaaatatattttaaaaagaaacagttcaaatcaattgaatgctatactagaaaataaaacagaaaaagtcaataatttttcaagtgcttacttctttgtcaaaaaggctgaatgtaaaatggcttttctgccctgctatccaggtgtcttcctgagagagaatatttcatcccatatccccagaagaataggtagtatccagtggttgatggagacacacatacagcaatagttatcatgaaccagcattttctttctatgttaattcatgggccagtttttatacaacagtaggtgaagcgttgtgtctattactctttgagaattggctctatgattctaaatgatgatgcatagcagaatgttaacaatggttatctgcaagttgag

SEQ ID NO: 163399 - DNA, 552 bp, Homo sapiens
gggccattatctaaggacttagacagcttcatagtgtttgaatttggaaaactgtataacattttgatcacctgggttcaaaaaaatttgtttagtactatttcttttttgtccaccccttgatattctgggtgttagtgtcttgcaagaaaaatcaatttttacttaatctgcctgttacctaaattyctatagcagcagcattatatgcatttcaattaattgcttgaatgcttttatctaatatcttaagcaaaacttcattttctaacttaattattgattaaccttgcattcttctttctaccatctttgtaattttacttagcaaagtgcttaaaagaaaatgtagcttcttctcaatctagtaggaaacattgttggctgcatatgacctagaaaattctgttccaggcttgatttgataacctccaagttctttaatctttctgtgatttggttttggtataccaactgatagctacttcacatggaggtgtcttcttaatcagctcattcttaccatccgtctgtctttctaggtatctcact

SEQ ID NO: 163400 - DNA, 552 bp, Homo sapiens
gggccattatctaaggacttagacagcttcatagtgtttgaatttggaaaactgtataacattttgatcacctgggttcaaaaaaatttgtttagtactatttcttttttgtccaccccttgatattctgggtgttagtgtcttgcaagaaaaatcaatttttacttaatctgcctgttacctaaattcctatagcagcagcattatatgcatttcaattaattgcttgaatgcttttatctaatatcttaagcaaaacttcattttctaacttaattattgattaaccttgcattcttctttctaccatctttgtaattttacttagcaaagtgcttaaaagaaaatgtagcttcttctcartctagtaggaaacattgttggctgcatatgacctagaaaattctgttccaggcttgatttgataacctccaagttctttaatctttctgtgatttggttttggtataccaactgatagctacttcacatggaggtgtcttcttaatcagctcattcttaccatccgtctgtctttctaggtatctcact

SEQ ID NO: 163401 - DNA, 635 bp, Homo sapiens
cactacattgacttactgcacataaaaatattcaaactaaattttattttataaaataaatatgtttatctgggaataatattttttctagctgaaccatcttagatctcctttctgtggtccaatgtaaaaatatgttgatctttttgaatgtaaatgctataggtggaaaccctgtaatcaatgatatatttattacagtctgtaatccaccaccatctttcataaatatttattaagtatgcaaaatattgattgcaatatgttgaaatgtatgttggcaattgataataattaatagataatgccattgataatttaaaacaaacacattatgcattgaatccaatatctcctgagattctgattacctaactcattggttgaatgtgctgaaatgctctgaaaattgagtttacaaaatgacaggcagttcctatttaattttttcygcttaataagctactggttctgaatcactgactatattacaagaacagtgtgtcagctaagccctattggaataacaaaataaatgaaacagttttcatgtcccacttagctatatttaacattgtaatatttcacgcttttagaaatctactctccaataatgcagaaaactctccattgaa

SEQ ID NO: 163402 - DNA, 631 bp, Homo sapiens
ggtatttttgacctaaatattactccatatcttgatgaataaagtaacactgcatttggtgtacttaattacattaaatttctaagttatgcaaatggtacattgtaacatgaacttttaaaaaatacatgttacatgtgatgtgtgccacactttaagattcattttcattaatataaaataagtaattctctctgcttakcacagttaccatttttattacttttcccaacttggcagtgattgtttttaaagtggccttcattaaactacagcatttctaaagtgacaaaatttcaggagcaacttagtctctgactgattgcaggttgacagttgagtacctatgtctcaattgtgtatcatagagaaacgaacccgaacaggaaactaacccacttactaaaaagtatgattttggcacttaacctttctggttgtagttcctgttacataagataataatttcaaattcataagatagatatgaatattaaatgacagaactgatgcaaagttaagtaaccaccataagtcattctcaaaattatttttacatacatatagagaagtagaaaagccatgagctttacaatcaggcaaacatctgcatacatatcatcttctatac

SEQ ID NO: 163403 - DNA, 589 bp, Homo sapiens
tacaatcttttctttaagtagaaacgaggatgagcctgttaatactcaagtcaaatggtatcaggcctctacacagacactccagtggcttcccaagtcaatgaaaagaggaggcaagtttgtatgatcttcttccctcccaccccatccttgcccggtgcgtcatgaatgcatctcccagcttcttcctcttgctcactctgctccagctattacagtctactggccatgtctcatacatgccaggcaaggcaccacttattgatcctgcttgcaractacttttctcccagatatctgtgtttcctcttttatattctttaggtctttgctcaaaggtcgtcttcataatgaggctttttccctggcacactgtaacaatgccttccctcttatcaccatcagacttaatatatgttgacacatctatctatatgtatgtgtgtatatgtagtcagtgtgtacgtatagtatttgtgatgtacagagtcggtttcctccctgaagaacgagctccatggacacagactctctgtgttttgttcactgctgtgccccagtatcatgtatggtacatggcgcataaaag

SEQ ID NO: 163404 - DNA, 601 bp, Homo sapiens
agtgagtggtgagtggatgtgaaggcctaggacatactactgtagacttcataatcactgtacacataggttgcactatatttattaaaaataaatatttttctttaataacgaattaaccttatcttactataacttttttacttcataaaatttttgttatttttaaatttttgactcttctgtaataacacttagcttagaccacaaacgcattgcacagctctataaaaatatttttccttatattcttaytctgtaaggttttttctagaatttattcatttactttttttactttttaaatgtttttgttaagaactaagatggaaacatattagcctaggcatatacagggtcaggatcttcaatatcactgtgttccacttccacatcttgtcccactggaaagttttcgggagcaatcacacgcatggaactgtcatctcctatgataacaatgccttcttctggaagacctcctgaaggactcccctgaggctgttttacagttaacttgtctattatagttaggagtacactctaaaataatgataaaatgtatagtaaatccacaagccagttggataaatagtaaatc

SEQ ID NO: 163405 - DNA, 390 bp, Homo sapiens
ctgggttggggtcatgcctctaccccttactagttgtgtgactttggacaggaacttaacttctctgagcttcaagtcccaaatatcattgttatcataataataatgatattattatgacagcaatttctcataaaattggtgagccaatgaaattattgcaatggtatgactgcaaaatcaccttgtaaactctaaagtatgcataaatatttattaatttcctgagaaataaatcttccaagatacagtgaagcttacacttttactgtcagaacttggacattatcattattgatgagagactataaagaacatggmctttgaccattactcagacaattgagtaggcgacgggagaatgtttctcaccccttctttctatgatgt

SEQ ID NO: 163406 - DNA, 309 bp, Homo sapiens
taatgatattattatgacagcaatttctcataaaattggtgagccaatgaaattattgcaatggtatgactgcaaaatcaccttgtaaactctaaagtatgcataaatatttattaatttcctgagaaataaatcttccaagatacagtgaagcttacacttttactgtcagaacttggacattatcattattgatgagagactataaagaacatggcctttgaccattactcagacaattgagtaggcgacrggagaatgtttctcaccccttctttctatgatgtgtaaacatgctaagctggagaa

SEQ ID NO: 163407 - DNA, 404 bp, Homo sapiens
atcatgttgcatagtcacattaaaagaactatctcttataacagctcaagagttttaaaaccataaagaaacacagcctaagtcaattgctggtacactattcaggctggtataaatttgaaatgattcaataatccctaccatgttctccctttctcagtccrtaagcccttcctctatgtataaatggttctcggccagctttttccaatctttgttctgaggaacactagctgggtgagatgttaacaggtaaaaaacatctgtgttaagtatgttgggaatatgcagggcgagataaatttatgtaccactgaactgctcagtctttgatgtactgactgtacttgctaaagaagaatgaagtgttcagcatttcccaaactcatctgaccacagaatcc

SEQ ID NO: 163408 - DNA, 417 bp, Homo sapiens
atcatgttgcatagtcacattaaaagaactatctcttataacagctcaagagttttaaaaccataaagaaacacagcctaagtcaattgctggtacactattcaggctggtataaatttgaaatgattcaataatccctaccatgttctccctttctcagtccataagcccttcctctatgtataaatggttctcggccagctttttccaatctttgttctgaggaacactagctgggtgagatgttaacaggtaaaaaacatctgtgttaagtatgttgggaataygcagggcgagataaatttatgtaccactgaactgctcagtctttgatgtactgactgtacttgctaaagaagaatgaagtgttcagcatttcccaaactcatctgaccacagaatcccctttttccccca

SEQ ID NO: 163409 - DNA, 478 bp, Homo sapiens
gctcatgcctgtaatctcagcactttgggaggtcaaggtgggcagactgcttgagtccaggagttcaagaccagcctgggcaacatggcaaaacccaatctctacaaaaaaaaataaaaaataaataaataaataaataaatagragtaaataaaaaataccaataaataaataagaaaatggaaactgaacaatgatgaatatcacctgaagccatacaaagcagatatgatcttacagataactcaaccaaaaatgaaaataaacttgtgaaatacccgagtatggttatacaaatgcaatagaatcttaagtaattggagaataggtgaaggagagtcaacctacaataatcaggactccaaaacacagaatagatagtatagagctaaatattaaaaaaaaaaaaaaaaaaaaaaagaaaatttcaaaaattcaacatgaaaaaagagagaggtcggatatagaaagatggaat

SEQ ID NO: 163410 - DNA, 457 bp, Homo sapiens
tctgttgcccaggctggaatacagtggcatgatctgggctcactgcakcctctgctacctgggctcaagcgattctcctgcctcaacctcctgagtagctgggattacaggcacctgctgccacgcctggctaatttttgtatttttactagagacagggttttaccatgttgtccaggttggtctcaaactcctgacctcaagtgatctgcccactttagcctcccaaagtgcttggattacaggtgtgagccaccatgctcgacctcttatatattatatatttgatattaaatgttaatattgtaagatgcttcctcttaaatattaaaattatttctttgaacactcagtttcaaaggtcttctaaattttatttacactacattggaaatattcccttcctgcctagctttttcttatttgagcaaattctcaatttcatcatttaaatact

SEQ ID NO: 163411 - DNA, 556 bp, Homo sapiens
aaagaggaactatagctagagaacaaaaatatgaagacatgtccaaagaaaggcaaactttaggaattgtaaatttatcatttttaaaacaaataaatcaatattgggcaagaacgttgagaaacagatactcttatccattgtgggtaaaactataaacttaatattaamtttttgaaagttggtactgtgtttctaaaactaagaatatggaaatcttatcaaaggcaggtgaagaccatggggtttagagttggaggcctgtctttaaatccctatccattacctgctatgtgactctagacagctttctcaacttctctgaacctcagaatcctcatttataaacattgggataataatatcatcaactccttagagctgttgtgaaaatcaatggagataatatctgcaaagtatttatcacagagcatgttaattttctattgctacatagcacacaaataccacaactttagcagcctaaaacaataaacatttcttatctcacagcatctgtgggttgggagtctgaacatggaccactgaaaaacgt

SEQ ID NO: 163412 - DNA, 556 bp, Homo sapiens
aaagaggaactatagctagagaacaaaaatatgaagacatgtccaaagaaaggcaaactttaggaattgtaaatttatcatttttaaaacaaataaatcaatattgggcaagaacgttgagaaacagatactcttatccattgtgggtaaaactataaacttaatattaaatttttgaaagttggtactgtgtttcyaaaactaagaatatggaaatcttatcaaaggcaggtgaagaccatggggtttagagttggaggcctgtctttaaatccctatccattacctgctatgtgactctagacagctttctcaacttctctgaacctcagaatcctcatttataaacattgggataataatatcatcaactccttagagctgttgtgaaaatcaatggagataatatctgcaaagtatttatcacagagcatgttaattttctattgctacatagcacacaaataccacaactttagcagcctaaaacaataaacatttcttatctcacagcatctgtgggttgggagtctgaacatggaccactgaaaaacgt

SEQ ID NO: 163413 - DNA, 520 bp, Homo sapiens
ggtctctggtgaaaagttgtcctcaatcttcctattggcttcaatgagtctgcttttgcaccccccaggaagcaggagactttcaattagttgctgattactccaaagctaatctgtccatgaattgttgtaaaatcattgtgtttgttgaggaaatgaaggtccagtacttcccattccactatgctgttgacgtgtctctgctatctcatgtttttgaacaaaaaactttaataacctctatcgtagatagtcgtcaaagtcaatcaaagaaacgtcttggcagggtgttctggatcacatctgcaatcctagcactttgggaggccaaggaaagagtatgcttgaggccaggagtccaataccagcctgggcaacatagtgagacctcatctgtacaaaaataaaaaataataaaaaatgagaaargtcctatgggactttcgtccttgacacattctgtttaaaatattctgtaataaattaaaaactacataaacaatatttcaaatgatactac

SEQ ID NO: 163414 - DNA, 421 bp, Homo sapiens
ggcctatttactcaccattgcagctctggtaactaaccctcagtgggcattcaataaatatttgttgaatgaaaaacaaacaaacaaacaaaaaaacatgccaggcactrtggctcattcttgtaatcccagcactttaagaggctgaggcgggtgaatcatctgaggtcaggagtttgagaccagcctggccaacatggtcaaaccccatctctactaaaaaaaaaaatccaaaaaaaaaaaaaaaaaaatgcgtaagcataattttctagttaaatgcatgtaagcatattttttctagttaaatgccagttgtttgacgtgaaattagtagtgtgcttagtatgatgattaaatagagtggtacctgaatgaatcagttatgcagtagctacacattttatcatacaggctgagttat

SEQ ID NO: 163415 - DNA, 686 bp, Homo sapiens
tgcttacattagaaaatgaggaaacatggctcaaatcaataagctcccatctgsagaatctagatgaagaagaaggagggaaaaaacacagggcaagcagaaagaaagaagaaaataataaagagtataaattcagaagttgaaaatttgaacatatattacaacgtggatgaatcttgatgacattatgttaagtgaaaaaagccagtcagagaaggacaaatattgtatgattccatttatatgaattgccttgagttatcaaatttatagagaatgaaagtaatgtggtagtttccatattactaggggagaaagaatgagatgatattctttattaggtatgaagattcacttcggtaaaatgaaaaagttctgaagttggatgtgatgatggttgcacaataatgttgatgcacttagtgccatgaactgtatacttaaaaatggttaaatgataaattttaggttatttatgtcttaccacaataaaaacaaaacagccacaaaaacaaggaagttgaaaaaaacagaaaataagtaatacaaagagctagtttttcttaatttagttcaattgagaaacctctaagttagatgtatagattctgattttctcccattctgtgggttgtctgttaactctacttattatttcttttgctgtacagaagctttttagttta

SEQ ID NO: 163416 - DNA, 648 bp, Homo sapiens
cagtataaaattatttgaaggcagctatttttaacaccaatataatttacagtaacttcaaaaatgaaatacttaaatatacatcgaacagaacatgtactgaatctgatgatgaaaacgacaaaacactcaaaaagaattcaaagatctaaataaattgaaagctatactaagattaattggaagacttactgtagcatagatttctattccccactaatctgtctacagrcttttaggaattccaaacaaaatatccgcagaaatttttttcattgaaatcaagccggttctaaaattcatatggaaaggaaaggaagttaaataaccaaacaaagtggaaaagaaaaacaaagcttaacaactaacattatcttatttcaaaatttgctataaagctgcagtaatcaagacagtatggtattggtgaaagatcactaccataggtcagtggaacggaatagaatgttcagaaacagatccaaacatacgtagtccactgatttaaatcaaaattataaaagcaaatcattggtggaaagagaattttttcaaaaaatagtgctggaagaattggacatccatacatacaaaaataaatcttaaccagatctcaacccatctcatgaacctaaagataatacctaa

SEQ ID NO: 163417 - DNA, 458 bp, Homo sapiens
gccaggcacagaaagagaaatgttgcatgttcccactcatatgtagtagataataaagttgatcacatagaggtagagagtagaatcatagataccagaagctgggaggagtatgtgggtaggaggagggggatgaagagagctgggttaatgggtacaaaaaaacagtcagatagaaagaataarttctactattcgatagtagaatgactacagtgaacaaaaatgtattgcatatttcaaaatagctggaagaaaggacttgaaatgagcccaataaaaatgataaatgcttgaggtgatgggtatcctaaaaccttgatttgattgttacaaattctatgcatgtaacaaaatatcacgtgtctataaatatctataaatattatatatcagtaaaaaagcaacttgcttggaactgattttttttaaaaacaacttatattcttccaatcata

SEQ ID NO: 163418 - DNA, 577 bp, Homo sapiens
ctgaagcagtcttctaactggcctgttttatttactccctatgatgccaagtaaaatgcattcataggctggatccaagtggatagaatattgaaactcataatttatcattcacttctggtgtttctctaaacttcacgtgataaaccatcaggtattttctcaacaatggttatttctctctcttcatggaatacaagttatccaagtttccaacatcctgcttatatcttcataggttcacttatataatctcattaactcctcttttgcattcacaggaatttaagtgatgataagttcaattcctcaacagaattataaatgaatttttgacttgttttaacatggaccaacagattccaaacttaaatgaacttcatcatgtctttatgttacatataagaataaacatattctctcttttattcatgatctcaaatcatgttcaatttaccaagcttaccagacaataatatggaatgagcacgaattggaktataaactagaacagtcataacttcaatgacattttaaatgtcctattttgttatctcttttcctgaagcagtaaagc

SEQ ID NO: 163419 - DNA, 569 bp, Homo sapiens
tctccatagtgttttccatagaggttttaccaatttacattcttttcagcaatgtgtaagtgtaccctttgcgccacagccataccaacatctattttttttgactttttaataatggtcattcattctagagtaaggtggtatctcactgtggttttaatttgcatttctctgatgatgagtgaagttgaatctttttttcatatgtttcttgtccatttatatatcttcttttgagaaatgtctattaatattatttgcccactctttgatgagattattatttttttcttgttgatttgtttgagttccttgtagattctggatacatgcrccaaatatacatccagaatctatatctggatatatccttgttggatgcatagtttgcaaatattctcttcattctgtgggttgtctccttactttgctcattattattattattattattatttgctgtttggaagctttttagtttaatcaggtcccattaacttttttatttttttgttgcatttgcttttcgggttttagttatgaattctttgcctaggctaatatccgga

SEQ ID NO: 163420 - DNA, 669 bp, Homo sapiens
tacttgtaaaactatactctttggtctagtgttgattttggtcaatgaagtgtggatggaaatgacatgtacctcttccaggatgaagcagtcattgcatggtgaggagctgccaaggagattcgcttagatgcacagtggacttggaatgaacaaaataaactttggttatgttgagcccctgagatataggggttctaaaatatcatagcatgtgctaggccattttaactaataaaacataggatgaaaactgatgcattaaagatactgtagcagaaaggttgaaatagccttatttccaaaggcagtattgagcatcaggaccagccctggactgccagcttccagatttcttattgagtaaagatacraagaaaaacttttagttaaatgatttagttgtatttgtttccatttgctttctttcatattttgcagctggaaacgttgcaaaatagatagatagatagatgatagatagatagatagatagatagatagatagatagatagatagataatagagcacagatatatagatgagagagttatagacatagatacagatatagatgtagatagatatggagttatcgatatagatacagatagctatagatgctcctcaacttatcatggaattatgtcctaataaacccatcataa

SEQ ID NO: 163421 - DNA, 669 bp, Homo sapiens
tacttgtaaaactatactctttggtctagtgttgattttggtcaatgaagtgtggatggaaatgacatgtacctcttccaggatgaagcagtcattgcatggtgaggagctgccaaggagattcgcttagatgcacagtggacttggaatgaacaaaataaactttggttatgttgagcccctgagatataggggttctaaaatatcatagcatgtgctaggccattttaactaataaaacataggatgaaaactgatgcattaaagatactgtagcagaaaggttgaaatagccttatttccaaaggcagtattgagcatcaggaccagccctggactgccagcttccagatttcttattgagtaaagatacgaagaaaaacttttagttaaatgatttagttgtatttgtttccatttgctttctttcatattttgcagctggaaaygttgcaaaatagatagatagatagatgatagatagatagatagatagatagatagatagatagatagatagataatagagcacagatatatagatgagagagttatagacatagatacagatatagatgtagatagatatggagttatcgatatagatacagatagctatagatgctcctcaacttatcatggaattatgtcctaataaacccatcataa

SEQ ID NO: 163422 - DNA, 634 bp, Homo sapiens
catttttagtaggtaaagaggaggaaggagaataataagataagtatcctggcatgtggttgtctagtcctaagtacaattccagtctaactctgtatatgtccttaagcagatttttgacgttcctacaaaatgtcaagggcttttgctgcacataaaaacagtgctgggaggctggccactggagtgatgcttatgatgaaacattttttaaaaatttatattccttcagatgtttcccattgactcagctgagaatggggtgagaacttaagagtttacagggaacaaatagaagcttaacagccatctggtgtcccaggggcatctggagcttttctctgtaggatgtgtcataggcgctctctccattactctytcacttccccacacactggctcaacacacaaaggcaatacacactcatggtcagaccgtggcaaaattgtgaaattggtggaatttgtcttcttagttctccatttctcagtcctatttcccatgtcgtttccagaagctcaatggtctcttatttttcttattacttgttcacctgctaattaatttattcaacaaatatgaaatacctgcttgtgatgcactctgctaagttctgaggataaagtgagacaga

SEQ ID NO: 163423 - DNA, 465 bp, Homo sapiens
agattcaaactttaatgaaagctataattaattgtttaccaatgttaggcacttatgttaagcactttatgtgyactgtttcttttaattctcataataattttatgaggttggaaagaattttatgcttatttgaaagatatatgtcacttaaagtagtttagtatggagctggttactaagtgtcaaagacaggattaatgttcagatcttttatactccaacaactacactattctttatttgttatgttcaacatattttgtctccatttgcaaatttgacacacttacatataatcaaattaatcatggcatttataagtgtattatgattgggggcacttaccagaccacattgtaccttgagtttgagttctgactccatccaataatagttgtatgaacacagcaggtcattaatgtagtgtgtatatgtctgtttactcatctatataactgagat

SEQ ID NO: 163424 - DNA, 479 bp, Homo sapiens
ccatattctggttttcttatgagatatctggcttttacctgtgtctggtgtaacttttaattgtttctgtctaaaactctcaagagattctctatttgaacaagaaaatattgtccccctatgttttatgaarttgatgaatcatagtcaattattgggaagtatattcattatctataacgccctagaagcagcctttggccaaaagagtaatgtttggttctatacactgtacctaccatttcttggttaaggaaacatgcttttgtttcacatatctcctcaattataccattcttcctaggagagttcttgttctgagtgaatagaaatagaaaaaacttcttgtcctgatttgcctgaaggttaatattctttaattattgtactctttcaaagcatcactggtgttttctataataacattttccttttgttattgaaatttgtgttttagtgatataacatttattttgttt

SEQ ID NO: 163425 - DNA, 479 bp, Homo sapiens
ccatattctggttttcttatgagatatctggcttttacctgtgtctggtgtaacttttaattgtttctgtctaaaactctcaagagattctctatttgaacaagaaaatattgtccccctatgttttatgaaattgatgaatcatagtcaattattgggaagtatattcattatctataaygccctagaagcagcctttggccaaaagagtaatgtttggttctatacactgtacctaccatttcttggttaaggaaacatgcttttgtttcacatatctcctcaattataccattcttcctaggagagttcttgttctgagtgaatagaaatagaaaaaacttcttgtcctgatttgcctgaaggttaatattctttaattattgtactctttcaaagcatcactggtgttttctataataacattttccttttgttattgaaatttgtgttttagtgatataacatttattttgttt

SEQ ID NO: 163426 - DNA, 545 bp, Homo sapiens
aagaaagcgatgtgtacttggatatgcaccctcatgttagattcagatttaattaccaataatttagtaatatctgtatcagctctgaaggttctgatgtgcaatgcataatgctaaatctcttctagatttaaagttggagagactatattctctcatacatcatgcaatattatctcataagagacaggagtatgcccctcaaataattgrgataaaaagacaaatggagatattgacagaatcataattggactttatttggctactccagcagtatctaagcctgtcaacacagtataggcttatctttgaagcagggaacaatggcactaagaagtaagctggccttatatgtaagatatccctggcacaaaggtagtgtcaaataaatagaaacttacccttgccttagtaaagtggcatcatctaagatagagaaaaccactgtgcagagaaacacctgattgagataccctgtgcttttgactctatcattctgtgtccaggattataattctaacaacaatcaggtgtgccataat

SEQ ID NO: 163427 - DNA, 539 bp, Homo sapiens
ttatatttgatttcagctgcaaaggcagtcagcgttcctaaaccctgcattattcaatgatcagctatatattattttaaagttctcacactatatgggaaaagcataacattgtttgaaagtagatggtaaacagttaaaaatgtgcactaaaaaccttaaagtatccattaaaataaaacatcaaaaatagcaactaaaaatagtcaacaaaaaagggaaaaattgaataatgtattcaacacgaaaggaggctgaaaaagagaaaaaaaagaattgcattcagatagtgtaaataaaaagcaaatagcttgaaggtagatttaaacccaatattaccaataatagcattaaatttatgtgatctaaaaactttagttagaatgcagagattatcagattggataaaaataacaagactcatatacaytgcttttaaaaaggtgttttgtaagtataaaaacatgaatacaagtaaaaggttggaaaaagatatatcatgctaacactgatcaaaaagaaagctggagggactatac

SEQ ID NO: 163428 - DNA, 586 bp, Homo sapiens
gcagcagtataattgtgtcttcaatttaaatatctatagaactaaaggttttatctgtcttctctragatccatcttagcagaataataaaaaaaaatctaagtactaaaatacagaagtaacttatttcattaatttctatttaccttcatgttagtaaacagtttgaagaatctatatatttttatgttttagattagcagaatataagttttgtccatatagacatatatttagatctggttttaatgttttgataaatctgtgtattcaagtcaatgcagagtttgattgacatcacttccactaaaactgtcgaaacatatctaatgcataattgccaaaggtttatttccttattacaacatatttaactgagatattagtttttaaatgcatactcccagggtcttacacatagtggaataagagaaatcatgttacattcattatctcaatttatttttaaaattccccaaaattctctaatatgattttctgcatccacacgtttacttccctagagttttcccaattttcacaggtaaagaggtaaatcttttaacaactttgaaaccaagataag

SEQ ID NO: 163429 - DNA, 586 bp, Homo sapiens
gcagcagtataattgtgtcttcaatttaaatatctatagaactaaaggttttatctgtcttctctaagatccatcttagcagaataataaaaaaaaatctaagtactaaaatacagaagtaacttatttcattaatttctatttaccttcatgttagtaaacagtttgaagaatctatatatttttatgttttagattagcagaatataagttttgtccatatagacatatatttagatctggttttaatgttttgataaatctgtgtattcaagtcaatgcagagtttgattgacatcacttccactaaaactrtcgaaacatatctaatgcataattgccaaaggtttatttccttattacaacatatttaactgagatattagtttttaaatgcatactcccagggtcttacacatagtggaataagagaaatcatgttacattcattatctcaatttatttttaaaattccccaaaattctctaatatgattttctgcatccacacgtttacttccctagagttttcccaattttcacaggtaaagaggtaaatcttttaacaactttgaaaccaagataag

SEQ ID NO: 163430 - DNA, 598 bp, Homo sapiens
ttaatttctatttaccttcatgttagtaaacagtttgaagaatctatatatttttatgttttagattagcagaatataagttttgtccatatagacatatatttagatctggttttaatgttttgataaatctgtgtattcaagtcaatgcagagtttgattgacatcacttccactaaaactgtcgaaacatatctaatgcataattgccaaaggtttatttccttattacaacatatttaactgagatattagtttttaaatgcatactcccagggtcttacacatagtggaataagagaaatcatgttacattcattatctcaatttatttttaaaattccccaaaattctctaatatgattttctgcatccacacgtttacttccctagagttttcccaattttcacaggtaaagaggtaaatcttttaacaactttgaaaccaagataagtggcttctgcaactagatattgcaggcaaaactagtgtgagaagagacgtgaacagccagtaattcaccacaygtgtggaggaaaaagaaatcaattgatcaagaaatacatgtaagcaaacccaacaaataaccattagcaa

SEQ ID NO: 163431 - DNA, 598 bp, Homo sapiens
tgaatttaatgcttggtgaatgcaaaaattactaartaaacactcaacccaatgaataatttaaccctgtcttgtacttgtatttaatgaatattattatgtcaggtagataatgggaattaacaaatcagttccacctttgattttgaagaatagtcctcgtatggccgcaaagaacatttatgcattcaactgtctttgccaaacccagctttatttcaatcttacaggaatataatgttcgacagagttcagttttttttctagaaatcaaagaagaaaaataacaaattccacaggacaatcagaaacaatcactgattctgttttcccataaccctctttttatcctgaactaagaaattgtattaagacgaaaattcatcccatactcaggtttaccatatattgcagagggtgtaggtgagagtttaagaaaattgcatagtttgaacacagcaatatgtatggatataatagcaacatataaattatgttcatattatagtatggtatcatagagaaccttaccaaatctctccctctttctctctctttatctctttctccagttcatatttgtttaatattggggaga

SEQ ID NO: 163432 - DNA, 583 bp, Homo sapiens
ctccaattttcacagagcatgagaacttacatacaaattaacattcttgctcctcatttttattcattatacttttctattagcaggtttatttgaaaaaaaaaawaaaaactggaatacatcaagagcaaccaggctatattggaaggggccttctcttctgtctttctcgttatttaggtagtggcaaatacattagcaattgacaacctatggaaaatttctaccagttgacaaagggaaaagtcccagtccctcctcacttaacattctaaactgttgactgcactcaagatgcacctaagatgaaacaatgtcagttgcctaaagacatgattataaaaaaaatgtggacctcagttgtgtgtgtgatttattttcatctccaaacactcatccctgacttgtaatgcagaattaagagaacactgaattcaaattaaagatcatgcaaacaagatgcttagtctaatcattttcactttattatagcgaagtcttgttagggacccaaaagtatgaatttgtgatttcaagcctaccaaatacatttataattccacaaatgtatgctataaaaatt

SEQ ID NO: 163433 - DNA, 586 bp, Homo sapiens
tatatctaatcctaatgacaactttgcaaagcagttgagattacatttattttatcaatttttttaaaaggaagctcaagtagtttactaatatccccaatatcattcaggtagtaaagggaataatcagcattggtatattgccacatcttccayctctcctgcccttttgttccagtgtacagttagcccttcatatctgcagattcaaccaaccacagtgaaaatattaaaaattcaaatacaaatttttaaaatatagtataacaactttatatagcatttacattatattaaatattataagtaatataaagatgatttaaagtatacaggaggatgtgcataagttatatgtgaacacttcaaaattttataggagggtcttgagcactcacagattttggtatccgcaggtttctggaatcaattccctattgatacaaggaaggactacattgctactcttcatacccagtccccaaatttatacaatatactttctttgctcatcatttttttattctctttttcacaacatttaccaagtccccaacactattccttagatgtgaaaagtagttgt

SEQ ID NO: 163434 - DNA, 586 bp, Homo sapiens
tatatctaatcctaatgacaactttgcaaagcagttgagattacatttattttatcaatttttttaaaaggaagctcaagtagtttactaatatccccaatatcattcaggtagtaaagggaataatcagcattggtatattgccacatcttccacctctcctgcccttttgttccagtgtrcagttagcccttcatatctgcagattcaaccaaccacagtgaaaatattaaaaattcaaatacaaatttttaaaatatagtataacaactttatatagcatttacattatattaaatattataagtaatataaagatgatttaaagtatacaggaggatgtgcataagttatatgtgaacacttcaaaattttataggagggtcttgagcactcacagattttggtatccgcaggtttctggaatcaattccctattgatacaaggaaggactacattgctactcttcatacccagtccccaaatttatacaatatactttctttgctcatcatttttttattctctttttcacaacatttaccaagtccccaacactattccttagatgtgaaaagtagttgt

SEQ ID NO: 163435 - DNA, 586 bp, Homo sapiens
tatatctaatcctaatgacaactttgcaaagcagttgagattacatttattttatcaatttttttaaaaggaagctcaagtagtttactaatatccccaatatcattcaggtagtaaagggaataatcagcattggtatattgccacatcttccacctctcctgcccttttgttccagtgtacagtkagcccttcatatctgcagattcaaccaaccacagtgaaaatattaaaaattcaaatacaaatttttaaaatatagtataacaactttatatagcatttacattatattaaatattataagtaatataaagatgatttaaagtatacaggaggatgtgcataagttatatgtgaacacttcaaaattttataggagggtcttgagcactcacagattttggtatccgcaggtttctggaatcaattccctattgatacaaggaaggactacattgctactcttcatacccagtccccaaatttatacaatatactttctttgctcatcatttttttattctctttttcacaacatttaccaagtccccaacactattccttagatgtgaaaagtagttgt

SEQ ID NO: 163436 - DNA, 539 bp, Homo sapiens
gttaagctcatgcaagaggtgggttcccatggtcttggacagctctgcccctgtggctttgcagagtacagcccacctcctggctgctttcacaggatggtgttgagtgtctgtggcttttccaggtgtacagtgcaagctgtcagtggatctaccattctggggtctggaggatggtggcccttatctcaaagctccactaggcaatgccccatttgggactctatgtggaaacttccaccccgcgatttttttctgcactgccctagcagaggttctccatgagggctccatccctgaagcagacttctgcctggacatctagacatttccatacatyctctgaaatctagatggaggttcgcaaacctcaatttttgacttctgtgtacctgcaagcccaataccacatgtaagcctccaaggcttagggcttgtaccctctgaagcaatgacctgagctctaagttgtccccttttagccacagctgggatgcagggcatccaaagcactgcacaaaccagcaaggccctgggcc

SEQ ID NO: 163437 - DNA, 602 bp, Homo sapiens
gcctatttttcaattttgttgtttattttcttacctttgagttttactatttttatattgtttgtacaagtcttttttggtagttatgtaatttgcaaatattttctttcatctggtagtgtgcctttcaattcttttaaaatgttttctgcaaagtaaagttaatttcagtgagattcaatttatcatttttatgaactataattttggttatctaatcattctacctcttatgaatatatacagaaatacctgataggattttgattagtrttaggttaaatgtataaatcaatctgaagagaattaacatgtttactatattgattatacacatccactaacatagtaggttgccattaggtttcctttgattcctttcatcacaattttgtaattttcagcatacacattctgtacatgttttgttagatatatacttaaggatttcatcttttattgtaattggcttggctttttcttttaaatgttaggttctaattgtacattgctagtatctaaacatacaattggttgttgtgtgttaattttgcatcctgtgactttgctcaacacacttattagttgtaggaggttttttt

SEQ ID NO: 163438 - DNA, 556 bp, Homo sapiens
tcatgttttgtttaggggggttaggggaggggagggtaaggtagagtatgacaagtcaaataaatgaggtttctgagaatattagcaagaacgttattgaagtggatacacagcataggagatttagtcaaaaggagagggtagaaaggacatggatatgtatgtgtgtgctggaggtcctaaggaagttaaatgattgaagacctggggataggttarcaaataaataggaggttgtggttgaagtagtaggtgcctgaatttatgacataagagataaaatatatttcaagtgatggcaaacctggagagaagttataaaagtgagtcatagacctgaaaacaaatagaaagcaactgtacaaaaacaaatcagagaactgaagatcagaatgttgtatatgtcaccatatggaccttgaagtttcttaagattttgataacacagagggcaaagaagagcctgcaaaccaggggattttcttttatttttttaaaaataaatgagagtgaaagatcagtaaacgaagaggtttgtatgtttatcaacaaaacg

SEQ ID NO: 163439 - DNA, 494 bp, Homo sapiens
ttagagcactgtaagatatgaaattctctgcttatgacctcaggatcattatgttagaaatgcaagagacatggaccgtcatgtccaacatttctcaaagttcattccatagctctcagtcacactctgaaaaaaaatattcactggctaatacatttgtgaaactcggaataatatacawctcctatagagatttatacaatagtcaacatatcaaagtaatgagaaatcttgtagtatgaaaagctatttaactttgaaagaaaatatagcatgatagttcaaaagatcatggatgctagaactagactgggtgggtttaaagcccggttttgcttcttagtagttctgtgagcttaagctacttatttaacctcactgtatctgtttgcttaaataaagaccaaaaaatgcctatttcaaacaatattcttggaataatttaaacaagtcaatatagagaaaaaatatagtatcgggcacatcataataac

SEQ ID NO: 163440 - DNA, 608 bp, Homo sapiens
tatacacccaaaagaaaggaactcggtatatcaaagagatatctacccttctgtgtttattgcaacactatttacaatagccaagatgtggaagcaacctaagtgttcatcatcaaatgaatggataaagaaaatatggtacatatacacaatagagtactattcagccataaaaagaatatgatcttataatttggaacaccatgaatagaactggaggacattttgttaactgaaataagccaggcacagaaagacaaaattgttctcatgttctcactcatttgtgggagctgaaaattaaaacaattgaactcttggagagtagaatgatggttaccagaagctgagaaaggtagtggtggagaggggggaacgggaatgcttaataggtataaaaatatagttatgtagaatgaataagatatagtatttgatagcacaactgagtgagtgcagtcaacaataatttagtgtatgtttaaaaatagctaaaagactttgggaagccgagtsaggtatatcacttgaggtcaggagttcgagaccagcctggccaaggtagtgaaactccatttctaccaaaaatacaaaaaattagccaagca

SEQ ID NO: 163441 - DNA, 497 bp, Homo sapiens
tattttagtcattaatttccaatcaatgattatttagtttaacccaacatgcatacgaacatttgctcacaattgcttcttttaggttttctttctttttattttaagagactgagatcttgctatattgcccaagctggtcttgaacttttgggctcaagcgatcctctcacctcaccctcgtgaatctctgtgattacagttgtaagccaccatggcaggccacagttgcttcttaaatttcaagtttttttcttctgaattaaagtttctagtgttcttcttatgtagaatatattatggraaaaaaaaaaaaaaacagaaacaaagactgatagtatatcattttgttgttggtttccttcatactggctttagtgaaggtaggttctcaatctttgtcccacaactaccacacacacaataagtttttaccatcctctcccttgaatgaggctttagctgggtatagaatttttgaggaacaattatgtttc

SEQ ID NO: 163442 - DNA, 591 bp, Homo sapiens
ccttactaattttctatttggatgttttatccattgatgaaagtgaaatacagcagtcttctgctattattgtatttctgcttatagattctgtttttcaatacctttattaagtgtatatttttcaaatattttatctacatgtgtggctggtcttttccttttctcaataatatctttcaaaggacaacatttttaaattttgattaagtttaatgaataaatttgtttatttctgaatcctgcttgtgatgttatatctaagaaatatttgtctaaccaagtttgcaaagaattctcatgtgttttatgtagaattttaaaatttcagtttttaacttttggtgcattatacattttgagtgaattttgtctatggtgtgagatatgtatgaaagtgcttttatttttgccaatagaaattcaatagtttcagaaacatccattaaaaactatcttttcttaactgatgtgcttttatatttttgttaaaaragtaagctatcaatacatgataattctggcctcaaagatgaattaaggaatatttcctcctcctcaatttactggaaagtttgagtagaataagtt

SEQ ID NO: 163443 - DNA, 453 bp, Homo sapiens
atagcagcagtaagcactctggcagttaggtgcagatgcctggtgaaccccattttcaaccctgaaagccaatctacaagtgaaatccatggaccagattgagaacctctcttcctgttcagcaccctttcttckgattaatccttacccttcacctgttttacatatacctacttttctctaactggttttttacactaccctgcccacctttgactggcgtctttgttttagcctttctgcatactcacaaaccagtcactatgcactcccccattctgagcccataaaagccccaagccttgccacactggaggagaaaccacccaactttgggtggggaaccaccctcacatcccctctccactgagaactgttctgtcacttaataaaattcttctccactctcctcccactacaattgtcagtgctacctcattcttcttggatgtg

SEQ ID NO: 163444 - DNA, 453 bp, Homo sapiens
atagcagcagtaagcactctggcagttaggtgcagatgcctggtgaaccccattttcaaccctgaaagccaatctacaagtgaaatccatggaccagattgagaacctctcttcctgttcagcaccctttcttctgattaatccttacccttcacctgttttacatatacctacttttctctaactggttttttacactaccctgcccacctttgactggcgtctttgttttagcctttctgcatactcacaaaccagtcactatgcactcccccattctgagcccataaaagccccaagccttgccacrctggaggagaaaccacccaactttgggtggggaaccaccctcacatcccctctccactgagaactgttctgtcacttaataaaattcttctccactctcctcccactacaattgtcagtgctacctcattcttcttggatgtg

SEQ ID NO: 163445 - DNA, 581 bp, Homo sapiens
tattttttttatttccctgaaatctgaaaactatttaaatttgtgtctaatgacagtacttattacctaaaattatttataacatgaggaaagatactagtctagggatcaggatactttgttacaattcctatggctattgactagatcactaccatgtgacttagaacagtccactcagtctccctgggcatgatttttccagaaggtgaaactatgtatttagctcaatgatttctggactctttccttactcaagctttatacagtatcccaattgtttgatcaaaagcatctattattttacttaamtaggtatgactattaaagtgtggagacatattacatacaagggaaaagagaatttgattatataactatgaccgcacaggggaaaatacctccactttgaaaaagatattctcttcatacaggaagttaagtttaaccaatgcctgacaatgtactttagtgtgcttaactggatctttagctgaatataagaaacttttctctattcaatttataccccagggaaatgagtggaaaatgcagatataatattgatacatattgtaaag

SEQ ID NO: 163446 - DNA, 581 bp, Homo sapiens
tattttttttatttccctgaaatctgaaaactatttaaatttgtgtctaatgacagtacttattacctaaaattatttataacatgaggaaagatactagtctagggatcaggatactttgttacaattcctatggctattgactagatcactaccatgtgacttagaacagtccactcagtctccctgggcatgatttttccagaaggtgaaactatgtatttagctcaatgatttctggactctttccttactcaagctttatacagtatcccaattgtttgatcaaaagcatctattattttacttaaataggtatgactattaaagtgtggagacatattacatacaagggaaaagagaatttgattatataactatgacygcacaggggaaaatacctccactttgaaaaagatattctcttcatacaggaagttaagtttaaccaatgcctgacaatgtactttagtgtgcttaactggatctttagctgaatataagaaacttttctctattcaatttataccccagggaaatgagtggaaaatgcagatataatattgatacatattgtaaag

SEQ ID NO: 163447 - DNA, 581 bp, Homo sapiens
tattttttttatttccctgaaatctgaaaactatttaaatttgtgtctaatgacagtacttattacctaaaattatttataacatgaggaaagatactagtctagggatcaggatactttgttacaattcctatggctattgactagatcactaccatgtgacttagaacagtccactcagtctccctgggcatgatttttccagaaggtgaaactatgtatttagctcaatgatttctggactctttccttactcaagctttatacagtatcccaattgtttgatcaaaagcatctattattttacttaaataggtatgactattaaagtgtggagacatattacatacaagggaaaagagaatttgattatataactatgaccgcacaggggaaaatacctccactytgaaaaagatattctcttcatacaggaagttaagtttaaccaatgcctgacaatgtactttagtgtgcttaactggatctttagctgaatataagaaacttttctctattcaatttataccccagggaaatgagtggaaaatgcagatataatattgatacatattgtaaag

SEQ ID NO: 163448 - DNA, 628 bp, Homo sapiens
tctgttgaataatgattagcagaaggtaaatctgagagtcagacttccagtaggagctggttgtaaaattcttggatggaggtaacaacaatttgaactagaataacagttgtaattgaggagaatgatcaggaagattggcatgagagccatttccattcatttgacatatcttcattaatcttggtaatttaccaacatgtaacctttgggaagttatttaacctttctatatgttatttttctcatctgtaaaaatatataatagtgacattgacttcatagatttattaatattaaatgaatgcatatagaatggtttaagtgcaaatacatataagaggtgatgatggtgatgatgacgataaagcatgaacagtgtttgcaaacactaattagtgaaatatgagaacccccccacattgcccccccccacacacacacacacasagagagagagagagaggccagaaaaagaaattaagttaaaacatctttttttttaggcaatttgtgttgcaagttataagaattattaaaaatagaagaaagtagttgaaaatgggtaagtggagatagaaaaattgttagtgattggaggtataagtttatataggagagaaataga

SEQ ID NO: 163449 - DNA, 628 bp, Homo sapiens
tctgttgaataatgattagcagaaggtaaatctgagagtcagacttccagtaggagctggttgtaaaattcttggatggaggtaacaacaatttgaactagaataacagttgtaattgaggagaatgatcaggaagattggcatgagagccatttccattcatttgacatatcttcattaatcttggtaatttaccaacatgtaacctttgggaagttatttaacctttctatatgttatttttctcatctgtaaaaatatataatagtgacattgacttcatagatttattaatattaaatgaatgcatatagaatggtttaagtgcaaatacatataagaggtgatgatggtgatgatgacgataaagcatgaacagtgtttgcaaacactaattagtgaaatatgagaacccccccacattgcccccccccacacacacacacacagagagagagagagagaggccagaaaaagaaattaagttaaaacatctttktttttaggcaatttgtgttgcaagttataagaattattaaaaatagaagaaagtagttgaaaatgggtaagtggagatagaaaaattgttagtgattggaggtataagtttatataggagagaaataga

SEQ ID NO: 163450 - DNA, 534 bp, Homo sapiens
ttataaccggacctgtcactatctcttgattcaggaattaatccgctatcctctctttcgttctattctttcccaagtaaagataccatcctaattagccaacatcacactttctccactggtgaaataatcctgtctactatatagtaacagatatatatgggcaaaaaaggtcaatttttcagctaggttctgggtttctataaaaatgacatgattctaggtttctataaaaatgacatgaccattctttattattattattttagagacaaggtcttgctcttttgccraggcagaatacattggcaccatctcagctcaatgcagcctcagacgttgggctcaagaaagcctttctccttagcctcccaatgtgctgggattacaggcatgagacattgcacccaaccatcatttactattaatttaaatttgtcctttgttcttggacctggggccccaatagaacaatttttctcttgttatagggatccatcaggaaaactttgaaatgagaaaaacaaatggtct

SEQ ID NO: 163451 - DNA, 592 bp, Homo sapiens
ttctgtcgttttaagccactcagttggtggaaaattgtggcagctcttggaaagtaatataattgatgactgcctttaattctttaatagcctgtcttttattcttctcatggtgcaagctgagaaccacctttgctatctgatgatatatttttacactaataaagctgtgctgtattatctatgggttaggacactgtagctgctactctaaccttactggtcattacaataattgaaaacacctggctcttggcagtcaagcattgccacatagtccctgttttctcaagataatactgtcccattggtatcaaagagccaagcactacarcaaaattttaccatcagtcctggttcacagatgagaggcaccagaaaacatttcaatgatgctggtggccctatcaccagggtattgtctatgggcttggtaactgttctaaactgcacaacttccccttgaattagattcaccacttggtaggtactcagctttacttagttcatttgctccaacatgaccccttccttgagtcaattccctcccgcactgtctgctttgtcaattccatcaggtcaaccacactta

SEQ ID NO: 163452 - DNA, 551 bp, Homo sapiens
cacgtctggttgttttgaagtgtgcggcacctcctgccccccttgtttcttctctagccgtgtaaaatgtgcctggttcccatgatttgccttccaccatgattgtaagttttctgaggcctccccagaagcagaagccactatgcttcctttacagcctgcagaaccatgagccaactaaacctttctttataaaagcccagtctcaggtatttccttacagcagtgcaagaacagacaaatacagggtaatgtaaggaaggggaagattttcaggaggaagtcttgcttgaagtaagttgcttgagatatgtatcgagatgacaaagagactatcctggtaagaaactaatagattctattaaaggaaaaataggtagttarcttcatttattcatttaatttgggaagactttgaggtttagggaaactaaacattttttccccaggtcacacagtgaatacaaggcaacataaggattgtcagagctgtcagacaaaagattcttacctcttaactaaatgggacagtagagagatcacagagatgg

SEQ ID NO: 163453 - DNA, 551 bp, Homo sapiens
cacgtctggttgttttgaagtgtgcggcacctcctgccccccttgtttcttctctagccgtgtaaaatgtgcctggttcccatgatttgccttccaccatgattgtaagttttctgaggcctccccagaagcagaagccactatgcttcctttacagcctgcagaaccatgagccaactaaacctttctttataaaagcccagtctcaggtatttccttacagcagtgcaagaacagacaaatacagggtaatgtaaggaaggggaagattttcaggaggaagtcttgcttgaagtaagttgcttgagatatgtatcgagatgacaaagagactatcctggtaagaaactaatagattctattaaaggaaaaataggtagttagcttcatttattcatttaatttgggaagactttgaggtttagggaaactaaacattttttccccaggtcacacagtgaatacarggcaacataaggattgtcagagctgtcagacaaaagattcttacctcttaactaaatgggacagtagagagatcacagagatgg

SEQ ID NO: 163454 - DNA, 561 bp, Homo sapiens
ataaaatgtcaaatcagagaggtggttcagcagcattattctgtgagaggcacactycatgggccatgtggacaagaccccttagccagtctcctcacacagctgggacattccctttgggaccccactcctttgggacaggcaggccttcaaatttttgctagagctgtgataatactgagttaaggtgccacctagtggcaaaaagagggagtgacctagagctaaaggtgtcaatatgcagactgcacagaacctttcaacacacatatgttagagaaaccaaaccagcccgacaagcaaatactggaataaataactaatcattcaatgcaaatcaatagacttacatccataagaaatgatgacagcaaactgggaacctccccaaacggacaaagtagggaaccagtgtctgattccagcaagatggtgatgtgagctttcagatcaagaattcaaaataagagtattgaggaaactcaacaaaatccaagataatgcaaacaagcaatttggaagtttattagagattaacacaataaaaaagcaaacagagat

SEQ ID NO: 163455 - DNA, 621 bp, Homo sapiens
tcttttcataaatctcaaattatttgggaaaataaaatgtatttaaatagaaatacaaatttgtggaagagtttggacatactgaagtcaggtgacaagcatttggactagctgtagtaatatcacacctatcaggaagcctgcacagcaccgagcatactgcctgctttttgacagctaatgagtagacaatgaaacactgtgttcaatgctcttgcaatttatgtgcccctgctttggaytctcagaaggagaaaaatgttttttaaagcagcagggagatcacctctgtgtgacttccttctttcaagcttccttcaaatatatataattggcaacatattatttgcttccaaaaacttaataagagagtttgtaaaatatggaatttaggtttacaacctctgcaggaggaaatacatttaaaagagggaaaaaatgggtgctgtgcattaatcatccaaacccaacacacttcccctatttgccatcgataatgatttgggtgatgtttatttattttccttctgtctctagggatgtgggtacaggatttgcctaattaagatgttctatttttctaaatataataatgaatgcattaatctgaaagccagtctt

SEQ ID NO: 163456 - DNA, 555 bp, Homo sapiens
cacagctgggacattccctttgggaccccactcctttgggacaggcaggccttcaaatttttgctagagctgtgataatactgagttaaggtgccacctagtggcaaaaagagggagtgacctagagctaaaggtgtcaatatgcagactgcacagaacctttcaacacacatatgttagagaaaccaaaccagcccgacaagcaaatactggaataaataactaatcattcaatgcaaatcaatagacttacatccataagaaatgatgacagcaaactgggaacctccccaaacggacaaagtagggaaccagtgtctgattccagcaagatggtgatgtkagctttcagatcaagaattcaaaataagagtattgaggaaactcaacaaaatccaagataatgcaaacaagcaatttggaagtttattagagattaacacaataaaaaagcaaacagagatcctggaactaagaaatacattggctgaaataacaaatgtatcagagggtctctacaacagaaccaatcaaacagaagaaagatattgtgag

SEQ ID NO: 163457 - DNA, 498 bp, Homo sapiens
cagtctccacctattgagaggtgaagccagctgggcttctgggtcgggtggggacatggaaaacttttctctctagctagaggattataaacacaccaatcagcactctgtgtttagctaaaggattgtaaatgcaccaatcagcactctgtaaaaakgcaccaatcggcactctgtgtctagctaaagaattgtaaatgcagcaatcagcactctgtaaaaatgcaccaatcagtgctctgtgtctagccgaaggattgtaaatgcaccaatcagcctcttaaaaacgcaccaatcagcgctctgtgtctagctaaaggattgtaaatgcaccaatcagcactccataaaatggaccaatcgcactctgtaaaatggaaaaaacagcactttgtaaaatggaccagtcagcagggtgtgagcggggccaaataagggaataaaagctggccaccagagccagcagcggcaacccgcttgggtcaccatccttgctgt

SEQ ID NO: 163458 - DNA, 546 bp, Homo sapiens
ggtattgtgtggaacatgcctttgacatgtttgggcctgaacaaacatgagttattactttttgtgggtgtccttttgcgtgctttttgtcaggaaatctaagcatgcacacaaagacatgagaagctaaatagagctggtagggtcctttttcccttgggaatgccaagtaaactgtatgttgcacaccagtgttttgactgcaatctgttacatraggtcaggtgtgactttttccagttttggtgtcatgtgagcactcaaaaattttgaattttgcaggattttagattttggatttttggattaaagactttcaacctgtatcttctttggtgaggtgtctgttagggtctttagctcacattttcattgaattgtttgttttgttgttgttgagctttaggacttatttgtataatttggataacagtcctttgttagatattttgtttgttttttttccaaatatttacccctagtctgtggcttttttcttcattttttgacagtatctttcacagagcagaaatttctaattttaat

SEQ ID NO: 163459 - DNA, 290 bp, Homo sapiens
cactgagcctctagcaattcattgattacatttcargtttcctaacctggtaccaatttctgtggtgatttctgcacatgggtttctgctgcagtaagttgtgattctctgcatttgcttgagggtatctctaattttgagggcagtgttttgtgctgtgatctcacttgtcttatggatctaagaagagtttttgatttcttagtttgttcagctttttacttcttgttaggatgaagtgggaacttctaagctctttacatgctgggctgcaaattggaagtttctat

SEQ ID NO: 163460 - DNA, 290 bp, Homo sapiens
cactgagcctctagcaattcattgattacatttcaggtttcctaacctggtaccaatttctgtggtgatttctgcacatgggtttctgctgcagtaagttgtgattctctgcatttgcttgarggtatctctaattttgagggcagtgttttgtgctgtgatctcacttgtcttatggatctaagaagagtttttgatttcttagtttgttcagctttttacttcttgttaggatgaagtgggaacttctaagctctttacatgctgggctgcaaattggaagtttctat

SEQ ID NO: 163461 - DNA, 498 bp, Homo sapiens
aattgtagaggagaatagtttcagattagaggaataatcatttctcatgacttcagagaaagacaaggcaaaaataaaatcctagaaggaaaagccacagacacagggggtgggggggccctatgggcagtgagagagccagatttgtgtggctcttaaaggtgtttctctgaggattattgatgacaacarctatctattacatattgatttctggtatgtcattgccttgagtcttgcagacatgaaagaaaatagcttacattataattgtcatgatgacaaacataaataaaacaggttctgaacagctttcaggggaaaaattacatttttacatggtgatcatgagtgtgcattttttttctataacttcagctctcactcatagtcaaggaaggatataaacaaattcaatatagtactttatgttaacaggggtcaatgaggctgcctctcatccggcaattttgtcagtatcctatctgagaaacactg

SEQ ID NO: 163462 - DNA, 570 bp, Homo sapiens
ccctaggaaatgagggagtttcttacggttgtgattgtggttggtttaaatttgttattgctaagaaatctttgtaagttccagatctgctttttctagatgagtgaaatcgtacatgtcagtaaatccaattttcactttcctcttgggtaaaataatattaatatcactgtattatccaagaatcttaatgcaaattttattttaattgtaaaatctatgaaaacaaatacatttacttttagctttgttatatattagttaactatatttaaggttgtaattctgaagtctaacatcagctcactgactcattcattcattcactcactcattcattagagtttggagcacctgtcctatactggtaggtgaattgatcacatagatcatacagtcctaatgaaagaagcagttactaaagagtgaataaactcataattaaataaygtcaaacaatcttaacttatgtgaaagtaaaataggatgatgtaatattgaaatagcaggatacattacccggagaagaagatatttgagctgcaaaacaaatgtccagatggagaaagc

SEQ ID NO: 163463 - DNA, 458 bp, Homo sapiens
aaaaaatctttttgtttattcttttgtatacagtcatatatttgatatatttgaatatgtgtatgtgtatcatacaatacatcagagcttgcaaattgatggaccactggccctaactraccagtgtttcattagtcccctactgtattttagaaaaagtatttgtttctaacacttaaaaaaagatatttcatataaaatccatattttttttgcttcttaagattcagcaacacacaacatgtttctcacataatagttgtttagagttactgtctgcataagatagaacatgcgttcttcagtttcccacagtttctgtttaatacgtgttggctgcctgaccttgataggcatttgagattgtgattcttgctcatacatagtattttgcactttcttccttcactccctaactctgtagcatattttggacatcttttcatattagtgaaaat

SEQ ID NO: 163464 - DNA, 385 bp, Homo sapiens
taattttgaaaaggaatataactgctcaaatttgagtttaactgaaacagacggaaacgaatgcctgatgaaagagcatctctccatagtactgaagatgtagaaaaaaaaaacataaaaagagcacgctgctgatagaagctgagagaaagaacacaagaaatagttgtctctgacatttaagcaagcctgatgctgggtgtttttagatttatgtgactgataaataatacaagtttccctgtagaggacaaatccaagtgaaaaataactgaygagaagagaggtatgtggttagtagtctcaacaggaaagctgagctatcctgaaattcaagatataaaatgtctattttttacctagaatattgtacccttggcaatta

SEQ ID NO: 163465 - DNA, 592 bp, Homo sapiens
ccacctgaatgaactttctgaaagaaatctgatcatgtcttctattcttcatgattctccaatgcctttgagataaaatcaaaagctcttaccatgacattcaaggcttttcacaattaagtctcaaacattctcctgtctccattactttccactaccaatatattcatgttcgagttaacttttgaagcacggggtgtttgcttgcacttctgagccttgttaatgctgctccttttgcctggggcatcctcctatcttctctacctgatgaatttttgcttatgttttggggccttccacagatatcaycacaacctgaaggtctaccttgccccttgcccagtctcagagctagccctgccctcccctggaattgccctggctttagtcagcccacattgagcagagtgcatgtaactgctagttggtcagtcttgcttcttactctgcaagcctcctgaaagcaggacaaagtgttcctgtcttttacatgcccaggcccattcaagtacttagctcctaagatgccctcaatgttgctgaatctgtgaacaaagcatcttgttcacaccatgttaatttgcatcca

SEQ ID NO: 163466 - DNA, 612 bp, Homo sapiens
gcaacctccacctcccgggctcaagcaattcttacacctcagcctcccaagtagctgggattacaggcatgcgccactgtgcccagctaatttttttttttttttttcagtagagatgggsttttgctatattgcccaggctggtctcaaacacctggcctcaagtgatccacccgcctcatcttcccaaagtgttgggattacaagtgtgagccaccatgcccagcctcaatttctaactcaatatctttccaagggatgtaataggcatttggagctgatcaattctttattttatgggagcacacctgcaaatttcaggatatttagcatccctggcctcagacgctaaataccagaaacaccattcaactactgcacaaaccaaaatcaaaatcaaaatttgtaaacagatttgcaaatgcctttgaaaatgacagagtattaccctctccaaaaagcaatgcacatacacagcacacatcaattttattgttgttgttattagtataattttagcagttacatggacttactgcctcgtctctagaaacccatcagctaatcttctaaaggaaacatttttataaagacataggcttagatattgat

SEQ ID NO: 163467 - DNA, 612 bp, Homo sapiens
gcaacctccacctcccgggctcaagcaattcttacacctcagcctcccaagtagctgggattacaggcatgcgccactgtgcccagctaatttttttttttttttttcagtagagatggggttttgctatattgcccaggctggtctcaaacacctggcctcaagtgatccacccgcctcatcttcccaaagtgttgggattacaagtgtgagccaccatgcccagcctcaatttctaactcaatatctttccaagggatgtaataggcatttggagctgrtcaattctttattttatgggagcacacctgcaaatttcaggatatttagcatccctggcctcagacgctaaataccagaaacaccattcaactactgcacaaaccaaaatcaaaatcaaaatttgtaaacagatttgcaaatgcctttgaaaatgacagagtattaccctctccaaaaagcaatgcacatacacagcacacatcaattttattgttgttgttattagtataattttagcagttacatggacttactgcctcgtctctagaaacccatcagctaatcttctaaaggaaacatttttataaagacataggcttagatattgat

SEQ ID NO: 163468 - DNA, 488 bp, Homo sapiens
atctctccaactgtttagattttctttaatttctcacaacaatgttttgtagttttaagagtacaggactagtacatattttactaaatgtattcctaaatattacacagtttttaatactattacaaatggtgttgatttcattgaaatttctaattgttcattgtaagtaccctaaattattattatgcacagtagttatgttctataaagtctccacaaacctgaattagcaaatactaaaccattgttcctagggaaaataaagataaggttcctgcaagtctctggtaatctttttatcaacagatcagtacataatcttgttttatgcatatttatgcttaaagacatgttatttcttatatattgttgactcattaacattgaactcatagccaacaacactgtaactcatgcctgaacaaagcttattygacacacatattttctttgtaaggcatatcacaaccttcctgcacttaaga

SEQ ID NO: 163469 - DNA, 575 bp, Homo sapiens
gcaggtctcacctctctcgtattttgccctgcaaactctagccaccttggtctgtctaaactgccaactctgctttttaaactcagcctgtccgtctctgtgtgggtttcccttccctgtgctgcattctagaaattccttctaggtaatgaactgttagaattgtagggtcacctcatttgttttcttcatctcagggataactgccccgtaccacttgtctaatgcttgaaacctactgtttcatctactttgtccagttttatagctgcttaaggaaggtgagtgaatatggttcttgttatcccatcatgaccagaagttccctgaggggttctttttaatataagacattttttacacaggtgtaaagtttaattgaaatatatgcgtgtatatatatatatatayacacacacacacacacacaggcgtgtgcacgcacacacacacacacacaagaatattattcaacctcaaaaatgaaggaaatcctgccatttgcaacaacatgaatgaacctggaggacattatgccaagtgaaataaaccagacacagaaggacaaatactac

SEQ ID NO: 163470 - DNA, 396 bp, Homo sapiens
ctcttcaaaagaagagtggtaatttcttgtacccatgcttctgaaatattgccaatmcctgttataaattaatcaaagccaatagagttctcataagtaacatgcaagtcatggttactttttttttatttccatattactccttcagttggaaataccttactatccttcctccatctatttaaattagggatttcaagctggtatccaaggatttctatatgaccctagatacattttttttggccattacattgggcctgtagcaagtaatgaggtagatattactcttacccagttaacaaaagtagctaggctcctattgtattgtatctagtctacttcatatgtttatgttaactgcacagggtacttgactttttgacctctactcat

SEQ ID NO: 163471 - DNA, 470 bp, Homo sapiens
gtctcataatattttgatttttttctttaattcagaatgatattattacaggacacagaattctggtttgacattttttagcacttgagaaatgtaatacttccttctggtctttacaatttccaggaacaaatccactgtaattagaatyactttttatctataggtaaggtgttactactctgtcaccactttcaggtatttttctatctttatatttttcactctatgactataatgagtgaatttctttggggttcattcagttttttgaatctgtgggttttgtgtctcttgccatttgggaaaaattttaatcattatttgagtgcttttttagaccaactttttttattttcattctggacctctaataatgtaaatgttattttttccttatatttttactagttcctaaggttatattcagtatgctttttccctctgtgttctagaatgggcgtattagt

SEQ ID NO: 163472 - DNA, 504 bp, Homo sapiens
tgcctttcttgaatttgtccacaatgcaaatttaatttctgaaacctgaagatagataaaactcattttaattgaaatgaaaacayaatctgaaacctccctaaatttcttcaggggtaatttaggctatgattgatgaagattgtcataactgtaccactttcttgatgtgagaatgagttaaccctgaagccataagtcttagtgcatccagaattttgtaacaaaaattccaccactggggcctgtgaaacagtagacgcgcctttcccacagttctgaggctggaagctggagatccgggtgctgtaggctctgtgtctgctgagggtttcctgactcagatggagcctgtttgctgcatcctcccatggcggaaggggtgaatgagcccccttaggcctcatttacgggggtactaaacccatctgagagggctccacccccgtggcctaatcacttcccaaaggccccaccccttaacacccctcataccatcccttt

SEQ ID NO: 163473 - DNA, 504 bp, Homo sapiens
tgcctttcttgaatttgtccacaatgcaaatttaatttctgaaacctgaagatagataaaactcattttaattgaaatgaaaacataatctgaaacctccctaaatttcttcaggggtaatttaggctatgattgatgaagattgtcataactgtaccactttcttgatgtgagaatgagttaaccctgaagccataagtcttagtscatccagaattttgtaacaaaaattccaccactggggcctgtgaaacagtagacgcgcctttcccacagttctgaggctggaagctggagatccgggtgctgtaggctctgtgtctgctgagggtttcctgactcagatggagcctgtttgctgcatcctcccatggcggaaggggtgaatgagcccccttaggcctcatttacgggggtactaaacccatctgagagggctccacccccgtggcctaatcacttcccaaaggccccaccccttaacacccctcataccatcccttt

SEQ ID NO: 163474 - DNA, 427 bp, Homo sapiens
gaattcttgattttaccagaaggtgtcaagaaaagatcctcagacagcattccttctttctcccagggcccttgcatgytgtggggccagaagcgtccgggctgtacaaatagtaccaccatcttcctggagtgactgggagagacacctgggatcttgctgggtcaatagtgactgtgcaaggccatccatgataaaatgcgttccaacctcagacacatgaaaagtgaaaaaaagaaaaggcatcttagaatctgtgaaatgttgtaagtaaaattggaacacggtggttatgtttggattaagtacggctgtgctcaagacaagctcacctgccttctgcctcccgcttctgcctccttcgtgtggtctccagcctggagctggacgttggagtgaacatgagtgtaaatacagaaagcgtcgg

SEQ ID NO: 163475 - DNA, 526 bp, Homo sapiens
tgtcaagaaaagatcctcagacagcattccttctttctcccagggcccttgcatgttgtggggccagaagcgtccgggctgtacaaatagtaccaccatcttcctggagtgactgggagagacacctgggatcttgctgggtcaatagtgactgtgcaaggccatccatgataaaatgcgttccaacctcagacacatgaaaagtgaaaaaaagaaaaggcatcttagaatctgtgaaatgttgtaaktaaaattggaacacggtggttatgtttggattaagtacggctgtgctcaagacaagctcacctgccttctgcctcccgcttctgcctccttcgtgtggtctccagcctggagctggacgttggagtgaacatgagtgtaaatacagaaagcgtcggcatgttttcaacaagcaaattcgtttctttgctctgtgtgtttgtgtgcctgtctaggacagtgttgtaacttcaggaaagattagaatcagtgaactccttcagggctaggaccgggaatt

SEQ ID NO: 163476 - DNA, 526 bp, Homo sapiens
tgtcaagaaaagatcctcagacagcattccttctttctcccagggcccttgcatgttgtggggccagaagcgtccgggctgtacaaatagtaccaccatcttcctggagtgactgggagagacacctgggatcttgctgggtcaatagtgactgtgcaaggccatccatgataaaatgcgttccaacctcagacacatgaaaagtgaaaaaaagaaaaggcatcttagaatctgtgaaatgttgtaagtaaaaytggaacacggtggttatgtttggattaagtacggctgtgctcaagacaagctcacctgccttctgcctcccgcttctgcctccttcgtgtggtctccagcctggagctggacgttggagtgaacatgagtgtaaatacagaaagcgtcggcatgttttcaacaagcaaattcgtttctttgctctgtgtgtttgtgtgcctgtctaggacagtgttgtaacttcaggaaagattagaatcagtgaactccttcagggctaggaccgggaatt

SEQ ID NO: 163477 - DNA, 520 bp, Homo sapiens
tggaattcttgattttaccagaaggtgtcaagaaaagatcctcagacagcattccttctttctcccagggcccttgcatgttgtggggccagaagcgtccgggctgtacaaatagtaccaccatcttcctggagtgactgggagagacacctgggatcttgctgggtcaatagtgactgtgcaaggccatccatgataaaatgcgttccaacctcagacacatgaaaagtgaaaaaaagaaaaggcatcttagaatctgtgaaatgttgtaagtaaaattggaacacggtggttatgtttggattaagtacggctgtgctcaagacaagctcacctgccttctgcctcccgcttctgcctccttcgtgtsgtctccagcctggagctggacgttggagtgaacatgagtgtaaatacagaaagcgtcggcatgttttcaacaagcaaattcgtttctttgctctgtgtgtttgtgtgcctgtctaggacagtgttgtaacttcaggaaagattagaatca

SEQ ID NO: 163478 - DNA, 427 bp, Homo sapiens
gaattcttgattttaccagaaggtgtcaagaaaagatcctcagacagcattccttctttctcccagggcccttgcatgttgtggggccagaagcgtccgggctgtacaaatagtaccaccatcttcctggagtgactgggagagacacctgggatcttgctgggtcaatagtgactgtgcaaggccatccatgataaaatgcgttccaacctcagacacatgaaaagtgaaaaaaagaaaaggcatcttagaatctgtgaaatgttgtaagtaaaattggaacacggtggttatgtttggattaagtacggctgtgctcaagacaagctcacctgccttctgcctcccgcttctgcctccttcgtgtggtctccagcctggagctggaygttggagtgaacatgagtgtaaatacagaaagcgtcgg

SEQ ID NO: 163479 - DNA, 496 bp, Homo sapiens
acacggaggttacaacacgctgatcctcttgattgccgaactggataagatgttttytgttttccctaagggatttttgcagctacttgaagacaacagaagcctgttgctgttgttttcttttaaattgggcatagctatttgacacagaggacgccatcactgacagtggctggacggggcccatgcactgacgaaggcgagaccgcctttttcccctgtgcagacttctgctgatgactcccagagacagatgcttggttaagaggcaaactgcctttcagattttaatgttcaggaaggagagataaacccgttggagtttataaataaagaccagaatggctttctcatttgctgtgataaacttttgagatttctgcaacagatgaaatcatgaggtatttgtcttcacacgcaatgttgtagaaaataacactttttttctccgtagtggtctggctgatacttttcaatcttagaattatgtcaggaa

SEQ ID NO: 163480 - DNA, 496 bp, Homo sapiens
acacggaggttacaacacgctgatcctcttgattgccgaactggataagatgttttcygttttccctaagggatttttgcagctacttgaagacaacagaagcctgttgctgttgttttcttttaaattgggcatagctatttgacacagaggacgccatcactgacagtggctggacggggcccatgcactgacgaaggcgagaccgcctttttcccctgtgcagacttctgctgatgactcccagagacagatgcttggttaagaggcaaactgcctttcagattttaatgttcaggaaggagagataaacccgttggagtttataaataaagaccagaatggctttctcatttgctgtgataaacttttgagatttctgcaacagatgaaatcatgaggtatttgtcttcacacgcaatgttgtagaaaataacactttttttctccgtagtggtctggctgatacttttcaatcttagaattatgtcaggaa

SEQ ID NO: 163481 - DNA, 496 bp, Homo sapiens
acacggaggttacaacacgctgatcctcttgattgccgaactggataagatgttttctgttttccctaagggatttttgcagctacttgaagacaacagaagcctgttgctgttgttttcttttaaattgggcatagctatttgacacagaggacgccatcactgacagtggctggacggggcccatgcactgacgaaggcgagaccgcctttttcccctgtgcagacttctgctgatgactcccagagacagatgcttggttaagaggcaaactgcctttcagattttaatgttcaggaaggagagataaacccgttggagtttataaataaagaccagaatggctttctcatttgctgtgataaacttttgagatttctgcaacagatgaaatcatgaggtatttgtcttcacacgcaatgttgtagmaaataacactttttttctccgtagtggtctggctgatacttttcaatcttagaattatgtcaggaa

SEQ ID NO: 163482 - DNA, 464 bp, Homo sapiens
agaattctacacaccccgcccacctttgaggtttgtttaaatacagatggctgctgtagacagagaaaccagctcagaagagtgtggttgtgctatgatctctgaaaattactgcactgtctgttaacagtgcataatcaggttcaccattataaaaaggggacttagttcagtcttactttatgcagggaattatactggggctttaaattattaatatattaaggtatatacaaagataatatatacaagagatgttgaattaccaaccraagaccacattggggcaaggtacattgggtatcaatcacaaaagagcagggactgtgcctctttcttcgacagtcctcctacatctgtttcatgtcctattatacagctggaaaaagctgctgaattaaactggacttgcagccccagagcgtgacgtcacatccaagaggccatcagtagcaggtctttgt

SEQ ID NO: 163483 - DNA, 463 bp, Homo sapiens
gaattctacacaccccgcccacctttgaggtttgtttaaatacagatggctgctgtagacagagaaaccagctcagaagagtgtggttgtgctatgatctctgaaaattactgcactgtctgttaacagtgcataatcaggttcaccattataaaaaggggacttagttcagtcttactttatgcagggaattatactggggctttaaattattaatatattaaggtatatacaaagataatatatacaagagatgttgaattaccaaccaaagaccacattggggcaaggtacattgggtatcaatcacaaaagagcagggactgtgcctctttcttcsacagtcctcctacatctgtttcatgtcctattatacagctggaaaaagctgctgaattaaactggacttgcagccccagagcgtgacgtcacatccaagaggccatcagtagcaggtctttgt

SEQ ID NO: 163484 - DNA, 559 bp, Homo sapiens
atcacatttttctctgaattcttgaggaaattgctctcatatacaacaccaacctttggctgcgtgacagagatggagtgttgtttgcatgccattatcaggctgtaaagtctggtcagggctgccttttcggagtttccaatcttttgggatcctgggagggtcaccctgcgggtcaggtttgtttagtctggtccgtaatggtgtaaagtggccttgactgttgagcctccctaaataatgccctatctgtttgatacttcaacagtccstcggagttgtatatatgtttcactttctaatattcgaagctgaattggatttcattgttaatagatgggaaattgtttctaaaaacaacctcatcttgctttgaaagttagccagagttcagagggcccctgcattttaacgggtgatctatgttttctctgggaaaatcatagagcacttctgtgtttttgtatgcatgttactcactctgcagctttttaaagggattcatctgaacatatgccactttaaaaagctttttattaaaatataatgtacatataga

SEQ ID NO: 163485 - DNA, 563 bp, Homo sapiens
cattcctaattcactgacttttctaaccaayggtaaaccaaccaataagcagcgacacctctgaaaccccctgactcccaagctgccacttactgacacaaacacacttaagcccacattagcatacccttgccagaatacctgcgggattgtgctgaatagcctgaagtgaaagacaaacatgaggcctggagcaaaatttcttgattaacagtacacagtcctttaaagagatcacataaacttttatctgaaacgtggcttggagcatctcagctaaaatccgttgctatgagagttgtcattcaactttggtaaattcagtgtgtgatagataataacctctgtactgtttaataatagattccctatttctgatgccagtaaataatccttacctttctttggtgaacagttgcttcatcccaaagcccagaaccatgtgtgaaaacattttagtaaaggattttcaagtaaagctcacagatcatgaaggtctgacttcatcagtgattgccttaggctatcttctgtgagctttctgggtttttttgcattttctt

SEQ ID NO: 163486 - DNA, 559 bp, Homo sapiens
gactgtagatttcattaagttcaatgagagcatttgtttcagcttaataatacacatgattccccaaacagtaagttgcttatatttaaatatgatcatgtgaggaaacccataattgttattgcctataaaggcatgtgaaaatggtaaaacaggagtaatacttattgatcccttataagtaaaatcataatacattaagaggctcgaatatctaatacaaaacttgtagattacattcctacttcattgtgtgtattttacctcttttctttctaggaaacatctagaaaaagatgttgcagctctcaaaacacaaagtattagaatatcttgaagataatacttaaaagagtgagatttccagaattgctatttcaaacatgtgtttaagactattgataattttattattctttttgatggaaattagtttttaaggaactagttggctaattttaaggctattagaggacygacaacaataaaatcaaagaataaagtccactatgatgagcattggaagacttccataattctttaatttctagtagaattc

SEQ ID NO: 163487 - DNA, 543 bp, Homo sapiens
acccacttaaggagggtctttgactttccgttagtggagctggtgcactgtgctggaggaatccccctaattgggattagccagtcttaagtggcagaacttgagactgtgcccacccttaccccaaggtgctctgttccagggagatgacagttctgtttctaagcccctgactggagctgctgaaattcctgcttggtgaggagggatggctgtgggtcccagctaaagaggcagtctggccacaatctgcaacagccactttgctgcactgtggggaattctgcccagtccaaaccgcctcgttttctttgcactggttagtggaaaaccaccaactacaatggcagtaaatgctgttgcccctcccgttgggaactcagttgtcccaggcagcagggatctcatgccagtgagtcttagcctgygggactccatgggagtgggaccggctgatcaagactgcttcagccccctttccacaagagtggacggttctcctgcctcactggagttccaggcaccactgtagtatgtaaaaac

SEQ ID NO: 163488 - DNA, 610 bp, Homo sapiens
agtctctagtcactcccttctaaggctatggagccagtagcagctctgcaactccctgggataaagccccctttgccatttttgctgtctcacagccctcacccttactgtctccaggctctggaaagyccatggggaccaggggctgattcagacccccagcacagagtaccctcctcaaagaaaagtaggcagactgttcctgcctgacctggacctccagtacaatgaccctgctccagtctgacctcgtagatcagaggcagcccagtagttaaaggagtactaacatgcagagatgagaaagaaccaacacaaaaactccagcaactcaaatggccagagtgtcttatgtccctcaaatgaccacagttgttctcccacaagggttcttatccagtctgagttggctgaaatgacagaaatagaatccagaatgtgaatagaaatgaagatcatcaagattgagaagaatggcaaattttaatataagaaaactaagaaccataatgaaatgatgctggtgctgacatgaaacagtcagtatataaaaatatgctaactgatatgatagagctgaaaaacaaactataagaatttcacaatgcaa

SEQ ID NO: 163489 - DNA, 610 bp, Homo sapiens
agtctctagtcactcccttctaaggctatggagccagtagcagctctgcaactccctgggataaagccccctttgccatttttgctgtctcacagccctcacccttactgtctccaggctctggaaagcccatggggaccaggggctgattcagacccccagcacagagtaccctcctcaaagaaaagtaggcagactgttcctgcctgacctgracctccagtacaatgaccctgctccagtctgacctcgtagatcagaggcagcccagtagttaaaggagtactaacatgcagagatgagaaagaaccaacacaaaaactccagcaactcaaatggccagagtgtcttatgtccctcaaatgaccacagttgttctcccacaagggttcttatccagtctgagttggctgaaatgacagaaatagaatccagaatgtgaatagaaatgaagatcatcaagattgagaagaatggcaaattttaatataagaaaactaagaaccataatgaaatgatgctggtgctgacatgaaacagtcagtatataaaaatatgctaactgatatgatagagctgaaaaacaaactataagaatttcacaatgcaa

SEQ ID NO: 163490 - DNA, 333 bp, Homo sapiens
tattatctaatattagtaagcactcccctgtataaggcactatgtaaaaggacactctggaaatgcattttttaattcctattgcagatagtatgtagagacgtaacatttgagattatgaacatgcaatataatccaaatcaacatttcagatacatttcatttttatagaacaagcaatgaccaaatatttaataaaaatataattggtaaaaatttgtcctaataattttaaaactraccattttcaaattatttaattattattacttttagaataaggagctttttgctttgggcttccatatttgaatgagtgaaattcatttattc

SEQ ID NO: 163491 - DNA, 612 bp, Homo sapiens
tgcctcctgcaaaccgtgagcccctggaaaactcctgtaaaagactctcagaaagatttattttcctaaatctcagtttctctcatttgcagaatgggatttataaatataactaagccacagactgttttggagaccaaagaatatgtgatagaaacaaatcagtaggccrggcatgggggctcatgtctgtaatcccagcactttgggaggccaaggagggcagatcacttgaggtaaggagtttgagaccagcctggccaacatggtgaaatcctgtctctattaaaaatacaaaaattagctgggtgtggtggcgcacacctgtaatcccagttactcgggaggctgaggcacgagaatcactggaacctgagaggcagaggttgcagtgagcagagatcgcaccactgagctccagcctgggcaacagagtgagactccatctcaaaaaagaaaaaaaagaaaggaaaaaaaaatcagtaaaaacaaataaaaaagtgttctccaaaagaggctaaatggagtatttaatatgtttgaaaaatgcttacacacagtcttgtataaataatgccaaataatcccagttaatctgtgtttaacccagaa

SEQ ID NO: 163492 - DNA, 612 bp, Homo sapiens
tgcctcctgcaaaccgtgagcccctggaaaactcctgtaaaagactctcagaaagatttattttcctaaatctcagtttctctcatttgcagaatgggatttataaatataactaagccacagactgttttggagaccaaagaatatgtgatagaaacaaatcagtaggccaggcatgggggctcatgtctgtaatcccagcactttgggaggccaaggagggcagatcacttgaggtaaggagtttgagaccagcctggccaacatggtgaaatcctgtstctattaaaaatacaaaaattagctgggtgtggtggcgcacacctgtaatcccagttactcgggaggctgaggcacgagaatcactggaacctgagaggcagaggttgcagtgagcagagatcgcaccactgagctccagcctgggcaacagagtgagactccatctcaaaaaagaaaaaaaagaaaggaaaaaaaaatcagtaaaaacaaataaaaaagtgttctccaaaagaggctaaatggagtatttaatatgtttgaaaaatgcttacacacagtcttgtataaataatgccaaataatcccagttaatctgtgtttaacccagaa

SEQ ID NO: 163493 - DNA, 612 bp, Homo sapiens
tgcctcctgcaaaccgtgagcccctggaaaactcctgtaaaagactctcagaaagatttattttcctaaatctcagtttctctcatttgcagaatgggatttataaatataactaagccacagactgttttggagaccaaagaatatgtgatagaaacaaatcagtaggccaggcatgggggctcatgtctgtaatcccagcactttgggaggccaaggagggcagatcacttgaggtaaggagtttgagaccagcctggccaacatggtgaaatcctgtctctattaaaaatacaaaaattagctgggtgtggtggcgcacacctgtaatcccagttactcgggaggctgaggcacgagaatcactggaacctgagaggcagaggttgcagtgagcagagatcgcaccactgagctccagcctgggcaacagagtgagactccatctcaaaaaagaaaaaaaagaaaggaaaaaaaaatcagtaaaaacaaataaaaaagtgttctccmaaagaggctaaatggagtatttaatatgtttgaaaaatgcttacacacagtcttgtataaataatgccaaataatcccagttaatctgtgtttaacccagaa

SEQ ID NO: 163494 - DNA, 612 bp, Homo sapiens
tgcctcctgcaaaccgtgagcccctggaaaactcctgtaaaagactctcagaaagatttattttcctaaatctcagtttctctcatttgcagaatgggatttataaatataactaagccacagactgttttggagaccaaagaatatgtgatagaaacaaatcagtaggccaggcatgggggctcatgtctgtaatcccagcactttgggaggccaaggagggcagatcacttgaggtaaggagtttgagaccagcctggccaacatggtgaaatcctgtctctattaaaaatacaaaaattagctgggtgtggtggcgcacacctgtaatcccagttactcgggaggctgaggcacgagaatcactggaacctgagaggcagaggttgcagtgagcagagatcgcaccactgagctccagcctgggcaacagagtgagactccatctcaaaaaagaaaaaaaagaaaggaaaaaaaaatcagtaaaaacaaataaaaaagtgttctccamaagaggctaaatggagtatttaatatgtttgaaaaatgcttacacacagtcttgtataaataatgccaaataatcccagttaatctgtgtttaacccagaa

SEQ ID NO: 163495 - DNA, 510 bp, Homo sapiens
actgagtgtaaacccaaaagtctaatgaagaaagaactattcaagtaaaaactgaaattaataaaatatataggaaaaagtatatacattttagaagaaatacattaaaaatatggttctttgaaaagatcaataaagtatataaatgccttatgagactaaaaaaagagataaagtaaaatatttatgatacaaaatgaaacaggaggcttaaactcatatgtaaaaaaactaaaaattataaataaataatatgtgcaaatmtgctgcaaataaattaaaacaaacctagaaaaaaaggatatctcccaactaaaatacaaactaccaaaactactcagaagtagaaaatctgagcagaccagttaccgaaaaaagtattgaaaactcaaataaagatttattcttaaaaaaagacatcaggctaggtgatttcacaactgagttctatgtaaacttgtaaaaaccacctatttctaatgctatttaaaacttctgatggcacaagga

SEQ ID NO: 163496 - DNA, 528 bp, Homo sapiens
atgaaaaggctttcaaattattaataagaattcttatagaaatgttcatctgtgtcaggcaccatatttctggctgggtgaacatagatgtcctttactatcaaattccatggggcccatgagaagagaatgcaggaccagccagatggctcatgcccattgccatttttactttgcttctatgttacaagctgacaattttgctctgtgtgtactgtaaaatarcagacattttccaaattttgctctggcttacactgttcctttttgctttttcatttatctttcttgtacccatagttaaaaaaaaaaaaagcatttcacagaggtaaggttaaggctagaggcttatgtggtcagaacatttgagctcttcttgtaaaggttcaagtgaaccttgtccttccccatctctgcttcctcaggaatgagttttcaaatatttcattccatttcactaaaatctagcaaggctgggtcaagggccaaatatctttgttctaattcccgctctgcaaatgagtacgc

SEQ ID NO: 163497 - DNA, 635 bp, Homo sapiens
cttcctcccagcccctggatgaagtattatagcttcttttttatgatccttataaaagaagagcaataaagagacacaaacagggtagttaagtttaatgtcggtaaaaaccagacacctgaatatatgtaatttattttcttaaaatcttgcccaattgaggctgctattaattagtatgaaaatgtattgcagagccaattttgcatgaagtttgttattgtggctactttatgaaaaggaaagacaaatcaaccagaaaagtctytgtgacttcattgtaaaaaggaggtggagggaagtcatcaaaacaacctaaggacttcatctaggaaaacaatcatgtgagatcccagatctcaagaattcaggaggcttcctccaccatggggatgagagggtagggggggcactgggggaggagaaacccacaccagttgaggacctacggtgtccaggaacggggccatgtactttccaggggtcaggcacttgtgactgtctgcatttttcagatgagaaaacaggctcagataagagcctcagccccagtgatagaacttattaagggacaagccaagattcaaacacaggtgagtctattccagactccatatttgactatgattggctat

SEQ ID NO: 163498 - DNA, 635 bp, Homo sapiens
cttcctcccagcccctggatgaagtattatagcttcttttttatgatccttataaaagaagagcaataaagagacacaaacagggtagttaagtttaatgtcggtaaaaaccagacacctgaatatatgtaatttattttcttaaaatcttgcccaattgaggctgctattaattagtatgaaaatgtattgcagagccaattttgcatgaagtttgttattgtggctactttatgaaaaggaaagacaaatcaaccagaaaagtctctgtgacttcattgtaaaaaggaggtggagggaagtcatcaaaacaacctaaggacttcatctaggaaaacaatcatgtgagatcccagatctcaagaattcaggaggcttcctccaccatggggatgagagggtagggggrgcactgggggaggagaaacccacaccagttgaggacctacggtgtccaggaacggggccatgtactttccaggggtcaggcacttgtgactgtctgcatttttcagatgagaaaacaggctcagataagagcctcagccccagtgatagaacttattaagggacaagccaagattcaaacacaggtgagtctattccagactccatatttgactatgattggctat

SEQ ID NO: 163499 - DNA, 635 bp, Homo sapiens
cttcctcccagcccctggatgaagtattatagcttcttttttatgatccttataaaagaagagcaataaagagacacaaacagggtagttaagtttaatgtcggtaaaaaccagacacctgaatatatgtaatttattttcttaaaatcttgcccaattgaggctgctattaattagtatgaaaatgtattgcagagccaattttgcatgaagtttgttattgtggctactttatgaaaaggaaagacaaatcaaccagaaaagtctctgtgacttcattgtaaaaaggaggtggagggaagtcatcaaaacaacctaaggacttcatctaggaaaacaatcatgtgagatcccagatctcaagaattcaggaggcttcctccaccatggggatgagagggtagggggggcactgggggaggagaaacccacaccagttgaggacctacggtgtccaggaacgsggccatgtactttccaggggtcaggcacttgtgactgtctgcatttttcagatgagaaaacaggctcagataagagcctcagccccagtgatagaacttattaagggacaagccaagattcaaacacaggtgagtctattccagactccatatttgactatgattggctat

SEQ ID NO: 163500 - DNA, 635 bp, Homo sapiens
cttcctcccagcccctggatgaagtattatagcttcttttttatgatccttataaaagaagagcaataaagagacacaaacagggtagttaagtttaatgtcggtaaaaaccagacacctgaatatatgtaatttattttcttaaaatcttgcccaattgaggctgctattaattagtatgaaaatgtattgcagagccaattttgcatgaagtttgttattgtggctactttatgaaaaggaaagacaaatcaaccagaaaagtctctgtgacttcattgtaaaaaggaggtggagggaagtcatcaaaacaacctaaggacttcatctaggaaaacaatcatgtgagatcccagatctcaagaattcaggaggcttcctccaccatggggatgagagggtagggggggcactgggggaggagaaacccacaccagttgaggacctacggtgtccaggaacggggccatgtactttccaggggtcaggcacttgtgactgtctgcatttttcagatgagaaaacaggctcagataagagcctcagccccagtgayagaacttattaagggacaagccaagattcaaacacaggtgagtctattccagactccatatttgactatgattggctat

SEQ ID NO: 163501 - DNA, 549 bp, Homo sapiens
cagtccttctgccgcccatggcctggcatatgttcttaggagactgctttctgcaccaagcagagaacgagcactggcaagaaataagcatggcaagaactctttctccatctgggcctttcccagcycctacacacaatccctcgcccccctcctcagaagcacaggctgccatgctaatgaacatgtccccctctgtcagatcaacttccaagaggaatcctgccttcagacagttcactttttcaccttcagagctattccgagctggtagcttatttacttgcacatttggtgagcgggttgatggcgtccctggggactcattcatttgtgcagttaaagggagctgggaaggcagtctcagcacagtcaggtgcagggggcggggctctggggcccagcctgcgtgggtttcatacactgtttgagctcctttgcccaggggttggcaggctggctacttttgtgccattggttccgagtggctcaggaggggacttggggctatggggcttgttgtaggcagaataaaggccccccagcgat

SEQ ID NO: 163502 - DNA, 549 bp, Homo sapiens
cagtccttctgccgcccatggcctggcatatgttcttaggagactgctttctgcaccaagcagagaacgagcactggcaagaaataagcatggcaagaactctttctccatctgggcctttcccagctcctacacacaatccctcgcccccctcctcagaagcacaggctgccatgctaatgaacatgtccccctctgtcagatcaacttccaagaggaatcctgccttcagacagttcactttttcaccttcagagctattcygagctggtagcttatttacttgcacatttggtgagcgggttgatggcgtccctggggactcattcatttgtgcagttaaagggagctgggaaggcagtctcagcacagtcaggtgcagggggcggggctctggggcccagcctgcgtgggtttcatacactgtttgagctcctttgcccaggggttggcaggctggctacttttgtgccattggttccgagtggctcaggaggggacttggggctatggggcttgttgtaggcagaataaaggccccccagcgat

SEQ ID NO: 163503 - DNA, 549 bp, Homo sapiens
cagtccttctgccgcccatggcctggcatatgttcttaggagactgctttctgcaccaagcagagaacgagcactggcaagaaataagcatggcaagaactctttctccatctgggcctttcccagctcctacacacaatccctcgcccccctcctcagaagcacaggctgccatgctaatgaacatgtccccctctgtcagatcaacttccaagaggaatcctgccttcagacagttcactttttcaccttcagagctattccgagctggtagcttatttacttgcacatttggtgagcgggttgatggcgtccctggggactcattcatttgtgcagttaaagggagctgggaaggcrgtctcagcacagtcaggtgcagggggcggggctctggggcccagcctgcgtgggtttcatacactgtttgagctcctttgcccaggggttggcaggctggctacttttgtgccattggttccgagtggctcaggaggggacttggggctatggggcttgttgtaggcagaataaaggccccccagcgat

SEQ ID NO: 163504 - DNA, 501 bp, Homo sapiens
agttaagaatatggactctggccccagaatgcctcagttcaaatcccagctcttttacttaatggctgtgcaatcttaggcaaattayctaactactttaacctcaatatccccatttgtaacatagtcaaaaaatcagtacttagttcgcagggttgttatgaggattcaatgagtgtagggccatatggtggctcatgcctgtaatcccagtgctttgggaggccaaggtgggataattgcttgatgtcaggagttttggaccaacctaggcaacaacgtgagacaccgcctctacaaaaaaaataaaaattatctagccttggtggtgcacctgtatttccagctactcggaaatagaagtacaccatttttctcttggtattgccgtcctggaccaggttcaaacaactgagtgacaggtgcacctgtattcccagctactcaggagggagaaaagaggattgacagttcaaataactgtccttgagattgaaggag

SEQ ID NO: 163505 - DNA, 575 bp, Homo sapiens
cacttgtactccttacatttatacagacaaaaaagaggaaaaaacaaaataaaccatatgttaaaaagtataccttcatatatttttcaatgatgcaaagggaggtagagaatgaacctttggtgaacatttgctatgtattgggctctcgcaagtaacttcaaataacttatttaatcctcacaatgaggtatgtaggagggatacatattcctatgttacagaaatggcaaacaaggctcaggtaggattaatagatactccacaccgtattgacgttcaaaatgtaacagtttgactttgctgtgtactgaaggcttgcaggtttttcartcctgcccattcatttgtaaagtgaaaaattgcgaagttatagtgtgttatgtacttaactcagatgttccatacttaagtttaatttgttgatttataatcctagaatgagactgaatttcccattcatacctggcagtaaagatcataaatattagttgtggtagttcctaaaaatagatatttggggaagacctactgaatcagaccctccaggtgattcttaggattgtcatcagcag

SEQ ID NO: 163506 - DNA, 465 bp, Homo sapiens
tcccagcctctagtagttattctatctccatgagttcaactgttttaatttttagctcccacaaacaagtgagaacatgcaaagtttgtctttctgtgcctggcttgtttcacttaacataatgacctccagttccatccacattgttggaaatgacaggatctcgttttacggctgaatagtacttcgttgtttatattatgtttaccacattttctttattcatctgttgatgaacacttaggttgcttctaaatcttgcctattgtgaacagtgctgcaataaccttggaagtgctgatatctcttcaatatactgatttccttttttcttggtatatacctagcagtgagattgctggatcatattaccatgtaatctatttttagttttttkggaaacctccaaacttctccacagcgattgtcctatttggttggtacaaaagtaatcgtggttttttc

SEQ ID NO: 163507 - DNA, 536 bp, Homo sapiens
attttcatttgcttcaagaatttttaaattgtttccttttctttcttgatccaattctggagcatgttgtttcatttccaaatattgtaatctatttgtacagttttcaatgttctacttgttattaattactagtttttttcctttgtggtctgaaaagatagttgatattatttcaattttaaaaaatgttttgtgagttggttttatgtcctagcatatggcctatcatagagagtgtttcatgtgctgataagaagatgcatattctatagctgttggattaagtgttctataaatatttgttaggtccatttgatytaaaatgcagtttaaatccaatttttttggttaattttatgtgtagattatatgtctaatattgagtacatgttgaagtccccagccattattgtatcggagtctatttctgtctttagatctattaatgattgcttatatatctgggtgctccagtgttgggtgcaagtatgtttagaattattatatgctgaattcctttatgattttataat

SEQ ID NO: 163508 - DNA, 471 bp, Homo sapiens
tagatggcaacaaggtgacattagcaacagtggcaggctaaatgccacggtggtcagccgaataaggtacaagcagtctggcgttattgagagtacagcagcaaacagacaagaatctttgtgccattcagaaaacttaaaacagggtgttttctttcacacttgctctgtgattgcaccattcacttgagttgttcacattttccgtttctttgcttataaatattaataggaatataaatgccaacttggttcagatttattgtagggaaaaaaacacaaatgtgattgtaaaagcattttggaaacagaaaggccatcagcattctttaatggattttctatgtatattaacaagcaaagtctttcttcaattattttcaytagctatatatcagccaatatttatagtatgtctaagaggtcttatgttatacttggtgtagtctaaggcatggaagtagggcaaag

SEQ ID NO: 163509 - DNA, 344 bp, Homo sapiens
actagtgtatagaaattctactcatttttgcataytgattttgtatcctgaaactttactaaagttgcttattagttctaggagccttttggtggagtctcttgggatttccaggtatgaagtcatattgtcaacaaagatataatttgacttcttcttttcctatttggatgccttttctttctttcatttgcttaactgctcttaagacttccagtactgtgttgaatgagaatgatgagtgggcatccttatcttcctgttcttaaggagaatgcttccagcttttgttcattcagcatgatgctggctgtgggtttgtcatagatggctctcattatatc

SEQ ID NO: 163510 - DNA, 536 bp, Homo sapiens
tactcatttttgcatattgattttgtatcctgaaactttactaaagttgcttattagttctaggagccttttggtggagtctcttgggatttccagktatgaagtcatattgtcaacaaagatataatttgacttcttcttttcctatttggatgccttttctttctttcatttgcttaactgctcttaagacttccagtactgtgttgaatgagaatgatgagtgggcatccttatcttcctgttcttaaggagaatgcttccagcttttgttcattcagcatgatgctggctgtgggtttgtcatagatggctctcattatatcgagatatgttcctttgatgcatactttgttgagggtgtttatcatgaaggatgttggattttatcaaaagctttttctgcatctactgagatgatcatatgggttttgtttttaattgtttttaatggcaacattttaaagcactctcttttcattggaaaaagtactaatttgctatgtatgtttaaaagcaatggttttgatgaattc

SEQ ID NO: 163511 - DNA, 524 bp, Homo sapiens
catattgattttgtatcctgaaactttactaaagttgcttattagttctaggagccttttggtggagtctcttgggatttccaggtatgaagtcatattgtcaacaaagatataatttgacttcttcttttcctatttggatgccttttctttctttcatttgcttaactgctcttaagacttccagtactgtgttgaatgagaatgatgagtgggcatccttatcttcctgttctwaaggagaatgcttccagcttttgttcattcagcatgatgctggctgtgggtttgtcatagatggctctcattatatcgagatatgttcctttgatgcatactttgttgagggtgtttatcatgaaggatgttggattttatcaaaagctttttctgcatctactgagatgatcatatgggttttgtttttaattgtttttaatggcaacattttaaagcactctcttttcattggaaaaagtactaatttgctatgtatgtttaaaagcaatggttttgatgaattc

SEQ ID NO: 163512 - DNA, 575 bp, Homo sapiens
cttactgcaagttacagaagataaagatacacagttgctacaggtgacaattttagccacacataagtagaaaacataaaggcttttagcattgcacccttaggtcattctgttagaactctgctttgcctgtggatagagacaactgtaggctcctggcaggttgcccatattaaaaagggaaattacagacttctgcccttttggctctctgaccagcaccatggtggtgggcaagaacaagcaccttacgaaaggcggcaaaaagggagccaagaagaaagtggttgatccattttctaagaaagattggtttgacgcgaaagcacctactacgttcaatataagaaatattggaaagacgctcatcaccaggacccagggaaccaaaattgcatctgatggtctcaagggtcgtgtgtttgaagtgagtcttgctgatttgcagaatgatgaagttgcrtttagaaaattcagctgattactgaagatgttcagggcaaaaactgcctaacttccatggcatggatcttacccatgacaaaatgtgttccatggtcaaaaaatggcagaca

SEQ ID NO: 163513 - DNA, 389 bp, Homo sapiens
tgatcatttgttttggcagccctaggaaactaacacagggacacttgggctggaagtacaaatttggaagtcaccatcacataggtaacatttaaaatccaatgaaaagaagtattcttgggagagagtgtagaaagcaaagagaatgaggcctaacaattacaggtctgatataagaggctrcaactgcaatagaaactgagaagaagcaagaagtatgagaggcaggtggtagtcagagaagacaaaaggggacagtttcgagggaggaattgttagcaaggcccaatgttacgaagaggccaaaaacaatgggattatcaaagaccacataatataaaaatataaaagttgtttgtgaccttaaccaggacagttttctgtggaat

SEQ ID NO: 163514 - DNA, 584 bp, Homo sapiens
tcactgcaagaaatgttaaaggattttatttaggaagaagaaaatgatagagttaagaaacatggatctacatggagaaaaaactatcggagaagaaataactgtggacaaaataaaatatttttcttattttaattggtataaaagatagctgcttgtttaaaatcataataagcactactagagcacttctgctggcggtttcctgccagagcacatttgccattacctcgacacctgcactctggagcatgttcacccttggcactcctgctggagtsgttcccactccaggcacccccaccactcacaatggagtgcttttgctgacagccccttgccatagcatgctcacctgcaaccctgctcccacccttccagagcacattcccttgcagcaaccccactgccccagctgcagtgcttcctgccggcagtgcccccacaccacacaccagagcacttttgctgacagcctcccatcatagtgcaccctcccataaccctctggagcatattcacccgtggcacctccaccactcccaccaggatatttcccatgcatgtcacccccaccaccccga

SEQ ID NO: 163515 - DNA, 584 bp, Homo sapiens
tcactgcaagaaatgttaaaggattttatttaggaagaagaaaatgatagagttaagaaacatggatctacatggagaaaaaactatcggagaagaaataactgtggacaaaataaaatatttttcttattttaattggtataaaagatagctgcttgtttaaaatcataataagcactactagagcacttctgctggcggtttcctgccagagcacatttgccattacctcgacacctgcactctggagcatgttcacccttggcactcctgctggagtcsttcccactccaggcacccccaccactcacaatggagtgcttttgctgacagccccttgccatagcatgctcacctgcaaccctgctcccacccttccagagcacattcccttgcagcaaccccactgccccagctgcagtgcttcctgccggcagtgcccccacaccacacaccagagcacttttgctgacagcctcccatcatagtgcaccctcccataaccctctggagcatattcacccgtggcacctccaccactcccaccaggatatttcccatgcatgtcacccccaccaccccga

SEQ ID NO: 163516 - DNA, 596 bp, Homo sapiens
ccatcctgtggctcccatctacgggagcaaagccagctcccagctgtatcacctcatccaaaagtagttatatcagaactgacttacccttttttgtgttttgttttktttttcggttttctttgagacagagtcttgctctgtcacccaggctggagtgcagtggtgcgatcttggctcactgcaaactccacctccccggttccagcgattctcctgcctcagcctcccaagtagctgggactacaggtgccaccacacccagctaaatttttttgtatttttagtagagatgaggttttgccaccttggccagtctggctcaaactcctgatctcaggtgatccacctgcctcagcctcccaaaagaactgacttatctttcattggttcctaagacatggccagagaagtgaagttccaattatcactagtttaaatattttatcttagagagaagaagaattaactaacatttagaaattaaaagtcttcttgtagccaggacccgctggctagcataatttcatttctcatttattttacatttacaaacaaagcatgcaccatacctaatcctagacttgctattgcta

SEQ ID NO: 163517 - DNA, 401 bp, Homo sapiens
gaattctcctgccttctcctgcaactaggtgtagccatatgacaaagcttttgctaataagatgtgagcaaaaggaacctgtgcaacttccaggttgtgttaacccttcccatcccgctttctgcaggttggaatgtggaggttgtagccaatagctctaacttgggatgcaggggtggcctcttttcctgacaaaaccactgttcattatctaatatattctgctggtgtttgaaacagcaactccatcaattacttcccctctgtacttttgacaggttgggcgtttggggttttttgttttgttttgttttgttttttktgtgtgagaactcttacaatctactctcttagcaatttccaagcatacaatacattgttattaactatagccacaatag

SEQ ID NO: 163518 - DNA, 246 bp, Homo sapiens
cactacacagggtaagagtargaagagattagagacaaggaaagcaagtaggaagttattgccaggtgaggggtggaaaaggttgtagattagcccagtgactagcaatgcagatggaaaggcagataggaggacagactcaacagcatttggcctctgtttaatcctagaggaaaagtgaataaacttacaaggatgatggagtcactattggccctaaggaggaaggttaggtttagaaggcaa

SEQ ID NO: 163519 - DNA, 246 bp, Homo sapiens
cactacacagggtaagagtaggaagagattagagacaaggaaagcragtaggaagttattgccaggtgaggggtggaaaaggttgtagattagcccagtgactagcaatgcagatggaaaggcagataggaggacagactcaacagcatttggcctctgtttaatcctagaggaaaagtgaataaacttacaaggatgatggagtcactattggccctaaggaggaaggttaggtttagaaggcaa

SEQ ID NO: 163520 - DNA, 246 bp, Homo sapiens
cactacacagggtaagagtaggaagagattagagacaaggaaagcaagtaggaagttattgccaggtgaggggtggaaaaggttgtagattagcccagtgactagcaatgcagatggaaaggcagataggaggacagactcaacagcatttggcctctgtttaatcctagaggaaaagtgaataaacttacaaggatgatggagtcactattggccctaasgaggaaggttaggtttagaaggcaa

SEQ ID NO: 163521 - DNA, 312 bp, Homo sapiens
cattgtaacacaatggtaagtatttgtgtatctaaacttacctatacatagaaaaaatatggtaaaaatacagtattataatcttatgggatcatsatcatatgaggtctatcattgaccaaagtatgactgtattacaaataaagaggtaagtaaagagatctccatcatatgcaacaaaaataaagtagttattatattaatttcagactaggtagaactaaagtttaaaggaccaagcagaatcaaaggacactataaaaaagtaaaaggcacaatttataaagatgatacaataatcacaaactgata

SEQ ID NO: 163522 - DNA, 574 bp, Homo sapiens
cattatcaaggccatgctccctctgaagtttctagggaataatccctccttatgttgtcttagcttctggtggttaccagcaattccagtgttacatagcttatagctgcatcactccaatttctgcctcagtcttcccatggctatctttcctctgtgtgtctgtctgtgtgtttacatggcctttttataaaaaaaaagctaatcactagatttaggacccagcctaatgcagtgtgacctcatcttaagttgattacatctgcaaagactctacttccaaataaggcaacattcacaggtcctgaaacttaggacatcaacagatctttttgtacttggagaagtccatggcttcatactccccytcctgggccctcagcagtggaggacccaccctgagggccctcctggcagcttatcatctatttctataaataattattggaacactgctacatctatttgtttatgtagtgtagttgcaaaaagatcctatagcctgaaaagcctaaaatatttgctatctggctatttacagaacattatttttccaatctctggtttaagagca

SEQ ID NO: 163523 - DNA, 532 bp, Homo sapiens
ctaacaactgaaaaaagcttgggacctgatggattcatagccaaattctaccagagtacaaaaaagagctagcaccattcctacatgcactattccaaaatatggaggaggagggattcctccccaactcattctatgaggccagcatcatcttgataccaaaaacctggcagagacacaacaacatcaacaagaaaaarcttcaggttaacatccttaatgaagatcaatgcaaaaatcctcaaaagacacttgtaaaccgaaataagcaatggtgaaaagattctctattcaataaatggtgctgggataactggctagctatatgcagaagactaaagctggaacccttctttacaccacacgtaaaagatcaattcaagatggattacagacttaaaactataaaatccctgaaagacaacctaggcaataccatcctggacatagaaaccggcaaagatgttatgagaaagacaccaaaagcaatcacaacagaagcaaaaattgacaagtgggatctaattaaact

SEQ ID NO: 163524 - DNA, 372 bp, Homo sapiens
gactcatcaaacaatcatgtcatgttaatttctacttcctatctttccatttgtcccttcttctccactttctatgttataggctgaattgtgtccccttacaattcatatgttgaaatcttgtcccctrgtacttcatagaataatactttatgtggagatagggccttttaaaagtaattaaagtaaaatgaggctattgcgtgaagcccaaatccaatatgactggtgttcttataagaagggggagagacatctagaatgtgtatgtacaaagaagaggccatgtgaggatgcaatgagaaggcagtggtctgcaagccaacaggagaggcctcaggagaatccagtgttgtcaaccctttaatcttg

SEQ ID NO: 163525 - DNA, 372 bp, Homo sapiens
gactcatcaaacaatcatgtcatgttaatttctacttcctatctttccatttgtcccttcttctccactttctatgttataggctgaattgtgtccccttacaattcatatgttgaaatcttgtcccctggtacttcatagaataatactttatgtggagatagggccttttaaaagtaattaaagtaaaatgaggctattgcgtgaagcccaaatccaatatgacyggtgttcttataagaagggggagagacatctagaatgtgtatgtacaaagaagaggccatgtgaggatgcaatgagaaggcagtggtctgcaagccaacaggagaggcctcaggagaatccagtgttgtcaaccctttaatcttg

SEQ ID NO: 163526 - DNA, 533 bp, Homo sapiens
cttttgcatatacacacatagttaattataggtttacaatgaaaagaagtctctgatcttttttctcagcagaatcatagttctactcttattttccaacttcctattatagaacttaggagtttcgtatcctcacccccatttcccctttccttagtctaatatgccacattttaaaaaaatcaataatgtttgtgctactttactatttaaatattattcacaggttggatattaagtgtattaaaatattattttctttcttgtataatgtattttttgttactggaagccagtaatcatcttgtttatttagttagattttgtctaggtgtttttactgttgttgttgtcagctattatttaatttaaccacaaattcagkgccagaactataaatcttctcttactatactcaaatgcatcaaatgtgccattgaccttgtgttagccttaagacaacttcccataggtctgctgaactgctgcggtctatggatttctctccactgttgactacagtttgcatcttt

SEQ ID NO: 163527 - DNA, 551 bp, Homo sapiens
tttttattagatatgtagttgatgttcgttttttaattagaagcattgcttctatgaacataagaatcaacacatcttttaagaactgtaatatctttcaattcaataaatctttgaattttagtacattcttacattttctcctcaagtgtactaygtggattttgttagaattacaaaggtttcatgtatattgctattacaaatgccatttttaatttttaaatttatttttctgtttgtttgttataagtagaaattcaatcgattgtgtaaattgtgtttaatattgtccactgatgctcatcttcatcccaaacattctaggttattgcagggactggaaagctagatgccctgcctcctagggtgccttgccagctcactggcttagactgtgtgcctgagtgagtcatctgagtctaagggaagcaacgcatcacttgcttccacggaagccacaggcagtgcagtcttcttctgtcagcagatgtgagcatctgggtatctaccagaaattcactggctttggtgcttcatgtggccaagat

SEQ ID NO: 163528 - DNA, 551 bp, Homo sapiens
tttttattagatatgtagttgatgttcgttttttaattagaagcattgcttctatgaacataagaatcaacacatcttttaagaactgtaatatctttcaattcaataaatctttgaattttagtacattcttacattttctcctcaagtgtactatgtrgattttgttagaattacaaaggtttcatgtatattgctattacaaatgccatttttaatttttaaatttatttttctgtttgtttgttataagtagaaattcaatcgattgtgtaaattgtgtttaatattgtccactgatgctcatcttcatcccaaacattctaggttattgcagggactggaaagctagatgccctgcctcctagggtgccttgccagctcactggcttagactgtgtgcctgagtgagtcatctgagtctaagggaagcaacgcatcacttgcttccacggaagccacaggcagtgcagtcttcttctgtcagcagatgtgagcatctgggtatctaccagaaattcactggctttggtgcttcatgtggccaagat

SEQ ID NO: 163529 - DNA, 461 bp, Homo sapiens
ttgagaagcctctgttgttggctacactgtgtatccaaaaaagatatattgaagtcctamtccctgatacctgtgaatgaacccttctttggagatagggtcttttctgatgtacttagttatgaataggtcatgttgaagcatgggagtgcacagatccactatgactgctgtccttctgagaagaagagaagaagtacagtgacagagacacaggaaagaaggccttgtgaagacagaggtggagggtggagtgatgcagctaccttctgagaagaagagaagaaatatagtgatggacagagacacacagtaaacaagaccttgtgaagacagagctgaagggcagagggatgcagctatcttctgagaagagaagaaatatagtacaggacagagatacacaggaaagaagttcttgtgaagacagaggtggagggtggagtgatgcagccagaagc

SEQ ID NO: 163530 - DNA, 469 bp, Homo sapiens
ttgagaagcctctgttgttggctacactgtgtatccaaaaaagatatattgaagtcctaatccctgatacctgtgaatgaacccttctttggagatagggtcttttctgatgtacttagttatgaataggtcatgttgaagcatgggagtgcacagatccactatgactgctgtccttctgagaagaagagaagaagtacagtgacagagacacargaaagaaggccttgtgaagacagaggtggagggtggagtgatgcagctaccttctgagaagaagagaagaaatatagtgatggacagagacacacagtaaacaagaccttgtgaagacagagctgaagggcagagggatgcagctatcttctgagaagagaagaaatatagtacaggacagagatacacaggaaagaagttcttgtgaagacagaggtggagggtggagtgatgcagccagaagcctttgaat

SEQ ID NO: 163531 - DNA, 492 bp, Homo sapiens
gaattctctgttctgtcttccctggcccttcaaagccttgagaagcctctgttgttggctacactgtgtatccaaaaaagatatattgaagtcctaatccctgatacctgtgaatgaacccttctttggagatagggtcttttctgatgtacttagttatgaataggtcatgttgaagcatgggagtgcacagatccactatgactgctgtccttctgagaagaagagaagaagtacagtgacagagacacaggaaagaaggccttgtgaagrcagaggtggagggtggagtgatgcagctaccttctgagaagaagagaagaaatatagtgatggacagagacacacagtaaacaagaccttgtgaagacagagctgaagggcagagggatgcagctatcttctgagaagagaagaaatatagtacaggacagagatacacaggaaagaagttcttgtgaagacagaggtggagggtggagtgatgcagcc

SEQ ID NO: 163532 - DNA, 461 bp, Homo sapiens
ttgagaagcctctgttgttggctacactgtgtatccaaaaaagatatattgaagtcctaatccctgatacctgtgaatgaacccttctttggagatagggtcttttctgatgtacttagttatgaataggtcatgttgaagcatgggagtgcacagatccactatgactgctgtccttctgagaagaagagaagaagtacagtgacagagacacaggaaagaaggccttgtgaagacagaggtggagggtggagtgatgcagctaccttctgagaagaagagaagaaatatagtgatggacagagacacacagtaaacaagaccttgtgaagacagagctgaagggcagagggatgcagctaycttctgagaagagaagaaatatagtacaggacagagatacacaggaaagaagttcttgtgaagacagaggtggagggtggagtgatgcagccagaagc

SEQ ID NO: 163533 - DNA, 469 bp, Homo sapiens
ttgagaagcctctgttgttggctacactgtgtatccaaaaaagatatattgaagtcctaatccctgatacctgtgaatgaacccttctttggagatagggtcttttctgatgtacttagttatgaataggtcatgttgaagcatgggagtgcacagatccactatgactgctgtccttctgagaagaagagaagaagtacagtgacagagacacaggaaagaaggccttgtgaagacagaggtggagggtggagtgatgcagctaccttctgagaagaagagaagaaatatagtgatggacagagacacacagtaaacaagaccttgtgaagacagagctgaagggcagagggatgcagctatcttctgagaagagaagaaatatagtacaggacagagayacacaggaaagaagttcttgtgaagacagaggtggagggtggagtgatgcagccagaagcctttgaat

SEQ ID NO: 163534 - DNA, 548 bp, Homo sapiens
acattatctacaaacaagataaattaactatccccattttgcagataaggaggctgatgcttacagtggtccagagattggcacaacgtaaaaatgatcctaaaagatgaaactgaaactagtatccgggtcttctgattcccaatccatatttccgggttgacataaaaataattaattgggttataaataatccaatccatctatctatattagtcacaaycgccagccctgggcagtaattatatgtcttggcaatggctaccctgttttgagttgaaaaaatgaccaggggagcaccccaatccaactacgtccaggaagcaatgtgaaccgtattggaagccctgcattcatctgcataaacacaatctagctgctggttggtgatgttgtctcactatttcttaaaaaatctacaacttttaatacagttcatgtatttccatttttctatacaagtggcaatataatttggtgtcaaggaactacatggttgttaagaataattcatagactattggttttttagccatggaaggatgaaa

SEQ ID NO: 163535 - DNA, 548 bp, Homo sapiens
acattatctacaaacaagataaattaactatccccattttgcagataaggaggctgatgcttacagtggtccagagattggcacaacgtaaaaatgatcctaaaagatgaaactgaaactagtatccgggtcttctgattcccaatccatatttccgggttgacataaaaataattaattgggttataaataatccaatccatctatctatattagtcacaatcgccagccctgggcagtaattatatgtcttggcaatggctaccctgttttgagttgaaaaaatgaccaggggagcaccccaatccaactacgtccaggaagcaatgtgaaccrtattggaagccctgcattcatctgcataaacacaatctagctgctggttggtgatgttgtctcactatttcttaaaaaatctacaacttttaatacagttcatgtatttccatttttctatacaagtggcaatataatttggtgtcaaggaactacatggttgttaagaataattcatagactattggttttttagccatggaaggatgaaa

SEQ ID NO: 163536 - DNA, 511 bp, Homo sapiens
tatgactctgctcctgtgggagtagacaagaaatacacaaatagacatacaatataattttacatagtgattagctctgtgaagaacattaaagaagggcaaagaaacaaaaaattgaaggaggtttctactttagatacgatggtcaggcaaaacctttctgataaggtaacattagcaacctgaatgaggaagcaaagtatttgggagaagcgcctccttgaaagagaattctaaggagggaattgctttggatgtcaaggagaagcaagggttttggggctggagtagggaggcaggcagtttggtcactgcctggtgtgtcagtgatatggctctaggttgtatgaactgagacctaccaggggaggcaacrcactcaatggccacctgttcagctattcagtttgaggacaaatatcagggggttgagagcagaagagagagataatctgccttatttacaaaactaaaacaagtgcacaaaactgagtatatgtcataagactgt

SEQ ID NO: 163537 - DNA, 483 bp, Homo sapiens
atgtgatttatttaatttttgcaatacttttattgagtatatatttattcaaccttttttcctaaataaattgtttcagagaagtcacacattagtaaattctcaaacctaacatccggattctgggaggacagatgctttcctgcaagggtggtcttcactagaagagtatcagctcctagatgggctgtctggttcctctcctaagttttccaccataaaaatcccacagaatttaagcttcaagaagaatcactcaggaatttcccctgcatrgataagaaaacaaagcctttactttcagcattcattggccacttttctcttttgcagttgataaatataggagacgtaggtaataatctcagcatgtggggtgagggcttgtttttaagaagtcatttgtcctcaacaccttaaaccttaggcaattaatgctagaaataatatgctgatttgtatgttgtgtgtgtgtgtgtgtgt

SEQ ID NO: 163538 - DNA, 483 bp, Homo sapiens
atgtgatttatttaatttttgcaatacttttattgagtatatatttattcaaccttttttcctaaataaattgtttcagagaagtcacacattagtaaattctcaaacctaacatccggattctgggaggacagatgctttcctgcaagggtggtcttcactagaagagtatcagctcctagatgggctgtctggttcctctcctaagttttccaccataaaaatcccacagaatttaagcttcaagaagaatcactcaggaatttcccctgcatagataagaaaacaaagcctttactttcagcattcattggccrcttttctcttttgcagttgataaatataggagacgtaggtaataatctcagcatgtggggtgagggcttgtttttaagaagtcatttgtcctcaacaccttaaaccttaggcaattaatgctagaaataatatgctgatttgtatgttgtgtgtgtgtgtgtgtgt

SEQ ID NO: 163539 - DNA, 483 bp, Homo sapiens
atgtgatttatttaatttttgcaatacttttattgagtatatatttattcaaccttttttcctaaataaattgtttcagagaagtcacacattagtaaattctcaaacctaacatccggattctgggaggacagatgctttcctgcaagggtggtcttcactagaagagtatcagctcctagatgggctgtctggttcctctcctaagttttccaccataaaaatcccacagaatttaagcttcaagaagaatcactcaggaatttcccctgcatagataagaaaacaaagcctttactttcagcattcattggccacttttctcttttgcagttgataaatataggagacgtaggtaataatctcagcatgtggggygagggcttgtttttaagaagtcatttgtcctcaacaccttaaaccttaggcaattaatgctagaaataatatgctgatttgtatgttgtgtgtgtgtgtgtgtgt

SEQ ID NO: 163540 - DNA, 556 bp, Homo sapiens
gcttcctcacttccttgtttacagagttgaataaaaatagttgttcwgtagactgtgtgaatgtttcaaatgcaggggcatttgtatccattcacctgtgaaataccccatcatactaagagctatgatggtgatgcaaagtgggtaggtatggcaggtcaatggggagttaaaggaagaacaaactggtgagagacgttagacagcagttataggacctcctgttgtctcaccattcctagaaattgtgctatcgtttccagtgatcaaaggtctcaccattttactcaaatctactttatatctacacaccatgcactagattcctaatagtaatgtacctttgcattgttcctcctgtttaatatcaattcctataaccactgcctaatccttcgttcttacaatatgcgtattatccagaacctgctcaaatgttttcccattatccagccgtccagatattagcatccagaaatcaactctctgtactgtgagctggtctaactgcttgtgtgtgtatgctttacatttagagagtatttatcctatgatg

SEQ ID NO: 163541 - DNA, 430 bp, Homo sapiens
aaaaaaaaaaaacagaaacaaaaacatttcttcctttgctacatgcccttaggacaattttctaagatattaaagtgctttcttaaaaaaataagttttrtaagttatgtgtattccattggatttgggtccacagagggagtttctcctgctgccatgcaatgaattgtccttctgacatgtgtctttcatgatttaatatgttaaaacaaataagcaggaagtatcgttcctgtttctttttcctcttccttttcactaggagtaaatgaaaaagagagaaagaataattactaatattactagtcatagtgatgagtagcatattgatattgtggacaggaattgtgcaaatgactctatgttaatctcatgatttctaattcctgtgcatggaggcatgttgtctcatgccttcgggtgtttattg

SEQ ID NO: 163542 - DNA, 586 bp, Homo sapiens
attataggacaagcccacttgagttggttttattgttatttgccaacaaaagccttgcaaggggtatggcttcagtgaaaaaattgtagaagccacaagccatggtagaaagagtggggagaagagaaaaaaaaaaaaaagcattaccggggaggaaagagtataacaagaacagagaaaaggataataggggaaatatattttttgcctacttagaattagtccttgttcagagaatcacagaatctgggacagaartgtactgacatgcagttcacaaactggcactggtttaaaataagcactgttgtatgtttctgaaattcataaatttcaaatatcttttattctgatattaagtcttttcacttttttggcattaaaactgcatttttaattgaatcctataagtggttttatgcttatatgtatcaagctacattagatagctctgcagtttacattatttaaagttttgctggtttgtgaaactccagaatctgcatattaccaaattaggtcaatatcttttactgattatgacggttaattttatgtgtcaagttggctgagctatggtcccagt

SEQ ID NO: 163543 - DNA, 593 bp, Homo sapiens
atagccgtgactacaaaaaaagacttctaatccagtatttcccagttttcccagcctgagaaaccccataattcttgcagagatagctttcccgtccttccttatctgacccatctaaactttttttgttgtagaacactttcaaacactagaatttttggcaggacattttaaggaattggagttgagctttattttttcttgttaaatcaagctttggaaaaatcgaaaaaaaattctagcattatccagtgaacacacattttttctcttaraaaaatcggcttgaaattttctgtgcttcttacctcttattagtaataatttaccctattgacaacaagtggctaaataacttaattccacattctttagattggtagcgatgttatggtaggcatctatgattgaaaaaataatttacacacatggatcaaaacttggcagcctggttttgaaatattcggggtatattcatgtgtgctatgacatactggttgagaaccattggtctacccacaaccgcagtagaatcatacctgtgtattacatatgtaatgatactgctcttttttgagccatgagccacttga

SEQ ID NO: 163544 - DNA, 534 bp, Homo sapiens
ttagtgttctactttgcagattattcagaccctgtcttctcttttctctcttatttttcccatgcacaaggaatggaggaaaatactcattcattttgcttcttacccagcagagtagagactgtacctctgtgcgtttctgttatctgagtctttccttggaataaatccttgactctcagctgtgctaagtctgagggattcttgcatattcttgcttcttcgagtcatttatccaacccactcaaatctgcccccaccgagggtgttatcagtccaagaacacctgcagggatttgtttctgattctgacattgwgcttttggtgagaccatccctagcagtgactctgctgcctaggagtgagcagctcataccttgctagggtttctcatcctggcagcagcagacttcccagtggctgcctttgaaatcaaaggtgccaattttagaaggcagaaaagtccagttcagtctttactttgggaaacagattgagctcatagctggaaatgagagaggagaggaaactga

SEQ ID NO: 163545 - DNA, 484 bp, Homo sapiens
ctgatatatctgaatttaaatgttacttcctttcacttaggtgaaaatgttcaacttatcaatgaattgtttgcaaatctgattaataaatgttacactgtagatatacaacatttttrctgtcagtgcaataacctaaatatataattgcatgtactgatcagttactctgggaaatgaaatgtgatttcattaaccagatgaataaatagataccctcacttaataatgacagtaactacaacttattgggagcctaatgatgataactagtaggtactgagagccttctctatgcaggaattctaagcactttacatgtattcactcatttagtcccattgtttttctatttatataagacaatgattagtaaaagctggggactcataggaaactggttcacttagtctcacagaaaatatctgccattaacagtattactgaaaaacttcacattctgcaaaatcatgcaagtaattaa

SEQ ID NO: 163546 - DNA, 519 bp, Homo sapiens
tgaaaaaatttttttcattgagtgttttgtttagttctaactgtatggtagctaagagtataagttttggagtcagaatgattgggtaaggatctgatttctgttcagttcttccatatacccagtaacctgtataacttgggcaagttatataacactcccaaatttgtttccatgtctagatactaccaaagttttaaactttattaaaaacaaaaacacatcatttcttcaaaatttagcagaaaaatatagcaggaattgggtctgaatcataattttaaaggacaataataaaagtcactcgaaagaccggagcccaaataaacaacaacaasaacaatatatatatgcaatcaattctcattattcatggtagttatgttctataaaatcactatgaatgctgaattagcaaatactgaaccactgctcctagaggaaatacagggtcagggtcctgcaagtctggtcacattttccttaaatgatcaatatataaccttgttgtctgtatgt

SEQ ID NO: 163547 - DNA, 398 bp, Homo sapiens
attactagtgttattgagtgaaggtaaaggtatactataatgacagcaattttattcaatttctttattaagtaggtaatttccagaaatacacgaaccttacttcaccaagttcatataagagtaaaatcaggaatgagaactaaagttattcctttgttttctaaggaaattgtattaatagatttctcatttctgactctgtactcagacattttttttccctcccaatctggacttcatagtrctgaaactaatgcttgtcagaaaaaaaaactaccttttttctttctttctctctttctccttccttccttttcttttctttttcttcttttcttcttttttcttttctttgctgagcttctcaaaggcaataagctctataatgttgcgct

SEQ ID NO: 163548 - DNA, 502 bp, Homo sapiens
tcgggaggctgaggcaggagaatcgcttgaacccaggaggcggaggctgcagtaaaccaagatcatgccattgcactccagcctgggcaacaagagcaaaagcctgtttccaggaaaaaaaaaaaaaaagrcaaaggacttccacagacattattctaaagaagacatacaaatggtcaataagcacatgaaaagatgctaaacaacattaatcacgacagaaatgcaaatcaaaacaacaatgaaatacaacttcacatctactaggatggctatactaaaaataaacagaaaataatcagtgttggcaaggatgtggaaaaactggaatccttgtacattgctagtgggactgtaaaatggtgaagttgtcatacaaaatgatatgacagttcctcaaaacctaaacagagaattactatatgacctagcaattctgctgctaggaatgcactcaaaaagttttgaaatcagccactcagacacctgtatactattgttc

SEQ ID NO: 163549 - DNA, 511 bp, Homo sapiens
cttcaacagcatatagcttgatttttaaaaatctagtttgacagtctcttttaactggagccattcatgattaatgtaattactgatatggatttaaatctaccatattgtcaagtaccatgtgcttttctctttgttttacctcttgtctgcttgtgtttctcttcttttgggtttttaaaawtttttttattttttccgaggcagagtctctctctgtcacccaggctggagtgcagtggcaccatctcgtctcactgcaacttccatctcctgggttcaagtgattctcctgtctcagcctctcaagtagctgggattacaggcatgagccaccacacccggctaattttttatatttttagtaaagatggggttttgccatgttggccaggctagtcttgatctcctgacttcgtgatctgcccgccttggcctcccaaagtgctgggattagaggcatgagccattgtgcctgacccttgggtttatttatttatgtatttattat

SEQ ID NO: 163550 - DNA, 392 bp, Homo sapiens
acactcaaagaaggaagagggagcttctgtggctctcggtgctctgcttctctgggtcaaacccttcttgccacacaggtgtgggagcctgagcaggccagtccactcctgccctcctttcagcccactccctgggccaggatgcacacagrtatgtattccccaatttgagccctgcctcacttcttcctcgttgttacctgccagcaccaccacacttgagaacagcagacacattgaactaaatatgatatgatgtaactctagcctaggagttacagaaaaaaacccaagcacatttctaaaatattcgagaatcctgtgttgaatgttaaagaaaccaaccacataggatctttataacacaccaaggcaggcactcacggcctgtc

SEQ ID NO: 163551 - DNA, 562 bp, Homo sapiens
caaggttgtaaagtctgatytgacttcttactgcaagcaccgctacttctatgacatcctccatgccctttttatttcaaaagcagtttaatatgttatttcatttaatctccactgcaactatttccatttaaaattttgttagataatcaatagtgctctaaatatgaaccaatttggaagaaatatgaagaaaagtcatcttttagagacaacccaattcatgggccttgtaaacatttttattttttaggtaatcataaaataaaattgactttttaaaaaaatttggtgtgtaggtctatgaattttcacaaatgtatggaggcgtgtaaccaccactataatcagtggaactgtgcctttaccgcatcgaaccgcctccttccatctctaacccctggcagccagggatctgtttttcatcaccatagctttatcttttcaagaatgtcaaataaggagaatccacaggatgtggccttttgaaactggtttctcttatgggcttactttttttttctcagttagaacttttatttaaaatcaacaatccattgaa

SEQ ID NO: 163552 - DNA, 585 bp, Homo sapiens
ccccactttatagtagaggaaactgagagagcatttaagtggcttacctaagatygcacagactatacatagagaagccaggtttgtctgtcttgaaactttttttttttgcagtgggctatttactatttatttcccagatggctctttacaccattgtgggcagtcctaccttacagtggggtctggtttctcaccttataggaggatgtggttgatacttgataagatttgatactggtcaggcgaggtggctcacacctgtaatcctagcactttgagaggctgaggcaggcagatcacctgaggtcaagagttcgagaccagcctggctaatatggtgaaaccccatctctactaaaaatataaaacattagcaggatgtgatggtgggcacctgtaatctcagctacctaggaggctgaggtaggagaatcgcttgaacccaggaggcagaggttgcagtgagctgagattgcaccactgcattccagcctgggtgtgacagagcgagactccatctcaaacaacaacaacaacaataacaacaaaaacagcagcaaagatatggtgctcagtctcctc

SEQ ID NO: 163553 - DNA, 585 bp, Homo sapiens
ccccactttatagtagaggaaactgagagagcatttaagtggcttacctaagattgcacagactatacatagagaagccaggtttgtctgtcttgaaactttttttttttgcagtgggctatttactatttatttcccagatggctctttacaccaytgtgggcagtcctaccttacagtggggtctggtttctcaccttataggaggatgtggttgatacttgataagatttgatactggtcaggcgaggtggctcacacctgtaatcctagcactttgagaggctgaggcaggcagatcacctgaggtcaagagttcgagaccagcctggctaatatggtgaaaccccatctctactaaaaatataaaacattagcaggatgtgatggtgggcacctgtaatctcagctacctaggaggctgaggtaggagaatcgcttgaacccaggaggcagaggttgcagtgagctgagattgcaccactgcattccagcctgggtgtgacagagcgagactccatctcaaacaacaacaacaacaataacaacaaaaacagcagcaaagatatggtgctcagtctcctc

SEQ ID NO: 163554 - DNA, 592 bp, Homo sapiens
gtgaagctcttgatgacagggatggcgggtgaacttgtcttaggtgtgcaagtgtggacccagaagcaaaaatgggtatgctgtgcagaagggttaataatcacccccagtctggatcattttgctgtaacatctgctgctaacccactgctaggagggggaatgccaattgtagtgctgctggagtagattttaaaacagaaaacatttgtgtgttgaagtgaggactggcrttctgttggttggatgacataagtcccaatttcttccatttccccatggtgtgcttgcattttggggcccaggtatactggggagggatgacccatatggatggagtgtaggctcactttggtgtggactagtctcactaataaccacgtaattatcattgctagaaaggactacagatcattctggaaaactctggaaaactcatttatttatagctaaggaagctgaggcccaaagtggaaaaacaggactgaaagtctgcatttgactttgaatccaatgctctttccctggtaacgtgattaataccaataacatgaaaatattatcaatagcattaatatggtcagtaaagctt

SEQ ID NO: 163555 - DNA, 587 bp, Homo sapiens
cccattttcaatgttgtgtttcttccatactgtcatttcaaaagagccatttaaggctgggacactctggtcccactcaaaaaaaacaacaacaaatcattaaactttcaacttttaaaaaactaccaaacaggttgcaaaacactttcttatcctacacctgggcgagagagacttacagagggggaaggggcagggagggaagaaggagagggtcatgaatggtgagggggaagggactgagtgagggtggaagtgttcatgattgggatggagtagagattagggagccttgaacctccctgaaggtgagaaaagatcacggatatctgttcatgaatttaaaaagactccgcaacttcatattcagagaggagcaggactcaggaatcaggcaatggtcatgaggtaagtttyaatttttcaaaacaaaggtgatttcatttttaaaaatttgttgtttatttgtcaagagaaactatttatttttatttttattttgagacagagtctcactctgttacccaggctggagtgcaatgctatgatctccgctcactgcaacatccacctcccgggttcaagca

SEQ ID NO: 163556 - DNA, 562 bp, Homo sapiens
aaaagcattttattctcttccagtttttcaagcaagttttaaagtgctattactggatcagattatgagagatgcacagtaacttacacagttaacaaaaataaacaaataaataatgtatcagtatataaaaattcataacatttctgagtttgagaaacctggcataagatacatataggtttgcaaagataaaagatgatttcgtaattttcatattgaaagtattttaagatataaaamtaatacaaaatccttaagaaaacagtagaaatgttacaagatcttttaacacttttgtattatggccctaataaagaataatggcccaaaataatacaaacattgaaaaacaagccaattaaaattacaaaaaaaaaagaaaaactgtttcttacttgataaaataaaggaaggtgtaataaaaattaagagaaataaagaatttaaagataaatggtggaatttattgtgcttaagttaaagaaagtggtcatgacaaaggatatttttgtttctttgcaagtttcaaagtaatattattttgataatagttggttat

SEQ ID NO: 163557 - DNA, 596 bp, Homo sapiens
ctggttcatttctcaggtctgaattcccagtgagcaaccttgaggaataaggtaacatctccctctgggacaaagagcaagcttgcttcctcctaactataaaagtgatgaattcccaaagctcagtactcttcagctgtaatacaaactcagtgcagatgcagtgtttatttgaatccatattgctttctccctttgggactttcagggaaccaaactgatacaaacatgctcatttacctggtactgcctatgctgtgaatatttataatcatttgtctctgaacttggagccttttgtcttcttccagcatctatgatactaacagsataacttattaacttgtaaagaggctaaaatataatatcagacctggaaaacttgctgttttgtgaatttctttctgtgagacttcagaaataatattttaacattttataatgttatccatgatatgcctctatgtttaatatagtttatggctctagcttattagacttattcaaaaaacaaggtaagtactagaaagtcatatagaattattaccaaccattatatagcattaagtaaaatatttgattttataattatttta

SEQ ID NO: 163558 - DNA, 352 bp, Homo sapiens
ctaaactccacctctgtaactctcaactcccatgtccacactagagtgttttccctgttccctgattcttattcatctctctcagatcatctgagtcaacgttttctgtccatccgtgcctctatttttgggagattcaaacaacactctgatacattatgattcccatcttttcccaatgagaatattccccttttctgcaccaaaaaagaaaaacctrtgaagaaaaactaaaatttcactgacatcttcaaaagtcttttaaaaattacatccaatgcaaacttaaattgccaaagaccatatagattaaattaggtgtttcgctttttagtagatacttaaattagac

SEQ ID NO: 163559 - DNA, 547 bp, Homo sapiens
tgcttttctactgttattttatctgatatgtggtgaattttgtcttgaaatatgaaaaagccatgtacttctgggaagaaaaacacttagcttttatgtatttttctttttgtacattgccagattcaattttctaatatttttgtttatatttttcagcctacattaatgagatgacaagtcatactttttcttttgtaataccctcatctggtttggtatcagtgttatagtggcctcactgaattaactgataaatgtgctacttttattttctgagagagaaagtgaagaactgttgtcatttgtttttcaaatgtttgttggaattcactgttgaaatcatttgggcctttagttttctgttaggaaagtataaaattacaaactcaatcactatattagtctgttcaaagtctcctataaagacacacctgagactgggtaatttatggataaaagagatttaattgactcagttctacaggawgtacataaagcatggctagggaggcctcagtaaacttacagtcatggcagaatgcaa

SEQ ID NO: 163560 - DNA, 456 bp, Homo sapiens
gattaaattaggctgaatgaaaactctcagataatacagccaatttcagaggcaatagcagaaatccagctgaacccttacatttttgttcacttccacaagggaatttattracagagatttatagccatccttggtgatgatgtaatcaacttaccatttgttgatgggcagataattgcattcaaatataagagtagtaatgctctaaagctacccaaagtgtatcacaggtgcagctactaaacccagcactccagaaagtgagtgttcatgggccctatgcttataaaggtagaaatttggaaaggacatagaaacataagggagaaaaagaaaatgcacacagtcttatattcttctatactagtaggataataatagtaattacctcaaaatgttgctgtgaaaattaagagagataatttatgttaaaatctgaaacataagaggccc

SEQ ID NO: 163561 - DNA, 543 bp, Homo sapiens
aaaaatttaattccagaagacagtcaataaaatgtggcctcaatggtaagatcaaatagaaggatgtggctgttaggccctaacaaaataacccagaatgatttcttatagagtatttagtagacctctcatctaaacaaatgaytgtctatgaatccagacccatcactcaaataggcccatcatccaaattagagagaggcctaccttgacaagaatagtaagcctggctgtcatctaacagagtagaatttaatctgatccatagaaatcccataaggaattttaaaggaactatattgatttggattaaaagggacagagacagttcaagaagactccatgccatcaatttcctacagacaaaaagtgagttgagaaaactacttagatgcagtcatgggctatttctttcttacagaaaaagaaggatctctcggaggctaagcaaaccatccagagtgtggacccaaaatccaaaaaacaaaattaattagagagccactccaagagataagaaataggccctaatcagggaacatt

SEQ ID NO: 163562 - DNA, 543 bp, Homo sapiens
aaaaatttaattccagaagacagtcaataaaatgtggcctcaatggtaagatcaaatagaaggatgtggctgttaggccctaacaaaataacccagaatgatttcttatagagtatttagtagacctctcatctaaacaaatgattgtctatgaatccagacccatcactcaaataggcccatcatccaaattagagagaggcctaccttgacaagaatagtaagcctggctgtcatctaayagagtagaatttaatctgatccatagaaatcccataaggaattttaaaggaactatattgatttggattaaaagggacagagacagttcaagaagactccatgccatcaatttcctacagacaaaaagtgagttgagaaaactacttagatgcagtcatgggctatttctttcttacagaaaaagaaggatctctcggaggctaagcaaaccatccagagtgtggacccaaaatccaaaaaacaaaattaattagagagccactccaagagataagaaataggccctaatcagggaacatt

SEQ ID NO: 163563 - DNA, 597 bp, Homo sapiens
tttcctggctgacccaaggaggggtgaggagattaacatctcagcatatctatctatagcccatctaccyaccttacaaggagtgaaaagctctgtgatgtgcagtagtctttataatgaagcatcaaattacatcttgctatcaacttttaaattactctataccaattgggtccaaaaacatttaagtagttcatttctaattctatgttatttacctttatccctaggcaccgtttgctaattgttctcctcattctattttctttcaaactttcatgtttctgctgtttctccacctataatgcccttcttttacctttctttggtgaactcctactcatcataaatctcatttcaaatgccactactcaggccattccaagctctttcaggcaaatttaggttgttccttcctctggctgtccaaacgtgcacacacacatacacacacacacatcacagtacttactgcatggttgcttgcactagttgtggaaagctgtagtgtagagactttgttttctatatcattgtacccttcacttggttcactgtagttcctgcctgcctagctcagagctcaatatatgtttt

SEQ ID NO: 163564 - DNA, 597 bp, Homo sapiens
tttcctggctgacccaaggaggggtgaggagattaacatctcagcatatctatctatagcccatctacccaccttacaaggagtgaaaagctctgtgatgtgcagtagtctttataatgaagcaycaaattacatcttgctatcaacttttaaattactctataccaattgggtccaaaaacatttaagtagttcatttctaattctatgttatttacctttatccctaggcaccgtttgctaattgttctcctcattctattttctttcaaactttcatgtttctgctgtttctccacctataatgcccttcttttacctttctttggtgaactcctactcatcataaatctcatttcaaatgccactactcaggccattccaagctctttcaggcaaatttaggttgttccttcctctggctgtccaaacgtgcacacacacatacacacacacacatcacagtacttactgcatggttgcttgcactagttgtggaaagctgtagtgtagagactttgttttctatatcattgtacccttcacttggttcactgtagttcctgcctgcctagctcagagctcaatatatgtttt

SEQ ID NO: 163565 - DNA, 524 bp, Homo sapiens
aaaatcataaacatagaatggatgtgattaaagataagtaaacatctctggaggaagtaaggtattgattcaatcatgtatttattcattgatcatttcttagacacaaatttcagagaggatcacatgtataaggcaaagtcgaaggacttgggatagggcagagtgaagaagtggtgctggggagtaatgtaaaggtcaatgmgacatgttacttgttctcagagaggtcatgggttaagctgaagtgcagagaggcagcatattattcatattataatatgataaatgctataatagaacatgtagtacatgtttccacctctaggacactccttttgggtgtggcccctctcaggtaaacaggaaaacatagtaacaataaacatcagtatagattataagttcataaagtaagatgttgactgcaacaccataagcatagctttgggtggtaagtgttagagacatttgccataaagcccatgactagacaagtaagtctctgccagcctactcccatt

SEQ ID NO: 163566 - DNA, 524 bp, Homo sapiens
aaaatcataaacatagaatggatgtgattaaagataagtaaacatctctggaggaagtaaggtattgattcaatcatgtatttattcattgatcatttcttagacacaaatttcagagaggatcacatgtataaggcaaagtcgaaggacttgggatagggcagagtgaagaagtggtgctggggagtaatgtaaaggtcaatgcgacatgttacttgttctcagagaggtcatgggttaagctgaagtgcagagaggcagcatattattcatattataatatgataaatgctataatagaacatgtagtacatgtttccacctctaggacactccttttgggtgtggyccctctcaggtaaacaggaaaacatagtaacaataaacatcagtatagattataagttcataaagtaagatgttgactgcaacaccataagcatagctttgggtggtaagtgttagagacatttgccataaagcccatgactagacaagtaagtctctgccagcctactcccatt

SEQ ID NO: 163567 - DNA, 518 bp, Homo sapiens
aaagctgttgtctcatttccagcttctccaggtggtaaatgttttctcttgccattttgttcaatttcaaagagatcatatccaatcttcctaattaaatataacaatagctggctttcttagatgacctttattaggtcaaggaaatttccttctattcctagtatgcagagaatttctaatgtgattgagtacaatgttttgtctaatatattttttttcatccattgagggacttgtttcatattgttaaaaactaaaagtttgctaataggtgggctgtattcagtgatttccagatgttaaatcagccttccrttcttgagttaaacccaattcaataatgttgtattatcctttaatatatatattgttgcattcaattgggtaaaattatgttatgaattttggagtctatgttaataagggctattgttctatggttttcttgagattgttctgcctggttattttatcgaggtaatcctagcatcataaaatgtactaggaaatgaccc

SEQ ID NO: 163568 - DNA, 582 bp, Homo sapiens
gtaggtttggagtgaggcccaggaattttctaacaggtttctaacaggctcccgggtaatggctatactgttgatctgggaaccatgctttgagaaccacagccacagtcatttgtctgagcttctcctatctgagccagcccctccacttaggtatttgggcccacggtctcccactcactggaggctccaagaagtctccccactctcacagcaccagttcctgtatctttcctggataatttccactggtttatagtcatcccaagatgaaatctaacaagcatttgtcagttctcatgtcacatggcctacaagcaaagcctttgacatccttcatttctctctctttctagaaacttttggctcctacaataccacaagcccttagttttactcctaactgaatggtcactcactgtcttctttgctagtttcctcctccttctgatccctaaagtatggagtgtcctaggactccatwcttaaatctcttctctatgtgctctttcttcattggtgaggcaattcaataatttagatgccatctttttcaaactcccaaattaatacccccagccc

SEQ ID NO: 163569 - DNA, 397 bp, Homo sapiens
atttattctcattctatattcaccaggcaagcaattttattatctgaatttggtttcccaagaagattttgatatgaaaaacttgtgctaatcaactcacaaggggacttcaagatcacaattcacatttgatgaactgtcattctgatttatttgtcatcttattttaaatttaacatgagaaagtgaaagaaattgagttcctctttatgcaagtctagtagtcaatagtacggactctgtgttcacactgcctggattacaataccagcttttcgattcactagctgagtgacctcaggcaaatttcataacttctctttgccttaatttccttatgtgtataargtaaaataatagtacttaccacatggaaatcttaggagaaaatgaatca

SEQ ID NO: 163570 - DNA, 577 bp, Homo sapiens
  misc_feature (1)...(577): n = A,T,C or G
actattgtattacacacagcagtgaggatggcttgtgcagaaaggtaggaagtgtgatagatgagaaaagcactrgtggcattttgccagctcgcgataagtatctggtacatctgcggcatcaccaagaggtctctgatttagcaaaagcatcatanagatattcggtgtcataaaagtaacactttatttaaccttcctgtacaaactttaggagcattaatctgtcacagtaggctctatcttgtacatgtaaatggatgagactctgtaatcaaatcctaaatgtgtatttgtagcaatacggcttttcagaagaatgtatgatgggaagcaacagacggagcaggggacaattaaagagacagcaccatgctccgcgagaccttttactccctgaatggagtttcccaggactgcactgatttctgaattttcttctttatttaccagctagcataactttattgggaccccacaaggcctctcctactctatcgcctgcaatggagactcatttaggcagagagaaaccttgcaaggatgtgattcaaggagcattctaatttcctttcaa

SEQ ID NO: 163571 - DNA, 455 bp, Homo sapiens
gaattctgtgaagggaagcaccaagyaaacaatgcacggtgcactccggggaaagctctgagctgtgattcattctcagaatgagggaaataatgacctcagcctatgcacacttccttatgaatttagaagatgacacggttatactagtaattcatacaaccgaaataccttactgtagcctaagaaattcttggccctatgggtacatagattatcctaaactggatagataattatacaaatatctgtatccatggcagtatagataaagcttttaaaataggtcactgaactcattgaactttcaataactagtataaccagagtagaattgttaaaaaaattggattggaaatttcagtgtttatgctcttgactcaaaatcggggggcagataataaattcattgctaaaattcatttggaagttacagtttaaatatattttcccag

SEQ ID NO: 163572 - DNA, 456 bp, Homo sapiens
ggaccccttctgcctccaaggaataagtataaattgtgaagaatgaataattaattaggatattgctttagaacttatttttataactattatagtaaatgaatataatccatgtgtgaagataaacaaaatacaaacagaatacattttatttgcttaacaggaatctatactatagagtagaatcatgtcttacccagaacatagactctaaaatcaatctgtaataagaaggttacrtataatccaatcttctcttaaaaataatcaaacacagtattcatggctttggacttacaactttttgctgtgtgtgcaggatggacagaatataataaagaatacacatgccaaatatgtttacagtgttttatttccatgaaggtagttgaactggactcacaatatgcacatattatgtgatattatgtgactctactatatctcatctcttct

SEQ ID NO: 163573 - DNA, 590 bp, Homo sapiens
taggctatcatttttttaaaaatcacatacattgtatgactctaccttaaataaaatgattaattgaagtatttctttttttgtgcaaagtagagtactgctagatcctcgaaaggtttctaagagaaaacacatcaaggcgcagtggctcacgcctgtaatcccagcactttgggagaccagggcgggcggatcacgaggtcaagaaatcgagaaaacatatcagctcagctaggccaatttgacttcctcttccttccgtcattttcttcacccctttgttctctgtcctttgaacwcctcctcattagagcccctggctctctaatttcacagtcccaccatttgacattgaattcacctttccttttgacaggacctgctgctttatcttttcccttttctaactttgcaaagataaaatcttatttctcaatgaaaactgagactcagatacaaggtatacccaagaattgacttaattgtcaaagaaaattagtgatgagtcagataactgagctaacccaaatccaattttaaatctggtataataatggtcctttttcaaactcagagcataaccaaatcac

SEQ ID NO: 163574 - DNA, 590 bp, Homo sapiens
taggctatcatttttttaaaaatcacatacattgtatgactctaccttaaataaaatgattaattgaagtatttctttttttgtgcaaagtagagtactgctagatcctcgaaaggtttctaagagaaaacacatcaaggcgcagtggctcacgcctgtaatcccagcactttgggagaccagggcgggcggatcacgaggtcaagaaatcgagaaaacatatcagctcagctaggccaatttgacttcctcttccttccgtcattttcttcacccctttgttctctgtcctttgaactmctcctcattagagcccctggctctctaatttcacagtcccaccatttgacattgaattcacctttccttttgacaggacctgctgctttatcttttcccttttctaactttgcaaagataaaatcttatttctcaatgaaaactgagactcagatacaaggtatacccaagaattgacttaattgtcaaagaaaattagtgatgagtcagataactgagctaacccaaatccaattttaaatctggtataataatggtcctttttcaaactcagagcataaccaaatcac

SEQ ID NO: 163575 - DNA, 302 bp, Homo sapiens
gatgtacatattcacaaatatgttgggaatgtttgagccatgttaattgggtgaatactttgacccaatccttcaggaatattgaatcatgggaatactgtacttagaacaacacaatattaccatgggcctctctgccctgcgcaaatattagtctttaactggaatgaccaaaaacagatgtttcatatctagaatgttttctcacagagagtttcaatagaaatattttagcccctcagatacatycaaataaaatatttggtcttgaaacattctattttaaaagtcagtgagttgtg

SEQ ID NO: 163576 - DNA, 588 bp, Homo sapiens
taagagttttttcttttaattgtacaataaaataatgaatgaagtgatcaaacgtgaaaagacaagttttaaatatcactgatcaaattcttctagcatgtttgtccaggccacaacccttcactatctagtggtgggaaaattatatatcatgggccaaatccagcctatagtttgcttacatgaggtaatggcaawggcagaattgagtagttgcaacagagatcttatggctcccaaagcctaacatatgaagtttgccagccgccagagcagaccatcataacacttatcagagcagccagtgtggtcagtggtaaaccaaggccctcttggagaatgtgctcctgggttgggctggaggactttacctagacctgtgctgctttgcagcccagaggctatcaccccagaggtctagggagttgagccaccattcaactgatggtgttgtgttcagtttgtgtaatgagatctcaaacagtagggccaatgcttgtctcttaatggtcttctaagataagataatgcctgtgaaaatagtttataaactctaatggctagacaagtgctatttataaaaggcat

SEQ ID NO: 163577 - DNA, 533 bp, Homo sapiens
ggccctctccataggctgtcttgggcccagggcccagacctccagccatgcttccagaggccctgtgcccccatattatcctacccaggcagcctgcagggaaggggatttgttccctatgcctgtcactctgcgctgtgtggagggcaatagggcttttgtgagttcccaagtgaacccactggcccattgtctggcccaactctccacagagctccaccagcgtggtgaggacaggggcagggctgggaaaggcctgatatattcctggccagagctgcaaacactgttcatcccagaagcaccctgttaagcagcaacaacagcacaaagagggaggagaaaggagagrgtgggaaacaaggagggagaaggcgtgaggagggagaaggaaagagaggtgaggagggggaggaggaggaaggtgagggcaatgaggaagggcacctacagcatggaagaggagcttcttgtcagagtccttcaggtcctgcacatggattctgcagagccacatttctcctggagagact

SEQ ID NO: 163578 - DNA, 630 bp, Homo sapiens
acagtgcatattgactctctgcagtctggctgattgtgtgtgtgtgtgtgtgtgtgtgtgtgtgtgtgtgtgtgtgtgtgtgtctgtgtgcatatgtaaagcatgctatcaaaactcatttatctgtaaaaactgttcccctttcaaaatcattgtcatgggctctactcattggtccatctacactaccttctagaaaaaccttcagaaactctgacacattctttatgccccaagagtggatttgaatttcagaaacaggcaaaagtcatttggaaccaagtctgattagtgagatggatgagcaaactaagaaataatattactggtcaaaatgaagagccactataaaatgaaggtgagagatttgagctgattccactctgtgcctctaaagacagttccaagcacagaattctggaaagatgtttgatagttggcccctccctggactgatgcaatgtcccccmccccacacaggcaaagatcatttggaaccaagtctgattagtgagatggttgagcaaactaagaaataatattactggtcaaaatgaagagccactataaaatgaaggtgagagatttgagctgattccactctgtgcctctgaagacaattccaagcac

SEQ ID NO: 163579 - DNA, 483 bp, Homo sapiens
ccctgttgctttcagcccctggctgtgatggattagaaaggcaaacctagtccctctgatcaagaggcttatttaacttgcttgttggaaatctcagtccacagttcttttacttttgaagtggttggccagggctcatggccatttgtacttgggccaccattggcctctgtgtgtgtaagtttctgtgtttgtgagatgtgtggcttatgtgtaaacatctacctgagttcttactttcaaaaaagtgctgcgagggcttccagtctcctcctcctgtgctgtcctctggaaccaccttcagggcctgtgatacgctctgttgactactgtaacactggcagatcttcaccayaggaaaggggatgtgatagaggaaaaacaggaaggaagtccgaagccaagcctcatgaaccttcaggatgagtgagctgggctcatgtgtactccgtgtgtatgtatgtgtgcatatatgtctcttta

SEQ ID NO: 163580 - DNA, 521 bp, Homo sapiens
ctgggatgttggctttggccttacttccagttatgggcaaaagctatagaataagttggccaaaatcccactatactttcaatagtatgaaggatcatgcccaggatttgggatctgatgtcctgggcttatttccattttctgctaagttctttagcctctttaagtccatatgctgcctttataacataggtaatataagatcttatatatagagtgattgggattacattgtgtttacctttgtaaactgtaagactcagtgcagtaccacttgccctgattagtactagtggtaacaacgactcttgttcgaaagacctaacttgtatgggatgagggtggcaactgatgaaggagggcccctggagacacaagatcaacatgataggttgtgattcttacatgaacaatgtcagagagcacaccctgttattaatagcagtgctattaataatgataactattacactaatcatcacrattaattacataccaactgtgtgccaggcatcaagctt

SEQ ID NO: 163581 - DNA, 483 bp, Homo sapiens
aaggagactagtctgacatttaagggtgatggggagccactgaaatcttttccaaaaaggaggctcataatcaactgggctgagagtagtgacagaatgaactggggaagttcagggaagctccttcctagccctcatctatgctgcaggccaacactgtacatccctccagagctctcagtcagttttctgggctccttgtactggggccagtgcaggtcccccaagaaagtgctgagcttggaagttttatggagttctgaactcccgggccaagctctctccagtccccgatcaattgatycctgtcacaagctgatcttgttccagttctttactttctggatcataaagttgtcctctggtgacttaggaggctctctggtgctgggcatttataacccagagatacctgtgcagtcagcagcccccattagtgtgctgtttgacaatttagctgtcccctctgaggccaggatgaga

SEQ ID NO: 163582 - DNA, 313 bp, Homo sapiens
gagctgtgcatgcaaataacagggactctgtctcattggaggggtcagcaagactccctggggacaygacgggtcaggtgagactgacttagggaatgaggagggaagaaagggaggtgcaatccaggcagagggatcaatattggaaaggcctcaagttgaaagaaaatgtggggcaggcaaggaacaaagagcaggccctcagtaggggtgctcagccaggggagagtgtttgcactggggcaaggggtgaggtccatggggccagtggcagcagcactagtgagctagagttctgagaaattcctctaga

SEQ ID NO: 163583 - DNA, 465 bp, Homo sapiens
actgatgaagaaaatgtaaaaggtaacaggcaaaagtctcacgtggatatctggctcacttcatagatgaagaatctgaggcccagcaacaatgagtgacatatgcaaggacacacagctggttgcaggcagaggtgggagcagaatatgctagactccaatgttgcctcttcaatccacatagttgtaaatgacagccacttatatatatatatatataatatttattatttaatttatattttattaaataatattaaatrttaaatttaatatttaatataatatatacatatataatatttattaagtgtttgtcatgtgccaggcaccgagctaatgaggatagtagagaggagtagtctgacacacgagctctggggtagggcagcccagggttgaatctggcaccattactcataagcagtgtaacctcaggcaagttgcttaacctcttggtaccat

SEQ ID NO: 163584 - DNA, 561 bp, Homo sapiens
tcaataaatcctagccaaaaaaattaaaaacaaatttacgagtgtttaactagtatgcatcactgtgcatatataggcacgcatccatctatccatccatctgtcccactcagcaggtatctgtcctgtcgtggtgatctgctgggtcatcttccctacctccaggccrtagcatccttcaatccatccgtctctccccactcggcaggtatctgtcctgtcatggtgatctgctgggtcatcttccctacctccaggccgtagcatccttcagagtcctccattccttcctgtctcaccttgctccacttcagttccttttcaccctgatcctaaatcaatactataacttttaaatgactctccctgcttctagcccttcctggcccagtctgttccaagcaccactgctaaatcaatcttccaagtactcttgagtgactgcagattgcccttggtcatggcgtccagtctgaatttcttggcccaacccagaggcccacagcatatgccctgtattgtgattctgtcttttggagttagtggcttctggagaagctt

SEQ ID NO: 163585 - DNA, 561 bp, Homo sapiens
tcaataaatcctagccaaaaaaattaaaaacaaatttacgagtgtttaactagtatgcatcactgtgcatatataggcacgcatccatctatccatccatctgtcccactcagcaggtatctgtcctgtcgtggtgatctgctgggtcatcttccctacctccaggccgtagcatccttcaatccatccgtctctccccactckgcaggtatctgtcctgtcatggtgatctgctgggtcatcttccctacctccaggccgtagcatccttcagagtcctccattccttcctgtctcaccttgctccacttcagttccttttcaccctgatcctaaatcaatactataacttttaaatgactctccctgcttctagcccttcctggcccagtctgttccaagcaccactgctaaatcaatcttccaagtactcttgagtgactgcagattgcccttggtcatggcgtccagtctgaatttcttggcccaacccagaggcccacagcatatgccctgtattgtgattctgtcttttggagttagtggcttctggagaagctt

SEQ ID NO: 163586 - DNA, 561 bp, Homo sapiens
tcaataaatcctagccaaaaaaattaaaaacaaatttacgagtgtttaactagtatgcatcactgtgcatatataggcacgcatccatctatccatccatctgtcccactcagcaggtatctgtcctgtcgtggtgatctgctgggtcatcttccctacctccaggccgtagcatccttcaatccatccgtctctccccactcggcaggtatctgtcctgtcatggtgatctgctgggtcatcttccctacctccaggccgtagcatccttcagagtcctccattccttcctgtctcaccttgctccacttcagttccttttcaccctgatcctaaatcaatactataacttttaaatgactctccctgcttctagcccttcctggcccagtctgttccaagcaccactgctaaatcaatcttccaagtactcttgagtgactgcagattgcccttggtcatggcgyccagtctgaatttcttggcccaacccagaggcccacagcatatgccctgtattgtgattctgtcttttggagttagtggcttctggagaagctt

SEQ ID NO: 163587 - DNA, 561 bp, Homo sapiens
tcaataaatcctagccaaaaaaattaaaaacaaatttacgagtgtttaactagtatgcatcactgtgcatatataggcacgcatccatctatccatccatctgtcccactcagcaggtatctgtcctgtcgtggtgatctgctgggtcatcttccctacctccaggccgtagcatccttcaatccatccgtctctccccactcggcaggtatctgtcctgtcatggtgatctgctgggtcatcttccctacctccaggccgtagcatccttcagagtcctccattccttcctgtctcaccttgctccacttcagttccttttcaccctgatcctaaatcaatactataacttttaaatgactctccctgcttctagcccttcctggcccagtctgttccaagcaccactgctaaatcaatcttccaagtactcttgagtgactgcagattgcccttggtcatggcgtccagtctgaawttcttggcccaacccagaggcccacagcatatgccctgtattgtgattctgtcttttggagttagtggcttctggagaagctt

SEQ ID NO: 163588 - DNA, 594 bp, Homo sapiens
gaattctaaaatcctttactttttactttttttggaatttggagtcttccctgcctataattgggtattgtgctgccattgtgatatgtttatctggttttagcactactggaatcaaattatatatcacgtaagtatttgattttaataagtagtcacccagaggttttctscacagacaatgagggatcaaatttgctcagttaattcccttctttgggattttgttttaattattcattgtgtaacacactgtgagctcctctttttaatttctgttgtgtatgatctctgggactgaccaactgatagttttttttcccacttggttattatctgtgactactggtgttaagcagtcctgtcctgttgttggtactgtgagcttttctggatctatttgacttattcatggcttcctgtgttcactgtttcctgtacacacagataaaaacaagtatatcactatgatttaaaaacacacatatatgtatggaaataattaaaagctcacttacatcaacatttcactatttgttaaaataaataaaatgctatctttgtattacaactacttttatacacttttgaaat

SEQ ID NO: 163589 - DNA, 565 bp, Homo sapiens
attctggctatctttggaaatgctctatgaaatattctgtgacaaatagtaaccactcttatcagcaatttagagtgctcaatatattttttaaaaatattacttttacctgtaaacttttatacaagtaaattcaccaacctaacactcttcattagatcacaagaactaaaattgttctttaacgttaggaagtgtgtttttgccttgagatagatgaactaggcattctttctatgaatagtcagtggctgatcactgaatacaattttctgctcagcactctagcagactggcataattagagaattaggcaacacaaaaacctttatcataaagttagtgaataggagctaaccccatgggtttaaatgtatgtgttaccccaaggcagcagataaaaccttattatttatactaataaataatatatgactggaaaatttaagaggaattatcaatcaaaattgtctttatatcagtcaactttttttacaatgaaaatttattttctrtgagtattctttctatttcttacattttagagaaaaccgccaaatcaatt

SEQ ID NO: 163590 - DNA, 604 bp, Homo sapiens
actttttttcttattataattagtgattctggaatgaaaggcccagagattgaaatctgaaaacaattaatggcaattctatctatagctgaccctaattatttagctcagttggcgagagctgtgtgttaatgagactgatgtggtgggtaaatccctctgcgggccagyaggttttactctgttctggaatatggactttactcttactctcgtgttcttctgaaaatgcctacttcgggatatggggcagaaaaagaagttatttagcacaattctatttggcacaggtgggaaaacaactcccaggtaactcctcatgaaagtgcttgatagttacatttatgaaggacagcacaattattttcatatcaaatacttgattacatctcaagattctctgacttattattgacaacatgtttaaaatttttttcctccttgtgtcagtgaagtctcatcatctgaatacactgatataagaatggatgatacttagtggaaatttaaacaaagataaaggaagaacaacacaatttaatactaatgactgtgacaggccctgcttttatttcacaactggattgggaactactttcatttg

SEQ ID NO: 163591 - DNA, 604 bp, Homo sapiens
actttttttcttattataattagtgattctggaatgaaaggcccagagattgaaatctgaaaacaattaatggcaattctatctatagctgaccctaattatttagctcagttggcgagagctgtgtgttaatgagactgatgtggtgggtaaatccctctgcgggccagtaggttttactctgttctggaatatggactttactcttactctmgtgttcttctgaaaatgcctacttcgggatatggggcagaaaaagaagttatttagcacaattctatttggcacaggtgggaaaacaactcccaggtaactcctcatgaaagtgcttgatagttacatttatgaaggacagcacaattattttcatatcaaatacttgattacatctcaagattctctgacttattattgacaacatgtttaaaatttttttcctccttgtgtcagtgaagtctcatcatctgaatacactgatataagaatggatgatacttagtggaaatttaaacaaagataaaggaagaacaacacaatttaatactaatgactgtgacaggccctgcttttatttcacaactggattgggaactactttcatttg

SEQ ID NO: 163592 - DNA, 604 bp, Homo sapiens
actttttttcttattataattagtgattctggaatgaaaggcccagagattgaaatctgaaaacaattaatggcaattctatctatagctgaccctaattatttagctcagttggcgagagctgtgtgttaatgagactgatgtggtgggtaaatccctctgcgggccagtaggttttactctgttctggaatatggactttactcttactctcgtgttcttctgaaaatgcctacttcgggatatggggcagaaaaagaagttatttagcacaattctatttggcacaggtgggaaaacaactcccaggtaactcctcatgaamgtgcttgatagttacatttatgaaggacagcacaattattttcatatcaaatacttgattacatctcaagattctctgacttattattgacaacatgtttaaaatttttttcctccttgtgtcagtgaagtctcatcatctgaatacactgatataagaatggatgatacttagtggaaatttaaacaaagataaaggaagaacaacacaatttaatactaatgactgtgacaggccctgcttttatttcacaactggattgggaactactttcatttg

SEQ ID NO: 163593 - DNA, 604 bp, Homo sapiens
actttttttcttattataattagtgattctggaatgaaaggcccagagattgaaatctgaaaacaattaatggcaattctatctatagctgaccctaattatttagctcagttggcgagagctgtgtgttaatgagactgatgtggtgggtaaatccctctgcgggccagtaggttttactctgttctggaatatggactttactcttactctcgtgttcttctgaaaatgcctacttcgggatatggggcagaaaaagaagttatttagcacaattctatttggcacaggtgggaaaacaactcccaggtaactcctcatgaaagtgcttgatagttacatttatgaaggacagcacaattattttcatatcaaatacttgattacatctcaagattctctgacttattattgacaacatgtttaaaatttttttcctccttgtgtcagtgaagtctcatcatctgaatacaytgatataagaatggatgatacttagtggaaatttaaacaaagataaaggaagaacaacacaatttaatactaatgactgtgacaggccctgcttttatttcacaactggattgggaactactttcatttg

SEQ ID NO: 163594 - DNA, 584 bp, Homo sapiens
attttcttttttctggactacaatagtatggtaaaggaatttctcttcagcagactcacatggtgaacatttttataataaaaaatctataactattatatataattagactttaatcaaaattgcttaaagcagggcatgtttataacacaattggtttttatgtgaacaatatagagaatttcattaaaatgagactatcatgcayaggcagtgttaggatggtcaaatattaatattcatggtggtataaggcaggctaatttacaatatcaaaatgctggacaaaagccaagtgtctaccaatgagggaatcttcaaattatgatagatcagtaaaattgtattttatattgtcataaaaaataatggtttgaaagaatatttaatgacataaagaagagctcatgataaattcaagcattatataaaattgcattttaagtaattttccaattttgttaaaaattatattagctttatttatttatgtaatgtatttgtcaattcattcaacaaacatttattggatacttactatgtatcatatgctgccaaagctctggggatctagaaaacacaaa

SEQ ID NO: 163595 - DNA, 497 bp, Homo sapiens
ctgcagtaagtgtgagtttgcctccagctgacctcatacgtcacgaaacatgtttttagtacatgctgctttttctttgggagcaaaatataagcacatggtactagcccttccttttaaaaagcttattcaaatggaatatgagaagtttagggagtgcgaaaacaagtgtatttttttcaactatattaataaatatacattgaacatatatcagacaaaagaatacatttaggtttatactctgggaaaagtttttagtttgtttttattataagttgttccactgatactcaagttctttttttaataactatctcaactgatggaaactcaattacttaaaaaatgtttcaggttttattttccttattgtagtgaaacaaataattgggcatgggaatgaccacttacagttaaagaaataattattaaaatggaactaacmgtatttaaacagctaaacaaaaaaggcttaaaggaaaaaaaagccaata

SEQ ID NO: 163596 - DNA, 473 bp, Homo sapiens
ggcatgcttttgggcacctcaactgatagttcaacattagcattatgaaagtcacatatacagttatttagaatctctgtggtgtatggtaatttaatgaaggctttacccaagtgtatgtgtgtgtgtgtgtgtgtctgtgtgtctgtgtgtagcttattagattcaatwtaaaaccctggcatgcttcctccttttcctgataagagttgtgtttccatttttgcctttactgcaagattagaagaaatcttatcaacaattgtaatcctcattgaagtacatggcagggaaaaggaagaggtagatcaagcacaagaaaggaacgagacatataattttatccctgtttcaaatagttaaaaaaaaatatatccaaaagggactattcaaccaggaaagagtgtgacgatgtaaatatgtaagttcaattttcaaatacgtccacccatcctcttccaatatagcattgt

SEQ ID NO: 163597 - DNA, 563 bp, Homo sapiens
  misc_feature (1)...(563): n = A,T,C or G
tactttccttttcttggaatacataattccttccattatgaaaataatatatgacagctaaaactacatttttagctnttctctgttgctaaatttcctttgtcttttaagtaaactttctaaaccagttctccagatctttctggataaccatttgcattttgtaaaggaatcttggctcaaaataagcaaacataaagaaaggcaatcacaataaaggaaatgtactagtactatagatttctgttaattacctggcaaaataatctggctgcctacgcacctccaggatagtgatgttaactcttaagaaaaacaaatcgtggatcaagtgtcagtctactaagccaaatttcaaactactccaaaacwttccacaggaaagggccatatactgcataacacgccttggcaaaagttcccgtagctgttttcactttatcatataaatccacaaaggaatacattaaagacaacacatggttcaaataggtgataaaggggatagctgagcatggaaaatggagagataaaattggtcctaaagcaataaggtatcctgg

SEQ ID NO: 163598 - DNA, 621 bp, Homo sapiens
tggatggaactggagactattatcctaagtgaagtaattcaggaatggaaaaccaaacatcgtatgttctcactcataagtgggagctaagctatgagaatgtaaaggcataagaatgatacaatggactttggggactcgggacaaaggatgacagggagggtgaggaataaaagactacaaattcggttcagtgtatactgctcaggtgatgcatgcaacaaaatctcaaatcactactaaagaacttatgtaaccaaacaccccctgttcccccaaacctatggaaacaacaacaacaacaaaacaaacaaacaacaacaacaacaacaaacagtgactctggaactacattgcctgagctgaaatcctgtcccaggcaccttattaactatgaagtttggtccaggtcacttaagttcattgtaactcagtttcttcatctacataaaggggacaatattgaaacacaatttgtaggamagtcatgatgattaaattagttaatatatattaatcatgtagaacggaccaggcatgtagtgagcactcatacattttacctattagagatcatttaattatttatacattttgttttgtttttgttttataaaccaa

SEQ ID NO: 163599 - DNA, 621 bp, Homo sapiens
tggatggaactggagactattatcctaagtgaagtaattcaggaatggaaaaccaaacatcgtatgttctcactcataagtgggagctaagctatgagaatgtaaaggcataagaatgatacaatggactttggggactcgggacaaaggatgacagggagggtgaggaataaaagactacaaattcggttcagtgtatactgctcaggtgatgcatgcaacaaaatctcaaatcactactaaagaacttatgtaaccaaacaccccctgttcccccaaacctatggaaacaacaacaacaacaaaacaaacaaacaacaacaacaacaacaaacagtgactctggaactacattgcctgagctgaaatcctgtcccaggcaccttattaactatgaagtttggtccaggtcacttaagttcattgtaactcagtttcttcatctacataaaggggacaatattgaaacacaatttgtaggaawgtcatgatgattaaattagttaatatatattaatcatgtagaacggaccaggcatgtagtgagcactcatacattttacctattagagatcatttaattatttatacattttgttttgtttttgttttataaaccaa

SEQ ID NO: 163600 - DNA, 628 bp, Homo sapiens
tattcacattatgttatttgactaagatacatgaaaaataatttctcaggagttcccattgcttgatgacaatgtaacttgattccaattgtcatgtaaaacaatggtttctattttgcttctccaaattttgtcacagccaatccagcagagatgatgtatgacccactacaaattagggaaagcaacagttcgtgtcagctgaatctgaaaatacatttgtcgtttctttggtttccttcattaaagaatacactccgtgggtccaatttgtatkgtgcattattgttcaatctcccagagcaaaacactattatgttgccttttccccccttaactgcattcctttggaaattaacttacttaatgcattttatgcagaattgttttgaattgacaaaaatcagcatgagaagtaagtaaaaatttaatatatttcccaacggtttaaactaatgatatagactcagtaaatgaacaaattaagataaactaatgatatagactcagtaaataaacaaattaagaaagccagtctcaaattggtcacttttagttaaaacttaccaattttgttatctcacccttatggtctagctcctttctagtattatttttctatatgatg

SEQ ID NO: 163601 - DNA, 577 bp, Homo sapiens
cctcattcagaataccgcacattttctgcctcgtctgcacaaagcaaatgattttgacccaccacgccttttagaaagtcttcatgaaacgagaagggggcacctccccaaaatgtccagacccacttattcccatagttggactgggaaccagatcaccagatcacaattttttttaaaaaaaggcctgatcctctgcattttagccaaccaaaccttactaattatctgttcattgtaatggtcrgtattggttgccagagggattttcttttgtaaaaaattgttggtcttgcccttaatagtcatttcccaggcaaaatgtaagtgaaaaggtacatggagtcataaaacatggagttggaaaggatattttaggtcacatttaaggaagcatgtatatatattattttagtagagtcactggcacatagtaagtgctatagaaatttagctattattatcattattaatagtgcttctattcccacttttgtttatgtgtcagaatcaccaggagtgcttatcacaattcagattccctggccccttcctagacttaccaagccagaatttt

SEQ ID NO: 163602 - DNA, 573 bp, Homo sapiens
cctgcgcattgtagacattgaaaaatgcaagtttccttcctgcctagtccctactccttcttcaaggttcactgctggcatcaccccctcaggatgctttccttgcacttctcttaattccatctgtgatgggttaggtactccactcttctctgcatcttagacttyccagtacactgtttgcatcactcatcttgcggagtattgaatggcttgtttttatttctgcatcttcttgaaaactaggaccatctcacatggacctttgtctctccaactcctggcatggtgctgcatgcatgaaaggaactcagtaaatgtcaaactaggggctctgaagtgaagagaatattttcttacctatcttcagaaatgtacaatttagaaaagaagattataaaatatatattcctgaaaaggttttacacacacacacacacacacacacacacacacacacacacacaatttattattacccatccttggtgcttggcccagctgcagcacttattggggttattaacaaagacaaggcctagattttaacctgatatcaacctgaaagctggg

SEQ ID NO: 163603 - DNA, 535 bp, Homo sapiens
aagcttcaaaagaattataactgtatcatctggtgtgtatgttttcgtgtaggtgagtgagtatattactgaggcatcttacatgttgaaaaggcttaagaaaaccagataatctggaccatcatgatacctctccagtgcctggaagctgttgatagatgatgcatgttgttgatgctttgaaatcttatttaaatatttaggtggacagatggcccagggcactgaggacaaggaggagaatgattaacatcctggcgttcattcttacaatcttcgagattcagtcattggattatctgttctctaaaaattcaaattcatttgtactctggcttcttcaagagaaatgcatctgagayccgtcacacactgtgacgaaccctgttatggccaccttcaaagactgcatccttttcgatcttggatgactttcttgccctagacccaagtgaccaaattcattattgatgtgttggcagatgtttgctcatattcttccagattaaatgggatttaaatgtgatcattcagg

SEQ ID NO: 163604 - DNA, 563 bp, Homo sapiens
ggccaccttcaaagactgcatccttttcgatcttggatgactttcttgccctagacccaagtgaccaaattcattattgatgtgttggcagatgtttgctcatattcttccagattaaatgggatttaaatgtgatcattcaggtaggctgctttgartttgaaggagcatgtttctactctgtggtgaagaggggctctgtgcaggcttgagaacaagagaaaaagttaaaagcattttacaacacccttttctttcttgttgatttttctgaagctattaaaaattttttggactgctttgaggaggcccattcctccctcaaatgtcagccctttttctcaattcagaatttctggtattttcttttgggacaaatataattcagaactgtgtctatacaatccagtgaagtggggaattccagataactcaaacaataaatgatgtttccctcaatgatccaaatattttagatgaatgtgttaaaaatatttttgtttgaaactatctagatcaagaacccaattctccacattactttgcataaacatagggtgttt

SEQ ID NO: 163605 - DNA, 540 bp, Homo sapiens
aaaacagcagcatattattcttttagctacttcttaccctctgtctccccttttcatctaaatttggaagaacaatgttgagaaccaggacttgcatttggaracctgctggctaagtctagcctcagatttactgtttgatcagcacagtgttttggatcagattagttaaaaaacaagattggaattgaatgacatcacttagaaattggaagattttatttaagaatccagatttctacttttcttagaattgtgatattcaggctgggtccatattcttaagtagagctgattagctgttgttgatcagcaactgtcctctttaagttagataaatgctctccactctgccacagttcccgccacttcctattatcaccatcatgattcattcttatgcttgacctttggctttctcaacagttggcttccaagatgcactttatcatggtctttactatggccaactagcctgagttaagctggcttctgtctagctctcctaccctatctcctgacacccttctctttgctaac

SEQ ID NO: 163606 - DNA, 551 bp, Homo sapiens
gggatggctgggtcaaatggtatttctagttctagatccctttttaaggagaatgatttatttgtttttttggttctctgttgtyagcctccatatctttcatcttctctttctagttttacattttttttatttttttcctccctgaattctagagcagctcgatttatcttttactccacttctggggttttgtgcagcactaatcatgctctctactgcctccaatgtgaatttcaacgtctttatcctatcatttcctttttcatctcattctattttcttttttaatttttttatcatattctatttcattctatcttattaatttcatattggttcattttaattgctacctgctatttctaaagaattttctgtcatttccctttgtatggtgccagttagccagtttaaagaataatgaggatgaccccctagggcagtgctactcaaaatgtggtctacggacaggtactatctataaactacttgttactggtcaatgataagtatgcttacttctaaactgtatcagtgcacaatggggc

SEQ ID NO: 163607 - DNA, 592 bp, Homo sapiens
gattaatgctccaagaaaaccctgttattctgacacacagtcccagatgctggcttgcatcagtatgcttttgatattaatgtttaatttacagaaacactctaatcttattattcaaaatcagcacttacaatctcacgcgcccacctcttccactatagtccctgggcctagagggattgcttagttttaatttccagccctgtgtctcatgaaagcagttaattttgattgttgccttctcttgcatctgaagacratagttcaattggtgtcaatgctcaaaatttaaaggggtaagtgccttcttcagatccaggagtcaaagcccttaacagcacaagcattagttaacaggatatttatactgcagaaattcctatcactctctctaacatgttacaaattaaaacactataatttggtgtataggagttactgcctgcaccacttccaaccaccgtattaaagtagttagattactcatggcatgtgtctaattgctagcattctgtgatagatctatgaccaaaagcatcaaaaagtgataggtcctatgccaactcaccaaagtaaaacagctaacctttct

SEQ ID NO: 163608 - DNA, 407 bp, Homo sapiens
attttaagaacagaattctttttgtttccaaactccccactggttcccacaaattgtgtgcaagctacttcagaaacatgggcacagatactggccatggaactgaggggtggggagtgagtagctactactgtgctaagagctgacgttgaccataatttactttccaagactagcactggaattttcaagtcttcattgaattccagagttccaaaatagtttacatcagacagattctgcaggtacaatatttttctaggtggagagaatatatttctgatgcttcgttctttactttcttcccagaattttcagattttcactagtgctttaaaaartttttatccttgaaaatacttgatcatagcttgtatctctatgttaattttatagaaagttgtatt

SEQ ID NO: 163609 - DNA, 471 bp, Homo sapiens
aacaatatttcagtgtatttccaggtttccttgtctactccaaaatttacttctgtatgtattatgttgtrctatatcaattagtttactttatgatatatacattgaacttatacagactgagaatcccttatctgaagtgcttggagcctaagtgtcttagatttttgactctttcagattttgaaatatttgcattgtatacttagcatccctaatctgaaaacttgaaatcataaatgctccaataagcatttctctggagtgtcatgttgatactaaaaatgtttttgactttggagcattttgaattttgtatattttaattatggatgcctgtatatagtttttaagtaaacaatcaggtaaagatagtatagttctttaactctatctgttattcttatttttcagaatttcaaagaattgttcttgcttttcttcacattaccttttgaactattgaagtca

SEQ ID NO: 163610 - DNA, 471 bp, Homo sapiens
aacaatatttcagtgtatttccaggtttccttgtctactccaaaatttacttctgtatgtattatgttgtactatatcaattagtttactttatgatatatacattgaacttatacagactgagaatcccttatctgaagtgcttggagcctaagtgtcttagatttttgactctttcagattttgaaatatttgcattgtatacttagcatccctaatctgaaaacttgaaatcataaatgctccaataagcatttctctggagtgtcatgttgatactaaaaawgtttttgactttggagcattttgaattttgtatattttaattatggatgcctgtatatagtttttaagtaaacaatcaggtaaagatagtatagttctttaactctatctgttattcttatttttcagaatttcaaagaattgttcttgcttttcttcacattaccttttgaactattgaagtca

SEQ ID NO: 163611 - DNA, 471 bp, Homo sapiens
aacaatatttcagtgtatttccaggtttccttgtctactccaaaatttacttctgtatgtattatgttgtactatatcaattagtttactttatgatatatacattgaacttatacagactgagaatcccttatctgaagtgcttggagcctaagtgtcttagatttttgactctttcagattttgaaatatttgcattgtatacttagcatccctaatctgaaaacttgaaatcataaatgctccaataagcatttctctggagtgtcatgttgatactaaaaatgtttttgactttggagcattttgaattttgtatattttaattatggatgcctgtatatagtttttaagtaaamaatcaggtaaagatagtatagttctttaactctatctgttattcttatttttcagaatttcaaagaattgttcttgcttttcttcacattaccttttgaactattgaagtca

SEQ ID NO: 163612 - DNA, 471 bp, Homo sapiens
aacaatatttcagtgtatttccaggtttccttgtctactccaaaatttacttctgtatgtattatgttgtactatatcaattagtttactttatgatatatacattgaacttatacagactgagaatcccttatctgaagtgcttggagcctaagtgtcttagatttttgactctttcagattttgaaatatttgcattgtatacttagcatccctaatctgaaaacttgaaatcataaatgctccaataagcatttctctggagtgtcatgttgatactaaaaatgtttttgactttggagcattttgaattttgtatattttaattatggatgcctgtatatagtttttaagtaaacaatcaggtaaagatagtatagytctttaactctatctgttattcttatttttcagaatttcaaagaattgttcttgcttttcttcacattaccttttgaactattgaagtca

SEQ ID NO: 163613 - DNA, 519 bp, Homo sapiens
acaactgcaataggaaattaatacagccttcatcaaatagcagatgaaggaatattttttatttagttttcgaaataaaagttatatataataaaatcacaaatataggtaacattgtgaaatggctatcaaaatcaagctaattagcatgttcatcaccttacatagttagggtygtgtgtgtgtgtgtgtgtgtgtgtttgtgtgtgtgtgtatggtgagaatatttaagatctactctcttaacaaatttcaagtactcaataacttattattaactattgccaccacgctgtacattaggtaactagaacatattcatcttattgaaaagtttttacccattgaccaacacttttcatttcctcttttctcctatccttggtaatcatcctcctatccttggtaatcatcctcctaactctctgtttctatgagcatatatcaaaacactactttgcataacttaaatatgtataatattatgtgtcaattgttcctcaataaatctgggaaaat

SEQ ID NO: 163614 - DNA, 574 bp, Homo sapiens
gctggtttctagggtacaagacaaagtctcttccacttttcctcgtgattttctcaaacagaagtctttcaccatagccaccacagctggaaatttgctcggtcacctttgaagctagcacctctcagagcccaaggctcacagtgtactccctgggtattactggtggttattcagggctcacaggctctttagtcaacaggtgatgaaacttaccaggactgcatccttctcttcaaggcaaaagattcctgtttggctcaggatgtgtctagaaatgttgtctgggacctagggcctggaatggggaactcacaactctgcctcgtgcccagttctactgtggctcagctggtatttaagatgcaagacaatgtcctctttactctcctctgctcaagcagaaagaaggagtactttaatttctgcaagacacactgcttggggttgggagagggatagtgcaagcatgcccttaactgtgccagctggtgtcttccytagttcatgtgccaccctaggtcattagctctaagcccagtttagcactaggagttgcctaggaattacagcc

SEQ ID NO: 163615 - DNA, 574 bp, Homo sapiens
tgagacattaaagaaaagtaaattatagatctatcagaccctttactatgttagctcactgttagtcccaagaaaaaaatacagaaggtgttgaatttcacaacttaaactgggcatgcatcttactaggcccttaatttttcttgaagggtctcttacaggactgatatttttggaaacgtattttgggaaacatgacacatgacaatgtcaatattattccccaaacacaaactacacttaaaataattttgcttttgttcatatcatacccccaaacctgaaatattccttcattctcctgatcttccaattttacctgataaatttttatacattctttaacaccaatattaaatatcaccttttctatcaaatattgtttctttacttccctaggcaaaaataatacttagcacatttcawatatgtctaatatgactcttacttttataaaactcttctcataaaaaaatgacaatgctaagagagaacatttttatctgtgcttatattttcatattaatagagtagatgttatttttaatatgggggctttaccttctttcttttg

SEQ ID NO: 163616 - DNA, 574 bp, Homo sapiens
tgagacattaaagaaaagtaaattatagatctatcagaccctttactatgttagctcactgttagtcccaagaaaaaaatacagaaggtgttgaatttcacaacttaaactgggcatgcatcttactaggcccttaatttttcttgaagggtctcttacaggactgatatttttggaaacgtattttgggaaacatgacacatgacaatgtcaatattattccccaaacacaaactacacttaaaataattttgcttttgttcatatcatacccccaaacctgaaatattccttcattctcctgatcttccaattttacctgataaatttttatacattctttaacaccaatattaaatatcaccttttctatcaaatattgtttctttacttccctaggcaaaaataatacttagcacatttcaaatatgtctaatatgactcttacttttataaaactcttctcataaaaaaatgamaatgctaagagagaacatttttatctgtgcttatattttcatattaatagagtagatgttatttttaatatgggggctttaccttctttcttttg

SEQ ID NO: 163617 - DNA, 615 bp, Homo sapiens
aatgctttctgctctagcttttagatttgttaggtgggactggagcagtgctcagattagggctaattcttcccctccaccaaagaattacccttctgatactcaattttccctgaactaggaagctttccagtattcctaatgggaacaagctttattcccatcctggtaacagcatcagggactrttactctaatcccgttgggtatttctttcttgagctcaggtagtttactcacacagatgtgtaatcaggccttggttgaatacctgaggggggctttctatatatctctgaaattctctctctgtgcagctgtttgctgtactatattctgcttttcgaacttgaattgtcttggaactctcagctccatttcgtcagggacattttcaggctctgcctaagaacctcctccctgtaacatggcccggaaacattctcaatagggtaaacctcagtcaatcctgatactccccagaccattattattattttttcatcttactcagggatcagtgctcttcattgactgatatctttgaaaacaattattttatatattttgtctgttttgcactgtttcaagtgaaagggtatgagcctatattact

SEQ ID NO: 163618 - DNA, 615 bp, Homo sapiens
aatgctttctgctctagcttttagatttgttaggtgggactggagcagtgctcagattagggctaattcttcccctccaccaaagaattacccttctgatactcaattttccctgaactaggaagctttccagtattcctaatgggaacaagctttattcccatcctggtaacagcatcagggactattactctaatcccrttgggtatttctttcttgagctcaggtagtttactcacacagatgtgtaatcaggccttggttgaatacctgaggggggctttctatatatctctgaaattctctctctgtgcagctgtttgctgtactatattctgcttttcgaacttgaattgtcttggaactctcagctccatttcgtcagggacattttcaggctctgcctaagaacctcctccctgtaacatggcccggaaacattctcaatagggtaaacctcagtcaatcctgatactccccagaccattattattattttttcatcttactcagggatcagtgctcttcattgactgatatctttgaaaacaattattttatatattttgtctgttttgcactgtttcaagtgaaagggtatgagcctatattact

SEQ ID NO: 163619 - DNA, 488 bp, Homo sapiens
aactatttattttaaattatgcaaatctattatcactgtaaacagaaggccatacaagtcccaaaaaagggtgacagaaatagcaggtataatttttttggaaatgactaaggtcattagggatgctagagttcaatgctgcatataaattccatagtcagctaaaacacatactagagacttgagagctaataattttaatctaaacttactgaatgatgaaatactctccaaagataaaaaaaaatctcagttatacatgtagagaaaaatgttagctgagaataatattgacaaatagtgatgaagatcctatgagacagaggagatctgcttctagcctcagggagagaaggggaaaagaagcttcactactggaccagatagaagaacrtttacccccagccgtcctctaagattaagcataggctggatgccagttgcctactgcagggaaatcaagtgagcattaagaacccaaaagaaga

SEQ ID NO: 163620 - DNA, 560 bp, Homo sapiens
ctttataatagtagcaatataggtarcaagaccatcatttactggaatgttccttttagcttttcaaaatgtgttacggttgttattccaatttttcattgactcagtggcatattaacatagatggagataagtggtggggctgtaaggatggagttctgtctgaacttatttcatggtatctctcaagtttttcttttaaaaatacactgcttgacttgtgtcttgtttgcataaatgtggaggacacaatgtgtgtccctgcctgtgctggtgagtagagaatttggttttcaggaaaccagatacaatcatcttaatagattatgaagctgtagtaagtgaaggcattgtggcctagggctgagggaaagtaaacagaaaataatttcagcaaagttgttcagagagtgctggtgcaaatattctggacatttagatgacttggaaaaatgggcttcaacactgtcaaagtcaaacctggcactgtgggagggaggtaacactgtagctgagggcatgcgttcaggagttaatctgcccaattcaaattctggctt

SEQ ID NO: 163621 - DNA, 559 bp, Homo sapiens
gttggccccttacaattccctttattactgggtaggcagtatggttattctggccctacaatatcagctgctctttattaattgaaatacaattttaagaatattaaatctgtttggtaactattacatccctctgttagtaaagacagtcaggagctgaaagtataggactacggatggtccctaacttatgatggttcaacttatgatttttcgactttatkatggttcaaaagcaacatgcattcagtagaaagtgtactttggattttgagttttgatcttctcctgggctagcaatatgtggttcaatattctcttgctatgctgggcaggggcaggggcagtggcagtgaactgcagctcccagtcagccaggcgatcactagggtaaacagcctatactccatatcttcccaaaaaacgctatgcctactaaaccatcaataagtgtcaatgcctcattgccttctattcttgagcctcatcagaagacagagaaattgatgaccctatttctgcagcatccccatcaatcagcaattaactttagttcaat

SEQ ID NO: 163622 - DNA, 559 bp, Homo sapiens
gttggccccttacaattccctttattactgggtaggcagtatggttattctggccctacaatatcagctgctctttattaattgaaatacaattttaagaatattaaatctgtttggtaactattacatccctctgttagtaaagacagtcaggagctgaaagtataggactacggatggtccctaacttatgatggttcaacttatgatttttcgactttattatggtkcaaaagcaacatgcattcagtagaaagtgtactttggattttgagttttgatcttctcctgggctagcaatatgtggttcaatattctcttgctatgctgggcaggggcaggggcagtggcagtgaactgcagctcccagtcagccaggcgatcactagggtaaacagcctatactccatatcttcccaaaaaacgctatgcctactaaaccatcaataagtgtcaatgcctcattgccttctattcttgagcctcatcagaagacagagaaattgatgaccctatttctgcagcatccccatcaatcagcaattaactttagttcaat

SEQ ID NO: 163623 - DNA, 559 bp, Homo sapiens
gttggccccttacaattccctttattactgggtaggcagtatggttattctggccctacaatatcagctgctctttattaattgaaatacaattttaagaatattaaatctgtttggtaactattacatccctctgttagtaaagacagtcaggagctgaaagtataggactacggatggtccctaacttatgatggttcaacttatgatttttcgactttattatggttcaaaagcaacatgcattcagtagaaagtgtactttggattttgagttttgatcttctcctgggctagcaatatgtggttcaatattctcttgctatgctgggcaggggcaggggcagtggcagtgaactgcagctcccagtcagccaggcgatcactagggtaaacagcctatactccatatcttcccaaaaaacgctatgcctactaaaccatcaataagtgtcaatgcctcattgccttctattcttgagcctcatcagaagasagagaaattgatgaccctatttctgcagcatccccatcaatcagcaattaactttagttcaat

SEQ ID NO: 163624 - DNA, 553 bp, Homo sapiens
acttatctttaaggtccttccaattattytaccacctaactgtgcataatcatggacaaatacacgagttctgtgctcctcaatggtatcaggatatcaattgtgaaagggtgctttgcaaccctaaggggattcagtgtaataatgataacagctatggtccatttaccgcctaccatggccataactgtgctgaatgctttggtctgtgatttacctgtacacctgtgatttgactgtcacaactacctcgggtggtgtgtagtcttatgcccaggttacatatgagaaaactaaatcctacggaaactgttaagaggcagagccaggacttacaccaaagtcgacctgctgctaaagctctaggctgtcatcccatggtgatctactgctctatcactccgtgtggtaaatatcaatcaatcactccatctgggagggaagctctgtccactcctgtccttcctctccatctgttaacactttgcaatcctgctgatggtccacacatcaaagcctgtcaacttggacaaaatgagattaaaaagcagat

SEQ ID NO: 163625 - DNA, 574 bp, Homo sapiens
gaggggggtagaacaggtattattgtccccatctgagccygaacctagtaaggttcaagagttgtttgtttctggggtaacagttccttttatcttttcctcattatttcatgagctttgccccacctcactcccgtcttaggggttcacgttcctaacatgtgacctgaataagcaaggatattgctggggacattaactcaagccctcagaagagggagccaaggtgagcattggttcaagacagagaagatggcagaactctcccacaggggatggaaaatgctaccctgcaggcttctgggattccactttgcctttcacccattgcaccaagcataccaaagtccaggggtaagccctgggacccctgaggacaactgatgggcacaaccttacctttccccatagcatgtgcctcactgaagcttgttggggtttagggggctcatttaagcagctgaaggctaacatacaacttggagttagtgttgactcccaaggaaagatcagacgtatgctggaaaaggcagtgggcttcaaagtaaagaggataagaaacaatcaacagtct

SEQ ID NO: 163626 - DNA, 574 bp, Homo sapiens
gaggggggtagaacaggtattattgtccccatctgagcccgaacctagtaaggttcaagrgttgtttgtttctggggtaacagttccttttatcttttcctcattatttcatgagctttgccccacctcactcccgtcttaggggttcacgttcctaacatgtgacctgaataagcaaggatattgctggggacattaactcaagccctcagaagagggagccaaggtgagcattggttcaagacagagaagatggcagaactctcccacaggggatggaaaatgctaccctgcaggcttctgggattccactttgcctttcacccattgcaccaagcataccaaagtccaggggtaagccctgggacccctgaggacaactgatgggcacaaccttacctttccccatagcatgtgcctcactgaagcttgttggggtttagggggctcatttaagcagctgaaggctaacatacaacttggagttagtgttgactcccaaggaaagatcagacgtatgctggaaaaggcagtgggcttcaaagtaaagaggataagaaacaatcaacagtct

SEQ ID NO: 163627 - DNA, 523 bp, Homo sapiens
aagcaagttacagagaagaggcagttggagaaagagtctccgctgtcccctctctccatactccacctctgtgatgtgagatggagttcacacctctctgccttctgtgcagaagccrggtacgcacccgagataaccccgcctggcaggatcatagcagagcgagccaaagtgaaacctgcattccctcggtcgagctacctttagaggctgcatggagtgctgcgagggttaagtgacaggtggtggccaatgaatgtgaaatttaaggaaaacaacttcacaaaggcattttgaggtgatttaattaaaacattcagtcacaaagtcaacaacagaagcaacaaaaaattatgaggcgtgggcaccggagaaaagaaatgcatgggacgactggaaagtgcaggagttgatgagagagcacaaggaagaagctgtcaggaagcatgagtgtccctgaacagagggaatgggtgggctgaagaatgggacctgcatatatcctcagagcagcctctgggca

SEQ ID NO: 163628 - DNA, 515 bp, Homo sapiens
aataactgaccctaactaaatggtgacatgtgaactttctgaccaggaatgcaaaaatagtagttttaaagaaacttagcagtttctacattaacatagatgagcaattcagaatttaacagasaaatttaacaaggaggtcagtgagctcaaagacaagctatttgaaattacatggttagaggaaagaaaagtaaaaagaatgaaaagcaaagaagaatatctacaatatatgtaaaattacctcaaaataccaaatctaagaatcattggttttcaagaaggatttgagcaagagcaagggtagaaaatgttttcaaataaataataacaacattttccaaaatgtgagaaagatataaatatccaggtagaggaaggtcagagaacacccagcagatttgacacaaatgagactactccaaggcatataagaaccaaactctcaaaggtcaaggacaaagagagaattctaaaagcagcaagagaaaaataaaaataaaaaacaaataaca

SEQ ID NO: 163629 - DNA, 515 bp, Homo sapiens
aataactgaccctaactaaatggtgacatgtgaactttctgaccaggaatgcaaaaatagtagttttaaagaaacttagcagtttctacattaacatagatgagcaattcagaatttaacagagaaatttaacaaggaggtcagtgagctcaaagacaagctatttgaaattacatggttagaggaaagaaaagtaaaaagaatgaaaagcaaagaagaatatctacaatatatgtaaaattacctcaaaataccaaatctaagaatcattggttttcaagaaggatttgagcaagagcaagggtagaaaatgttttcaaataaataataacaacattttccaaaatgtgagaaagatataaatatccaggtagaggaaggtcagagaacacccagcagrtttgacacaaatgagactactccaaggcatataagaaccaaactctcaaaggtcaaggacaaagagagaattctaaaagcagcaagagaaaaataaaaataaaaaacaaataaca

SEQ ID NO: 163630 - DNA, 438 bp, Homo sapiens
gcttgctggaaggcctgggtcaagtggcgatctagttgcctgctatagctggagctgctgtggctcatggaagccaccaacaatcagctgccaggcaggtagaacgttgaaggcgcagctggagtttccaaggaaggagcccattgcctgtgtcacaagtggycactaggtggggacagagtagcctgagggcacagccagagctggttcatgagggccactaggctgcaatgatgaataaaaaatggcaggctagaacctggaagagaagtgtgttcatgtggtgatcaccttgaagtgtaatgtcagcaccctctgttgataaagccttgtgtgccagctggcaaaggagaaacgtctatagggtctggcttcagtattacaaagctgcataggaaagggtggattcagagctgggagacaataagctgataagtg

SEQ ID NO: 163631 - DNA, 438 bp, Homo sapiens
gcttgctggaaggcctgggtcaagtggcgatctagttgcctgctatagctggagctgctgtggctcatggaagccaccaacaatcagctgccaggcaggtagaacgttgaaggcgcagctggagtttccaaggaaggagcccattgcctgtgtcacaagtggtcactaggtggggacagagtagcctgagggcacagccagagctggttcatgagggccactaggctgcaatgaygaataaaaaatggcaggctagaacctggaagagaagtgtgttcatgtggtgatcaccttgaagtgtaatgtcagcaccctctgttgataaagccttgtgtgccagctggcaaaggagaaacgtctatagggtctggcttcagtattacaaagctgcataggaaagggtggattcagagctgggagacaataagctgataagtg

SEQ ID NO: 163632 - DNA, 479 bp, Homo sapiens
tattgagcaatgtgctacgtattaggaaagggaggttctacagaacagagatgaaagccatgayggaaaaaaatacaattattttatgcatacaccccaccaagttcagactgctcaataaactggttacatacagattcacacatcctctgcccaccagatgcttgggaacttggccaggattactctcaggctgcatgctgattaccatgacaacataggtaaaacacagtcctgtagcttccccagtttatagacttggagccaggggtagttctaaatggtctaaccgtgaatgttctgtgattaaatctgatgtttgacaatgagccctggggaccataaatcactgaagtctgagagtgctccaagggcaataacagaactccctcagtgaaagagctgctttgcaggcagcttagagggaagaacccttttcatgtcttgccttcacatctagatcagcaccagaagctgca

SEQ ID NO: 163633 - DNA, 592 bp, Homo sapiens
tatattttgcatttagttgtcatgcctctttagtgtctttaatttgaaacagttccactgctttttgactttctcaaccctgacattgtttcagagtactggctagttattttgtagaaagtcgcagtacttgggtttgtytgctatttccttttttcttttaaatggagcaatgacattcccttgggtagggttgttgagagtccagattggctagaggcaaagaaagggaaattgggaaagtcttcctggaagaagtgaggtaaggcagaaaacaagtgggaattagctagggacaaggggtggcattctaggtagaggaaacctggaatgtgcatttgttacagggagaagtacaaactggaaagaggtgagaggagaggcctctagtcatctgtgtgcacatgccctccttaaggggagaatcctgggttcagacctcagaacaaacagtggggcctagtaaatgctgttaatattgaaatccaaagtcagaggtgcttgtcttttgttttttgtcattgtgaaaatgtactctgtttatttaaccaatcctctaaaattggacatttggtccttttcatatttttaa

SEQ ID NO: 163634 - DNA, 534 bp, Homo sapiens
caccacagcgttccagggcctctaccacctcctgagagtctctgctcctcctgagtgctcccaggttcctctccgttcctcagagggcccccacccctctcttttctttacccagagcccccacccactggtcatggcgtctcacccctgggccttcctctgggtccataattgctcaacagccctgcgccrtacctcctgcccatgagtcccttcactcctctatccggcagggagcctctccccacctgctctccaggctcctgcctggaaggggctaactgggttctagctgctccctgggccaggcccatttatttcattttttatttaacagttataatatacttaatatataccagatatgttctaaattcttttcaaaaattctcccatttgattctaatgagcctgctaacctaatgtgtgctgaggcacagagaggttaaataacctgcctgagacaacacagctggtcagtagtggaccgggatttaaaccccacaatgctgctccagatttcacatcttaacc

SEQ ID NO: 163635 - DNA, 439 bp, Homo sapiens
gccgacggtgccgcatggcttcttttgtccacttacaataaagtgagagaagagagaatgactcaaagatggaatttataatttcaaagaaagcagaacagaaagatttggaaaactctcagcctggccatttaaagaataaaaaagcagccgtgcgcggtggcttatgcctgtaatcccaacactttgggaggctgaggcaggcagatcacgaggtcaggagatcgagaccatcctggctaacaccatgaaaccccatccctactaaaaaaaaatacaaaaaattagctggacgtggtggcacacacctgtaatcccagctactcaagaggctgatgcaggagaatcgcttgaacctgggaggcggargttgcagtgagcggagattacgccattgcactccagcctgggcgacaatgtgagcctctgtctcaaaaga

SEQ ID NO: 163636 - DNA, 379 bp, Homo sapiens
tgaggatggctgatatttaatataatgttaggcggtgccggcccctcatattaaataacattgaaacacgtggtaagaaaatacatcttctttaatgtctgtttcaatccttaagattaggtgggaaaaaaatatcactggatgctaatgtttttagcatctctctaatacttgcttccctcctgcttctaataaagagagcaagccccggcttcagaactgtctaggacaactgtttctactagaatttaatgwtctgtaatttccctttatgtatgcctagtaatgatggttttgcatctctggtggccatatgaagttactcttttaaccccatacgtgtaaatgttaattgaatccacttatagataaattagga

SEQ ID NO: 163637 - DNA, 574 bp, Homo sapiens
ttgccatatgccaccctggtgccatagctcacacctagctcatgtccctgccctggctgcaggagcaaacacccagcttgtgactaagtcccagcagcaactctgtgcttgcattccagtagcagtcctggaagtattccctttctagcagtggcagctgtagcctgtgccatgcttgcttcttagccctggccatggcagtattcccagctggcttcccagtcccagcagtgacagcctgacttccataacatttcagtcccagtgccactgggcccaggacagcattcagtctgtgaggtttgaaagtgtcaccttgctgtagctacttagctcacagaaagggtataggacccagcatgagctccgtctcagagcagttctcccccatcatcttccagcagcttcccatgttagtttcagggtttgcgagggtcaaggagttctcctgtggcatggattgcacaatcccacagtgggactgtgggctactggaagtccmttactcatccttgccctgcattgagaggaagttattcccagcccccagccaatcctgtcccagcagattgcc

SEQ ID NO: 163638 - DNA, 394 bp, Homo sapiens
tttatgatcactggtagccaggcagcagttataacatggtggttgtttcatgcacatactcaaagctggttattattcatggaagcatgactgaaaaactctcattgtcaacaaactttaagagagccattcaaagaagtattatgagtcttaattgtttgaaaatcttttgttgacaacttctccataaagtcaagaaagagttgtcatcaaaacttgcagatacttgtagaaagagtatcagcaacttgaaagtaaatcctagagacatgagtaaagcactctttcaagaattgttgcatcaccaatattaytgagggcacagaaaactatactgtgtggaaagacatagacatgaagagctctgactcaaaaagtgatattaaaaaatgaa

SEQ ID NO: 163639 - DNA, 190 bp, Homo sapiens
aatcccctttctttatcccactccccaaatattcctgcttctaagtttcagtcttggatgtcaacctgagctgtagttccttagtggaaagaaaakatgttctcccctcacactgctatgtgctgtgtctgcagcacaacaaaaccacccaaggccctcagtgggggtggtcctgggatatttaagccgt

SEQ ID NO: 163640 - DNA, 514 bp, Homo sapiens
ttcaatagcaattagatgcaagagtccgtcataagctgttcagatgtcgatccctaacatagacccattcattcagtaaygccaggggctgtgctaaatattgggaatgtaaagtgcaacaagcaaatacagctgacctttgaacaatgcaggggttagggccactgatccgctatactgtcaaaaatccacagataatttttgactccctaaaaacttaactactaatagcctactattgactggaaggcttactggtaacataaataatcaattaacagtattttgtgtgttacatgtattacatactgtattctttttttttttttttgagacagagtttcactcttgttgtgcaggctggagtgcaatggcacaatctcagctccctgcaatctctgcctcctgggttcaagcaattctcctgcctcagcctcccgagtagctgggattacaagcatgcaccatcacacccagctaatttttgtatttttagtagagacaaggttttacc

SEQ ID NO: 163641 - DNA, 607 bp, Homo sapiens
gtgtatttagactcagcttcatcagtcacaaaatactttgtgatctataagatcctttttgattcaaaagctatttgattctataagcaaataaaattacattgaaaataatgttataaatatttgttagtggaatctgctataggagaaagaagtagataaaccccagaaaatgtggcactcagtcattcatctttttttctgaaacaaagggaaccggaagaattctaacttcagataatatgattacaggctagttctaagctgtaaatttgccagttactacaggccttatttagtaccttagagatgtcacktacaccttttatcttacactgtaagaataaaatcacaaaggatatctattcacatcaatgttctactcaaaagaggaaaaaaaattcggctcacaggtgactgtcatgcaagagtactcagaggttcgaaaagaacaaataagaaagcactttgggctcttcaggaaaaaaaaaaaagtactgctatttaataaactcaaggatcttttcccattgagataatgtataaaatgtgttcacggacaaaacatggtattcatttttaacatacttatgttttatacacattt

SEQ ID NO: 163642 - DNA, 445 bp, Homo sapiens
aggataacatgatggttacctagcttccaggtgatggggttgggcaactgaagttgaaacatcaactctgctcctttatttttcactccattaaaagtccaaaattcagtctaatttcatttgtctgtgagcactttatgccatgatacactgcatttttatagggctttatgtgtttcaatgcattcttatatacattactttaccttttcttcagcatgagcaggcaagaattaccaagttggctggacagatgcagaaaytcaggcatagtaaagttaaacaatttataaagcaaattagtgaaagagcttggcctatgttcagccatcctgctcttgtcactagatcatattacatttgctggttggtataatttgccctagactgcattttctatacagaagaggaattgtatttacttaatgtaatgaaaacattgcac

SEQ ID NO: 163643 - DNA, 504 bp, Homo sapiens
ttgccaagtggaagagtgctcttttcctcagctctttaccmgtggaggtgtatgatcactctttaatttttgtcattctaatgggagaaatcatctctctcattgctagtttaatgagtcttttcatgaccactagtaaagtttaatccttttatatgtttattttccacttggatttccttttctgtaaaacatctatttatatcttttgtccatttaacaagatcttcctttctattctgcccccttttaggtggttattgcataagtttagtctatcatatatgtgttgcacttatttttcctaataaatcatttgtgtcttgattttgtatttgctatcaacaattgtttaaatgtttgatttgtatatagtcaagcatgcctatctttttctttgtggcttctgggtttcttcttttgctttcagaatgttcactattacaatgaaactgcaacaaacattctagactacacctccaattgtttccttggactgaattc

SEQ ID NO: 163644 - DNA, 576 bp, Homo sapiens
ccccttttaggtggttattgcataagtttagtctatcatatatgtgttgcacttatttttcctaataaatcatttgtgtcttgattttgtatttgctatcaacaattgtttaaatgtttgatttgtatatagtcaagcatgcctatctttttctttgtggcttctgggtttcttcttttgctttcagaatgttcactattacaatgaaactgcaacaaacattctagactacacctccaattgtttccttggactgaattcctaaaagttawattagcaaattaatgagctagaacatttttaagattcttaatgatgttgccaaatttttctcgagataaactgtggttgtggccttttaaatccatctagcagagtgtattagtccaatctcacactgctgtaaagatactacccgagactgggtaatttataaaggagagaggtttaattgactcacagttccccatggctgtggaggcctcaggaaagttacaattgtggcagaaggcgaaggggaaagcaagacaccttcttcacacgctggcaggagaaagaagagtacgtggaggaatt

SEQ ID NO: 163645 - DNA, 529 bp, Homo sapiens
aattctagaaaggcagcagttttgaacctttgtacttctctttaaaaaagctaattaggaaattaaatccaaaaggactgaatccttaaaatgttggctttgtaatgctgatgggaacaattcaactcacctgctattttggtgccatctcctgattagtcattggaatgagatattcaaagaaattaaaaaagattaaaaaaataatttagaagctccaccacctttgttaatattagaaactttattgcttggaaaattaaatctgaacagagaagtattttagattttcttatcactcctggctaaacattttcytaatttattatgcgcttgatcagttggtaaactattgggataattcctagtcgtggtgtcagctggggcttgggagcctgaccattatctctgtgggtgccctggtgccctgtgggctcaaaccacaaacagctggagtccactgagaagaaaagtactaaagctttttctacctccaaaggtgtttcctgcttaccaggacttgtaaggc

SEQ ID NO: 163646 - DNA, 301 bp, Homo sapiens
atgcccaaaggcctaatttttggctcggttttctttttgtgctgctgtatttttgtaagttaagaaaccaaatcagcaacgtgtcctttgtattttatagtaaaatygccaaactcagaaaagggaagataaaattccaaaatgcttaggtgacacaagccgcaatcctcttataaaatttctgtgactttcttaaactcacagtctgctgctgtttctaaagctcccctagcaaagtaaagggtttgaaagaggaatccatgggggtgctcttttctggattgaggaggcactgccatta

SEQ ID NO: 163647 - DNA, 569 bp, Homo sapiens
  misc_feature (1)...(569): n = A,T,C or G
atttttcttttagaaaatacaaaattctatatatttgttagaagttgacattatgaggaaaaaattctgacaaaactttagttattggttttattgtggaaaaaatagcctgaacaattttcctgctgaaaacaactaaaagtttggctaaaaacattntaagttatttaaatacattgctaagctagacagaaattaaggaatctgcagaggtcaaaagagaaactaaagcaggaccctgtgaggtgagtaagcatggaaacagwctccactctcagggtgttgccaacacaccctgctctttatggtggttgcgcagggagaaggggacacaatgaagcaaaggcctggccctttattgttggggcgaatgagaaacacgctgtgttggatagaaggggaaagctaggaaaagtgtctaggaccgctgtggcactgagcagacagaggggaaaactcccctgaggatgtgccaggcctcatggggtcagagttctcattatctggtgcagttagtccaagaaacttcaagctagcagtggccccaggcaaccggcagaagcaagtgc

SEQ ID NO: 163648 - DNA, 625 bp, Homo sapiens
ctgattgtcttcctcctttcttagactataaactcatcatgtttatacatgggaggctagcacatggatggctatggaaaagatatgaaaataattaggtgcatgttgtgaatctgttggctgagctctccagagctctttcccactcttctccaatcttcctgctgaaagtaatcaaagtagcaggatcttttgaactgcccagagcataatccaaagcttcagtgggttctggcagtgaagagatgctctttccaggctgttaattttattcttgggccttttggaaatgtyacatcatggccatgtgtttgcccaaacttctcttcaggtatggttgtggcagatttgacaagtggagatagaatagttttgataaaaagagtggtcatggaatcaaagagcagaattaaactgtggttcactacttactggtatgattgtaggcagctggtaccttagttgccttataaaaacagtaactacttgtaggtttgttggattaaagaagataatacatacaaaatacttagaaaagtgcctgcctggcctgaggtaagctctaggtgataattagcatttcttattactgccattatttatcccaggaaacagagttgcaaat

SEQ ID NO: 163649 - DNA, 625 bp, Homo sapiens
ctgattgtcttcctcctttcttagactataaactcatcatgtttatacatgggaggctagcacatggatggctatggaaaagatatgaaaataattaggtgcatgttgtgaatctgttggctgagctctccagagctctttcccactcttctccaatcttcctgctgaaagtaatcaaagtagcaggatcttttgaactgcccagagcataatccaaagcttcagtgggttctggcagtgaagagatgctctttccaggctgttaattttattcttgggccttttggaaatgttacatcatggccaygtgtttgcccaaacttctcttcaggtatggttgtggcagatttgacaagtggagatagaatagttttgataaaaagagtggtcatggaatcaaagagcagaattaaactgtggttcactacttactggtatgattgtaggcagctggtaccttagttgccttataaaaacagtaactacttgtaggtttgttggattaaagaagataatacatacaaaatacttagaaaagtgcctgcctggcctgaggtaagctctaggtgataattagcatttcttattactgccattatttatcccaggaaacagagttgcaaat

SEQ ID NO: 163650 - DNA, 544 bp, Homo sapiens
catactaaattcagttgattgataagcttgtttgtggattgattttttttttttttttttttttttgacagagtctcattctgttttccaggctggagtgcagtggcacaatctcagttcacacaacytccgtcttctcatgtctcagcctcctgagtaacttggattacaggcatgcaccaccacccctggctaattattatattattagtagagacggggttttctatgttggccaaggctggtctcgcacttctgacctcaagtgatctgcccgcctcagcctcccaaactgcaatgaggattacaggtgtgagccacagcactaagacagattgaaatttttcttaggaaagaaatccatccataaaaagttaatgaaggtgaccaggcaccgtggcctgtagtcccagagcttgggaggccaaagcaggaagattgtttgagggcaggagtttgagaccagcatggacaaaacagtgagacgcttgactctacaaaatagcaataaaaaaaattagctgggcctggtggcatgcctgtt

SEQ ID NO: 163651 - DNA, 544 bp, Homo sapiens
catactaaattcagttgattgataagcttgtttgtggattgattttttttttttttttttttttttgacagagtctcattctgttttccaggctggagtgcagtggcacaatctcagttcacacaacctycgtcttctcatgtctcagcctcctgagtaacttggattacaggcatgcaccaccacccctggctaattattatattattagtagagacggggttttctatgttggccaaggctggtctcgcacttctgacctcaagtgatctgcccgcctcagcctcccaaactgcaatgaggattacaggtgtgagccacagcactaagacagattgaaatttttcttaggaaagaaatccatccataaaaagttaatgaaggtgaccaggcaccgtggcctgtagtcccagagcttgggaggccaaagcaggaagattgtttgagggcaggagtttgagaccagcatggacaaaacagtgagacgcttgactctacaaaatagcaataaaaaaaattagctgggcctggtggcatgcctgtt

SEQ ID NO: 163652 - DNA, 408 bp, Homo sapiens
gcctggtcttcttttcatttgatttttacaatccaagaagtgttcagaggaagcgttatatttctctttaaaacacactgagcataaatttaattggtaataaaatgcatcaaccgtcttctctaagcaaaaagtgaatagmagtagtgttattccgatggtttctcattgagcttttccttcttcacaacttttattggatattgactgaagaaaagaaaattaaaaaaaatataatcacaatgctcaacacctcagaactgaagggttttgttaatccctaagacattataacaccaaatggaaatggtgaacacaaaatatatgtgttctctttgcttgttcaacttcttagggcattacactctggagttagtaaaatgtatctctaggtagtatctgggtagt

SEQ ID NO: 163653 - DNA, 534 bp, Homo sapiens
tatattccaggaacttgacctccatactataaagagtttcaattcctctgtaagcaaaaatataattttttgaaccgaatagggccatgattagattagtgcttcagtagaaagatggttgcattgatatgaagcaaggtagaagacttatatccctgttagaaagatattgcccaagttcaaggaaagtttattaacttattcttttattttttgttctttccttcattcataattcatgagtatataatcaccttagcagggtgttagaccttggggctgttaagataaaaatcaatatctatttaaaattatacatttgttcaacaaatataaattgagagcctactttgtgctagatgaatgaatcagagcagaatttacttcagtcattgaccttaagttctgagtctgaatagtgcatagcatttggtgattacagaccaatgtgttagagatatgaatagaacactaaagtccttcactatgtgacatttcrcagaagagattatacagaccctctaaatgatcctt

SEQ ID NO: 163654 - DNA, 295 bp, Homo sapiens
ctgacacagcagagggacctgaaagatacataatggagcattagacagtatcaagatcagctgattaaccacttatctttcttgcttcctctctctcttcctccttctctccctctcttcttttcacaaatatgcatagagtgcttaccacatgaaaacagatggtaagtaggacacaattcctgaccaagataaactcacagtctataggaggaaatgtgtatgtaaacattatwaaaaggcaaacacttatttcaagggggtacattcaggagcacataggagagattaaatt

SEQ ID NO: 163655 - DNA, 580 bp, Homo sapiens
taatcttttaaaaatgaattgtttgtgtaactcaaaatgtcattgttggaagtagtgaggaagagaaatgacttttatacctttttttttttttttttgagacagtcttgctctgtcgcctaggctggagtgcagtggtgtgatctcggctcactgcaaaagctccatctccctggttcacgccatcctcctgcctcaacctcccgagtagctggaactacaggcgcccgccaccacgcctggctaattttttgtatttttagtagagacggggtttcaccgtgttagccaggatggtctcgatctgctgaccttgtgaaccgcctgcctcggcgtcccaaagtgctrggattacaggcgtgagccaccgcgcccggccgacttttatacttttataatgtttactcattgcctagtactcggcgtatatttaaagtagtgctttaattacattatagccatcttaaaattaaatagattaaaatacgctattaataataatttagacccccccccccaagttaatttaatcccctttaattctcacagaaacttcatgaaatagggactcctttttttt

SEQ ID NO: 163656 - DNA, 580 bp, Homo sapiens
taatcttttaaaaatgaattgtttgtgtaactcaaaatgtcattgttggaagtagtgaggaagagaaatgacttttatacctttttttttttttttttgagacagtcttgctctgtcgcctaggctggagtgcagtggtgtgatctcggctcactgcaaaagctccatctccctggttcacgccatcctcctgcctcaacctcccgagtagctggaactacaggcgcccgccaccacgcctggctaattttttgtatttttagtagagacggggtttcaccgtgttagccaggatggtctcgatctgctgaccttgtgaaccgcctgcctcggcgtcccaaagtgctgggattacaggcgtgagccaccgcgcccggccgacttttatacttttataatgtttactcattgcctagtactcggcgtatatttaaagtagtgctttaattacattatagccatcttaaaattaaatagattaaaatacgctattaataataatttagacccccccccccaarttaatttaatcccctttaattctcacagaaacttcatgaaatagggactcctttttttt

SEQ ID NO: 163657 - DNA, 646 bp, Homo sapiens
acatttaggttgattctgtatcttggctattgggaataatgctgcaacgaacatgagcagttatctctttcacatactgattttatttcctttagatatatactcagcagcgggattgctggatcacayggtagttcaatttttaatttttcaaaaaatctttataatgttttccataaagattgtactaatttacttttctaccagtagtgtacagggttcttttttcttcacattctctccaaaacttgcagaatagccattctgacaggtatgaggtgatatcacattatgattttaattttcacttctctggtgattagtgatgttgagcatttttttaatatacctgttggccatttatgtgtcttcttttgagaaatgcctattcaggtccttttcccatttttcaattgattatttattttcttactattgagttgtttgagcttcttatatattttggattgagtgacactcctttgctgatattccatatattttaaataatgctattttatcataaagtatgagcacaaccacaaggcatttctcaaaagacaaacaaatattctgtgtttcaactgagccaggctaattagtaggaaatgtaattattgctcatcaggactggctataggaaaat

SEQ ID NO: 163658 - DNA, 646 bp, Homo sapiens
acatttaggttgattctgtatcttggctattgggaataatgctgcaacgaacatgagcagttatctctttcacatactgattttatttcctttagatatatactcagcagcgggattgctggatcacatggtagttcaatttttaatttttcaaaaaatctttataatgttttccataaagattgtactaatttacttttctaccagtagtgtacagggttcttttttcttcacattctctccaaaacttgcagaatagccattctgacaggtatgaggtgatatcacattatgattttaattttcacttctctggtgattagtgatgttgagcatttttttaatatacctgttggccatttatgtgtcttcttttgagaaatgcctattcaggtccttttcccatttttyaattgattatttattttcttactattgagttgtttgagcttcttatatattttggattgagtgacactcctttgctgatattccatatattttaaataatgctattttatcataaagtatgagcacaaccacaaggcatttctcaaaagacaaacaaatattctgtgtttcaactgagccaggctaattagtaggaaatgtaattattgctcatcaggactggctataggaaaat

SEQ ID NO: 163659 - DNA, 574 bp, Homo sapiens
aaatagtaaaatatgtcattgaactgcatttgggttttcagaaatagatcacacacctgacaaacacacaagacataatgttcagcattctaattcatgtttggcttggcatatctcatttggggcagaacaagatgccctaccacaaatggaagtatctcattactcaggaaataaracatgtctgcaccaaagacttgacaaatcccattaactgtataagaagaaggatgattttttttttcccttaaggaaaggcagaaaggtcagggatctgtggtagaaaatatgtgtgtagatacattaatgcttgtgtcattttaaaaatatatgtgtaaaattataccagaatgcatgactctcttacagaagtacttctccttcaaaaatatggtgtcatgctctattcacagctggggtcagcaagaatgagaccagcgagtgttttctaggaattaaataagaccattcagttttttgaaggctcattaacagatccacaatctactatgtatctttctgttggtatctattatttcagttcctgcatagcagttatgaggctaacagtgtg

SEQ ID NO: 163660 - DNA, 574 bp, Homo sapiens
aaatagtaaaatatgtcattgaactgcatttgggttttcagaaatagatcacacacctgacaaacacacaagacataatgttcagcattctaattcatgtttggcttggcatatctcatttggggcagaacaagatgccctaccacaaatggaagtatctcattactcaggaaataagacatgtctgcaccaaagacttgacaaatcccattaactgtataagaagaaggatgatttttttttycccttaaggaaaggcagaaaggtcagggatctgtggtagaaaatatgtgtgtagatacattaatgcttgtgtcattttaaaaatatatgtgtaaaattataccagaatgcatgactctcttacagaagtacttctccttcaaaaatatggtgtcatgctctattcacagctggggtcagcaagaatgagaccagcgagtgttttctaggaattaaataagaccattcagttttttgaaggctcattaacagatccacaatctactatgtatctttctgttggtatctattatttcagttcctgcatagcagttatgaggctaacagtgtg

SEQ ID NO: 163661 - DNA, 574 bp, Homo sapiens
aaatagtaaaatatgtcattgaactgcatttgggttttcagaaatagatcacacacctgacaaacacacaagacataatgttcagcattctaattcatgtttggcttggcatatctcatttggggcagaacaagatgccctaccacaaatggaagtatctcattactcaggaaataagacatgtctgcaccaaagacttgacaaatcccattaactgtataagaagaaggatgattttttttttcccttaaggaaaggcagaaaggtcagggatctgtggtagaaaatatgtgtgtagatacattaatgcttgtgtcattttaaaaatatatgtgtaaaattataccagaatgcatgactctcttacagaagtacttctccttcaaaaatatggtgtcatgctctattcacagctggggtcagcaagaatgagaccagcgagtgttttctaggaattaaataagaccattcagttttttgaaggctcattaacagatccacaawctactatgtatctttctgttggtatctattatttcagttcctgcatagcagttatgaggctaacagtgtg

SEQ ID NO: 163662 - DNA, 582 bp, Homo sapiens
tttagtatatttcctgatttgggtgaatactttatggattaagatcagtttttgcacttcaaatggagagtctttctgtgcttcaygcagaagtctgagtatacaattctgtgatcatatcttccataatcagcaatcattattctatccttttctgagttttaaccctatattgaatatatacgaagagctaggttttgttcctttttagttaaccaagcctccctgctacatgaatgtttgtacatttttatttttaaatttagttacgtttctaataagcctacacacctgtggacgtgtgtcttttcatgttgattggaatgtggtcagtcctttcaatctccatgaaaggatatgtcatctctggaaagatgtctttagtttatgtatctgcttattgcttctgtttcagctattcttatttcttcttctggatgatgtactcactgttatgttagaccgccactcacttttttttctattttctttttttagatttatcttttttttttaaagtttatgtgggtgcatagtaggattatatatttacagagaacatgagatactgtgatacaggca

SEQ ID NO: 163663 - DNA, 547 bp, Homo sapiens
attggaaaatgttatcaaataatgttagcaatctcaacaaaatctaaataactgaaaatctgactaccttatcattctatcactcaactcttatgggaatacttaaatgtatacacgagcagagcatgaatacattagatcaggatttcaaggtctgttggccattccacctaaaatttatagaatctagagataaataagttcactattatcaatcagaaagaatatttaaagacttaggatgcaggtgaataaatcytaaatggccatcattttaaagcagacatctaataagcatccatgttataaacaattgttttgactttttagctagaaatatttatagatttataagacattgcaaagatagtacagagagagcctatgtacccttcatgaggtttctacaaattttacattttatatgattatatcaaaaccagggaactgacattggcgcaatatgtatatatagttctacgttactttatcaggtatagattcttgtaaccaccactgcaatcaggacacaaaaggattgtaaata

SEQ ID NO: 163664 - DNA, 522 bp, Homo sapiens
gtaactgcacactaaatttcacatttgtattgttccacctcttcagaatgactgtcataaaatctcrcttgaaacacagatggcttggtgtagcacccaaattcttccaaagacaatccaaccgtgagtcaaatgtgatttctaaacagaaaaagcaaacatttgggctaagaattatatatacattcagctgaaattctacttaagtttaacagttgaagatgttaacaatgaatcacctttccataaatccttccccaccttccatttgggcttagcaatactctgtggctgttgtctgggctcagaataggatgactgagttgcagggagagaggggtggtttgcaggctgcctggaagtctgatggcacttagactgcctccatacctctgtatttctgctgtatttctactgtatccctaaactattcagttattgctgactatctttccttattggatttcctagttctttgcattatgtgatcacagaagataatgaaataacagcattgatata

SEQ ID NO: 163665 - DNA, 522 bp, Homo sapiens
gtaactgcacactaaatttcacatttgtattgttccacctcttcagaatgactgtcataaaatctcgcttgaaacacagatggcttggtgtagcacccaaattcttccaaagacaatccaaccgtgagtcaaatgtgatttctaaacagaaaaagcaaacatttgggctaagaattatatatacattcagctgaaattctacttaagtttaacagttgaagatgttaacaatgaatcacctttccataaatccttccccaccttccatttgggcttagcaatactctgtggctgttgtctgggctcagaataggatgactgagttgcagggagagaggggtggtttgcaggctgcctggaagtctgatggcacttagactgcctccatacctctgtatttctgctgkatttctactgtatccctaaactattcagttattgctgactatctttccttattggatttcctagttctttgcattatgtgatcacagaagataatgaaataacagcattgatata

SEQ ID NO: 163666 - DNA, 539 bp, Homo sapiens
ctcaggtgagcaatcccagtacctaattttaacttcatatcttgaaagagacattgaggagaacaggaaagacagtcctgaagcatcaaaaccacccctccaacaccacaggtagtgagccatgcagcaaagagtctgtgcatttgagggagggagaatacagcaaatgggggactttacattaaactsagtgctgccctgccacagtggagagcaaagctatactgggctcagccaatgcccacacacagagggagcatttggaccagacctagccagagaagaatcatccatctcatcagttgatacccaagtttcctggcaagccttgccatcacaggccaaagtgctctggggacctaggtaaactctgaaaggcagtcaagggcacagggactgcaactcatatgcaactcctagtgctggactgggctcagagccagaggactagggtggcatggcatgagacctagggagacaccagccggggcagctaaaggaatgcttgtgccatccctcccccagccataagtaaggca

SEQ ID NO: 163667 - DNA, 488 bp, Homo sapiens
aaagaactaaactgaagaaatcacattacctgacttcaaattatactacagagctatagtaaccaaaacagcatggtactggcataaaaacagacacataggccaatggaacataatagaaaatctacaagcaaatctaygtacctacagtgaactcatttttcacaaaggtgccaaagccacacattgaagaatggacaatctcttcaataaatggtactgggaaaactagatatccatatacagaagaatgagacttgacccctgtctctcaccatatacaaaaaacatatcaaaatggattaaagacttaaatctaagacctcaaactatgaaactactaaaagaaaacattggagaaacacaggcaaccaaagcaaaaacggacagatgggatctcatcaagttaaaaagcttctgcacagtgagggaaaacaatgaacaaagtgaagaatcaacccacagaatgagagaaaatatttgcaaac

SEQ ID NO: 163668 - DNA, 488 bp, Homo sapiens
aaagaactaaactgaagaaatcacattacctgacttcaaattatactacagagctatagtaaccaaaacagcatggtactggcataaaaacagacacataggccaatggaacataatagaaaatctacaagcaaatctacgtacctacagtgaactcatttttcacaaaggtgccaaagccacacattgaagaatggacaatctcttcaataaatggtactgggaaaactagatatccatayacagaagaatgagacttgacccctgtctctcaccatatacaaaaaacatatcaaaatggattaaagacttaaatctaagacctcaaactatgaaactactaaaagaaaacattggagaaacacaggcaaccaaagcaaaaacggacagatgggatctcatcaagttaaaaagcttctgcacagtgagggaaaacaatgaacaaagtgaagaatcaacccacagaatgagagaaaatatttgcaaac

SEQ ID NO: 163669 - DNA, 668 bp, Homo sapiens
gatgtaagaattgcctgaaactggttgaggtttcagctagctgttgaatctctacagtgtctttacccactgcagaaatgtctggaatgtggcaggtactaaagaaatattggttgaataaatgaacagacccatgctggtcacagtcattttaggtaattgacaatagaattaaagcttgaaatatccaagcaatttaggagagtgttttgtccgttaatatgtrtctttcttcttctacatctttcaaagtaatggaaatagttctggctcagatttatgaaataataacattcttttctgtagacctataggttacttttcaggaaggtttttgggaatgggatagaagaaagattatgactgggaaaaggcagtcttttacaatgacctgctattctagaggtttatctatcaattcataggccagaatcacaggagaccatgtcctgcactgtcttttccagatcaaagcgttaaatctacaaccatataaaccccataactttgcctctttctgccttttttttccttctatgcttttcttccagacatgtctccaacctccagtactttaagtggcatctttaagctaaaaacacaaaactatctagaaatgttgatatttcaagaatggcttcccctgtaggaattatatttttaacaca

SEQ ID NO: 163670 - DNA, 668 bp, Homo sapiens
gatgtaagaattgcctgaaactggttgaggtttcagctagctgttgaatctctacagtgtctttacccactgcagaaatgtctggaatgtggcaggtactaaagaaatattggttgaataaatgaacagacccatgctggtcacagtcattttaggtaattgacaatagaattaaagcttgaaatatccaagcaatttaggagagtgttttgtccgttaatatgtgtctttcttcttctacatctttcaaagtaatggaaatagttctggctcagatttatgaaataataacattcttttctgtagacctataggttacttttcaggaaggtttttgggaatgggatagaagaaagattatgactgggaaaaggcagtcttttacaatgacctgctattctagaggtttatctatcaattcataggccagaatcacaggagaccatgtcctgcactgtcttttccagatcaaagcgttaaatctacaaccatataaaccccataactttgcctctttctgccttttttttccttctatgcttttcttccagacatgtctccawcctccagtactttaagtggcatctttaagctaaaaacacaaaactatctagaaatgttgatatttcaagaatggcttcccctgtaggaattatatttttaacaca

SEQ ID NO: 163671 - DNA, 607 bp, Homo sapiens
actgacttccacaagggttgaactagtttacagtcctaccaacttgacctcgtgatctgcccaccttgacctcccaaagtgctgggattacaggygtgagccaccgctcccagccaatatgctttctctttatctcttctcttaacatgtcagttatattactttaaaaaatgcttttagcggtagcactggagtttccagtatacatttttaactaatttaactctacctttaaataacattattctatatcacatgtaccacaagtatcttagaatattcccaattcctgcttcctgtctcatgacattgctgtctttcacttcacttattcatacgctgtactcacccaatatgctgtctgtcttatccattaagtagttaccttttagatcaattaagaataaaaaactaaaaacttttattttactttcatttattctttctctaatgttcttgctttatgcagacccaagtctctgatccatgtcatttttcactttttttctatgacacacttttaaaataaaacatttattgtcattcaaatctgctattagggagttccctcagtttttccttctctgggaaagtctttatttctccc

SEQ ID NO: 163672 - DNA, 498 bp, Homo sapiens
tctttcaggctgttcttttgttagtgaaaaaggaattctaccgaggacttgtcctagctatctgcctaactggttcctttcttttccctcacttttagattgaacagragatttgaaaaggtagtatacagtattctggaatactgctgacacagattcccctgttcttaatatcttacattaccatggtaattttgtcacaactaagaaacaaacattgatatataattattaactaaattccaggctttattcagatttcactattttttcccctaatgcttgttttctgttccaggatcaatttagtcatcgattggtctagaacagttttgtttcttgttctttattatttactgttttctttttttttttagatggagtcccactctgtcatccaggctggatagagtgcagtggcacaatcttggcttactgcaagctctgcctctggggatcaagtgattctgctgcctcagcctcctgggtagctgggat

SEQ ID NO: 163673 - DNA, 631 bp, Homo sapiens
agagaaactggaagcaagagaaaccargaaaccatgcagacatcaacctaatagaaatcaagcagaaactgccacagaaacaacgctgtctacatttgtctccgtggattttatctcaggttctgccaatgaaaacctgagagtaggtcttttacaattacctacatggtctgtggtcaacagattaaattggattaaacaaacaaacaactcttgagtaagggagaacagaaagctttggttttctggactggataagtagaagttccttaatggtgtgaagagaggtcacagctgagttactcaaagtagaaacatggagacattgttttgaaagttatattaaagaatacaagtttaggatgtttacaaataagtttattatatcatattccttcaatctcattagctgtcagctaatggcattaacagaaggaaaagtttctatttttaattctttcaacctataaggatctgagtaaaattacttcctgagaagtcttttgttgaaaatcatagttagcaaacagatttaagatcaagttattttcttcagttaatgagatttattttgatatcagttttgagacatcaccatgttttcttttttttttattcccagatgtgctat

SEQ ID NO: 163674 - DNA, 584 bp, Homo sapiens
tggctagccatatgtagaaagctgaaactggatactttccttacaccttatacaaaaatcaattcaagatggattaaagacttaaacgttagacctaaaaatgggcctgtttttaagagagttagcyaacaaccaggccacagagttagcaaatgacaaagctggcagaaaattttgaaccacagctcttcattttttgggttacttcgctatgttatttcattttgactctggaataaagtacattaaactatgaattttccatctgtgtacaccacaaatcacaatatccttcatcatagaacaaaaagatgaaatcttgccatggtatttgagtaatagctccctgttacagtgacctgatttgaaaaagactgtggccttgacgttttctatggataaaatttgttccataaccctttatttagcaaaggttctttccattttaaaaaagtaacattaatttaatgttaagaaaatggcatagaacaaacatacaatttaggattaaaacatgtttattttcatgatgtaattttatctagagagtttgtatctaaaggcagtagggtaatgacttatag

SEQ ID NO: 163675 - DNA, 459 bp, Homo sapiens
agaggacatctggagtggtgaaaagactccaagagagggaggaacyattggaaaatagaaagcagacatgggtcctaagtggacaatggaaaaaactctatcaccatctgggaagttggtgggtctgaggaatcctcaagagcagctggcagagaggaaaaacttttcctctactctgtcatattcagtatctgggggtctgtgacttaaactaacaaaagacagattaataggagaaaaggcatacaatttttattaatgtttacattcatgggagttcacagggggaaaaagtgaaactcaaggagtatttagactcaggggcttagttagatggtaatgttaacaaaagaaagggagtttgaattttgagggatgataaattgcagataagtgacttggaaacatgagaaaactaatggaagataacagttattttcatagggtatttttatgcaa

SEQ ID NO: 163676 - DNA, 459 bp, Homo sapiens
agaggacatctggagtggtgaaaagactccaagagagggaggaactattggaaaatagaaagyagacatgggtcctaagtggacaatggaaaaaactctatcaccatctgggaagttggtgggtctgaggaatcctcaagagcagctggcagagaggaaaaacttttcctctactctgtcatattcagtatctgggggtctgtgacttaaactaacaaaagacagattaataggagaaaaggcatacaatttttattaatgtttacattcatgggagttcacagggggaaaaagtgaaactcaaggagtatttagactcaggggcttagttagatggtaatgttaacaaaagaaagggagtttgaattttgagggatgataaattgcagataagtgacttggaaacatgagaaaactaatggaagataacagttattttcatagggtatttttatgcaa

SEQ ID NO: 163677 - DNA, 459 bp, Homo sapiens
agaggacatctggagtggtgaaaagactccaagagagggaggaactattggaaaatagaaagcagacatgggtcctaagtggacaatggaaaaaactctatcwccatctgggaagttggtgggtctgaggaatcctcaagagcagctggcagagaggaaaaacttttcctctactctgtcatattcagtatctgggggtctgtgacttaaactaacaaaagacagattaataggagaaaaggcatacaatttttattaatgtttacattcatgggagttcacagggggaaaaagtgaaactcaaggagtatttagactcaggggcttagttagatggtaatgttaacaaaagaaagggagtttgaattttgagggatgataaattgcagataagtgacttggaaacatgagaaaactaatggaagataacagttattttcatagggtatttttatgcaa

SEQ ID NO: 163678 - DNA, 390 bp, Homo sapiens
actcaaatgttaatctcctttggcaacacactcacagacacacccaggaacaatactttgcatccttcagtctaatcaagtggacactcagtattaaccatcacagagggaaaacataaagttgctttctccatgcttctgacgaattaaaaccayttgggatggggaaattcaatggagacagatactatggaatgatgaaaacagcctgcatgctagttgtcaagattagccccctcctagtcacctaatagaagagtgtgaaagaggaatattccaacacaatatgtagagttaagtgagatgataaagatatgatgaaaaatttcttattgcaaagctgatttaggagttaaaaagaaattaggcagataatgagagtatggaaat

SEQ ID NO: 163679 - DNA, 581 bp, Homo sapiens
ttctttaataaatgattattttactttgtaccttaatttgttcagcactttgttgggaaatggatcatgtttcttccaaaaagggtagtttctttggcataatttattatctttggataataaatggatcctttcaaagatcccaaaactcactatgccagaactgcttataatatacacttcctgcctctactttgtcttaccctggtttatttccttaaatgcgaatgcatcatatggtgaacttgatcaatatgcaatatttgactgtttctacatggacaaatttaccacatattttaattgtactgtaccttgtaaacaatattctgattgttggttgtcacaaaaaatgtaagggccctaaatcctctgctgtgttctctgcatcttgttcttaaccttacctcctaatgctgccctcactcttgaaatttctcactctttgaaatgcctaaggcaagaaaaaaaattcyctagattctcttagtcataaaatgctacaggcacattaaagatgctcagcatcattgctaatcaaataaataaaaatggaaataaatattacagtatggctatta

SEQ ID NO: 163680 - DNA, 509 bp, Homo sapiens
tggccagctcctacacagataggtaaggaaggttaggggtagtatttctagatattgtggtttctgtgggggagggaagctctagtttctatgacccaccttgtggaagatgagttctgtctacaagttgtttcaggggaaaaagaggggtgagagagggagggcaggagaaggacagagagaacttgtttctgaggccttccaatctattttaattcaaagtactcagcatgtcaaagcaccatactatggggtatcatgttctgagctccaataagaaactgtatcctactaaatctagcgctgcttcttgctatagaaaatgcttaatacatgcatcatttatactcttttggaaccagaccaagagagagttagaattatggtatatgtcattgtaaacgtttgtgtatgtgtgtgtgtgtgtgtgmacatctcaggggaaatggttgtgaaagcatttatctttatcatttatattaagagagctgtcgttggcaggtgcaacc

SEQ ID NO: 163681 - DNA, 556 bp, Homo sapiens
acttactgatgacatactgtattccaggaactacacttttacaggtgaattaattcatctggatttaggatacatgaaggtcactgaagagagggaaataaaarttgcactttaggaaaagttagcgggtgggtagctggatcagcaagggagcagattagaggctgggagatgatttaagaggctactgtaataatccaggcctgggtggggtaagaacctggattcgagtgatgacagtggaaatgagcacaagaaaaaatatcacgctcaggaagaattaatagcatttggtgtctgatgggaggtgaccgagagaatataaagtataaccatgattagctacaagtagaaaagtagtttaaaagtttagtaaagctttttcctaggaagggtatgtcagataaactaaatctgaaccaagcactgaactttcagagaaagggatctatctaaaagatgtcttttctagtcttaaataccactagggaagtagatatttttgatcagatgacacgcgatttagaaaacctttttgtagagactcagcagtgtg

SEQ ID NO: 163682 - DNA, 629 bp, Homo sapiens
aagctttgaaactcctggaataaaatgtaagagaaaatttggatgaccttgggtttagcacwgactttttagatatgaaacaaaaggcaccatctatgagagaaacaattgataagctggacttcattaaaataaaattttcctgctctccaaaagacaacgacaagagaataagacaagtgacacactggaagaaaatatttccaaaagacgtctctgataaaggactgttatccaaaatgtacaaaaagctcttaaaactcaacaataagaaaattaaaaacccaatttaaaaaaatgaaccaaagaccttaacatatgcctcaccaaagaagacatgtggatggcatgttagaatacaaaacgatactccacatcatatgtcatcaaggaaatgaaaatcaaaaccatgagacaccaccactcacctgttagaatagccaaaatccaaccactcacaacatcaaatgctggaaaggatgtgaggcaacatgaactctcactcattgctggtgggaatataattggaaggcaatttgtcagtttcttacaaaactaaccataccctttgatccagcaataacactccttggtttttacccaaaggagttgaaaacttaggtccccac

SEQ ID NO: 163683 - DNA, 558 bp, Homo sapiens
aatttgcaaatatgctcaggtgcagaaaatatccagttatatttttcccctaaaatcaagctaaatctgattgtaacttacattttgatgatgtagcagagaagtagcggagaattcactgcttggaatcattgggatttccttctcctttgccccatttgtrgagatatcaagcacattttatttaagaaaatgtgatgagttaatgtcactttttttgaaatgtgctgctgacaacgcacactcacatttgaatgtaccatcaccaaaaaaaatcatatgacttaataactcactactagctcttataagctacagctatagcttttaaagaagtgatttgagtttgtagttatgaatttgaatggacaaggcccaagcttccacattgtaattttcttaatattagttgcagcttctgaatgagcaatggttaggacctggcatttccacgagtacttcttccttagcaactcaggggctttctattcctccatttttctgggaaaatgccattgtttgtcattatgaagtaggccttcatggacagttagattt

SEQ ID NO: 163684 - DNA, 569 bp, Homo sapiens
atcctttagatctctgggaagtggctaccagtgatgaaggcattgctgggaattctggtcatggaatttatatctagtcataacccaaagtgtaatactcctgagatgaacttcagtacagatgtttccaagacaagcagcgcctcrtttatgtgatgtatttacttggtctccaaaccactaagagaagttaacaaaagacaagtggttgaactaaactctttattgatattgatttcaaagcctcatctgcatttgtctgagggttacatttacttgtaggtcatttaaatgtacatgtcctaaacctaatcagtcatcttaactccttcatggatatccaactcttgcaccaaaatatgcttttctttatgtatgtaccacattgccaaatgacttccaagattcaaaaacatcagatcataatctctttccaaacgcattaagctgcagaatctcatcgattcatcctcttttctgctgttacatttttcccattttctgccccatcatgagcgttctagttgaggttgtaatgaactttcattgggacaaaataaacagtgtag

SEQ ID NO: 163685 - DNA, 597 bp, Homo sapiens
taaccttctaaaaacggtctgccaaacctgcatctgctcctccttgtaaaagaagtgaaaggtaatataatattatcaagaatataaaattaaacagacgggaactcttgtaactcagtacacaaaatttctaaaacatggccttaaaggctaagcatgtctgtatttttcctttctgtcttgacagaaaaaaatctaacctttctataggtcagactaagcaagttctattaattagcccaaacttcaataggacagattatctgagaatgttcttacttgtagggcactttaattgaaataagactaattctgactcctgattttacgggtgagaaagttgagatccaacaaaattaattaccataaagaacaaaaatctgattgccatttttgttcctttttcaatatacttagtagcccttcctcaaagaaagttttagcacaaaatgtattctcttacttggaattacttctgctgtttgtttctgtatrtaatctgaataaatataatgttaacactggaaaagttcctagaaattagctgttcttcatcttttttggatcaaagatcattttgagaattggataaaatgt

SEQ ID NO: 163686 - DNA, 412 bp, Homo sapiens
tgacttaggtgatgagtacttaaaattgacaccaaaaacacaactcattaaaacttttttgagaaattggactttattatcaaaagtttaaacttttaaactttcactctaagaaaggcactgttaacaagaatgaaaagtcargtgctgaatgggagaaaacatttggaaattccaagtccagcaagtgacttggattatccaaaatatacaaaggactctgaagaacttgccagtaagtgtgataggaagaataatgcccccacacccccatcacccaaagatgcctacatcctaatccaaaagggagtgatgatgtagaagaggaagtcagagatacgatgtgaaaaagactcaatccaatgatgttggcttggaaaatgaagaaagagaaatatgagccaaggggcag

SEQ ID NO: 163687 - DNA, 337 bp, Homo sapiens
cacagccaccccttcccccaggtgctctgtcccagggagatgggaactttatctataagcccctgactggggctgctgcccttcttttagagatgccctgcycagagaggaggaatctggagaggcagtctggctacagcgactttgcctagctgcagtggattccacccagttcaaaattcctggcagctttgtttacactgtaaggggaaaactgcctactcaagccttggtaatggtggattcccctccccccacaaagctcaagcatcccaggtcgacttcagactgctgtgctggcagcgagattttcaagccaggggatcttagcttgcta

SEQ ID NO: 163688 - DNA, 335 bp, Homo sapiens
aaaaaggaactcttacacactgttggtaggaagataaattagttcaggcactgtctccacagtctggagatttctcaaggaacttaaatcagaactaccattggacctagcaatcccattactggggtatataaccaaaagaaaagaaatcattttactaaaaagacacatacacttgcatgttcatcacagcactattcacaaaagcaaagacatagaattaatctaggtgcccataaatggtggaatggataaagaaaatgtggtacatccyggcaaagacacaatgaaaaaagaaaactacaagtcaatacccatgatgaacatagacacaa

SEQ ID NO: 163689 - DNA, 601 bp, Homo sapiens
gaagcttggccatcaatacccacaacagttatgggggcaagggaaacaggcccttgaaaagaaggtaatgtggagtgggtagcccccgtatcgattaaacaggggacggacttactcttctctgtaagagttacctgaagctcagcatccatgatagtccaggggcttccaaggcgatgggcagcatcagtcttcagctgctaagccaaggagatctgggaaggagtcagtcaaggaatgttgggtttgggcttcagggcgttttaggagcagcagtgatgtgagtcggacagtcygacctccagcgggggcccacacagacagggcacggcttaggaggaatcccaggctgaggacattctgaggcccagtggccaggcttttggcatttgaagcaaggtccatgaggatgttttgaaggagcccctgcgagctgtggcttggatgttctaaagttcttgcatgctagagatgtggttgtgggttttcctacagcggaggcaagtagctgtaactcagaaatacgttgctgtctggctaccccctctctattattgtgtaccttgaaggtgaggttgattaattcctattgtggggtttg

SEQ ID NO: 163690 - DNA, 549 bp, Homo sapiens
tttcctgcaatataataggaaaaactcagagaaattattttagatgatttagaattaaatgacatagatttacaaaatgtaatataaaagaccatatcttcttttctgcttgtaagtgtgccaacttgattaaagaaatgataaaagtaaagtattggcacatgctacaacatgggtgaaacttcaaaaaatgataaatgaaataagtcacaataacccatgtgttatatagatttcatttatatgaaatgtccagagtaggcaattctaaggaacagaaagtacattattgattgccaagggctggatacagggaggcttggagaatgatggctaaggagagtggtgtttcttttgggggtgaaaactgttctaaaattgattgtggtgacagttgcacaactctgtgaatatactaaaagtcactgaataaacactttaggccaggcgtggtggctcaagcctgtaatcccagcactttgggaggccaaggtgggcrgattgcttgagtccagcagtttgagaccagactggccacgatggcgaaac

SEQ ID NO: 163691 - DNA, 601 bp, Homo sapiens
aatttccaatactataccttaatatggatcttctttcactcactttgctggaactctgcatagtccttttcagtatggaacctgttatctttcactacaggagaatttctagtattctttctttttctcttactggaactcccattaatccaatgttggacctcctggattctctattttctctcctattatccagttttattttaactttctgttctgcattctaggtgatattggctactttatcttccaaacctactaagttttaatttcttctatcatgtcttaattccaaagagctcttctctgaatcatcttttaacaaaatccttttaatggttttaatattaattctgttttcctccaatttcctattttctgtttttctctttggttttcrtatgaggttttcttcaagaggctagctattgtcaattgtattatcagaatgagttactcaaaaaagaataggagctttatgttcacaacagggcttctcatccagtaaacctcactgtagggtcataagcaggctgattttaaaattgaggatcctatatatctatatctatatctgtaggtctctctcttgaataagctt

SEQ ID NO: 163692 - DNA, 541 bp, Homo sapiens
gatgatcacattttaggatattttgcttacgtgttattttatatttatatactataataccattgtatagttcagaacaagaaaatatcttgataaatcatctgctactgtgaggcagttaaaaaaatttgaggctcactgaaaatgtgtgacttgcccactgtctcatattgctagtattggagagaaaactagaatctaggcctttattttcctgatgtaatgattttagctaattattatttattttcttaaatcattgcattaattsatttttcacaagtagagcctatatcagtgtttgcaataattaaattttaagtatatttctataattgtaaataaaatcctgacatttgttacaggatggggttttctttcatcatatttttataataaaaattaagcagttataaaaataaatagcctagtttttcaattggtataagctggctttattttatactgctaataaaggcacattatgttcaagcattgcaattatcgctgaaatgcatgtccattaactgaaacattaggc

SEQ ID NO: 163693 - DNA, 585 bp, Homo sapiens
ctgttctcaaacattgatgatatcatcaaagtgaacagcagattcctccatgatctgcaggagacagcctccaaggaagaggaacaagtgcagctagttggtaagcaaaaaacctaaggagttgtcagccttagattctcatggaactgttctcagcgagtggtcactgcttaactgtctccagagttccagagaaatgcagctcaacggcagtctgttttggggatctccaaaacacaacatatcagagccagcagggccctcaaataacaactagtccagtcccattgctttacagagaccgagccccagagacagagaggaacatgcttacagtcacggaattgttagygatgcagctaaatctttagtctgtgtctctttcacattcattcatccaacggttatttaatgagcacctgcagtgtgcaggcacagcatcaacgagagagtctgagcttctattctcatggggttgacaagttagtgacagagacagaagatagacaaacaacagaattgtaggtaataatttgtaatttaaaggaaataaatagtcatggtaacttctgggtgtgagggaag

SEQ ID NO: 163694 - DNA, 600 bp, Homo sapiens
ctgcccgttaaatgcctgcggcattactttccagagcctggccaataataatcaccacgccagccataactagttctttctcagtctgctatgatagatggcaccaggttattagattccttgggattccaaaatgcacgctgaccccaccctttatttgggtaggatgttcattctgtcttttaaggcaactcttcccatctgagagccaagggaataaaaaaactcacctttgcagtgggcaggaagctctgccctaggtaggactgtcctaatggtagagctgtcagggtggaaaargcggccttgcagaggtgggcccgtccagcacaaagcactgcaattccagaatgatggctgaggcagcagagtttggagaaggcagataaccttctttgttttcctttatcagctaggtgtgtttgttttaaatataaaagcaacatatgcttattgaacaaaaggaaagttccaataacacaagtatataaagtaaaaagtaaaaatccattccactagtaatgttttccatccaaattttctactgtatatttatagatagagagacacatagatggacagacagatagatggttagat

SEQ ID NO: 163695 - DNA, 523 bp, Homo sapiens
gtttgaattcaagtatctgtgtgacccttggaaatttatttaacctctctatgcagattgtttcgtctttcrcaaacgggggaagttaaaatacattactctgtttttcaaacaaatgttggcaaaatactttttctgagactttcttatctcaacaatatcttagcattttttctgtgtaaatcttcctcatctttgtaactgctccaaactattccaaagcattaatcaaacataattaccctttgcctttctattgaacttcagaattttaccatatttttttattgtaaataatcttgcaatgaatatctgtatgttatctacttccaaatgtaaaagatatctggcttatttatacgtttttctttaattcttcccaaagctccatgtgttagacagaatataattttctatttgagaattgggactcaaactcagtttttttcagacttctagaatatacaactttaaaagagttacatttctaatagtgagataatcatactgtggtccctcgccc

SEQ ID NO: 163696 - DNA, 604 bp, Homo sapiens
cttttgcaatattagtatccatagaaaacaccaagtttagaatacttggaaggaaaatgacagcttcacaaggaatcaatgttcaatacaattttgttgaatgaccaagtggttgatctctgacttagagagagaatgcatgtctgtgtttttaatcttcatactgtaaatgtccatagaaatagagtttttaaaaagtgctttcactcagattatgtaattttatcctcacatcctcctaggagacagttaaattaaaaactattatattaattggacaaatcgggaaactgtagccaaatgaacctatgcaaggtatttacctccaagtaactaatatttgagaaggcaaagattgaaagccaggtctaaacaaatctttaatgctgttttgaaaaattatattagttgcttttcttccactctccttaattttgttttgcaatatatcagaaatattgtcmcatctaatttgcaagcttccttcagggttaaataaactgcaagaatatttgaatgacaattcccctagactgttgaaggagggaaaataatttgacatgctttgtgcataagcacttgatgtctagacgtattatttcaa

SEQ ID NO: 163697 - DNA, 560 bp, Homo sapiens
acagacactcatttttctgacattatatacagatgaatttttttctttgagctggtgacattttgcaggctgcagttgaatgaattgttaggaataataatgcatgcccctgagatggtgaagtgtagcatgggtatgtccacatgagactatattttagtagtgttttgggaaaattgtttttctacatttttcttaaatttggatcacttycttcttttcaaatgaccttaaagatatcactagaggaacacacagaaaataataagaaattaatctggtaacattccatttgtcctttaaaagaaagattcttatgaattttgttttgattgagtgaccgtgagcctcagtgcatccattttcactatatgaaggtattaaatactgaggatatggccggtcatgctacataaccaaataactattcttcttttaattaactttcagtttggtgggaggaatatatgtatgtagttaaataactaaaatgcaaagtatgatatattataaatatatacaagagatataaagttgaacacagtaagtgtttagtaaag

SEQ ID NO: 163698 - DNA, 438 bp, Homo sapiens
tgatctatgatctttgatgttactattgtaattgttttgaaacaccactaaccacacccacataaaacaacaaacttaattgataaatgttgtgggtgttctgattgctccactgattggtctctctctttttctccttgggcctccctattccctgagacacaaatatactgaaattaagccaatttataattctataatggcctctaagtgttcaagtgaaagacagttgaacatttgtcactttatacaagaactagtaattattacacttrgtgaagaagacatatcgaaagctaagatagaccaaaagctgggcctcatgcaccaaacaggttgtgactgcaaaaaaaccaaaaaaaaacgaaacaaaacaaaaaaacttccagaaatgaaaggtgctactccagtgaaagcataaataataagaaagtgaaa

SEQ ID NO: 163699 - DNA, 438 bp, Homo sapiens
tgatctatgatctttgatgttactattgtaattgttttgaaacaccactaaccacacccacataaaacaacaaacttaattgataaatgttgtgggtgttctgattgctccactgattggtctctctctttttctccttgggcctccctattccctgagacacaaatatactgaaattaagccaatttataattctataatggcctctaagtgttcaagtgaaagacagttgaacatttgtcactttatacaagaactagtaattattacacttggtgaagaagacatatcgaaagctaagatagaccaaaagctgggcctcatgcaccaaacaggttgtgactgcaaaaaaaccaaaaaaaaacgaaacaaaacaaaaaamcttccagaaatgaaaggtgctactccagtgaaagcataaataataagaaagtgaaa

SEQ ID NO: 163700 - DNA, 601 bp, Homo sapiens
tgcctgctaatatgccatccattctacagcccatggaccaagcagtgatcttgactttcaagttttattattcaagaaatacatttcacaaggctactgctgccatagatagcaagttgcctgatggatctgggaaaaataaaatgaaaaccttctggaaaggattcaccattctagaggccattaagaacatttgtgattcataggaggaggtcaaaatagcaatattaacaaaaggttgtaagaagttgatttcaaccctaatgcatgactcagaggggtccaagacttcagtggagaaagtcattacatatgtggtgaaaaccgcaagaaaactagaagtagaagtggaccatgaagacatargtgaatggctgcaatctcatgataacactcgaatgaatgaggagttgcttcttatgaattaaaatagaaagtggtttcttgaggtggtatctaccttgtggtatctactcctgccgaagatgctgttgttgaaataacaaaaaaaaattagaattacataaacgtagttgataaagcagcagcaggggtttgagagaatagactcccattttaaagatgttcaattgtgggtaaa

SEQ ID NO: 163701 - DNA, 595 bp, Homo sapiens
aggcataaaatgcataatattaaaaactcataaataaaaacttaatatttaaacaatatatttagaatatataacatgaatcactgagttgttcgagaagcttagaaaatatcagcagagctacttatttacatttataaaaagcagagcttctttaagtagggagagccaattaatgaccaccatatcactacaggaataagtcactttacctgatgtgtgcacttctgtagagttacatgcattcattttttctattacaatatttttaatgacctacatgcttcaagttaagaaatctaattgagtattktttaaagggtaaacaaccttttacaaataggaaaacttatttcctcatgtattattttagagggtgcatttgatataaaaaggtatttcctgcctatatccccgtatactatttcaactgtatttttcaggctgataaaaatgaaagattccaatacaatatcttctagacacagaaagcagtagtgaactgaacacaaatcaccactctcgttatgaaaattgcattctgaagcttaaaattgagtaatcataaaatcaaatgcttttatactaggcgcta

SEQ ID NO: 163702 - DNA, 565 bp, Homo sapiens
attgtatcacctcttctggtacttttgcctttctataaaaatttcagaatcaattcgtctatattcataaattaacttgctgtgatttggtcaggactgcattgaatttatagacgaggttggaaagatctggcattgagattttctatcaatgaacataaaatgcctctccatttatttagttctttgatttctgtcattggtgttttgtagattttctcaaataaatattgaattttctcaaataaatcagcttgaattttttttcctgagtctttcaattttggagtttwttattattattattattattattattattattattattattattattattattacagaggtaggtctagcttggtcacccaggctagagtacagtggcatcattatagctcactgcaacctggaaatcttgggctcaagtgattctcccacctcagactcccagttagctaggactacaggcatgtgccaccatgtctggctaatttttaaaaattttttctagagatgaagtcttcctatgttgccaggcttgtctcaaaatcctgtcctc

SEQ ID NO: 163703 - DNA, 487 bp, Homo sapiens
tatacttattcattaggtagcagtggggagagaagccataaaacactcctttccagggaaatccacccacaaggcagattacgtagaaggaaaagtactgaaccacgagacacactcagcctctttctgctgttcatttcccaccaggctggcgtccagcatggagtagcaccctaaacccctacttccaggccacttcagatactggattggaaacttttctttagggaaattcaataactccagtgaaaaatctagagacrccatttttataacattctttaaacatggatattcatttctctcttttttggggtgggggtgtttggttttggtgttatttgtttgtttatttcttgacattgagagctgaatgaaagcctcaggctgaaaccccttccttttgaacatgcattgtcttttcttcaactggttgaagtctttctcctgttgtagctgttgcttggcctgctaacttttccccatc

SEQ ID NO: 163704 - DNA, 500 bp, Homo sapiens
tgttaattaagtcccttatctttccccagtctcttcaatcagaagtggggataggaccataccaaggggaatttcagtgcaggatgtsttgtgatgggagtagtgagttagcatttgaaaaatagagaattaagttgaatgataattgactatgaagcacagcattgcttgtactggatagactcagacattagtttatcttaaaggtcacccagtcactgccaagtttatttagtgtgaatttagggcttatgtgacagcctgagattgcactagagcaaaagttacaattaatatcttgaatagttgtatatgactataaggatggaaatacatctttcttgctctggttttgtgttttctttgttaatcatccacaaatgctttttcctgatagaaatagcatttattggtttcataaatggtatataatgtgataactaccacttcttgacagatttcaactttctaaaataacatttaatctataggctgtgaat

SEQ ID NO: 163705 - DNA, 402 bp, Homo sapiens
atgctgaactgaagaggacctcaggtattgagcacataatcctgactccttattaaacgggatgggaggatcaggccagcttggggaccatctgctgtgtcctgtgtggcctatccccaagggctctgggccatattctcctrtaaatcctctgccttattctcatggttgcctctccccaactctcctccagttgccccttttgcccaacttccagccacctggctctgcatgctgtcagttccatgcttgggtggcagtgggtttagcctgagatgcctggacttcactctcgcattgcttctgttatcctccagcctctgtgccccatggccagtgactgagacatgagaaaaggagaaaaagccacatgtataggaaagacctaggagaagaaatttc

SEQ ID NO: 163706 - DNA, 377 bp, Homo sapiens
aatgctgaactgaagaggacctcaggtattgagcacataatcctgactccttattaaacgggatgggaggatcaggccagcttggggaccatctgctgtgtcctgtgtggcctatccccaagggctctgggccatattctcctataaatcctctgccttattctcatggttgcctctccccaactctcctccagttgccccttttgcccaacttccagccacctggctctgcatgctgtcagttccatgcttgggtggcagtgggtttagcctgagatgcctggacttcactctcgcattgcttctgttatcctccagcctctgtgccccatggccagtgactgagacaygagaaaaggagaaaaagccacatgtat

SEQ ID NO: 163707 - DNA, 290 bp, Homo sapiens
aaatgagccctgacccatattttccctagtacacactatacgctcacatagtccctaggcctgaagacatttcctcttagctcagtctgctaaaatcaagacggtttctgttttacctcctttgtaaagacttcctttatcacaccatatccagaagtggcatgccatttctgcttttctctggcattgtgcatctcctgcatattactgatcatgtacaatgccattcgagtacaatttgattgaatatgtaaactgtraaacacgtagaaggtaaatgacaaatgttt

SEQ ID NO: 163708 - DNA, 612 bp, Homo sapiens
ccatatgccagttactgagtctttctatttacacacattttctcatttatttcctgtaataacacacttatagaagaggcattgttggccagacagaatggctcacgcctgtaatctcagcactttgggaggccaaggtaggcggatcacttgaggtcaggagttctgcctgagcaacttggcaaaatcctgtctgtataaaaaatacaaaaaagagccaggtatgttggtgtgtacctgtagtcccagctactcgagaggctgaggtgggagggtggcttgagcacaggaggcagaggttgcagtgagctgagattgctacactgtactgcagcctgggtgacagagccaggccctgtctcaataaataaataaataaataaataaataaataaataaataaataaataagacatcattatgccagtattgtacgtgaagaatttgagattccaaatgcttatacaatgtsccataataaataacagagccaggatggaacctggttcctggggattggggacccctgctatgatgtatgtggttctgtatttattgttttatgaaacacagggaactgtaataatagctatgataacagagccagaatgg

SEQ ID NO: 163709 - DNA, 595 bp, Homo sapiens
gtgtcttggctcagccgtttattaattgtgtgactgggagcaagttctttatgttcctgtgactcagttttcttttctttaaaatgggcacacctatatcacatcgaatgctgtaaagactcaattaataagttcatttaaatagctgagaatagtgcctgttacaaaaccaatgttagccacatcagaaaaaagaaaaatagcaggagttaatcaatgcatagtttagaggaattttgtctcagataataattagtgacaggaatttaaagctagtctttcttggtctccatctattcgtatgaatratataggtgctagttcagtgtatctctcagtttcctattcactctgattctctgctcatgttgtgctgagattactacctacttctgctcagttcttcagtttattatataggggtggtttggattctgagctctaaaatataaactgaaataagatatccatccagagattttataaagtttattaatacccatatatactggttttaaattcattttctcaaaatcttttgtcttttatacaatatcacttaaaaattaacccttgatatttatgccatttattg

SEQ ID NO: 163710 - DNA, 621 bp, Homo sapiens
tttccagcttagtggaagccttgaaaattatcagccttacaactatgacagctatgaaaaccagtagcagccactgtcaggacaaaacttgtttgaaggtcccctaaaatacttgtcactaaaaaattacatgatagctctctgtaaaaacccaatttgcagggcttgtatttgtttgacctgaccagaattcacccaatgggaaaagccctatccatagggtgtttgttaaaaataataagcaacatttgtttaactttgaagttttcaacaactcagtggcctggggggcattaacagttttacaaacaagggactagtaaaataatagaaaaggaaaatctgtccactgggactttgaaaagcttatgcatatttgagggggatctaaaaagccacatgcttgtgcaggaatctgcaaattgtagggtaagacctgaatttaagatgcaatatcacatgctgccttgacaggcctagctatgagttcccctcctttcaccaggtgtgctcccyaccaaacagcaggaaagactccccacccaccgacttgccctatcatctggaccagccgcacctcactcagttctcaacctaaccaatttcacttccttaccagcc

SEQ ID NO: 163711 - DNA, 531 bp, Homo sapiens
ctaatttctggctacttattagagtcttctctctttttcttagtcctgctaagggtttctcaattttgtttattcaaaaatcaactcagttttgttgatttttaaatastttttcaattctctatttgatttgcttttgcttcagtttttattatttctttcctcctgctaactttgaatttagttttttctagttcttttatatatgttgcttaattaagatctttgttctctttttagtgtagattttttttatcataaacttcctcttagtactgttgttgctgcaccctgtaagtattggtaagctgtgtttttgtttttatcttgaggtttttaaaagtctcttttgattttctttttgacccgtggtttttcaggaatgtgtcatttagtttccacatatttgggagttttcctattctcctgctgttgatttctggtttcattccattgtggttggaaaagatacttggtatgatttcaaacctattaaatgtgttaagacttgttttgtgacctaacatatga

SEQ ID NO: 163712 - DNA, 612 bp, Homo sapiens
ttaattgcctcctttcatgcccagtactacaacaatcctttggtaaacattgctgcatagtcttagctggtacttcaaggaattagcaatgcccatatgagagaatctaatgtccatacctaaggaggaagcaagttatgagatggtaaaagatgaatgactgggagaaaaaaaataccagtccagagcaagaaagctggctgggggttccagagatgaccgagtagtttaatggaacatwaaagcattcctaagagaattctccaaaatttacttaaagatagtaggagggtagagaagaatcttgtatgaccacatttccacattgcacagaatgggactattattatgtttgtttattgtcatcattgtttgaattaaaaggaaaaattacccagaaagtgggagagtttgccggcattaaagctgaattaacttgctagggctaacgtaacaaataccacagtctgggtggcttaaacagcagacacttattttcttacagttctggaggctgaggagttcaagatcaaggtgctggcaggcttggcttcccctgaggcctctccctttggcttgcagagggccatcttctctctgtgtcctcacaca

SEQ ID NO: 163713 - DNA, 612 bp, Homo sapiens
ttaattgcctcctttcatgcccagtactacaacaatcctttggtaaacattgctgcatagtcttagctggtacttcaaggaattagcaatgcccatatgagagaatctaatgtccatacctaaggaggaagcaagttatgagatggtaaaagatgaatgactgggagaaaaaaaataccagtccagagcaagaaagctggctgggggttccagagatgaccgagtagtttaatggaacataaaagcattcctaagagaattctccaaaatttacttaaagatagtaggagggtagagaagaatcttgtatgaccacatttccacattgcacagaatgggactattattatgtttgtttattgtcatcattgtttgaattaaaaggaaaaattacccagaaagtgggagagtttgccggcattaaagctgaattaacttgctagggctamcgtaacaaataccacagtctgggtggcttaaacagcagacacttattttcttacagttctggaggctgaggagttcaagatcaaggtgctggcaggcttggcttcccctgaggcctctccctttggcttgcagagggccatcttctctctgtgtcctcacaca

SEQ ID NO: 163714 - DNA, 486 bp, Homo sapiens
cccccatggttcaaccaccttcccckgggtgcctcccacaacatgtgggaattctgggagatacacttcaagttgagatttgcatggggacacagccaaaccatatcaataagtatatatgtatctaaacatagaaaagtaaatatagcagatttattgtaaatttaaatacagtaaaattacatattacaatgttgtgggaccaccactgtatatgtcatctgttgttgaccaaaatatcattatacagcatgtgactgtattctccacctatccacattgctatttgttgtgaaactcagacctcctctcagttgaaggtcctagggattaagaagttcttcctgttagcaaggctcagctaggactaaccttttcaggtatgcttccaatctggttattgctgctgaaatggaaacaaggataaggaaataaaacccatcatggatggatgcaaaaggctttcatcacattcttcattctaat

SEQ ID NO: 163715 - DNA, 575 bp, Homo sapiens
gttgtttattatcatcatgtaatgagaacgcttcattgttttccaattagatacaaaaaatgttaaactttgtttttagccatagttgtttgaataatggatactaaacttaccagratgtcagagaggaaaagagaagaaaacagaggctgttttacttatttgaaaagaggtaaataaaacaagaggcatactgttctctgagtatgacctgctacttagagagtcatgttgttctctatgtatgacctgctatccaatccacttctccttttttatttacacagacttggaattagaaacattacacagatcagtgtatctacttaaaataaaaagtatagaaagaagatattgtgtaaggaatgtctgactccttcttagtaatattgacagcatggaaacatgttaattctcttgagtccagttgtccccaaatggtgtttttctcatttcaagcatatgatggtgccatatgattggcaaatactctctgctaaaactgaaaatctataaagaactaagtaagcacggaaagagcttggaatatcctatttctggagtgaaatgcatct

SEQ ID NO: 163716 - DNA, 575 bp, Homo sapiens
gttgtttattatcatcatgtaatgagaacgcttcattgttttccaattagatacaaaaaatgttaaactttgtttttagccatagttgtttgaataatggatactaaacttaccagaatgtcagagaggaaaagagaagaaaacagaggctgttttacytatttgaaaagaggtaaataaaacaagaggcatactgttctctgagtatgacctgctacttagagagtcatgttgttctctatgtatgacctgctatccaatccacttctccttttttatttacacagacttggaattagaaacattacacagatcagtgtatctacttaaaataaaaagtatagaaagaagatattgtgtaaggaatgtctgactccttcttagtaatattgacagcatggaaacatgttaattctcttgagtccagttgtccccaaatggtgtttttctcatttcaagcatatgatggtgccatatgattggcaaatactctctgctaaaactgaaaatctataaagaactaagtaagcacggaaagagcttggaatatcctatttctggagtgaaatgcatct

SEQ ID NO: 163717 - DNA, 649 bp, Homo sapiens
tttttctttatttttttcagactgggttagttcaaaagactggtctttaagctctggaattctttcttctgcttggaccagtctattaataaagatttttgttgcattttgaaattccttaagtgagtttttcaattccagaaactctgactgatttctttttaagatgtctatctcttccttcctttcctggattgctttagaagtctctttgtgttgttttgtcttggatctcattgagcttccttggaacctatgctttgaattctttatgtgtcatttctgagtttccattttgattagggaccatcgctggagagctagcgtgatccaaattttctrtggtaccagaattcttgtgctgtttccttctcattggagatgttggcacttccaatttttgtaattcttttcatgtggataggattttttctttcttttcttataattaaatattttttctttccctttcccctcctccctagggggtgtgactgttgagaattttgggtagactcttttggctttgcttctatagccttatgcatttctgtgggcagcttttatattgatctgtgtagttcaacctacaaaccagtagatgacacttatgggtaagaaccacctgcagccaatgcagatgggtata

SEQ ID NO: 163718 - DNA, 649 bp, Homo sapiens
tttttctttatttttttcagactgggttagttcaaaagactggtctttaagctctggaattctttcttctgcttggaccagtctattaataaagatttttgttgcattttgaaattccttaagtgagtttttcaattccagaaactctgactgatttctttttaagatgtctatctcttccttcctttcctggattgctttagaagtctctttgtgttgttttgtcttggatctcattgagcttccttggaacctatgctttgaattctttatgtgtcatttctgagtttccattttgattagggaccatcgctggagagctagcgtgatccaaattttctatggtaccagaattcttgtgctgtttccttctcattggagatgttggcacttccaatttttgtaattcttttcatgtggataggattttttmtttcttttcttataattaaatattttttctttccctttcccctcctccctagggggtgtgactgttgagaattttgggtagactcttttggctttgcttctatagccttatgcatttctgtgggcagcttttatattgatctgtgtagttcaacctacaaaccagtagatgacacttatgggtaagaaccacctgcagccaatgcagatgggtata

SEQ ID NO: 163719 - DNA, 619 bp, Homo sapiens
tagagagtagagtagtatgacagttacacagcctgggaagggtcgtgtgggagtgggaaagaaatgaagatggtcagtggataaaaagcatatagttatatacaaagaataagatctggtatttgatagcacaacaggatgactacagtcagtaataatttgttgtatattttagaataactgagggagtacaattggattattcataacacaagtaaataataaatgcttgaggtgttggatgccccatttaccctgatgtgattattaaacattgtatgcctgtatgcaaatatctcatgtaccccataaatatataaatataaatatatatatacactatgtatccataaagttttttttttaaaaaaagaaaagaatatcgcggcagatcttttatcgagaccagcaaaactttctctgtatcagcaatgatgccgttttgctttcttatcacttgcgtattcactggagtagcacttttaatttccttyaagaactttccctttgcattcacaactttgccattaggtgcgagaggcctagctttcagcctgcctcgctgctggcatgctcactaatgttaatcatttttaacttttgatgtaaagtgagcaac

SEQ ID NO: 163720 - DNA, 619 bp, Homo sapiens
tagagagtagagtagtatgacagttacacagcctgggaagggtcgtgtgggagtgggaaagaaatgaagatggtcagtggataaaaagcatatagttatatacaaagaataagatctggtatttgatagcacaacaggatgactacagtcagtaataatttgttgtatattttagaataactgagggagtacaattggattattcataacacaagtaaataataaatgcttgaggtgttggatgccccatttaccctgatgtgattattaaacattgtatgcctgtatgcaaatatctcatgtaccccataaatatataaatataaatatatatatacactatgtatccataaagttttttttttaaaaaaagaaaagaatatcgcggcagatcttttatcgagaccagcaaaactttctctgtatcagcaatgatgccgttttgctttcttatcacttgcgtattcactggagtagcacttttaatttccttcaagaactttccctttgcattcacaactttgccattaggtgcgagaggyctagctttcagcctgcctcgctgctggcatgctcactaatgttaatcatttttaacttttgatgtaaagtgagcaac

SEQ ID NO: 163721 - DNA, 488 bp, Homo sapiens
aagttaaagcacaaatagccaagtatmgtcattatattttcagtgattggggaatgaaaaaattcatgcaaagtgtgtggtaggaaaataaatatggaaatgatggtacaggaaggcaattgtgtattggaaatatagcactaaccttatcacaaactccaggtaggatcttggctctcccaattatcacctcctgagagtagatcgtctacgcatcagaattacaatttgctttttgaaagtaaaatactttgcaatgaattaacaaataatagaatattttattagtttcccatgatgcttaataaattatcatatacttagtggtttaaaacaatatccatttatcactggacagtttctgtgggtcaataatccaagcaagacttagctggccttctgctcaggatttcactaggctgaaattttatcagaggcttgactggggaaaagtcttcttcaagctccctcaggttgttggcagaatt

SEQ ID NO: 163722 - DNA, 601 bp, Homo sapiens
  misc_feature (1)...(601): n = A,T,C or G
tgagttttcatttttagtttatatgctattgccatgtagaatataaaatggaaattaacaataatcatattaataatatgtaacatttgttgataatttactatttctaaacaatgttctatgtactttacatgtctaaattcattaactcttcaacctattatccacaacttacagaaaaataattgaaaaaaattatcatgatgaatgatcattttcattsatgagactttacaaataatatagtaggagaacaggaccatgtgttatgccaggtataaagtgtggtagattatgaattaaaaaaaaaagaaatgtgggcaaaaaggggaaaggaaggagccctctacaaattttcatggttccctaaagaagattaagaaggtttcctgttctttgttacttttagttctgtctttacttcttttatgtctatataattctttccttgcctctatttttcctccaaagtgcaacggtatcatttcttagaacaaatacgggaaaaagcaggtatttttcttatcactctggactgatcctataaaactacgagaaatggtgnnnnnnnnnnnnnnnnnnnnnnnnnnnnnnnnnnnnn

SEQ ID NO: 163723 - DNA, 400 bp, Homo sapiens
tctgtgcctatttcctttgaaatgaaaataatagtggtacctaccttgtaagtcctaacttactaagtctaaggtattatcttactgggttgttttgaggattagaggtgtaaacacatgtaaagcacttatgacaatgcctaccacatagtaattcttagtaaattattctaatgctactatttttgctgctgcaaccaccactattactcctcttcctctcactcctcctcccttcttttacccacartctagaaatgggtgctccctagagttctgttctttgctcttatctcctctgagttccctccagggccatcatgtctactgtcaagttttcaaatcaccacatgtatttttatatttctcaaatcttcatttccaatccctcacttgaatt

SEQ ID NO: 163724 - DNA, 400 bp, Homo sapiens
tctgtgcctatttcctttgaaatgaaaataatagtggtacctaccttgtaagtcctaacttactaagtctaaggtattatcttactgggttgttttgaggattagaggtgtaaacacatgtaaagcacttatgacaatgcctaccacatagtaattcttagtaaattattctaatgctactatttttgctgctgcaaccaccactattactcctcttcctctcactcctcctcccttcttttacccacagtctagaaatgggtgctccctagagttctgttctttgctcttatctcctctgagttccytccagggccatcatgtctactgtcaagttttcaaatcaccacatgtatttttatatttctcaaatcttcatttccaatccctcacttgaatt

SEQ ID NO: 163725 - DNA, 592 bp, Homo sapiens
aaattcaaatttaaacatcaatcgaccaacataactataaagtaaaactgccaacaagcagaatacatgtgaagaggcctctgtcgttatttcaagtccagaagatcaaagcaaacaaacacaatcaagaagctagggatacagtaatagaacaaatctgctataggttgtatccagagtcattaaactgatgatcatatgataataataatgaaactaatatatattgtaccagtactgtctacaatgtttattcgtagttaactttgattatagttatctgaaatgaaaaccaytgtgttctaaactgttcgttatctgtcctgattaacaaaaggtgacactattaagaaggtaaaagcaaaaatatattgggagtgtaatatgatgtctttcacatttgactgagtaaattttgctgtaggatataaatgcattgggtttctgatgcaaattactcattataagacaaagaaaaataatagaagtagttctcagagtaatgatttagggcttgggttttacatgttttccaagggcctttatggtcatacataattcatgaatccttatttctgtaatgtttgaaatt

SEQ ID NO: 163726 - DNA, 592 bp, Homo sapiens
aaattcaaatttaaacatcaatcgaccaacataactataaagtaaaactgccaacaagcagaatacatgtgaagaggcctctgtcgttatttcaagtccagaagatcaaagcaaacaaacacaatcaagaagctagggatacagtaatagaacaaatctgctataggttgtatccagagtcattaaactgatgatcatatgataataataatgaaactaatatatattgtaccagtactgtctacaatgtttattcgtagttaactttgattatagttatctgaaatgaaaaccattgtgttctaaactgttcgttatctgtcctgattaacaaaagrtgacactattaagaaggtaaaagcaaaaatatattgggagtgtaatatgatgtctttcacatttgactgagtaaattttgctgtaggatataaatgcattgggtttctgatgcaaattactcattataagacaaagaaaaataatagaagtagttctcagagtaatgatttagggcttgggttttacatgttttccaagggcctttatggtcatacataattcatgaatccttatttctgtaatgtttgaaatt

SEQ ID NO: 163727 - DNA, 632 bp, Homo sapiens
cgtacaaaaataaagctgttatacgttttatcataatttattaatgatagagttaataagcmagcccatgattcctactgaaactattccaggatgtatgttagctaaaaataccaatgttcacacacgtgtacatgcattgcccataattaacccatcacaaaagtagatctcaaattagaagatgaatgcaaaccacccttgagtgctaaaatcagaaaagacaaaatgaagtggttggtacttatgaactatatcaggtacctctagtgctgcctaagaatctctctctggggcccttgaacacttatctcattccagatctggcaagtactgattttgaatgattacatctttctttatgctcacatggcacatttttcctgcctccttcatgttttcctcttgttcctgagacaagagatgcaactgggacacatcagggcttccttatgtgcaacctgaaagtgtgtgttggcaggtgaggagcgggggagggcaggttcatggcctatgaagaaaacctgtcacagtggaaactggaaaagactgattaattattttttccttcccccaaggtagactgaggtacagcagttcatgccgccttttgaagatggcaaaattgcgct

SEQ ID NO: 163728 - DNA, 632 bp, Homo sapiens
cgtacaaaaataaagctgttatacgttttatcataatttattaatgatagagttaataagcaagcccatgattcctactgaaactattccaggatgtrtgttagctaaaaataccaatgttcacacacgtgtacatgcattgcccataattaacccatcacaaaagtagatctcaaattagaagatgaatgcaaaccacccttgagtgctaaaatcagaaaagacaaaatgaagtggttggtacttatgaactatatcaggtacctctagtgctgcctaagaatctctctctggggcccttgaacacttatctcattccagatctggcaagtactgattttgaatgattacatctttctttatgctcacatggcacatttttcctgcctccttcatgttttcctcttgttcctgagacaagagatgcaactgggacacatcagggcttccttatgtgcaacctgaaagtgtgtgttggcaggtgaggagcgggggagggcaggttcatggcctatgaagaaaacctgtcacagtggaaactggaaaagactgattaattattttttccttcccccaaggtagactgaggtacagcagttcatgccgccttttgaagatggcaaaattgcgct

SEQ ID NO: 163729 - DNA, 534 bp, Homo sapiens
cctgaaagttttccagaaaggagtaataaaattgtgttcacgttttagaaccattgctctggcagaaccagaatgaatggatgaagatgaggggattggaagcaaggggagaaatttagagtttcagtgccagattgacatcttcaaacaatagtagtgggaatagagggaagggcaagcacccaagagatattaggtaaagcaaatcaacgagcagacctcagtgagtgatgggacatgagaatcactgggacagtgggagtcaggaaaactccttgggttctcttttggacaattgggtagatgagggtgccatttactcaaaaggtcaatatagatattttgtttttggttttgagttggagaagataawggatttattttttatatcctaaatctgagctctctatgaagtaccttgatgaagatatccaatagtaccatgaaaaggttggcattaaacagtcattgaaaattagatatgcattccccaagggagaatctagagaagaagagggaatacatatacataaa

SEQ ID NO: 163730 - DNA, 609 bp, Homo sapiens
tgacccaaacccacattttcagacctctccttcagtcccttttcactgtcctggcctttctggggcttacctcattaaaaacaatatcccttatcctttccaccaggatactgccattgctgaaaattataactcatatgtaaaaacccaaaatataatgagaatcttttgttgtagtttttctcgacatwaattactatgactgtcttacatgcttcttatttctgctcctcattcagccatcatttatgagtgcggagttactagaatgttatcctttaaagactttgatgtaaatatttgtcagaatcagtacagtaaaatctgttactcatgtttcccaagtttagttcctggagttacctcaatttttcatctcttaatggctttatttttctcatcaagggatagttttgaagacaagtataagaactgatagctatcaataaaatctttcatttgtttttcttctccatggtttgcatttattatagcaaccacacagataatgaactgcttctctcaaattcagtgagtctatggacaattgattattgtggtccacaggtgattataaaaagcctttataagatctactaataattctca

SEQ ID NO: 163731 - DNA, 609 bp, Homo sapiens
tgacccaaacccacattttcagacctctccttcagtcccttttcactgtcctggcctttctggggcttacctcattaaaaacaatatcccttatcctttccaccaggatactgccattgctgaaaattataactcatatgtaaaaacccaaaatataatgagaatcttttgttgtagtttttctcgacataaattactatgactgtcttacatgcttcttatttctgctcctcattcagccatcatttatgagtgcggagttactagaatgttatcctttaaagactttgatgtaaatatttgtcaraatcagtacagtaaaatctgttactcatgtttcccaagtttagttcctggagttacctcaatttttcatctcttaatggctttatttttctcatcaagggatagttttgaagacaagtataagaactgatagctatcaataaaatctttcatttgtttttcttctccatggtttgcatttattatagcaaccacacagataatgaactgcttctctcaaattcagtgagtctatggacaattgattattgtggtccacaggtgattataaaaagcctttataagatctactaataattctca

SEQ ID NO: 163732 - DNA, 609 bp, Homo sapiens
tgacccaaacccacattttcagacctctccttcagtcccttttcactgtcctggcctttctggggcttacctcattaaaaacaatatcccttatcctttccaccaggatactgccattgctgaaaattataactcatatgtaaaaacccaaaatataatgagaatcttttgttgtagtttttctcgacataaattactatgactgtcttacatgcttcttatttctgctcctcattcagccatcatttatgagtgcggagttactagaatgttatcctttaaagactttgatgtaaatatttgtcagaatcagtacagtaaaatctgttactcatgtttcccaagtttagttcctggagttacctcaatttttcatctcttaatggctttatttttctcatcaagggatagttttgaagacaagtataagaactgatagctatcaataaaatctttcatttgtttttcttctccatggtttgcatttrttatagcaaccacacagataatgaactgcttctctcaaattcagtgagtctatggacaattgattattgtggtccacaggtgattataaaaagcctttataagatctactaataattctca

SEQ ID NO: 163733 - DNA, 478 bp, Homo sapiens
aaaaaaaaatggtttcttaactctctggaaaatatgagcaggtgtaaagacagttatgtaaccaaggggagccagagcatgaggaaaagagagaagagatcagatgaagtaaatacaacttatgttttctagatattaagaagaacagaaataaaaacatccctattacctatttattttagttaagaaaattaaacatacaaggcagagatacgaaatggatacataatatgttgggccctgtgcaaaatgaaagcatggatcccctcgttccaaaaggaggaaagaaaaagtacagttaaaagtaataaaatatgaactatattggtttaagatatttgatagggyttggctgtatgtctccactcaaatcttactttgattctaataatccccatgtatcaagggtgggaccacgtgccggtcattggatcacggaggtggtttcccccatgctgttctcgcgatagtgagtgag

SEQ ID NO: 163734 - DNA, 550 bp, Homo sapiens
ctacaggcgtgaaccaccgcacctggccaaaactttgtattttttaaacagcttgattgagagacagtttacctaccataaagtccaccagcttaaagtacacaatttagtgggttttagcacatttacagaattatgcaaccatcatcataacctaattttagaatataccacttaaatgaaacctggtgtttattagcactcactacccattctctctccctacaccctcaggctggccccagggtcaatcaytaatctacattctatcgccacagttgtgtctcttctggatattttgtgtaggtggaagcacaccatgtgtgatcttttgtgaatggcttctttcacttagaatatttttgaggtttatccatattgtagcatatatcagtacttcattgctttttgttactgaatagtgtttcatcacattttggttatcaatttaccagttaatgggcattggattgcttccaacttttgtctacgattaataaagctgctatgaacattagacaaaatgcttttcaaatttaaggtacttttt

SEQ ID NO: 163735 - DNA, 578 bp, Homo sapiens
agtagtgcaccatctttggggaaaaaaatccataaacataagtgacaagactatttgttygctttatttaaactttggctcttccttgaagaaaataatgttctgggaaggtctttgtgcagaggcaacacagtttccttactgtctccccaccgagggatggaactgccattctcccagcctcctattataagtctaggccccgcccacttcattctcatacaaaattctttgtctcctctttgtccttgtcttccagtgctagtaagccccatagctacatattctattgtttactgacttatttccccattcatctccattcattaaagactttggtgactggtggacacacttttctctttcatccaaagtcttgctttcatactgctatcaacaatatttatacagattataattctaaccttctatagcagtttctctaagtgtgagttgtctactacctgtatccaaatcatctgggttaagggggcaaattcatgaataccataccagacctcttaaatcagaatccctagaagtaaaatcagcaagttctgcatcacaagctctccaaa

SEQ ID NO: 163736 - DNA, 618 bp, Homo sapiens
tgggttcagcgtttagtttaatgaaagctttcctgaatacgtaaatgccaagggaagacactgggtaccacagaacttctcattgttgttgtaggattttaagaattcctgggaggctattatgcattttccaggcaaatcctatgagcatagcattgtgaccatatccygctttttgacttcaaattctcaattctaggacacaaaatgttttttttttcaagttctttctcaatggtaacttaaaggaatacagtcttagttaatactactcctttctgttgcctggcattgaatgaccagattgaaataattttcctattggacagaatagtgactctgttactgtatttggatcctgctttttatgaggctaataaatgcagaaacatagaaagaactctgcaattaagtttcacctctctattaacaaatcaaagagcctgaacaagacaccactttctggtactcatacaattctctctaacactttgtgaacataattgtaatgagagaagaaaggacgatgtcttaggaattcatggggactctattttgaaaagagaagatggggtgatgtaaatacttcagggaaatatcaaatatgcctgaagtgtg

SEQ ID NO: 163737 - DNA, 394 bp, Homo sapiens
gaattcctgggaggctattatgcattttccaggcaaatcctatgagcatagcattgtgaccatatcccgctttttgacttcaaattctcaattctaggacacaaaatgttttttttttcaagttctttctcaatggtaacttaaaggaatacagtcttagttaatactactcctttctgttgcctggcattgaatgaccagattgaaataattttcctattggacagaatagtgactctgttactgtatttggatcctgctttttatgaggctwataaatgcagaaacatagaaagaactctgcaattaagtttcacctctctattaacaaatcaaagagcctgaacaagacaccactttctggtactcatacaattctctctaacactttgtg

SEQ ID NO: 163738 - DNA, 618 bp, Homo sapiens
tgggttcagcgtttagtttaatgaaagctttcctgaatacgtaaatgccaagggaagacactgggtaccacagaacttctcattgttgttgtaggattttaagaattcctgggaggctattatgcattttccaggcaaatcctatgagcatagcattgtgaccatatcccgctttttgacttcaaattctcaattctaggacacaaaatgttttttttttcaagttctttctcaatggtaacttaaaggaatacagtcttagttaatactactcctttctgttgcctggcattgaatgaccagattgaaataattttcctattggacagaatagtgactctgttactgtatttggatcctgctttttatgaggctaataaatgcagaaacatagaaagaactctgcaattaagtttcacctctctattaacaaatcaaagagcytgaacaagacaccactttctggtactcatacaattctctctaacactttgtgaacataattgtaatgagagaagaaaggacgatgtcttaggaattcatggggactctattttgaaaagagaagatggggtgatgtaaatacttcagggaaatatcaaatatgcctgaagtgtg

SEQ ID NO: 163739 - DNA, 523 bp, Homo sapiens
ttttggtagtaagtaaagaatcatctacttaattgacacataactataatattaaatttgtttttagccaattggcactgatacaataggcattgataacttcttatagaaacacaaaaagtcctttacaaaatatcagtgtacgtcctatgataaaatataaaataacatattaatmaaatgtttgagaatgtttatgtgtttttttaatggcagtaatttaaccttagtaatttaatatactaatctttattgtgaagccctcagagttcctccaacttgttttacacagtgcacacttctttacagacctttacgaggtcagttttctgcggaagacagtttagaataatttgctccaggcagcattttctgatgtaaataatctcatccttccatcctgttactgacaaatgaattcgaccgccttttctcaaagactccggagttttgccatcttgatttcgtctcatgatgtataatcaagttgaaactaatttttaatcacttctttgttctagaa

SEQ ID NO: 163740 - DNA, 548 bp, Homo sapiens
tcaggcataattcgataacaaaatatttgcagattttgtgaagttgatggctttaagtagatataaaatttgattggcttaggattgtaaactatggttaaattataactccacttgtctagctgtgctcatagtctctcctctctccttttttcatcataatttctcagtgaaaatactcacttattaaatatactgatggaaaatacaaccactcatcatagtggtgccctttttttctagatgatcataattaatcaattacaaatttatgagaaagaaacacctggcacacttccataaacaaatagatttcctgtggttttaagaacagttgagggtattacaaagggtcagggygatctgtgagtaaagctcttttcacagtttgacttcccccacatccctgtttctcataaatatgcacccttacacccaacatacatgtatgtatttacttactcagcaggcacatgttgcaaaggctatggagaaacaaagaatgtaaaggagaaagagaaaaattgaacttaaaaacatatgcatat

SEQ ID NO: 163741 - DNA, 409 bp, Homo sapiens
agaatacattgcatggcacctacatttacctagacattgaaataaaccaaaataataagtaggagttgtccagaatcaaaaatgtctggcagcaaggggagtatggaaacattttctaatcagaggaagcatcttatagaaataacaggaaaagagactrtaattccctatggaccaagactgctaagtagatgctcaatcatggagtatctgtggagccatattaaggagttggtccttgctatgacctgaatgtgtccacccgtatttgttttagaaacttaatcaccaatgttatcgtattaagacatggggcctggaagaggtgcatgaatcatgagagcagagccctcatggttgggagtagcagccccttataaaaggggttgggaaagtggctttatcccct

SEQ ID NO: 163742 - DNA, 465 bp, Homo sapiens
ttgtactttgggacctctttaaagtattcttatttgtggtttgtttctacggggaaatgagagccagaaattcctattctgtttgctgatgtcattcccacatatctttttttctttatcttctctatccttggtgatatgggccttgatacattgtaaaactctctattactgacattacagatcttccattactaagattaaagtatttccattactttcatctcaacaggaaacttaaagaaagacaattttgagtttggcatggtatggtatarcaagtgtactgtattttaattgtttgtattctgggagtcatcaggatctgaaaatcaatcagctggagcattcattgaactcttatagtactctcttgttaaggtgctaggaaagcttggtccaagttcatctgtaagcaggtcttcctaaagtatagtggtatgctaatagctcatctgataatat

SEQ ID NO: 163743 - DNA, 566 bp, Homo sapiens
tataagaaggaataagtacaagtagaaaagaacatggaaaaagttgaggacagctcaaaataaatagatggacagataagctgtcttgattttacatgtggtagtgagcctgcagaatggtccacaactatccttgcctcttgctgtccccagccytgtgtgatactctctcatgttgtgccaaaggtagtctgtgtgatcaatagactgtggcagaagagatgggttatcacttctgaaattgggttttataagatatttctgctttcatgtctctctctctctcttttctctctctctctctgtgtttttctcttttctctctctctgtttcacacactctctctctctctctcacacacacatacacacactgacaccaactaaagtctcttgccaatagccacaggagtgctctaatcaagcttcagaggccatagccctggtctacagcttcactgctatctcatgagagaggcttagctgaaccaaccaactaagctgctcccaaattctggatcttcagaaagtgagatgatatctggctttaagccgataaatttggg

SEQ ID NO: 163744 - DNA, 557 bp, Homo sapiens
tggtatgtgtgctgctgtagatctgcctcagatccattaaggaacccacctagcatgacctagggtagagtcctaagaatgattcagcagcagctagcacacctggagttataaattgtagtcataatgctccacacaattaggactctggttataccacagactcaccaaaaaaacaaaagccacccacgcataaattgacttttacatgacagtgatgtagaataaaaggttctaagagttaccacagaaatcagtatragccttaataaagtacataacatttactaatgtgcccaaagccctcaggatcgacctctatataaaagaccacttgcctcttcaattagtaataaccacaggttttctggtgaaagtagagtgagcataaatatgtcaagcacatactaatagactagctgatttagatagcagtatttctagaagaggattaaaacagtactaactgcttgtcatgtcctcattgtatattgacatatatctgtttgatttactaaattggactacctgaacactctatttaaaagtgaatatca

SEQ ID NO: 163745 - DNA, 589 bp, Homo sapiens
tgaaaaagaatctcacaaggtgaagagaatatgaatttgtaaaatttgcactatgatatgcatggaacaataacctatgacagtaaattgtatgtgctagagaagaggcacaaaaagttttaagaagggttaggtcctgcaacttgagaggagtaaggaaagtcttttgtgaaataaactgcatttgggttgaaacctgaaggacagcagagttgttctctccacctgttgccattccacctctattttcgtctttcaaaatccaacctatcccttcagggttcagtttggactctagactatctgtaaacccattcccaatgtcacacctgtacctgttcatattttcttttcactctttgagccaggagtcactttgcactccactatggcattcatcatactcatattacacctgtctgtrtgttttatggttgactctcctagatagctagttcttccccactttccatatccctgttagcacctagcctggcatgaatgataggtccccagtgggtctctctgacaaatgaattaatgactttatctgcctttgtcttcattacatccacaggcctgtagtgtc

SEQ ID NO: 163746 - DNA, 498 bp, Homo sapiens
aacaatgtttttcaaactgaaggacaaatcattaaacaagagctcttaatctaggttctttagaccaccagataatctgaggakagagtacagtatatctatgagcttaggtgggtaaaacaatcacatctttatttttgttaataccaataataccacagtagtattagtagtacttatgactattaccagcggaaattatagatattttcatggcaccttaggttatgcaggaatcttgaaatattatttatccatattactactttaggattatggtagcttatttcaaattttaatttaaatgctcatatattgtggtggagccaagatggccaaataggaacagctccagtctacagctcccagtgtgagcgacacagaagatgggtgatttctgcatttccatctaaggtaccgggttcatctcactagggagtgccagacagtgggtgcaggaaagtgggtttagtgcatcgtgcgtgagctgaagcaggg

SEQ ID NO: 163747 - DNA, 553 bp, Homo sapiens
tattcacacaaacatgcatattcatacacacaggctttcactctgataatggcatactaggtgatttgcactaacccttttgctgaagatgactaaaaaactcgattaaaagtcagaaaagatttacttaacatccaagacctaagatattagggaatttcttgctaagagaatagaacaaaaagagatgaactagagccctcctgttcagggaataattgccttygtagaaaaagcacctgagatgggtggagttctttaaagtgaaaaggtgtgaggttcaaggtcctgaagtcaccagaaacagagaacctgaagaatatcccctcttcctggatgtcattcttactctggccaaagtgcctattcttgtggaaatggcttgaaggcaagctgacctcttgggtaaatttcaggagctggaaggacaagtcagaatgtaatgcgtgacaaaggtaaaaacctaaggtaatgtatactctaatgtggtagggacgctcaggagttgtactcttaaactgaggtattttggcagatcatctaggtagctcag

SEQ ID NO: 163748 - DNA, 586 bp, Homo sapiens
tcattccccatttaattctcataatagtaagcaagtccattaacatggactaaggttataaaagcttaacattataatagaaggcagatccrtcgaagctcagcaagatataaaatgtctttttttatggcatgtaaaggcacttttgtcttgcatttctatgattgtattaatacaatcttacattaaggaaacattttaaaataaagagtataaaattaaaaaaaatacaatgcagaaaatccagcaggaagtaggaagcacttgcattttctccaaccaagccctatttatgtctaagaaatgtattaatttccttaaagacaaaatggcttgaatgtcagcatgtttacatttagactttatgttccttctttttatctggcacagtggttctgaagctgaattacatgagaatgctacccaggagtgcacacatgcatgctgctgatgtatatatggataattacagggattttcaaagtcagaaaacacttaggacctctattccatgaaatctgtacatcagcatggatgacaggatgaggaggaccataatgaactggctatgagatcattgaggttg

SEQ ID NO: 163749 - DNA, 586 bp, Homo sapiens
tcattccccatttaattctcataatagtaagcaagtccattaacatggactaaggttataaaagcttaacattataatagaaggcagatccatcgaagctcagcaagatataaaatgtctttttttatggcatgtaaaggcacttttgtcttgcatttctatgattgtattaatacaatcttacattaaggaaacattttaaaataaagagtataaaattaaaaaaaatacaatgcagaaaatccagcaggaagtaggaagcacttgcattttctccaaccaagccctatttatgtctragaaatgtattaatttccttaaagacaaaatggcttgaatgtcagcatgtttacatttagactttatgttccttctttttatctggcacagtggttctgaagctgaattacatgagaatgctacccaggagtgcacacatgcatgctgctgatgtatatatggataattacagggattttcaaagtcagaaaacacttaggacctctattccatgaaatctgtacatcagcatggatgacaggatgaggaggaccataatgaactggctatgagatcattgaggttg

SEQ ID NO: 163750 - DNA, 586 bp, Homo sapiens
tcattccccatttaattctcataatagtaagcaagtccattaacatggactaaggttataaaagcttaacattataatagaaggcagatccatcgaagctcagcaagatataaaatgtctttttttatggcatgtaaaggcacttttgtcttgcatttctatgattgtattaatacaatcttacattaaggaaacattttaaaataaagagtataaaattaaaaaaaatacaatgcagaaaatccagcaggaagtaggaagcacttgcattttctccaaccaagccctatttatgtctaagaaatgtattaatttccttaaagacaaaatggcttgaatgtcagcatgtttacatttagactttatgttccttctttttatctggcacagtggttctgaagctgaattacatgagaatgctacccaggagtgcacacatgcatgctgctratgtatatatggataattacagggattttcaaagtcagaaaacacttaggacctctattccatgaaatctgtacatcagcatggatgacaggatgaggaggaccataatgaactggctatgagatcattgaggttg

SEQ ID NO: 163751 - DNA, 546 bp, Homo sapiens
attttgctggaacacatccttcagtaacttctaagacagggtgcactgaaaatcaacagatatctacctcttacctcattagccaccccatcttcagccttagtataggtgctgtcccaggctgctgagttcaggctgcagggcatggggacaggacaatacaggcttccattcccatagggaaaccctaaacccacgaataatgctgagttttccaaagctatcattgcagtgctattctttaccctgctcatggattatatccatttctgtgggctgattctggtatctaacctccccatatggtgatgtakaataataggaagagctacgtaggaaggaagacctgaatttatatattgatctatccattttcttgatatattacttactttttctaagtttcaacatttttatctataaagtgaggatggtgcatagcttctctggagtgtcacgagaatgacctatatttggtacttactaaaggacattgaaaggacctttggaacacaagcttgcccccaaatattcaaaaacttttac

SEQ ID NO: 163752 - DNA, 539 bp, Homo sapiens
ctctcctgtacactgctttgaaaatttcagccatctcagtagcctcaaattcctgtatttttcttctcagctagtgacaccactcttgggctttctttggctagtcaggarcatgcattcacacagaaaaccagtctaactctgtggctaacctattttgtttcctttctctcagtgactgtagtcctatgacacctattatacaatgtctggaaacagtttctatattttccagttttgcaggtatttgtagtggcagaccaggtccagtagcagttactttgtgatggtagaaagtgagtcataaaactgtactctacatagatattggtaacagagcagggcaaaagccccaacatataatatgcatatatcatagtatccacaaaaggaggataaaattggaactattatctaaaaatattccccaaattatgcaaattcattttgcaaacaagttaacatttctaagaaatgtgtagttataggcatcatgaatatgtaaaaaatgaagttgcatattaatgtgtcatttaagg

SEQ ID NO: 163753 - DNA, 585 bp, Homo sapiens
caagcttgtagacagcagacagcctattgtgggaccttgtgatcatgtaagttaatacttaataaactccccgttttatacatatatataatattatattatatacagtttaagaccattttgaatacctgatgaaaataatggactgcccattaagattcatgtgtataaatatatgtgcaatttgaagatgctcctatgccttcccttactcaaagtttaaggaacttcattaagaaaaatgaacagactacttaattttcaggaaatactttccaattaatgtattctatattatatatatatatatccaatactttccaatattatatatattataatatatttatattataatatatattatatattatataattatattatatatttatattataatatataatatatatwataatatataatataatataatataatatatattattaattataattaattatatatatattatattaattatataattaattatataattataatatatatatttaattctctttctctagggaaccctgactaatacagtgaccatgactcttctttatcgttacc

SEQ ID NO: 163754 - DNA, 580 bp, Homo sapiens
atggtgtgagatgaaggttcagctttgttcttttgtatactatacagaatatctagtttccccagcactatttgaaagaaaaaagattgctctttctccattgaattgttttgacatcccttgtcaaacatcaattgactgtaagtgtgagggattatctttggagtctcaattctattatattgatctatatgtttatctttatctcagtggcatgctgttgtgattaccatagcttcatggcaagttttgaaatcagaaaatgtgagtccttcctatggtttggatatgctttatttttcctcatcaaaactcatgttgaattttgacctccaatgtacccatgtcaggaggtggagcctagtgggaggtgtttggatcataggagcagatcttttatgaataayttgatggtgttctcttagtagtgagtgagttttcgttccaatgagactgttaattctcatggaaatgaattagttctcaggagcatgggttgttacaatggcaggacattcctttagttttatttctttgcatgtgtccacttcccctttgactttctttgagaagttttgat

SEQ ID NO: 163755 - DNA, 560 bp, Homo sapiens
gccaaatctgctgagagcacagtggtgtttatgccagagaagaccaagggaaataactaaaaggttccctgaaacccagctctaatctggggaacagatgaatgactgcaaaataatgatgcatgcattgatgctcttgagaggcatcctctaagctggggccaggccgggcattatccatctgttcaacctcccaggagaarctctggacctcactggggacagcatagggcaacacctgggaaatgtgaatctgtggttacagacagggagaggaactgaagttgtcttaaggaaagaataatacagaaaaaaaaaaaaaaggccaaatgcttggtgcaagaccagccctcagcaattataaggtttttgtctggctctgcctctgagtggtggcattttgacctgaataaatctgggaaaatttgtaaaccaacttgtgtcatccaagtgcctggagcagtacaaatggaggcacacaggcaagtctcgatgtgaactgaaaatataatcttacatctggtttggccagcttagctgttatgggctggaaatttgtg

SEQ ID NO: 163756 - DNA, 560 bp, Homo sapiens
gccaaatctgctgagagcacagtggtgtttatgccagagaagaccaagggaaataactaaaaggttccctgaaacccagctctaatctggggaacagatgaatgactgcaaaataatgatgcatgcattgatgctcttgagaggcatcctctaagctggggccaggccgggcattatccatctgttcaacctcccaggagaagctctggacctcactggggacagcatagggcaacacctgggaaatgtgaatctgtggttacagacagggagaggaactgaagttgtcttaaggaaagaataatacagaaaaaaaaaaaaaaggccaaatgcttggtgcaagaccagccctcagcaattataaggtttttgtctggctctgcytctgagtggtggcattttgacctgaataaatctgggaaaatttgtaaaccaacttgtgtcatccaagtgcctggagcagtacaaatggaggcacacaggcaagtctcgatgtgaactgaaaatataatcttacatctggtttggccagcttagctgttatgggctggaaatttgtg

SEQ ID NO: 163757 - DNA, 560 bp, Homo sapiens
gccaaatctgctgagagcacagtggtgtttatgccagagaagaccaagggaaataactaaaaggttccctgaaacccagctctaatctggggaacagatgaatgactgcaaaataatgatgcatgcattgatgctcttgagaggcatcctctaagctggggccaggccgggcattatccatctgttcaacctcccaggagaagctctggacctcactggggacagcatagggcaacacctgggaaatgtgaatctgtggttacagacagggagaggaactgaagttgtcttaaggaaagaataatacagaaaaaaaaaaaaaaggccaaatgcttggtgcaagaccagccctcagcaattataaggtttttgtctggctctgcctctgagtggtggcattttgacctgaataaatctgggaaaatttrtaaaccaacttgtgtcatccaagtgcctggagcagtacaaatggaggcacacaggcaagtctcgatgtgaactgaaaatataatcttacatctggtttggccagcttagctgttatgggctggaaatttgtg

SEQ ID NO: 163758 - DNA, 560 bp, Homo sapiens
gccaaatctgctgagagcacagtggtgtttatgccagagaagaccaagggaaataactaaaaggttccctgaaacccagctctaatctggggaacagatgaatgactgcaaaataatgatgcatgcattgatgctcttgagaggcatcctctaagctggggccaggccgggcattatccatctgttcaacctcccaggagaagctctggacctcactggggacagcatagggcaacacctgggaaatgtgaatctgtggttacagacagggagaggaactgaagttgtcttaaggaaagaataatacagaaaaaaaaaaaaaaggccaaatgcttggtgcaagaccagccctcagcaattataaggtttttgtctggctctgcctctgagtggtggcattttgacctgaataaatctgggaaaatttgtaaaccaacttgtgtcatccaagtrcctggagcagtacaaatggaggcacacaggcaagtctcgatgtgaactgaaaatataatcttacatctggtttggccagcttagctgttatgggctggaaatttgtg

SEQ ID NO: 163759 - DNA, 563 bp, Homo sapiens
aggcaggcctgattctgaatttagagcaacatttttcatgaacttctagtcattttgactcaacttstgacacatacattttttagcccatactcatagggataggtcatttttaaagtatctgaagcttaattcagacagccttttgaaagaaaagaaatataaaatgaacactaaaaaagtccagtagaaatgtggattttagttttggaaaagaaatcacaacaaacttcactttaaaaaatctgatagaaactatatatctaataatttcaaggaataacaatatttgtgttaactgccagacatgtctttattatgtttcttatttgtgtatactttgacttttctatcatatgatagcctttttttattgcctgaatagaaaataattgttaattaaggttgatttatttatatcaattacagcttgttatgtataatcagatgtaaatgtgtgttttttatttgtatcaattacagcttgttatgtataatcacatgtaaatatttggtatttttgtcaaattttggaacactcctatcaactttcattcatgtat

SEQ ID NO: 163760 - DNA, 563 bp, Homo sapiens
aggcaggcctgattctgaatttagagcaacatttttcatgaacttctagtcattttgactcaacttctgacacatacattttttagcccatactcatagggataggtyatttttaaagtatctgaagcttaattcagacagccttttgaaagaaaagaaatataaaatgaacactaaaaaagtccagtagaaatgtggattttagttttggaaaagaaatcacaacaaacttcactttaaaaaatctgatagaaactatatatctaataatttcaaggaataacaatatttgtgttaactgccagacatgtctttattatgtttcttatttgtgtatactttgacttttctatcatatgatagcctttttttattgcctgaatagaaaataattgttaattaaggttgatttatttatatcaattacagcttgttatgtataatcagatgtaaatgtgtgttttttatttgtatcaattacagcttgttatgtataatcacatgtaaatatttggtatttttgtcaaattttggaacactcctatcaactttcattcatgtat

SEQ ID NO: 163761 - DNA, 563 bp, Homo sapiens
aggcaggcctgattctgaatttagagcaacatttttcatgaacttctagtcattttgactcaacttctgacacatacattttttagcccatactcatagggataggtcatttttaaagtatctgaagcttaattcagacagccttttgaaagaaaagaaatataaaatgaacactaaaaaagtccagtagaaatgtggattttagttttggaaaagaaatcacaacaaacttcactttwaaaaatctgatagaaactatatatctaataatttcaaggaataacaatatttgtgttaactgccagacatgtctttattatgtttcttatttgtgtatactttgacttttctatcatatgatagcctttttttattgcctgaatagaaaataattgttaattaaggttgatttatttatatcaattacagcttgttatgtataatcagatgtaaatgtgtgttttttatttgtatcaattacagcttgttatgtataatcacatgtaaatatttggtatttttgtcaaattttggaacactcctatcaactttcattcatgtat

SEQ ID NO: 163762 - DNA, 563 bp, Homo sapiens
aggcaggcctgattctgaatttagagcaacatttttcatgaacttctagtcattttgactcaacttctgacacatacattttttagcccatactcatagggataggtcatttttaaagtatctgaagcttaattcagacagccttttgaaagaaaagaaatataaaatgaacactaaaaaagtccagtagaaatgtggattttagttttggaaaagaaatcacaacaaacttcactttaaaaaatctgatagaaactatatatctaataatttcaaggaataacaatatttgtgttaactgccagacatgtctttattatgtttcttatttgtgtatactttgacttttctatcatatgatagcctttttttattgcctgaatagaaaataattgttaattaaggttgatttatttatatcaattacagcttgttatgtataatcagatgtaaatrtgtgttttttatttgtatcaattacagcttgttatgtataatcacatgtaaatatttggtatttttgtcaaattttggaacactcctatcaactttcattcatgtat

SEQ ID NO: 163763 - DNA, 597 bp, Homo sapiens
gatgtaaataagtacatataaatgaaggacattattattagtgaagtgtaaatttaaaccttactaaggtatcactacatacacactataatggccaaattataaacctgagaggactatacaatgaagagaatttggagcaaggataactcttatacaaagctagtgataatacaaatggaatagccttattgaaaaattgtcagcaatttcttataaagacaaaytttttttaatataacctagcaatccttcctagatatgtactcaaagagaaatgagaacatctgtccaagatttgtatgcaaaatttgtgtagcacacagattcataatagcaaaagaataaaaatagcccaaagtctatcaactagtgaatgaataaacaagttgtggtatattcatctaatggaatacagtctagcaataaaaaggaataaactactgatacacccaacagaaatgaatctcaagagcattaaataagtaaaataagtccagcatacccccaaaaacacatggtttgtgactgcatttatatgaaattctggaaaaggcacattttagtaataggaagaagatttggcattacctgggt

SEQ ID NO: 163764 - DNA, 552 bp, Homo sapiens
accgggtctatcccatgacatgtggggattatgggagctacaagtcaagatgagattgggtggggacttagtcaaaccatataaaaaagataccgttaataaaatgaaaaagtcaccaaaattctgggagaaaatatttgaaaaataaacctaataaataatttgtatctggaatatataaaacacacttaaaattaaataatgcagcacagaatatgacacaatatttgaacatgcaccgtatcaaggaagaattacagatgtaaataagtacatataaatgaaggacattattattagtgaagtgtaaatttaaaccttactaaggtatcactacatacacactataatggccaaaattataaacactgagaggactatacaatgaagagaatttggagcaaggataactcttatacaaagctagtgataatacaaaatgraatagccttattgaaaaattgtcagcaatttcttataaagacaaattttttttaatataacctagcaatccttcctagatatgtactcaaagagaaatgagaacatctg

SEQ ID NO: 163765 - DNA, 584 bp, Homo sapiens
ttcattcctatccacagaatccaaactagcaactatccagaagtatgattaccaatccgaatattcttaaatcaggagcaaggttgtgatactctcttgaacctcaaagctgaaaaaaaaacacaatcagatggtaatggagatgactctctttgattgcagtgcccttcctccaagcaccacaagtggggtattttactgagcttatagttcctacagtgaaaaaagtgagttagaggtggayatccagtttccccaccattctgagactctatgcaggaggtttgcttttattttatctcacaaaaataattgcaagcattggcagggctaaactacctgaggtcagctagagataaagaataggggtagagcttacaataatcagcatgtggaactctgtggttgttctccttttctgccagtaaacatgccacagcatagaagacttgtcagcatcaccatgctgcaggaagcaaagcccacaggtctcctgggctcaagcctctagtcagttttcccacatagcttaggcatcctccttgggtcttccccagaaaattaaaggttgggaatgaaaccag

SEQ ID NO: 163766 - DNA, 588 bp, Homo sapiens
cctactcacatgcatccatgggcttagggctgtccatccagcctgtcacagccatggccaacaccagcctggatcacttggacccagaggtttgtcccaccactgctactactgtcacccataccacacccactgccactcatctgcctggaccactgttaccactactactggcacttgaacaagccacctagaggcccaaggataagcaygcttgggtcaccactgcaaccactggggtctgaggataagctcacgtgttgtccttgtacccagcaaaacttcattacaacctccaccaacaactgagaaaatcacagactgccctgatgcagtttacagccaaataaataataaagaataaactattgcatgcacccagaatcaaaaccacagtcctctgcccagccaacaccatagctacatcttcagaaaaaagtcctctcctatgaaagcaaattctaaaaattaaaagagatttctgttacaccagatgcatagttgtaacatatggacacaagaaacactaaaaagcaaggaaatatggcacctccagaggaacataataattctccagcaacagatacc

SEQ ID NO: 163767 - DNA, 433 bp, Homo sapiens
tttaagtcacaggggattgtgactgaaaggggtaagtggcttcttttttcagaaatttaggatgcagagaactaggatttgtagaaggtgactccaggaatctaatgatcccaaatagcaattctctttcctattcttaagacccctgtggactgagcaactgtgctcaagagtggcctgctcttcttcacataactgccattgcaatyaaaaaagttcttcttgacatctaacctaaatccttttgtagcctccaacgtgagctcttttccatcttacaaattctcttagctgcctttaggagggagggagagagggagtgagaatacgagagaagtggaagaaagggaaagacggaagaaaagtgtgttaccctttaaaccaggatttctacttttgggaatttatccaaaagaaatgcacaaaaatgctt

SEQ ID NO: 163768 - DNA, 619 bp, Homo sapiens
ggaggttgtagtgagccgagattgcgccactgcactccagcctgggcaacagagcaagtctccatctcaaacaaaaaaacaaaaaacaaaaaacaaaaataactccctgcaagtttaaagaggattctgaaataaagagcaagactgtttgttgttctgtagaagaagaaataaagaagaaacaattagatgttaatgagcgaaggttggtcttgctacttggaagaatttttaagttctcatcctattcttctactttctttcctaataccatttattagtcatagcattgttaagtttttttgggtatttktaagctgaaatattgttccacaagctttgggagagaactgacattggctctgaaggatgtgttcacatgtggttagttaggaagggcaatgggaggagagatatttctttggggtcttctccagccacttaggaaagtgacacatgactagtcaatcttgaaatccaatgaccaagagtcactggataaatttggtaaagcttatccatctcagaagtatttaaagactctgcaagataattctctcacttttgagagagataagccattacatctaagagtgctcacagatagaatcttttgagg

SEQ ID NO: 163769 - DNA, 611 bp, Homo sapiens
cacacaatagtatgtattgaaaattattgatagtctttaatcttttttttacaatttctatctatttatggtaggtgatactggctttycgtttatggtggggatatgaagttttctttaaaaaatcagtggctctccatcttggcttcacattgaaatcattttaggagctttaaaaaataatgatacctggatttcatcttaggcattaggattttcaaaagctccccaaaggtgtaaaactgcagttttaaagtgcgtcagtttagtgctcctcaaactttaatatgaattacctggagatcttattaaaattcagattctggttcagcaggctggggtgggcacagtgattctacatttcttgcaagctcccaggtgatgctgatgctgctgataggtgggccatgatttgaggagcaaggccctcgtggaacttgcttctgtactttaaatattttcataaagtaaacaatgctgtctcaatttattttttatgggaggattgcaaatcttcttaaaatgggtattagtcttcttgttcaaaagtcatggccaaatagtttcagcaccttggacagaagcacaggcaattattttaaagggctagt

SEQ ID NO: 163770 - DNA, 554 bp, Homo sapiens
tggcttcacattgaaatcattttaggagctttaaaaaataatgatacctggatttcatcttaggcattaggattttcaaaagctccccaaaggtgtaaaactgcagttttaaagtgcrtcagtttagtgctcctcaaactttaatatgaattacctggagatcttattaaaattcagattctggttcagcaggctggggtgggcacagtgattctacatttcttgcaagctcccaggtgatgctgatgctgctgataggtgggccatgatttgaggagcaaggccctcgtggaacttgcttctgtactttaaatattttcataaagtaaacaatgctgtctcaatttattttttatgggaggattgcaaatcttcttaaaatgggtattagtcttcttgttcaaaagtcatggccaaatagtttcagcaccttggacagaagcacaggcaattattttaaagggctagtgcctaagctggagaaggaaaaagagttaaaaatctcttgtgtattaaagcatttgtaaaataatgatgttgaaaatattattgaa

SEQ ID NO: 163771 - DNA, 479 bp, Homo sapiens
tctttggtgatctgtacacagtaaagctagccattcaggtggaattacatccaactagtcatctcygtcatactaaaacagtaaacaatgcttgaagaagtcagatgcctggcatcaaatctaagatccaccatttactggctgtggtcattaggcaagatgcttaacgtctttgtaccttattatcctattttgtaaatgggggaattataataatacctaatctctaggttactggatggactaaatgaaataatgtgtgaaatttttagtaacatagctagaatattacaagctcccaataagtctattgtattagtccatcctcacactgctataaacaactgggcaagaatgggtaattgataaacaaaaggggtttaattgactcacaacaggtctgcatggctggggaggcctcaggaaacttacaatcatgacagaaggagaagcagacatcttcacaatgcgataggagg

SEQ ID NO: 163772 - DNA, 494 bp, Homo sapiens
caggtggaattacatccaactagtcatctccgtcatactaaaacagtaaacaatgcttgaagaagtcagatgcctggcatcaaatctaagatccaccatttactggctgtggtcattaggcaagatgcttaacgtctttgtaccttattatcctattttgtaaatgggggaattataataatacctaatctctaggttactggatggactaaatgaaataatgtgtgaaatttttagtaacatagctagaatattacaagctcccaataagtctattgtattagtccatcctcacactgctataaacaactggscaagaatgggtaattgataaacaaaaggggtttaattgactcacaacaggtctgcatggctggggaggcctcaggaaacttacaatcatgacagaaggagaagcagacatcttcacaatgcgataggagggagaagtgagagcacgggaaaaaactgccacgtataaaaacatcagatct

SEQ ID NO: 163773 - DNA, 489 bp, Homo sapiens
ttggtgatctgtacacagtaaagctagccattcaggtggaattacatccaactagtcatctccgtcatactaaaacagtaaacaatgcttgaagaagtcagatgcctggcatcaaatctaagatccaccatttactggctgtggtcattaggcaagatgcttaacgtctttgtaccttattatcctattttgtaaatgggggaattataataatacctaatctctaggttactggatggactaaatgaaataatgtgtgaaatttttagtaacatagctagaatattacaagctcccaataagtctattgtattagtccatcctcacactgctataaacaactgggcaagaatgggtaattgataaasaaaaggggtttaattgactcacaacaggtctgcatggctggggaggcctcaggaaacttacaatcatgacagaaggagaagcagacatcttcacaatgcgataggagggagaagtgagagc

SEQ ID NO: 163774 - DNA, 281 bp, Homo sapiens
aaggctggaagactcagccagtcaagcccttccatgctgctctgcctgcttatattctagctatgctgrcagctgattagatggtgcccacccagattgagggtgggtctgcttttcctagtccactgactcaaatattaatcttttttggcaacaccctcacagacacatccagaaacaatactttgtatccttcaatccaattaagttgacactcagtattaaccatcacagggggtgtctcaggggtcctggcgactgttccacagtgccactcccct

SEQ ID NO: 163775 - DNA, 573 bp, Homo sapiens
atatgcacaattaccaagaaatcacatccaatctaaatttaaataaatcacctattgccagataatttcaggagcagaattttaaaattttctcaaaaaatgtttagagccaaaaatccatttaatgtaggatacaggcaaatttgtagcatgtttcaaatgctttctggtgagacctccaaaagtgaatgtgtctagggtatataaaattcttaaaggggctttgtcatccttcttccccactcacccataaaatagatgagataaaagctatttctaagggtggctcttttgtgaagtatttgagctttacggtagatgagactattgtttagtaaatatttgttccctctcctattacatcattgatgttcagctaggctatgtgacttccttttccctgagagatggcatagtgtacttccctacccttcractgttgagttgagcttaactttctttggctaatgggatgtgagaggacataacccttatgaaaggcttgaaatgctctcgtgtgatgagtttgccttcttgtgcttttgccttctctatgagaaaaacatgacttag

SEQ ID NO: 163776 - DNA, 463 bp, Homo sapiens
ccgagaatagtgctaagcattcttgtaatttcatttaatcctcaaaacagcccaatgagagaagtattgttattccatctcacagctgargaaactgaggctcagagaaggtgagaaatttgcccatggtcacagattagcagtcaggggcacaggattcaaacccagtcagtttgacttcagagaccactgggcttaactgctaaactcaactgcccactttcttgcagatgggaaaaccggggctcagagaggtgaagtgttatacctgcgatcacacagcaaacatggtttagaaacagaatttaaatccacatccagttccaaagcaatgtattttacactcaatctcacaaagcaaaactaacatgatcgttacagaaactaagcaggagcgaaaactacaaaaatgctgtactggatcccagcccaaagccagcccaggcagcctccagcatagcta

SEQ ID NO: 163777 - DNA, 253 bp, Homo sapiens
gttgtctgctctcaaatcctgtttcctgataagatgttatcaatgacaatgcrtgcctgaaacttcattagcaattttaatttcaccccggtcctgtggtcctgtgatctcgccctgcctccatttaccttgtgatatcttattaccttgtgaagcatgtgatctatgtgacccaccccctattcgtacactccctccccttttgaaaatcactaataaaaacttgctggttttatggctcagggggcatcac

SEQ ID NO: 163778 - DNA, 253 bp, Homo sapiens
gttgtctgctctcaaatcctgtttcctgataagatgttatcaatgacaatgcgtgcctraaacttcattagcaattttaatttcaccccggtcctgtggtcctgtgatctcgccctgcctccatttaccttgtgatatcttattaccttgtgaagcatgtgatctatgtgacccaccccctattcgtacactccctccccttttgaaaatcactaataaaaacttgctggttttatggctcagggggcatcac

SEQ ID NO: 163779 - DNA, 253 bp, Homo sapiens
gttgtctgctctcaaatcctgtttcctgataagatgttatcaatgacaatgcgtgcctgaaacttcattagcaattttaatttcaccccggtcctgtggtcctgtgatctcgccctgcctccatttaccttgtgatatcttattaccttgtgaagcatgtgatctatgtgacccaccccctattcgtasactccctccccttttgaaaatcactaataaaaacttgctggttttatggctcagggggcatcac

SEQ ID NO: 163780 - DNA, 547 bp, Homo sapiens
gttctagtatttccttgttctgacagcatcacctccctatcaccagaggcttttcagaggactgctgagtcatcccgacctttggaaatgctcccgcctccgcctctctaggctccagctcacctcaaagaggctggcattttctcagagtgaagtggcacttgcatgagcagaggcagaagaaatgtagccagagaaaaccagtgtggaaatgccaatctgccttttttggaacctgacagcccaagcagggtacccayatgtggcttaaagttccagacccacttgtagattagctcatatgagccctctgggaagagaagaaagggaaaagtgatggtcatgccctgacatagcatcactgccatcagcatcctcaatcaccatgattgtcaccataccattattatcaccatcatcatcatcgtcatcttgtcaccaccattatgaccattccatcatcaccatcaccatcatgaccttttcatcatcatcaccatcatcatcattgtcatcatcaccatcccatcataatactcatcacatt

SEQ ID NO: 163781 - DNA, 401 bp, Homo sapiens
agctttggcaatgggcgttgacrtcgccagattgaaactagtggtggggaaaaggctgtttttctaaaaataccaaattaagaattctccagtttccaactacatgcaagagaatctccatacgcaggaagtcctagtcacaggcattttattgcagaaatgggtactttttgttttcctaacatgctcatctaaggctgtccttctaagaactgtgtgtaacagaaggcaaaacttgcaccacctccctccttttatctcttactctggacaggactttgatcctctttgcgcctcagtaccttcatatgtaaaataaggagtctggattcgaaaatctggtgtgcttcttgcttttataaataaagttttattggaagacatacccattcctttaagta

SEQ ID NO: 163782 - DNA, 644 bp, Homo sapiens
tttttattttattttttacatatagattctgtctttgtcaatataacctatttggtatgacattgttttcatattttctttagttcttgtatgtggtttcctttagtgttttggacatatgtaagatagtaggcataaaatctatgtctagaaagttctacatctgggcttcctcacagacaattttttttgacaattttctgttgactgtttttttggtttgtttattttctttttcttgggtataggtaatacattttgttctttgcatagctcattgtttttgaaactggacattttaaataaaatgtgtcaacttcagaaattagatcccccagggttcgttgtttatgtaatttttaaatgaattttctgaattaacactgtaaggtctgtattccttttcatgtgtgcccacttaagtctgtgttcagttagtttaatggtcagctaattattggacaggaattgtcttaaattcctgggaccaataagtctttcagtcattgataaaggtctctgtgtgcatgacagggcataacttkaatgctcaggcagctagtttataactcatctttgtcttcacatcttacttagggtcttaaaatcatcaaaaggtgagagcttagggctctctcgggtct

SEQ ID NO: 163783 - DNA, 594 bp, Homo sapiens
acagcttcattcttgaagtcagtgagaccaagaaccsaccagaaggaaccaattccggacacaggcctgtccaataagagtgtgctgaagggcatccccagaggcttcatgatggaaacagcagatgatgccaactgagatcatacatagtggccatgatcctccccatcaggagaaaaacaaagggcaagctaactctgagatccacaccaacacaaagattctacagaattgtctaagaaggatccagaagatgagaaaggactaatggacttaagagaagaatactttcatctgtccttcccacttgtattagatatagtgatgataacccttcagatcatagtggggcatataaaggtccagatagaaataaaattctccgagagggatgtttgcttgtcactagcccacagggcccagctgtctctctataactatgtttttaagcattctctgactgagctgttttataggaggccttcttccagaaagaacttgagtagcctatagtgatacataacattaatggtgggagccaagcctgaaaggaaaactaaaatggaaacctaaatggagcaggagtgagcctcc

SEQ ID NO: 163784 - DNA, 594 bp, Homo sapiens
acagcttcattcttgaagtcagtgagaccaagaaccgaccagaaggaaccaattccggacacaggcctgtccaataagagtgtgctgaagggcatccccagaggcttcatgatggaaacagcagatgatgccaactgagatcatacatagtggccatgatcctccccatcaggagaaaaacaaagggcaagctaactctgagatccacaccaacacaaagattctacagaattgtctaagaaggatccagaagatgagaaaggactaatggacttaagagaagaatactttcatctgtccttcccacttgtattagatatagtgatgataacccttcagatcatagtggggcatataaaggtccagatagaaataaaattctccgagagggmtgtttgcttgtcactagcccacagggcccagctgtctctctataactatgtttttaagcattctctgactgagctgttttataggaggccttcttccagaaagaacttgagtagcctatagtgatacataacattaatggtgggagccaagcctgaaaggaaaactaaaatggaaacctaaatggagcaggagtgagcctcc

SEQ ID NO: 163785 - DNA, 578 bp, Homo sapiens
aaagtgtgatgtttcaatacatatacacattctgtaatgatcaaatcagagtaactagcatatccatcaccacaaacatttttcatttctttgtagtgaagatattctttgttttttaaatcatattgttgttagttttcaacatgatgtaatgctccccaaaatgtatttagagaatttctgtttttccttagagtcagaggaatgattcataaaccattccaggaaaataaaagatagtgcaacattagaagagtttctagtaggagtcatcacattaataagtgaaagaaaaaaattatatgatcaccttartagatgaccagttggcaattgatccagtttgatatctgtttccaattttttatatcaatagcatagaaataaacctctttaatatggtaagaattatttgaaaccaataggaaatatcttacttaatggtgatagtttaaaaggatgattaattttgtatgatatccctcaagattttttttgaactcactttggtaatttatatttacctttaaaaccatctatttcaccaactgcttcaaggataactacacagaactagc

SEQ ID NO: 163786 - DNA, 578 bp, Homo sapiens
aatcttcttactcaaagtcaactgtgccatctaaggaaacacagtcactggagtgaaatccatcataaccacactgcttggaattatgcagggacagagaatcttggggtccaccttagaattctgcctgccaccatgggtttataaagagataacttaggtgaacttccgagcatgagacttggcacatggcagacattcattgacagtgtccatatatattttattgttttaattattagcattaatctcagtcattctcaattaggcctctgtcttttcattgtcaacactacttcctttgccttttgttttaacttacaaaagaaggcatttgaatccctgcgagcttcaaagatttgttgtttgcttcgtgtgtttggatagaataacctgatggaggtcatgtttgctgcaattgttggaaaacaattgttcctaggaaagcgtttttaaaatrttcactccctggaagatttaaatattttccaaatgaaaaaggtttgccctttgcaatttggatcccataactgggctcagaaaactctttccagtagtggtggagttaacaagagtag

SEQ ID NO: 163787 - DNA, 390 bp, Homo sapiens
ccccccatattgtttctgtcttcacccccaaggcaaggttctgcctgtggtagctgcatcccccagacatagtctgtcatagctgttctctgttttgacttttccctggagctgaaaagattggaaatgactgaaaacagtatctgctgattcataaagcagcaccaaaaagcagaaatatggcacattttaccagtgaatgcagaccctgggcctctgccagtgsagtagagggacagatacctcttctgagtctgccataacaaagcaccacaacctgagtgacttaaaacaacagaaatgtattctctcacagctctggagacaagaagtctgaaatcaaagtgtcagcagagccacgctccttctgaaggctcttgggaaaagtcc

SEQ ID NO: 163788 - DNA, 610 bp, Homo sapiens
aaaagaaagggggctttataacagaggcagaactcattatgttctaaaaaatacacgcatgtttcccatgttgaatagtgtcccgcagaaagtcatgtccagctggaacccaggaatgttaaactatttggaaacagggtctctgcagataacacttrgttaagacaaggtcacaatgcattagggtgggctgtaaagccaatggctgtgtcctttcaggaaggtcatgggaacatacagagacctacagggaagacggccatgggacaagggaggcagagtctggagttacgctgcctacagtcacggaatgccaaggacagctggaaaccaccagaagctaagaaggagattttacctgaaagcctctcaaagaaatcaatcatactcacacctcctttttgaatttctggcctcgtgaatggtgaaaaaataaatttctgtcgtcttaagccccacggtttgtagtcatttgttctgttcctagccttaggaaactaacacagcatgctaagggaaaagaagaaaattctgcataaaatgtcattttactttttaaaacaactactgttgacagtaaatgagtattcttccaagattcatatgcaga

SEQ ID NO: 163789 - DNA, 610 bp, Homo sapiens
aaaagaaagggggctttataacagaggcagaactcattatgttctaaaaaatacacgcatgtttcccatgttgaatagtgtcccgcagaaagtcatgtccagctggaacccaggaatgttaaactatttggaaacagggtctctgcagataacacttggttaagacaaggtcacaatgcattagggtgggctgtaaagccaatggctgtgtcctttcaggaaggtcrtgggaacatacagagacctacagggaagacggccatgggacaagggaggcagagtctggagttacgctgcctacagtcacggaatgccaaggacagctggaaaccaccagaagctaagaaggagattttacctgaaagcctctcaaagaaatcaatcatactcacacctcctttttgaatttctggcctcgtgaatggtgaaaaaataaatttctgtcgtcttaagccccacggtttgtagtcatttgttctgttcctagccttaggaaactaacacagcatgctaagggaaaagaagaaaattctgcataaaatgtcattttactttttaaaacaactactgttgacagtaaatgagtattcttccaagattcatatgcaga

SEQ ID NO: 163790 - DNA, 610 bp, Homo sapiens
aaaagaaagggggctttataacagaggcagaactcattatgttctaaaaaatacacgcatgtttcccatgttgaatagtgtcccgcagaaagtcatgtccagctggaacccaggaatgttaaactatttggaaacagggtctctgcagataacacttggttaagacaaggtcacaatgcattagggtgggctgtaaagccaatggctgtgtcctttcaggaaggtcatgggaacatacagagacctacagggaagacggccatgggacaagggaggcagagtctggagttacgctgcctacagtcacggaatgccaaggacagctggaaaccaccagaagctaagaaggagattttacctgaaagcctctcaaagaaatcaatcatactcacacctcctttttgaatttctggcctcgtgaatggtgaaaaaataaatttctgtcgtcttaagccccacggtttgtagtcatttgttctgttcctagccttaggaaactaacacagcatgctaagggaaaagaagaaaattctgcataaaatgtmattttactttttaaaacaactactgttgacagtaaatgagtattcttccaagattcatatgcaga

SEQ ID NO: 163791 - DNA, 559 bp, Homo sapiens
aggtgtttcctagggtgctcatcagcacgcaattcaccagctgaggggaaygaggaaggaggagttgatggggtgtgaggagaagcaggctgggagaaggaggatttcaggtctgacgaggacatcgttctcaaggcatataccactcccttccaccctccaatgtagaaactgtgtgcagatgtgggggagcccatgggtagagttaagattcaagcgtgggagtcttcgggttaaaatacctgaaaaggtagagtggtgttaaaagaaaggcatggactttgcagacagacagaactgagtttgagctccagcgcgtgccacttactatctgcatgattttacgcaagttactgaaactctgaattctgggggttgtcaaattccaaaatgggcctgaccacacccacctcacagggttgcaagggcaacctcgtaaaataacctctgtagaatgcctccatggtgtcagtcagcacgtgtggacactcccccatcctgtgtcccacctcccacttccatagagcgtggaggtcttccaggaagagccttcaagatc

SEQ ID NO: 163792 - DNA, 504 bp, Homo sapiens
tgtttcctagggtgctcatcagcacgcaattcaccagctgaggggaatgaggaaggaggagttgatggggtgtgaggagaagcaggctgggagaaggaggatttcaggtctgacgaggacatcgttctcaaggcakataccactcccttccaccctccaatgtagaaactgtgtgcagatgtgggggagcccatgggtagagttaagattcaagcgtgggagtcttcgggttaaaatacctgaaaaggtagagtggtgttaaaagaaaggcatggactttgcagacagacagaactgagtttgagctccagcgcgtgccacttactatctgcatgattttacgcaagttactgaaactctgaattctgggggttgtcaaattccaaaatgggcctgaccacacccacctcacagggttgcaagggcaacctcgtaaaataacctctgtagaatgcctccatggtgtcagtcagcacgtgtggacactcccccatcctgtgtccc

SEQ ID NO: 163793 - DNA, 559 bp, Homo sapiens
aggtgtttcctagggtgctcatcagcacgcaattcaccagctgaggggaatgaggaaggaggagttgatggggtgtgaggagaagcaggctgggagaaggaggatttcaggtctgacgaggacatcgttctcaaggcatwtaccactcccttccaccctccaatgtagaaactgtgtgcagatgtgggggagcccatgggtagagttaagattcaagcgtgggagtcttcgggttaaaatacctgaaaaggtagagtggtgttaaaagaaaggcatggactttgcagacagacagaactgagtttgagctccagcgcgtgccacttactatctgcatgattttacgcaagttactgaaactctgaattctgggggttgtcaaattccaaaatgggcctgaccacacccacctcacagggttgcaagggcaacctcgtaaaataacctctgtagaatgcctccatggtgtcagtcagcacgtgtggacactcccccatcctgtgtcccacctcccacttccatagagcgtggaggtcttccaggaagagccttcaagatc

SEQ ID NO: 163794 - DNA, 552 bp, Homo sapiens
caggtgtttcctagggtgctcatcagcacgcaattcaccagctgaggggaatgaggaaggaggagttgatggggtgtgaggagaagcaggctgggagaaggaggatttcaggtctgacgaggacatcgttctcaaggcatataccactcccttccaccctccaatgtagaaactgtgtgcagatgtgggrgagcccatgggtagagttaagattcaagcgtgggagtcttcgggttaaaatacctgaaaaggtagagtggtgttaaaagaaaggcatggactttgcagacagacagaactgagtttgagctccagcgcgtgccacttactatctgcatgattttacgcaagttactgaaactctgaattctgggggttgtcaaattccaaaatgggcctgaccacacccacctcacagggttgcaagggcaacctcgtaaaataacctctgtagaatgcctccatggtgtcagtcagcacgtgtggacactcccccatcctgtgtcccacctcccacttccatagagcgtggaggtcttccaggaagagcct

SEQ ID NO: 163795 - DNA, 552 bp, Homo sapiens
caggtgtttcctagggtgctcatcagcacgcaattcaccagctgaggggaatgaggaaggaggagttgatggggtgtgaggagaagcaggctgggagaaggaggatttcaggtctgacgaggacatcgttctcaaggcatataccactcccttccaccctccaatgtagaaactgtgtgcagatgtgggggagcccatgggtagagttaagattcaagcrtgggagtcttcgggttaaaatacctgaaaaggtagagtggtgttaaaagaaaggcatggactttgcagacagacagaactgagtttgagctccagcgcgtgccacttactatctgcatgattttacgcaagttactgaaactctgaattctgggggttgtcaaattccaaaatgggcctgaccacacccacctcacagggttgcaagggcaacctcgtaaaataacctctgtagaatgcctccatggtgtcagtcagcacgtgtggacactcccccatcctgtgtcccacctcccacttccatagagcgtggaggtcttccaggaagagcct

SEQ ID NO: 163796 - DNA, 552 bp, Homo sapiens
caggtgtttcctagggtgctcatcagcacgcaattcaccagctgaggggaatgaggaaggaggagttgatggggtgtgaggagaagcaggctgggagaaggaggatttcaggtctgacgaggacatcgttctcaaggcatataccactcccttccaccctccaatgtagaaactgtgtgcagatgtgggggagcccatgggtagagttaagattcaagcgtgggagtcttcgggttaaaatacctgaaaaggtagagtggtgttaaaagaaaggcatggactttgcagacagacagaactgagtttgagctccagcgcgtgccacttactatctgcatgattttacgcaagttactgaaactctgaattctgggggttgtcaaattccaaaatgggcctgaccayacccacctcacagggttgcaagggcaacctcgtaaaataacctctgtagaatgcctccatggtgtcagtcagcacgtgtggacactcccccatcctgtgtcccacctcccacttccatagagcgtggaggtcttccaggaagagcct

SEQ ID NO: 163797 - DNA, 552 bp, Homo sapiens
caggtgtttcctagggtgctcatcagcacgcaattcaccagctgaggggaatgaggaaggaggagttgatggggtgtgaggagaagcaggctgggagaaggaggatttcaggtctgacgaggacatcgttctcaaggcatataccactcccttccaccctccaatgtagaaactgtgtgcagatgtgggggagcccatgggtagagttaagattcaagcgtgggagtcttcgggttaaaatacctgaaaaggtagagtggtgttaaaagaaaggcatggactttgcagacagacagaactgagtttgagctccagcgcgtgccacttactatctgcatgattttacgcaagttactgaaactctgaattctgggggttgtcaaattccaaaatgggcctgaccacacccacctcacagggttgcaagggcaacctcgtaaaataacctctgtagaatgcctccatggtgtcagtcarcacgtgtggacactcccccatcctgtgtcccacctcccacttccatagagcgtggaggtcttccaggaagagcct

SEQ ID NO: 163798 - DNA, 558 bp, Homo sapiens
aggtgtttcctagggtgctcatcagcacgcaattcaccagctgaggggaatgaggaaggaggagttgatggggtgtgaggagaagcaggctgggagaaggaggatttcaggtctgacgaggacatcgttctcaaggcatataccactcccttccaccctccaatgtagaaactgtgtgcagatgtgggggagcccatgggtagagttaagattcaagcgtgggagtcttcgggttaaaatacctgaaaaggtagagtggtgttaaaagaaaggcatggactttgcagacagacagaactgagtttgagctccagcgcgtgccacttactatctgcatgattttacgcaagttactgaaactctgaattctgggggttgtcaaattccaaaatgggcctgaccacacccacctcacagggttgcaagggcaacctcgtaaaataacctctgtagaatgcctccatggtgtcagtcagcacgtgtggacactcccccatcctgtgtcccacctcccacttccatagagcrtggaggtcttccaggaagagccttcaagat

SEQ ID NO: 163799 - DNA, 611 bp, Homo sapiens
gaattccagccccggggccttgggaccatcacagggccagatcctacgcccaccagcttccttacttctctctgcctccygcctcccctccctctcttctattccctgcctaagcccagcaaccttcagaactggctgccttcactgcatcctggactaagtagtggggctcctaggattgccccaccctgagctcctgggccttgccacaagcaaccaaggagtcctggggtcaggaggggtaccctgagatcctcccccagctgacccaggctgcccaagcccacagctaggactcacttggtgcggaagtcagcagcagccagatgggcattgtcattctgtagcaggatgttggcattgtccacggtggctgtgaggatcagcggagatgggagagtagtcaggtcatcggatgggggtggctgagcccacaccagagttctgaacagatcttcctgcctgggggcctctcttcccgcccagcccctcccttgccccgtgctgtattattggcagaggaggggcaagcaggagtctgaagggctcaaaggtgcctcttcttcccccgctactcagtaccccaccagacccccatgccaggctcagcc

SEQ ID NO: 163800 - DNA, 611 bp, Homo sapiens
gaattccagccccggggccttgggaccatcacagggccagatcctacgcccaccagcttccttacttctctctgcctcccgcctcccctccctctcttctattccctgcctaagcccagcaaccttcagaactggctgccttcactgcatcctggactaagtagtggggctcctaggaytgccccaccctgagctcctgggccttgccacaagcaaccaaggagtcctggggtcaggaggggtaccctgagatcctcccccagctgacccaggctgcccaagcccacagctaggactcacttggtgcggaagtcagcagcagccagatgggcattgtcattctgtagcaggatgttggcattgtccacggtggctgtgaggatcagcggagatgggagagtagtcaggtcatcggatgggggtggctgagcccacaccagagttctgaacagatcttcctgcctgggggcctctcttcccgcccagcccctcccttgccccgtgctgtattattggcagaggaggggcaagcaggagtctgaagggctcaaaggtgcctcttcttcccccgctactcagtaccccaccagacccccatgccaggctcagcc

SEQ ID NO: 163801 - DNA, 611 bp, Homo sapiens
gaattccagccccggggccttgggaccatcacagggccagatcctacgcccaccagcttccttacttctctctgcctcccgcctcccctccctctcttctattccctgcctaagcccagcaaccttcagaactggctgccttcactgcatcctggactaagtagtggggctcctaggattgccccaccctgagctcctgggccttgccacaagcaaccaaggagtcctggggtcaggaggggtaccctgagatcctcccccagctgacccaggctgcccaagcccacagctaggactcacttggtgyggaagtcagcagcagccagatgggcattgtcattctgtagcaggatgttggcattgtccacggtggctgtgaggatcagcggagatgggagagtagtcaggtcatcggatgggggtggctgagcccacaccagagttctgaacagatcttcctgcctgggggcctctcttcccgcccagcccctcccttgccccgtgctgtattattggcagaggaggggcaagcaggagtctgaagggctcaaaggtgcctcttcttcccccgctactcagtaccccaccagacccccatgccaggctcagcc

SEQ ID NO: 163802 - DNA, 611 bp, Homo sapiens
gaattccagccccggggccttgggaccatcacagggccagatcctacgcccaccagcttccttacttctctctgcctcccgcctcccctccctctcttctattccctgcctaagcccagcaaccttcagaactggctgccttcactgcatcctggactaagtagtggggctcctaggattgccccaccctgagctcctgggccttgccacaagcaaccaaggagtcctggggtcaggaggggtaccctgagatcctcccccagctgacccaggctgcccaagcccacagctaggactcacttggtgcggaagtcagcagcagccagatgggcattgtcattctgtagcaggatgttggcattgtccacggtggctgtgaggatcagcggagatgggagagtagtcaggtcatcggatgggggtggctgagcccacaccagagttctgaacagatcttcctgcctggggkcctctcttcccgcccagcccctcccttgccccgtgctgtattattggcagaggaggggcaagcaggagtctgaagggctcaaaggtgcctcttcttcccccgctactcagtaccccaccagacccccatgccaggctcagcc

SEQ ID NO: 163803 - DNA, 600 bp, Homo sapiens
agagctgtggatggatccttagactaggaccttgctcatgcttgtattttcatttctaaacgttgaggctcaaagctgwtattcagtacaatttgaaaataagcaaagacgtcattttcttagctggcccatgcctgctctgcaccaagtgatggcaggggcagggacattccgactggatgtgtgagagggctggggtccggctggcctctcaggcatcttcccctgggaaccatgccggcttctgtgcttcctttcctttgggaagtcgtgctcctttttgagaattctagggaaggcagttccttctgctggagccactggggaatgctgcatatgtcacagaaccgtgtcaagaacacggggccctgtgaaggtgcacaacctgtagtttcctactcttattacctaaaaacacacattgtttgctcatttctcttgaagaccagacctaacactgaagatcttccatcagattggcccctatgccttcatcagcctcactgcatagtgtacctgtttatagactttttacgctaaccaagtaactgatgagtccacatgaattatgtgttccagcctcctgcctttgcacacacc

SEQ ID NO: 163804 - DNA, 529 bp, Homo sapiens
gaattcagggagtctaccataaatggttctgggatcattggctatccatgcaagagaatcagtgtcaggtggtttaaacacttaactgtgaaagcaaaacattggaactttacagaataaaatgtaagatgtaagaaatttggaaagaattttttaaacaagacagagaaacgccaaagctgaaaaatatgtttgaaaggtaagtacatttaaacattctttttattgaaagacatcacgaagaaagcaaaaacacarctggaaggagatgcttgcaatacacataactgattatgatttcatgtagtgaactcccacaaatcaataggataaaggcacaaaactcaatagaaaagtggacaaaatgcttacataggcatttcatggaagtgggcatatgtagggtcaataaacgtgtcaacacatgccccagtcagcatggacatgtaaaattcaactgtggagagaaatcgtttacacctactagattggcctcaattaagaagtttgacaatgccaatttggacag

SEQ ID NO: 163805 - DNA, 552 bp, Homo sapiens
gcttattcttctgtgcttcagagtggttctttagtgtgactaacatgttggttatttattctgctgaggtttttgtcctataaaggacataaagggtgatcattcacattcatcacattccgaaagcagagaagggtaggtatttgtgcctgcacttcacctgccaagctccttcttcttcctgtccctgtctttctatccagtcagtgatcaagccttcatcttccacctccctgggcctccccaagctgacccctgtcagcaccatggccagcacctcagctcaaacacatcstttcatggaggttgtcctgtccctggttgcttctttctctgagcttctcctagtttggatgtcacacctgccttcagatgtctctttatgctgccttgcctcctttgagcttggcagcttcacagagacccctctgttctcattaggtcagtttccctgattaagggaaaagctgagtctggcaattaagctttaaatgtccactactctttctttctcattcagaccattcttcagtgatcgcaacattctctctt

SEQ ID NO: 163806 - DNA, 610 bp, Homo sapiens
gtgaggagcagaggtggtgcagggtcggctggggtgggacccggcctgagctcctggaagatggtgatgtggagaggctaagacctcagtttccagagcctgactgcctgggtccaaaccccagctctgtcccttttgcgatgtgacgtgggacaagttgcatctggtccactctctgcactctgtaaatgatttctgtcccctgggcatggcccagctctcagaggagaagcttccatttcctcatctgcagactgagaatggggaccctgcttgtctggatgtagacagttccattccacacttgctaagtgtcaggcacaagtcatagtgagactgccctctgcctgcagagaacccagccgaggcatgcctctgtcaggcaggaagccgggggkcctgggctctgctgggatggccctgggttcgaatcctggctccactacttccttacctgggcaagtcttgtgccctctttagccctcagtctcctcttctgtaaagtgggagtaaacatgctcccttgcagggtagtggtcgagattgaagatagcatttgttaagtgaatggcacctgttattattttattattgttacttttgtgggtgt

SEQ ID NO: 163807 - DNA, 512 bp, Homo sapiens
gaattcctcaactacagtggcttagtaataaagwcattggattcatagaaagaaaactgcagaggcagttagttccatagcttggtggagctccaggttccttccatcctgtgtgtgttggtttttgttcttaggctttttgcctcatagttgcaagatggctgcctcatctccagtcattgcatcatctcacagctttcaaaggctggaggcaagggggtcagccaatgtgttaagagtctgctcctctcacgtctatctctttataccaggaggtccatctctcccagccttcccttatgtttcatcgttgttcagaagtacatcaggaggcagccacagaccccccacttgccatggggagtgggattccctgactggtttggcccagtcaggattcatcctccagagctgagctgtgcaacagagctctctgtgttgatgggaatgttccagatctgtgctgtccaaatgacagccaccagccacaggtggccattgagcacccagaa

SEQ ID NO: 163808 - DNA, 512 bp, Homo sapiens
gaattcctcaactacagtggcttagtaataaagtcattggattcatagaaagaaaactgcagaggcagttagttccatagcttggtggagctccaggttccttccatcctgtgtgtgttggtttytgttcttaggctttttgcctcatagttgcaagatggctgcctcatctccagtcattgcatcatctcacagctttcaaaggctggaggcaagggggtcagccaatgtgttaagagtctgctcctctcacgtctatctctttataccaggaggtccatctctcccagccttcccttatgtttcatcgttgttcagaagtacatcaggaggcagccacagaccccccacttgccatggggagtgggattccctgactggtttggcccagtcaggattcatcctccagagctgagctgtgcaacagagctctctgtgttgatgggaatgttccagatctgtgctgtccaaatgacagccaccagccacaggtggccattgagcacccagaa

SEQ ID NO: 163809 - DNA, 512 bp, Homo sapiens
gaattcctcaactacagtggcttagtaataaagtcattggattcatagaaagaaaactgcagaggcagttagttccatagcttggtggagctccaggttccttccatcctgtgtgtgttggtttttgttcttaggctttttgcctcatagytgcaagatggctgcctcatctccagtcattgcatcatctcacagctttcaaaggctggaggcaagggggtcagccaatgtgttaagagtctgctcctctcacgtctatctctttataccaggaggtccatctctcccagccttcccttatgtttcatcgttgttcagaagtacatcaggaggcagccacagaccccccacttgccatggggagtgggattccctgactggtttggcccagtcaggattcatcctccagagctgagctgtgcaacagagctctctgtgttgatgggaatgttccagatctgtgctgtccaaatgacagccaccagccacaggtggccattgagcacccagaa

SEQ ID NO: 163810 - DNA, 512 bp, Homo sapiens
aagtcattggattcatagaaagaaaactgcagaggcagttagttccatagcttggtggagctccaggttccttccatcctgtgtgtgttggtttttgttcttaggctttttgcctcatagttgcaagatggctgcctcatctccagtcaktgcatcatctcacagctttcaaaggctggaggcaagggggtcagccaatgtgttaagagtctgctcctctcacgtctatctctttataccaggaggtccatctctcccagccttcccttatgtttcatcgttgttcagaagtacatcaggaggcagccacagaccccccacttgccatggggagtgggattccctgactggtttggcccagtcaggattcatcctccagagctgagctgtgcaacagagctctctgtgttgatgggaatgttccagatctgtgctgtccaaatgacagccaccagccacaggtggccattgagcacccagaatgtgactcatttgatggaggagtggaattc

SEQ ID NO: 163811 - DNA, 513 bp, Homo sapiens
agaattcctcaactacagtggcttagtaataaagtcattggattcatagaaagaaaactgcagaggcagttagttccatagcttggtggagctccaggttccttccatcctgtgtgtgttggtttttgttcttaggctttttgcctcatagttgcaagatggctgcctcatctccagtcattgcatcatctcacagctttcaaaggctggaggcaagggggtcagccaatgtgttaagagtctgctcctctcacgtctatctctttataccaggaggtccatctctcccagccttcccttatgtttcatcgttgttcaraagtacatcaggaggcagccacagaccccccacttgccatggggagtgggattccctgactggtttggcccagtcaggattcatcctccagagctgagctgtgcaacagagctctctgtgttgatgggaatgttccagatctgtgctgtccaaatgacagccaccagccacaggtggccattgagcacccagaa

SEQ ID NO: 163812 - DNA, 512 bp, Homo sapiens
gaattcctcaactacagtggcttagtaataaagtcattggattcatagaaagaaaactgcagaggcagttagttccatagcttggtggagctccaggttccttccatcctgtgtgtgttggtttttgttcttaggctttttgcctcatagttgcaagatggctgcctcatctccagtcattgcatcatctcacagctttcaaaggctggaggcaagggggtcagccaatgtgttaagagtctgctcctctcacgtctatctctttataccaggaggtccatctctcccagccttcccttatgtttcatcgttgttcagaagtacatcaggaggcagccacagaccccccacttgccatggggagtgggattccctgactggtttggcccagtcaggattcatcctccagagctgagctgtgcaacagarctctctgtgttgatgggaatgttccagatctgtgctgtccaaatgacagccaccagccacaggtggccattgagcacccagaa

SEQ ID NO: 163813 - DNA, 522 bp, Homo sapiens
tatgctgctgatgtctttgttactgactcagtttttaacacagctctccctccagaccatccgagcctcattccctgctgtgttcccaatgcatagcccagaaccaggcacatagtaggtgcctgataaatatttgaggaatgaaaaaaggaaggaggaaagcatccacagaccagggtgaagcgactccagtcccgtgccaacctccttggcggccagatgactcagacaggccctcgcatacaaggagtttggggattagtcaggagcccgataaacagctcaggaatcacaaaactccatgtgagtgctataaatagatgcatgagcaaaagtcccaggagggtgcctgggtgatgcagccatctccatctgggtggggayaaggaaggcctctcagaggaggtgattttgagactggacttttaaggaccagtaggagcttaccaggcagagaagcaagaagagcatccctggaaaggaacagcagaggcaatgggttggagatgtaaaaagggcgca

SEQ ID NO: 163814 - DNA, 466 bp, Homo sapiens
  misc_feature (1)...(466): n = A,T,C or G
tgatcacggcccttcccgccccctggtcccaggcattgatggggctgtggcatttgcttttccttcctccaggggtcctggctccactcagcttcccactcctcctgccccctccagagcagctgcgtccctgcgatcaatatggagctgatcaatctatctgtccctctgcttggctgaggaagccagcaatgatggccaccttgggaccccatgagtgctcctgagactgtggcatgtatcacctcctcactgcacaggtggggaaattgaggcctccagagggtcagggcttcccaaagytcccagcaagtctgtggggtgggaagggctggaacctgctcagctggcttctctttcagacatcacgtctgtgatgcatatggtcctgggtgccctgtgtccccgtggccatgcctcaggggtcctgaagtgctaaaccatgaattccgcggatccttctnnn

SEQ ID NO: 163815 - DNA, 581 bp, Homo sapiens
gaattctgaagattttacaaaacaatgcaggttccagctgctctggaaaaatctgaggagctggcaactttgggccgtagcctcatgagccaggtgggcaggtcccaggtggtcacagccaatccccttcctaacatctgaccatctcagacttcagcatctgctgtcattaatttgggctgttttcacagaggaggcacatgggaaatgctacacacacacacacacacacacacacacacacacacacacacasagctgtctccaaggccgcggacagagtgtgagaccatgaggctgcttcgcctctgcacccgtgagcctgcagcctcatcttctgcagggccccagcagtttccctcctagacaagtggcctgtgtgccacatgtgccctgctggatccagatttcctgtgggtgacatcgggccggtgggtctctgtcctcgctccaagctcccagccctgtggttggcaggaagtcatcatggaagggacggactagctagcttacaaccaactctgggctccaatcatgatgactggatggaaaaaacaagttatgtcagccctggccccggc

SEQ ID NO: 163816 - DNA, 581 bp, Homo sapiens
gaattctgaagattttacaaaacaatgcaggttccagctgctctggaaaaatctgaggagctggcaactttgggccgtagcctcatgagccaggtgggcaggtcccaggtggtcacagccaatccccttcctaacatctgaccatctcagacttcagcatctgctgtcattaatttgggctgttttcacagaggaggcacatgggaaatgctacacacacacacacacacacacacacacacacacacacacacacagctgtctccaaggcygcggacagagtgtgagaccatgaggctgcttcgcctctgcacccgtgagcctgcagcctcatcttctgcagggccccagcagtttccctcctagacaagtggcctgtgtgccacatgtgccctgctggatccagatttcctgtgggtgacatcgggccggtgggtctctgtcctcgctccaagctcccagccctgtggttggcaggaagtcatcatggaagggacggactagctagcttacaaccaactctgggctccaatcatgatgactggatggaaaaaacaagttatgtcagccctggccccggc

SEQ ID NO: 163817 - DNA, 286 bp, Homo sapiens
gcatttttgtttggtgttttctgcaaagtaccgaggaaatattttgtaaagtgatgctttgggtataacttagccccatcattatttaragaatagaggaagaagaaagaggaaggattttaaaggcagacaatgacagaccattcaggataggtagggttttaaagggagataaacacaatctcatcgactaaggagagatttgctgtagtaaataggatgagggaaatagtctgtgggatgcaagcaaaggaagcagggtgccttagacattgattggagccag

SEQ ID NO: 163818 - DNA, 286 bp, Homo sapiens
gcatttttgtttggtgttttctgcaaagtaccgaggaaatattttgtaaagtgatgctttgggtataacttagccccatcattatttaaagaatagaggaagaagaaagaggaaggattttaaaggcagacaatgacagaccattcaggataggtagggttttaaagggagataaacacaatctcatcractaaggagagatttgctgtagtaaataggatgagggaaatagtctgtgggatgcaagcaaaggaagcagggtgccttagacattgattggagccag

SEQ ID NO: 163819 - DNA, 286 bp, Homo sapiens
gcatttttgtttggtgttttctgcaaagtaccgaggaaatattttgtaaagtgatgctttgggtataacttagccccatcattatttaaagaatagaggaagaagaaagaggaaggattttaaaggcagacaatgacagaccattcaggataggtagggttttaaagggagataaacacaatctcatcgactaaggagagatttgctgyagtaaataggatgagggaaatagtctgtgggatgcaagcaaaggaagcagggtgccttagacattgattggagccag

SEQ ID NO: 163820 - DNA, 563 bp, Homo sapiens
tttatgcaataaaatgattgttcagacccaccaaaaaggtagtttgttatgctgcttcaggtaattagaacacccttccttttccatttttaatataagctggttcatatatgtgtgtrtcctgtctctgtattagataaatggtagcatattagagtcacttccctacctcacacttttcactagacaatatgttctggccatcactccagagagattttattttatcttattttatttattctttatctgagacaaggtcttactctgtcacccaggctggagtatagtagtgtgatcatagcttactgcagcctcaaccccctgggctcaaacaatccctcctgagcctcctgagtagctgggaccacaggtgtgcaccattgcactgggctaattttttttttttatatagcgctttcctatgttgcccaggctgttctcaaactcctgggctcaagcaatcctcctgccttggccccccaaagcgttgggattacaggtgtgagcctccatctcagcctccagagaaattttaaaggacaggtttgaattttgttttg

SEQ ID NO: 163821 - DNA, 563 bp, Homo sapiens
tttatgcaataaaatgattgttcagacccaccaaaaaggtagtttgttatgctgcttcaggtaattagaacacccttccttttccatttttaatataagctggttcatatatgtgtgtatcctgtctctgtattagataaatggtagcatattagagtcacttccctacctcacacttttcactagacaatatgttctggccatcactccagagagattttattttatcttattttatttattytttatctgagacaaggtcttactctgtcacccaggctggagtatagtagtgtgatcatagcttactgcagcctcaaccccctgggctcaaacaatccctcctgagcctcctgagtagctgggaccacaggtgtgcaccattgcactgggctaattttttttttttatatagcgctttcctatgttgcccaggctgttctcaaactcctgggctcaagcaatcctcctgccttggccccccaaagcgttgggattacaggtgtgagcctccatctcagcctccagagaaattttaaaggacaggtttgaattttgttttg

SEQ ID NO: 163822 - DNA, 563 bp, Homo sapiens
tttatgcaataaaatgattgttcagacccaccaaaaaggtagtttgttatgctgcttcaggtaattagaacacccttccttttccatttttaatataagctggttcatatatgtgtgtatcctgtctctgtattagataaatggtagcatattagagtcacttccctacctcacacttttcactagacaatatgttctggccatcactccagagagattttattttatcttattttatttattctttatctgagacaaggtcttactctgtcacccaggctggagtatagtagtgtgatcatagcttactgcagcctcaaccccctgggctcaaacaatccctcctgagcctcctgagtagctgggaccacaggtgtgcaccattgcactgggctaattttttttttttatatagcgctttcctatgttgcccaggctgttctcaaactcctgggctcaagcaatcctcctgccttggccccccaaagcgytgggattacaggtgtgagcctccatctcagcctccagagaaattttaaaggacaggtttgaattttgttttg

SEQ ID NO: 163823 - DNA, 390 bp, Homo sapiens
atgcatttcttccttctgggtgtggggtgaggcccttgatgaaatgggggtcttatgacctacagtcaaacatggtagctcagataatcttgtaatagccagtttttaaggataatatttttaggttttatgactggcttttgggaaaagaaactctggtttgtatgcccttacttggggaagaaggattctagtttctatggccagcctgtggagagaatgcgactgagagacaggagaacaggagaaggtcagagagaaacttttgcttctgaggctgctgctgaggccttcattttggagtattgttttctgggttccatcaggacaaacctatccamttaggaatttttccctagcttattttggttaactcccttcttaatacat

SEQ ID NO: 163824 - DNA, 622 bp, Homo sapiens
tcactaaggacacagaacatagttttataattacgttatgatgaactgataatttctagacattggtacaacacagtagtatctttagaaataattgaaatataagtatgattgaattcaacaaatttatattgataatgactgtaagtttctcttagctgctttgtctttacacatgtttgctctttacattttatcaatttatttttatttaaatgcaactaaaaatgataaaaacagaatatttaaattaatgtcggtgttatgttatagctgttttaccctaaccacagaagcatatagaaatgtaacaatgtaacagttctaaaacgtagctcattagatgtttgtctaatattagattgaaaatacttgaaataaagaattagaagctctcctatgcacaggctatatgcaatacttaacaaccaatatggtatgtgtactgcctgatgaacttgagcaccagacacagcayggaagcaggattctgaaactctccatctgtatatcctttgagtgcagcattattaagaggactgaggcttttggagtataggccaagggcagctgcaactctgaaaagtatttgaaaccatttggaattcattcaataaattaa

SEQ ID NO: 163825 - DNA, 428 bp, Homo sapiens
  misc_feature (1)...(428): n = A,T,C or G
aagttgaatgatgagaacacatggagggggaacaacacacactgggggctgtcggcaggtcgggggtgggggaaagggcattaggaagaatacctaatggatgctgggctcatacctgggtgatgggatgatctgtgcagcaaactgccatggcacgtgtttactgtacatcctgcacatgtacccctgaacttaaaatcaaagttggnacaacggtcaatgtctggggtttatgaacagcaaaaactgatatatttcatatagtggagatatttcttttggaatattccatgattaaggcttttgtggcatacacaacaatgtgatcaatgtcttatataacatcaacctcctcaggcctcactattctgtggttcctagttaggwcatattaccatctttgctcacatttcacttgcttgtagatc

SEQ ID NO: 163826 - DNA, 594 bp, Homo sapiens
ggtgacaggttttacccttgtcaacacatgccttcagtggtcaccttgggagatgacatacagccaacagattggggaagggaagcagaatgttgtatttcgtggaagctttatatgggccccaccaggaagtggcctcgaatctactcatgctccattgckggaatgtggtcacagccaaactataccaaattgatagctggggaaggtagtttaactgtgtgcccagatgtctggtcatcatttcaaggtcataattttaaccatatttagatttcttctcaattatcctagaaatatttcactcaatttatactcacaatagcagtgtagaaaaaaatgcttattttaacgcaacagtaatgggtactttaaaaagaaaaggtttctgattttaaaataataaaaggcttctcattattgctttaaaaggcaattctttgtgtacaagtgaggttgaacatttttgacatgcacatgggccttttttcattctttctgaattctgaatttatgaatttaaccatttttttccttctaagatgcattttttttcttaaggattaaaaaaacttccttaatgaagatgtggag

SEQ ID NO: 163827 - DNA, 300 bp, Homo sapiens
tcacatccaggcactttctttcggccttcaaacgtgatttcactaacattttgtccttaagatccatccattattgtaattatcactcaatcttctttctgtctgtttcaatgtccttagagttcacaacctgttcattttctctcaactttttctgattccttgctttcacagaakaataagggaaggaaggtttttgttgatttttctttttttaaggaaaaaaaaaaaaacagaaaatcagcttttatgaaggattcggagtgcccattggatgtacagccagataaagtgctctat

SEQ ID NO: 163828 - DNA, 338 bp, Homo sapiens
taggggaccatgctaataatgacgatactataatgggtgacaaaaactttcttatcattcakaaaaagtatgcccttaataacatttttgtacataaaattggacaaattatgagttgccttgcaataacccgggtttgtcacacaatgaatagaaatgcatctactgaatgataaaagaaaaccaggacagtctgtaaacgtcagtccattgctccagggcactgggctgtgccttgttaaattttagtaaattttattttctgattacaattattagcatccttttctgggcttgtaaaatagttgaatcatagggatagataaaaacacacagaa

SEQ ID NO: 163829 - DNA, 578 bp, Homo sapiens
taagacaccaaatcttctccttactgcttggagtgtgagatagtggtgtgtgtgacccacagggccaagcagtcagaattagaccacagtggcatttattaagcattcttctgcagtgtgtgtgtgagtggtgtgggatggctgtttgagtaggaagaataaagtggccaagacatgtaccaaaatggacaggatagttttttcagtgttgcatattatgccatggattaagcctgacataaatttctccatattaatttargaaaaatttataatttaaaacctctacatgctatggtaagagtaccgtgtttagaatcaagagatctgggttagagctgtctaacccagattgactttctaattttatgatcttgtatgaagttaattttgtgttctttaatactcttgtgtaaagtgaggcctgtaatactgtcttaaaatagctttcatgaagattaaataggttaatgtacatgtaaaataaaatttcaatgctttaaataaaatttaaaacctatttaaatataagatgctattgctctttaacaatcattatgatttagttaatatactta

SEQ ID NO: 163830 - DNA, 578 bp, Homo sapiens
taagacaccaaatcttctccttactgcttggagtgtgagatagtggtgtgtgtgacccacagggccaagcagtcagaattagaccacagtggcatttattaagcattcttctgcagtgtgtgtgtgagtggtgtgggatggctgtttgagtaggaagaataaagtggccaagacatgtaccaaaatggacaggatagttttttcagtgttgcatattatgccatggattaagcctgacataaatttctccatattaatttaagaaaaatttataatttaaaacctctacatgstatggtaagagtaccgtgtttagaatcaagagatctgggttagagctgtctaacccagattgactttctaattttatgatcttgtatgaagttaattttgtgttctttaatactcttgtgtaaagtgaggcctgtaatactgtcttaaaatagctttcatgaagattaaataggttaatgtacatgtaaaataaaatttcaatgctttaaataaaatttaaaacctatttaaatataagatgctattgctctttaacaatcattatgatttagttaatatactta

SEQ ID NO: 163831 - DNA, 586 bp, Homo sapiens
tgtgtattaaagctagtaagtgatgagtgaagctattattattacctgtactacaactatttccatctctattacaagccaatgaacttaacattrtaacaagaaggaccctaatcctgggcaatataatggtagcccttggaagactaaccaggatcttctatctctaacaatacattaaattcatttccttcttagagagactggagcgatggcacagggaaagatggaaggcataatatatcaggaattcaggttgaattgcaaagttcaggaataattattgtgctggttaaatgacatagtacttattaatctactagagagagttttgtgaaaggtttccagaaatgtgccacactactccactcttagccttgaactctttacttttaaatgcttggattaagacagaaaagaaaaaacgatgtgctcatattctagggtgaaataaagtcactagaatatgcactccttgagagcaagcacctcactttcttgtctaccatgtgtatctaatgcagatgctcaataaatattttgtcaatgaatgaaaatccaaaacaattttagtctggataaactt

SEQ ID NO: 163832 - DNA, 450 bp, Homo sapiens
tattgtaaaaacattactctaaagaattaagcaattttcttaatcacaaaatatggtaatattaatggtccaatttttactttattttacatatgattccaatgaaaacagttttacgtatggtaaaatttcaaaaagccacaaactcttagcaaaggaaaaaatattcctacctctccagcccacactgtcaatcttgttttttgtttgttttttgtttgtttgttttcttcctttctctttttcagaagtcagtcaacaaatattttagtgtcttctatakggcaggctctatcgaggcactggagaatgtcacagaaagggaatatctctgcttcaggagagcttacttgttaaggagagcgtgtaggattagttatggccttgagtaacaaaaacactaaaagtttgaaaaaaattgtaaaatgtgtttgcagtttcagactagtt

SEQ ID NO: 163833 - DNA, 450 bp, Homo sapiens
tattgtaaaaacattactctaaagaattaagcaattttcttaatcacaaaatatggtaatattaatggtccaatttttactttattttacatatgattccaatgaaaacagttttacgtatggtaaaatttcaaaaagccacaaactcttagcaaaggaaaaaatattcctacctctccagcccacactgtcaatcttgttttttgtttgttttttgtttgtttgttttcttcctttctctttttcagaagtcagtcaacaaatattttagtgtcttctatatggcaggctcwatcgaggcactggagaatgtcacagaaagggaatatctctgcttcaggagagcttacttgttaaggagagcgtgtaggattagttatggccttgagtaacaaaaacactaaaagtttgaaaaaaattgtaaaatgtgtttgcagtttcagactagtt

SEQ ID NO: 163834 - DNA, 560 bp, Homo sapiens
aagttattttaaacttattagttttatattgtaaaaacattactctaaagaattaagcaattttcttaatcacaaaatatggtaatattaatggtccaatttttactttattttacatatgattccaatgaaaacagttttacgtatggtaaaatttcaaaaagccacaaactcttagcaaaggaaaaaatattcctacctctccagcccacactgtcaatcttgttttttgtttgttttttgtttgtttgttttcttcctttctctttttcagaagtcagtcaacaaatattttagtgtcttctatatggcaggctctatcgaggcactggagaatgtcacagaaagggaatatctctgcttcaggagagcttacttgttaaggagagcgtgtaggattagttatggccttgagtaacaaaaacactaaaagtytgaaaaaaattgtaaaatgtgtttgcagtttcagactagttatggtggctccatgattatcaggcttaccaaatattaatgtgattgtataggttctgcactgcacaagtctaaagggtatcatt

SEQ ID NO: 163835 - DNA, 578 bp, Homo sapiens
gcctcagcctcccgagtagctgggattacaggcgggtgccaccacacccagcttatttatgtatttttagtaaagacggggttttaccatgatggccaggctggtctcaaactcctgacctcaggtgatccgcctgcctcagcctcccaaagtgctgggattacagacgtgagccactgtgccaggccaacatctttcacagcaagacctatttccaagtctccctttgtttcagacagagacattttccttaactctaatgtttcttttaccttttcatcccaccttctgttccctcattttctccctccttccacacccaagagtcgctgcccctgatctagagtgttggctgtcatgtgagaagttagttctgaaatcttccagggtcctgtgtgatggtgcctgatggtgcctccactrcgccacctgctgtcacaaggtgtcttgtcactgaagacctcttagcccttcaccctttcactctgatctcaggtgaacttcagtgatgacagtgacttggaagaccctgtctcagctgaggcctggctggcagaggagcctaagagacggggcac

SEQ ID NO: 163836 - DNA, 590 bp, Homo sapiens
cccacaaatgaagggagagagggaggagacaaagtagggatgatagaggcaagcaatggtgaggactcaaggagaagagggagcaaggggagggcagagaggagtcaccctggggcccagagacaggagagaccagtcagcaaaggatcaaaaccgtgactggagtcttcggaagcaaccctcccatttcctccagtgacctgggggaacagatggtctcagcagctcactctgtctgggacaggtacccactcccagctacaatctcctctgagggtctggtctaccactacccctccaaaaagcccatctttgctgttcctgagacaaagacactgctcacaggtaatcctggccagacagatcaagcctgcctctccrgtgggggagtggaaattggattcacctcgtcagacttgatacctgggactgctcagaaattgcaagactatttactcccctctccagcctgaaccctggatgcagagaaataagcccactttaagggacatcgccaaagtcaagagccctcctctgtgaccctggtttcctggcttccaagaagggaggtggctgagtgtcagtctgga

SEQ ID NO: 163837 - DNA, 410 bp, Homo sapiens
cctgatcttgtgatctacccacctctgcctcccaaagtgctgggattgcaggcgtgagccactgtgcccagcctgtccaagccttttatactttcccactgaagccctaaccctgccctccagccaccccatccctcccacccataaagctggtatataaatccttagccctggctgttcagagagctcctccttacagagtactcccrcatgcatgtgacataaacctgccttttctcctgttaacctgtttattcacagtcccccactacacgaccctaagttggtagaggaaaagttctcctcccaccagagccaggcaccatatgactgtgagcatggagttctcgtttccttaataaggttccggagaggacagagaatgtcttcagccctctctgtgcccacag

SEQ ID NO: 163838 - DNA, 574 bp, Homo sapiens
atcatgacctgcttccccgtcactggctcctctgatgggacctgtgttttcttttgcctaagtctcgtcccccagccagactagacttattgccagactggcccattcttttcatgcacctgacactctaacagaggctggggttgggggaaaataaatctagactttggccgggcacagtggctcacgcctgtcatctcagcraatttggaggctgaggtgggctgatcaccggaggtcaggagttcaagaccagcctggccaacatggtgaaaccctgtctctactaaaaatacaaaaattagctggccatggtggtgggcccctctaatcccagctactcaggaggctgaggcaggagaattgcttgaacccgagaggcggaggttgcagtgagctgagatatcaccattacactccagcctagatgacagagcgagactccatctcaaaacaaaacaaaaaaataaataaattcagactccgtaaggagagactttatccaaaaggattattattgcaagggggtgagggtctaggggacactgcaatagggagaatactgtgaccaaga

SEQ ID NO: 163839 - DNA, 607 bp, Homo sapiens
tctgtgatacttatgaagcaatcataaaggtagcaactgcaagaagcagccaccatccctagggctgagggaacaagggaagagattgggattattggaatttaaaagcttggtggagaggccactaggagctggaactcagagctcttcagggatggggcaggtgccagttgctgctgggatctctgagagggcacaataaggcaccttctgaagtgtgggacaagcacattgcaaactaggaccaactactgacaatagaaccagctccaccaccagattgaagacccatcaccagagagggacaggaagcaaaggaaaggaacaagtcctcctccctcttcttgcctgtctcccgagtgccccctactggcaggagctaactgggtgcatcaggcgaagcacaaccatggtttgcagagtatgactgggaggtttggaggtaagagtcagcagtttaagaaccagcacagaaagttcttagcttggatctcctgataggtttgccgcgagggyccttcttggagtctgagatcctaggaaacagctcttgtccacagcctcccagccagtcgcagggctgacttcttggtcacacactgatacc

SEQ ID NO: 163840 - DNA, 490 bp, Homo sapiens
gctgtggctcctgggccccctccagctgtctccacctcacttggaagagagtgagacacatgctcatggggtgtggctttgagtcctaaggccccttctccrtgtatgtggggttcatacccagggccctgggtaacacttctagcccccaggtgagtcgggaagaagactaggtgcctctgaggaaaagcaagggtgccaaggtggggcaggcaccccgagggcagggcttctcagccgcagcactttcggtattttgggctggatcattctttgttgttggggtggccagggctgtcctgcacattgtaggatacttagcagcatccatggcctctacccgcttgatgccagagcaacacttcccggtcacaatcatcttcagacattgccaaacatctccgggggggcaaagctccccctggttcaaaacccctgatttccaggggtttggaccccgaaagtagggctgaggaggtggagttggcta

SEQ ID NO: 163841 - DNA, 601 bp, Homo sapiens
aggaattccacttagagtgtccaaagaaacggaagtcaaccccagcctgtcagaagaatggacacagactggtgggattgcttctctggaaaggacttggtgatggttggatgtaggggtgagaaaaacaggagtcaagagtgaacacacgagcttcggtcctgaacagttgggtgactgtggtggtgcttcccaatatggggaagactgggaacccggttctgttagactccaaagccyggctcagggtagacagccactttctgttcttgccaggctgccggtcagtgtcccgggactgtggtcaggtcctctcctctttccaaagatgcactctgtgtatcttctcctctctggctacaggcgggatggcagcatttgtggaaactgctgggggacgtgaggaaaggggtttggcccaaagagcatgaaaggcaagtggaccagagggactgcctcctgtttctgctttgaagcagcagcctaacaagaagtagacaaacaggagcgcttctcagctcagcaggacgatgggggaagcgaattaaaatcccattatgagaacactgcggaggctgctggcacgtggctgatgatcatt

SEQ ID NO: 163842 - DNA, 601 bp, Homo sapiens
aggaattccacttagagtgtccaaagaaacggaagtcaaccccagcctgtcagaagaatggacacagactggtgggattgcttctctggaaaggacttggtgatggttggatgtaggggtgagaaaaacaggagtcaagagtgaacacacgagcttcggtcctgaacagttgggtgactgtggtggtgcttcccaatatggggaagactgggaacccggttctgttagactccaaagcccggctcagggtagacagccactttctgttcttgccaggctgcyggtcagtgtcccgggactgtggtcaggtcctctcctctttccaaagatgcactctgtgtatcttctcctctctggctacaggcgggatggcagcatttgtggaaactgctgggggacgtgaggaaaggggtttggcccaaagagcatgaaaggcaagtggaccagagggactgcctcctgtttctgctttgaagcagcagcctaacaagaagtagacaaacaggagcgcttctcagctcagcaggacgatgggggaagcgaattaaaatcccattatgagaacactgcggaggctgctggcacgtggctgatgatcatt

SEQ ID NO: 163843 - DNA, 595 bp, Homo sapiens
acacacgagcttcggtcctgaacagttgggtgactgtggtggtgcttcccaatatggggaagactgggaacccggttctgttagactccaaagcccggctcagggtagacagccactttctgttcttgccaggctgccggtcagtgtcccgggactgtggtcaggtcctctcctctttccaaagatgcactctgtgtatcttctcctctctggctacaggcgggatggcagcatttgtggaaactgctgggggacgtgaggaaaggggtttggcccaaagagcatgaaaggcaagtggaccagagggactgcctcctgtttctgctttgaagcagcagcctaacaagaagtagacaaacaggagcgcttctcagctcagcaggacgatgggggaagcgaattaaaatcccattatgagaacactgcggaggctgctggcacgtggctgatgatcatttacaccaatgtacacacacgaaagccttcttcrctgtgactcaggccacagaggcagccttgggaagaattctgaagtccacctggctttctcacctccaagcttgtgtccttgggcaagttgcgtaaagtttcttag

SEQ ID NO: 163844 - DNA, 426 bp, Homo sapiens
gaaatctgccgccatgatccaatcacctcctaccaggtcccttccccaacactggggattacaattcaacatgagatttgagttggggtacagagccaaaccatatcagaaagttaggagattgcccacatcaattcggatcatgttccattggcaagaacttaatcatatgaccaccaatgagactagaaatttaatttccagttgggcagccttgtgcccagaaataggaaagaatgagtttagagggacaatcagcagtctctactacaatatgtccctctgaccacctgaatatccacatgtcctttgatggtaattttaggtatcaacttgattggattaaggaataccaagaaaactaactgttacagcattatattrgtgtgtgtctgtgagggtgtttccagaggagattggcatgtg

SEQ ID NO: 163845 - DNA, 592 bp, Homo sapiens
ctcacagacaaaaggagcagatttatggaaagatcaaaaagaactttatggttggaaagggggggtaggaagagggtagttaggaatggcatgggaaaatgtaaaggatagaaagtgcaaatatagaggagtggaaaagtacctgagaaaccattttaaaaatgtaaatgccaggttaaggagtttmgagtatgtatggtaggctatgtataaaattcattgatttttttttttttttgttttctattttttaaatagggctgattcctccacctaaattgttagcagtgtgaaccaactcattgtgtatgtgagaccataattgatttgggatttttcttgtgatagaggtagttttaaactagggagacatgaattccaattttaattgagtatttactgatgtctgtacttggctctgggtcttggtttcttcttctgtaagaggaataaaaacctgccttgtagaattttgtaaaactaaaacgtaagactttatagcatatgtaacgcacaaggtaaatgctttaaaaatggtattattaccaaattaattttttccagaactcaaaactagttatgctagttagat

SEQ ID NO: 163846 - DNA, 530 bp, Homo sapiens
tgacctcaagtgatctgcccattttggcctcccaaagtgctgggattacaggcgtgagccactgtgcccagccacaatagcctttttacctaagttttactttagaatcctgagtaaaagctgtgaccttctagcttcatctactctctgacattccctgaaacctcagcctgtgtggcaagttctattacaggattcacatttcctgatttcaaaattactacacagcaatggtaaacaagacattgtggtaacaccataaatagtgtgatggtttgaatgtctgtgtcccttccagaattcatgttggaagttattccccaatgcaacagtttaagaggtgagacctttagggggtgattcaggcatgcgggttctgccctcacggatgggattagygctttataaaagggacatggggaactagcctaggccttttttttttttttttttttttttcgcttctgctcttccaccatggaagacacagaaggaaggtaccaccttggaagcagagagcagccctcgcc

SEQ ID NO: 163847 - DNA, 530 bp, Homo sapiens
tgacctcaagtgatctgcccattttggcctcccaaagtgctgggattacaggcgtgagccactgtgcccagccacaatagcctttttacctaagttttactttagaatcctgagtaaaagctgtgaccttctagcttcatctactctctgacattccctgaaacctcagcctgtgtggcaagttctattacaggattcacatttcctgatttcaaaattactacacagcaatggtaaacaagacattgtggtaacaccataaatagtgtgatggtttgaatgtctgtgtcccttccagaattcatgttggaagttattccccaatgcaacagtttaagaggtgagacctttagggggtgattcaggcatgcgggttctgccctcacggatgggattagcgctttataaaagggacatggggaactagcctaggccttttttttttttttttttttttttcgcttctgctcttccaccatggaagacacagmaggaaggtaccaccttggaagcagagagcagccctcgcc

SEQ ID NO: 163848 - DNA, 432 bp, Homo sapiens
tgctgggctggggcactttcctctaacatcacccaaacccagaaaaygaggatcgtaagccccttcatgggccaaatgcagggctggggcccttgggctaaccctttagtgcctctggctgcatcactgtcagagtaaggtaaccagcaaggggctgcagggaacaaccagccaggtccagacatggacaaacataattggaaggaagacaggaaatggacaggtcctgtccagtgtagataaaatgacagcagctaaggcaggttgaggggcagaggagaggctgggggatcggtattgtagcaatgcaggagtcctgtcctgagtggctgctcagggtattgacatgccattttgataaatacatgaattaatgagtgagtttcgagagtagggggagagagaataactgggcatccccttctgtagatc

SEQ ID NO: 163849 - DNA, 497 bp, Homo sapiens
tctagaagctgctacatcatgtggccccctctggtctcacctactattcaccccctaactcagtcccctccagccacatggcctccttagygtgtcttctcaatgaggctttctctgatcactctattgaaaatcataaccttcttccacttcacatgccatctccctattcccagggtttttcccccccatagcattttggatgatctaacgtgctatctacttaactcattcattttgtttatcatctctcttcccccacaaaatgtaggctccgcaaatatggaccttctgttgtgtttgttctctgctgtattttcaacacccaaatctgacactgaatcattattgtaggaatgaatgaatgaaccattagttatgtttatacaatgacctatctgctcacagcattactttgaaatccatttttcaaatttctgaatcacactggcatcacaaatttaaatacatcttaagattttttcgcttggcattga

SEQ ID NO: 163850 - DNA, 493 bp, Homo sapiens
catgtggccccctctggtctcacctactattcaccccctaactcagtcccctccagccacatggcctccttagcgtgtcttctcaatgaggctttctctgatcactctattgaaaatcataaccttcttccacttcacatgccatctccctattcccagggtttttyccccccatagcattttggatgatctaacgtgctatctacttaactcattcattttgtttatcatctctcttcccccacaaaatgtaggctccgcaaatatggaccttctgttgtgtttgttctctgctgtattttcaacacccaaatctgacactgaatcattattgtaggaatgaatgaatgaaccattagttatgtttatacaatgacctatctgctcacagcattactttgaaatccatttttcaaatttctgaatcacactggcatcacaaatttaaatacatcttaagattttttcgcttggcattgattaatgatgacta

SEQ ID NO: 163851 - DNA, 493 bp, Homo sapiens
catgtggccccctctggtctcacctactattcaccccctaactcagtcccctccagccacatggcctccttagcgtgtcttctcaatgaggctttctctgatcactctattgaaaatcataaccttcttccacttcacatgccatctccctattcccagggtttttcccccccatagcattttggatgatctaacgtgctatctacttaactcattcattttgtttatcatctctcttcccccacaaaatgtaggctccgcaaatatggaccttctgttgtgtttgttctctgctgtattttcaacacccaaatctgacactgaatcattattgtaggaatgaatgaatgaaccattagttatgtttatacaatgacctatctgctcacagcattactttgaaatccatttttcaaatttctgaatcacactggcatcacaaatttaaatacatcttaagattttttcgyttggcattgattaatgatgacta

SEQ ID NO: 163852 - DNA, 615 bp, Homo sapiens
tttcaagctttttgaatattattatatctgttatggcracattttcatcagtgacctttgatgttgctattgtaaaatgaatttaataaatgctctgtgtgttctgactgctccaaaaaaaaaaaaaaaaaaaaagaattgggttgcttcaaagtacctaaggctttcttgagaacaaagatttagaacatggtttgtttgtaaaaaaaaaattattggggatcaaacctacctaaagacaaagtagtatgcattttcttttagaagacagagcatacatttaacattttgaagaaattttatagcttcaatacttcaattatgtcctcatcaggtattctgtcacaggcgagtatacaagacattataagcaaagtacacaaaacatataacaatgataaggtatattttaaaacatgatatatgatccttaaaaacaaattccccccctatgtgaccaaaatgaaatcgaaagaccatgtggtaaccaggctaaagacataaatctatagggtttatagagcaagcatttaaaatgtgtacatttcaggcgaaagaatccaagccaggcttactgcagaaaccagaaaagttgcatatattaaaataaacaat

SEQ ID NO: 163853 - DNA, 615 bp, Homo sapiens
tttcaagctttttgaatattattatatctgttatggcaacattttcatcagtgacctttgatgttgctattgtaaaatgaatttaataaatgctctgtgtgttctgactgctccaaaaaaaaaaaaaaaaaaaaagaattsggttgcttcaaagtacctaaggctttcttgagaacaaagatttagaacatggtttgtttgtaaaaaaaaaattattggggatcaaacctacctaaagacaaagtagtatgcattttcttttagaagacagagcatacatttaacattttgaagaaattttatagcttcaatacttcaattatgtcctcatcaggtattctgtcacaggcgagtatacaagacattataagcaaagtacacaaaacatataacaatgataaggtatattttaaaacatgatatatgatccttaaaaacaaattccccccctatgtgaccaaaatgaaatcgaaagaccatgtggtaaccaggctaaagacataaatctatagggtttatagagcaagcatttaaaatgtgtacatttcaggcgaaagaatccaagccaggcttactgcagaaaccagaaaagttgcatatattaaaataaacaat

SEQ ID NO: 163854 - DNA, 615 bp, Homo sapiens
tttcaagctttttgaatattattatatctgttatggcaacattttcatcagtgacctttgatgttgctattgtaaaatgaatttaataaatgctctgtgtgttctgactgctccaaaaaaaaaaaaaaaaaaaaagaattgggttgcttcaaagtacctaaggctttcttgagaacaaagatttagaacatggtttgtttgtaaaaaaaaaattattggggatcaaacctacctaaagacaaagtagtatgcattttcttttagaagacagagcatacatttaacattttgaagaaattttatagcttcaatacttcaattatgtcctcatcaggtattctgtcacaggcgagtatacaagacattataagcaaagtacacaaaacatataacaatgataargtatattttaaaacatgatatatgatccttaaaaacaaattccccccctatgtgaccaaaatgaaatcgaaagaccatgtggtaaccaggctaaagacataaatctatagggtttatagagcaagcatttaaaatgtgtacatttcaggcgaaagaatccaagccaggcttactgcagaaaccagaaaagttgcatatattaaaataaacaat

SEQ ID NO: 163855 - DNA, 615 bp, Homo sapiens
tttcaagctttttgaatattattatatctgttatggcaacattttcatcagtgacctttgatgttgctattgtaaaatgaatttaataaatgctctgtgtgttctgactgctccaaaaaaaaaaaaaaaaaaaaagaattgggttgcttcaaagtacctaaggctttcttgagaacaaagatttagaacatggtttgtttgtaaaaaaaaaattattggggatcaaacctacctaaagacaaagtagtatgcattttcttttagaagacagagcatacatttaacattttgaagaaattttatagcttcaatacttcaattatgtcctcatcaggtattctgtcacaggcgagtatacaagacattataagcaaagtacacaaaacatataacaatgataaggtatattttaaaacatgatatatgatmcttaaaaacaaattccccccctatgtgaccaaaatgaaatcgaaagaccatgtggtaaccaggctaaagacataaatctatagggtttatagagcaagcatttaaaatgtgtacatttcaggcgaaagaatccaagccaggcttactgcagaaaccagaaaagttgcatatattaaaataaacaat

SEQ ID NO: 163856 - DNA, 433 bp, Homo sapiens
aaaaataatagaattttattactattactattactattattattgagacagagtctcgctctgttacccaggctggagtgcagtggtgcgatcttagctcactgcaacctccgcctcccagattcaagctattctcagcctcaggagttgctgggattataggattctgccaccacacccagctaatttttgtatttttagtagagagggggttttgccatgttggccaggctggtcccgaactcctgacctcaggtgatctgcccacctcaacctcccaaagtgctgggattacagacataagtcaccatgcccagcccatttctgytattttaaaccacctagtttgtagtaattttttttttttttttttttttttttttttttgcggtagtcacaggaagctaacagaagagggtagcatggctattct

SEQ ID NO: 163857 - DNA, 527 bp, Homo sapiens
ggtaggaatttttgtatattatatatgccacataacttaattgatcatgcttttatattaatctccttccacatagtgataattagtcaaagtaattakcatgttcatcaaactgatcaaacaactgttaacttttgttgtttttcctaattcccttgtctctcaatgtaatttttatcaaagatgataataatctctgagttcttagaatgccattgtggaaactttctcacaatgctaaagagtggttactttttcaaatatgaaatgtaaatagaaacaataagtccctactcaaaagttaacaggagaaccaaccaattgtttttcaaagtattcacttttaaagtttatacatttaccttaataatgccattgctcaagtaatttcagaacctattttagtaactgtcttcaaaacaaggctactaaactcataagaaaataggtagtctttatgtagttatgattctcttaccagtttctcctaatagatcatcatgatttttaaataactcaaactttat

SEQ ID NO: 163858 - DNA, 527 bp, Homo sapiens
ggtaggaatttttgtatattatatatgccacataacttaattgatcatgcttttatattaatctccttccacatagtgataattagtcaaagtaattagcatgttcatcaaactgatcaaacaactgttaacttttgttgtttttcytaattcccttgtctctcaatgtaatttttatcaaagatgataataatctctgagttcttagaatgccattgtggaaactttctcacaatgctaaagagtggttactttttcaaatatgaaatgtaaatagaaacaataagtccctactcaaaagttaacaggagaaccaaccaattgtttttcaaagtattcacttttaaagtttatacatttaccttaataatgccattgctcaagtaatttcagaacctattttagtaactgtcttcaaaacaaggctactaaactcataagaaaataggtagtctttatgtagttatgattctcttaccagtttctcctaatagatcatcatgatttttaaataactcaaactttat

SEQ ID NO: 163859 - DNA, 635 bp, Homo sapiens
actatagttgctgtcaaaatagctaatatataaacatacaaatagttgacagttacaagatgrtgaactatttaccaaaagaatatgcatcatagaggaattaaatctcagttggcctgaaacaatttttcttgcttaagatacaaattagtgggtcacttcttaaaataatcaatgatttcatactatttcatctgaatgaaatgacctaaaatttctagagttgaatcttcaaaggtaagtataattttatggagccattttattaaacatgcttatttgcttttctgttttaaatgaaatcttattaatactatcggttttacataatttggaaatttaataattagctatgtttttatttacattttatcttcaatagaaaatagcttttccaaacagaaattagcttctttttcttgaatcacttttaaaataaaagttatcccatgaattttgaaatgaacaaacacatacatgtgaggtaattgggcaggtatatatatgctgttcacattttctataatgatggtcaaagttcctaggaagtaaacatcaagtatacttacaataaccactccaaagctcttagtggggaaattttaaattcaaataggatataaataacttaaagt

SEQ ID NO: 163860 - DNA, 601 bp, Homo sapiens
acaccactctcctctaaggtagtaccaaataatagagtgcaatagtctgttataaacaccaacatcagttgtttcagtcaactggtggattcacttactctttttgtaaattgtattacagcataaaaataaccagtaatgtgcaggattcttaagggaatgacttaawatattttcacaagccagacacactcagaataaaacaacaacaacaaaatcctggaatattgcattaaaattcattttatgctcctttctgtcacaatcctaccccactcccccaagagtaacttctatcctcacttctaatgttatagattaatttttcctgttcttgtacttgacatatatgaaatcataatgttgacctttttatgttttccctttctgttctttttctgaaatccgtccatccatgttccttgctatatagtagtctgaagtgtaaatgtatcaacatttattggctcattttatttgttatgttaatttgggtaacttatactttggagatattatgaatggtactgtaataaacattattgtgcaggattttcataaacataaatatttttctctgagtaatcctggggctgaattg

SEQ ID NO: 163861 - DNA, 601 bp, Homo sapiens
acaccactctcctctaaggtagtaccaaataatagagtgcaatagtctgttataaacaccaacatcagttgtttcagtcaactggtggattcacttactctttttgtaaattgtattacagcataaaaataaccagtaatgtgcaggattcttaagggaatgacttaatatattttcacaagccagacacactcagaataaaacaacaacaacaaaatcctggaatattgcattaaaattcattttatgctcctttctgtcacaatcctaccccactcccccaagagtaacttctatcctyacttctaatgttatagattaatttttcctgttcttgtacttgacatatatgaaatcataatgttgacctttttatgttttccctttctgttctttttctgaaatccgtccatccatgttccttgctatatagtagtctgaagtgtaaatgtatcaacatttattggctcattttatttgttatgttaatttgggtaacttatactttggagatattatgaatggtactgtaataaacattattgtgcaggattttcataaacataaatatttttctctgagtaatcctggggctgaattg

SEQ ID NO: 163862 - DNA, 601 bp, Homo sapiens
acaccactctcctctaaggtagtaccaaataatagagtgcaatagtctgttataaacaccaacatcagttgtttcagtcaactggtggattcacttactctttttgtaaattgtattacagcataaaaataaccagtaatgtgcaggattcttaagggaatgacttaatatattttcacaagccagacacactcagaataaaacaacaacaacaaaatcctggaatattgcattaaaattcattttatgctcctttctgtcacaatcctaccccactcccccaagagtaacttctatcctcacttctaatgttatagattaatttttcctgttcttgtacttgacatatatgaaatcataatgttgacctttttatgttttccctttctgttctttttctgaaatccgtccatccatgttccttgytatatagtagtctgaagtgtaaatgtatcaacatttattggctcattttatttgttatgttaatttgggtaacttatactttggagatattatgaatggtactgtaataaacattattgtgcaggattttcataaacataaatatttttctctgagtaatcctggggctgaattg

SEQ ID NO: 163863 - DNA, 564 bp, Homo sapiens
atcggcatcatgttattaaaaatgtatgtaaaatattctaatattgttttaaaaattaatattgttgattattacaatattttgtacaacatctacaaagtttttgaatgttatatttttagagaatgtgaagcattcacatcttctgacttaagttcccatatttagcctacttttctattagtcttcattttgacttataaatcttatttatttattgtaattatctatactaagttagccgtatgaattgtagttctcttcccccaagttgtyaatgttcttacattttatttgcttaaatatttttctagtccaatgccatatgtgttcttttatacattttccgtaaataattttatttctgttttgaaataattgaaaatacagaaacattaatgaaaaatttcagagaactcacaagcccttagcccagatgcatttgttgatctctctttctctctctctctcatacatagtcacacacacatatatgcatactttaaaaccttctgatcccttttaggttaggtttcattaatatatattgtacacttttaggct

SEQ ID NO: 163864 - DNA, 564 bp, Homo sapiens
atcggcatcatgttattaaaaatgtatgtaaaatattctaatattgttttaaaaattaatattgttgattattacaatattttgtacaacatctacaaagtttttgaatgttatatttttagagaatgtgaagcattcacatcttctgacttaagttcccatatttagcctacttttctattagtcttcattttgacttataaatcttatttatttattgtaattatctatactaagttagccgtatgaattgtagttctcttcccccaagttgttaatgttcttacattttatttgcttaaatatttttctagtccaatgccatatgtgttcttytatacattttccgtaaataattttatttctgttttgaaataattgaaaatacagaaacattaatgaaaaatttcagagaactcacaagcccttagcccagatgcatttgttgatctctctttctctctctctctcatacatagtcacacacacatatatgcatactttaaaaccttctgatcccttttaggttaggtttcattaatatatattgtacacttttaggct

SEQ ID NO: 163865 - DNA, 645 bp, Homo sapiens
taaattttttcatgttaactttatattctattctcctgttgaattatcttattgttttagcctttttaatcctctatgtatttccagatattcatttgtatcatcttcaaatttaaaaaaatatttatttcaattcttatttcttcattttttatacccactaactataatgagtaatacctgtagtacaatattaaatataactggagatttagggcatctttgtcttgtccctaaccatagtgagaagggctctagtgtttttctaataagtagaatgctggattttaaattgagayatatacatacattttataatgttaaggaagtagccactttatttctcactttccaaaaatcttaatgagtaataagtgttgcacaaagtgagaatattttttacaggctctaggaagatatacttctctccttagaaatattagtataatatattaaaatatttcacattattgaaatatctttgtatttttcatatgaacccacttcatgttttattttctcattattatgattgattctgtttatcaacattttattaaaatattttcatcaatatttatgtataatattggtctgcatttctgtgccaactttattatcattaattataaattttatacttac

SEQ ID NO: 163866 - DNA, 645 bp, Homo sapiens
taaattttttcatgttaactttatattctattctcctgttgaattatcttattgttttagcctttttaatcctctatgtatttccagatattcatttgtatcatcttcaaatttaaaaaaatatttatttcaattcttatttcttcattttttatacccactaactataatgagtaatacctgtagtacaatattaaatataactggagatttagggcatctttgtcttgtccctaaccatagtgagaagggctctagtgtttttctaataagtagaatgctggattttaaattgagatatatacatacattttataatgttaaggaagtagccactttatttctcactttccaaaaatcttaatgagtaataagtgttgmacaaagtgagaatattttttacaggctctaggaagatatacttctctccttagaaatattagtataatatattaaaatatttcacattattgaaatatctttgtatttttcatatgaacccacttcatgttttattttctcattattatgattgattctgtttatcaacattttattaaaatattttcatcaatatttatgtataatattggtctgcatttctgtgccaactttattatcattaattataaattttatacttac

SEQ ID NO: 163867 - DNA, 599 bp, Homo sapiens
ttatagtagcagtttctctttacctatatagtttttatactagaaaaagacgaaaagataattccaggtaagtttctatcataagaaaattagaaagaagtgaaacggtaaaattttttgaaatataaamcctgttttatgtttataaatataaagcctagcagaaagcctgggagtcgcaaagagcagtaatagatttaatctatctcagtgtgtttattttgacttacatgaattggacacctctgtgaaatacacagctgaataccactgaggcagtcactggtggctgagctctgctgacttgctgggtgggacacctgacacctctggatatctttaaggtagtttctgacaactttcttggtggaaattgactaggtccctttttgtttatgtaagagatttaggatatgcctcatcgattcatgttttcaatatcttcacacctgggattttttttcctcatataattcccaagatacctatttattctacaatcattgaaatttgttttatatcttctattccacaatcctaccatgatattgaggcttcccaaatccaatctatatttataccaaaatgcctggtgaact

SEQ ID NO: 163868 - DNA, 566 bp, Homo sapiens
ggcaccaatacatgtttttacattatgagtgatctgaagctgagcatatgtcacttattttttacagtcctatctctattgaaaactgtgccaaaatatttaataatattcagcttcaatcacccaaaggtaaaggtcttgattttataacattcattgcagataaattatactgggcatctgtatgtttggtaccttaataatagcaaaaaacttttacatgttatttcatgtggtcctcaaaaaycctccaaagacaagaaagtatttcttttcattttatagaggaagaaatcatcagtaagtacctggtgagactgaggctcaaaaggaaatggttgaacaaaaagtcagccaacaagttggcagatacagaatactccattaaacaactgcacaattcatgtctttcaagccctcatggaatagtggctaagactgagaatattctaagccataaaatcaatcttataaaatttaaaataattgaaatcatgaagagtggtttctctgataataactgaataaaaagaaaaaatcagtaagagcaaggctacaaaatatct

SEQ ID NO: 163869 - DNA, 482 bp, Homo sapiens
cgaaaaatgcaaattaaagcaacaatgagataccattacacatccattagaaaggccaaagtccagcacactgacaacaccaaatgctggtgaggaaatggagcaacagaaactcttgttcattgaatggtaatgcaaaattaaaattgcacaccatgaaagacattttggcagtcttacaaaactaaatacattattaccataaagttcagtaattgtgttccttggtatacatccaaaatatttgaaaattatatatgagactataatggtaaatgcatgctattatatattttctcacattcatagaatgtacaacaccaagagccaattctaatgtacactatggaattagggtgataaataagtactggctaatmaattgtaagaaagtaccactctccaggtggatgtttataatgggggaggttaagcacatgtagggcaaggggtatatataaaatctctgtacctactgttca

SEQ ID NO: 163870 - DNA, 527 bp, Homo sapiens
gtctagtttggtaaaccctttccttatgtaaggtaatagaaataggcttttatattttcttctaaagtttttatatttttatacaggtgtccagtccatcgggaattgaattttccataaggcatgaggtaaagcagtggtgtcttgttcctgatcttagtacttttggtttcttaccatcaggtgtgatgtgagctgtaggttttgtagacatttcttatcaagttgtgaaagtgccatctctttctagtttactgaaagtttttatcatgaatttttgtaaaatgctttttccacatcttttgatataattacatgatttttattccatagccagttactgtaatggattacattaatttrtttttgattattgaaccaaactggcatacctgggataaatcccacttggttgtggtatatcattcttttttacgcattgctggattctacttgctaatattttgctgaggaatttacatatacgttcatcagagatattggtatgtagttttcttttctcatgg

SEQ ID NO: 163871 - DNA, 552 bp, Homo sapiens
atgagaacttttatctcataaagtgttccttacattcatgtgtaaattatttacagatatcattatatatatatgtttgtgtatgcatatatgtgcaatgatattatcattagacctttgacaattttataaagaagaaagcctttcccaagaaaaagaaagagccttcatgtayggttttattagctacgtggttaatgtaataccatatggcagttaaaatcaaggttctagtgtcgtaagtgaacactctgtggggctataagatgagggtctatgtctatgtattttttgagtgaaacagtcatcgaaaactgaaaaatatttccagtgaagagaacaagtataaaagcatgcttgaagcacatttcgtaggaagcagaatagaaagagcagaaacagtgacatcaatagaacatacgaagatcagttttgttatacattttaggctgaataaaaacatacaggtaagatgctgaatatctgtatgttgggactagaaagtgtctgccatcagctttaagtgagataaatcagcaaataatgttatct

SEQ ID NO: 163872 - DNA, 552 bp, Homo sapiens
atgagaacttttatctcataaagtgttccttacattcatgtgtaaattatttacagatatcattatatatatatgtttgtgtatgcatatatgtgcaatgatattatcattagacctttgacaattttataaagaagaaagcctttcccaagaaaaagaaagagccttcatgtacggttttattagctacgtggttaatgtaataccrtatggcagttaaaatcaaggttctagtgtcgtaagtgaacactctgtggggctataagatgagggtctatgtctatgtattttttgagtgaaacagtcatcgaaaactgaaaaatatttccagtgaagagaacaagtataaaagcatgcttgaagcacatttcgtaggaagcagaatagaaagagcagaaacagtgacatcaatagaacatacgaagatcagttttgttatacattttaggctgaataaaaacatacaggtaagatgctgaatatctgtatgttgggactagaaagtgtctgccatcagctttaagtgagataaatcagcaaataatgttatct

SEQ ID NO: 163873 - DNA, 552 bp, Homo sapiens
atgagaacttttatctcataaagtgttccttacattcatgtgtaaattatttacagatatcattatatatatatgtttgtgtatgcatatatgtgcaatgatattatcattagacctttgacaattttataaagaagaaagcctttcccaagaaaaagaaagagccttcatgtacggttttattagctacgtggttaatgtaataccatatggcagttaaaatcaaggttctagtgtcgtaagtgaacactctgtggggctataagatgagggtctatgtctatgtattttytgagtgaaacagtcatcgaaaactgaaaaatatttccagtgaagagaacaagtataaaagcatgcttgaagcacatttcgtaggaagcagaatagaaagagcagaaacagtgacatcaatagaacatacgaagatcagttttgttatacattttaggctgaataaaaacatacaggtaagatgctgaatatctgtatgttgggactagaaagtgtctgccatcagctttaagtgagataaatcagcaaataatgttatct

SEQ ID NO: 163874 - DNA, 554 bp, Homo sapiens
gaagtgtagtatgtgtgttttaatcccttctacctttgcaatgaagtttagcatagcatttactgctcactctctccgcattaagccgggaatggaatcaattgcaaatgcccgtactcgtcttcaggctgtaatctawttctggggagatgtctgcttggagtgggcccattgtatgtccacctatctcttttctgtggtctaggatcacccagtaatgcaagacctatctctcatagctaagttgctaaggagttagtccctcagatggaagctagaaaagttgtggtacttgatgtgtggtcaagctcctaccaggaaaaatgagtagaactggatttatcagtgagcagcctggaggaaaggctcctgagtgtcaagctgaggagactcccatacgcctagtaccagagataagaggtttaggatggaggtggctgtaaaagttgcaggcactggatgcatggcataaacagggagctgcattcttaaagccccttctctgcactggtctaaaggaggaaacccctgaaagtacttgcaatccatataca

SEQ ID NO: 163875 - DNA, 554 bp, Homo sapiens
gaagtgtagtatgtgtgttttaatcccttctacctttgcaatgaagtttagcatagcatttactgctcactctctccgcattaagccgggaatggaatcaattgcaaatgcccgtactcgtcttcaggctgtaatctaattctggggagatgtctgcttggagtgggcccattgtrtgtccacctatctcttttctgtggtctaggatcacccagtaatgcaagacctatctctcatagctaagttgctaaggagttagtccctcagatggaagctagaaaagttgtggtacttgatgtgtggtcaagctcctaccaggaaaaatgagtagaactggatttatcagtgagcagcctggaggaaaggctcctgagtgtcaagctgaggagactcccatacgcctagtaccagagataagaggtttaggatggaggtggctgtaaaagttgcaggcactggatgcatggcataaacagggagctgcattcttaaagccccttctctgcactggtctaaaggaggaaacccctgaaagtacttgcaatccatataca

SEQ ID NO: 163876 - DNA, 554 bp, Homo sapiens
gaagtgtagtatgtgtgttttaatcccttctacctttgcaatgaagtttagcatagcatttactgctcactctctccgcattaagccgggaatggaatcaattgcaaatgcccgtactcgtcttcaggctgtaatctaattctggggagatgtctgcttggagtgggcccattgtatgtccacctatctcttttctgtggtctaggatcacccagtaatgcargacctatctctcatagctaagttgctaaggagttagtccctcagatggaagctagaaaagttgtggtacttgatgtgtggtcaagctcctaccaggaaaaatgagtagaactggatttatcagtgagcagcctggaggaaaggctcctgagtgtcaagctgaggagactcccatacgcctagtaccagagataagaggtttaggatggaggtggctgtaaaagttgcaggcactggatgcatggcataaacagggagctgcattcttaaagccccttctctgcactggtctaaaggaggaaacccctgaaagtacttgcaatccatataca

SEQ ID NO: 163877 - DNA, 527 bp, Homo sapiens
atgcagaaaaccagaaaacactgatgaaagaaatgaaggacctaaataaaatagaaagatataggccagcacagtggctcacrtctgtgaatcccagcactttgggaggtcaaagtgggcaaatcacctgaggtcaggagttcaagaccaacctggccaacagggtgaaaccccatctctacaaaaatagaaaaattacccgggcatggtggcgggtgcctgtaattccagctactcagaagactgaggcaggagaatcgcttgaacccagaaggcagaggttgcagtgagccaagattgcgccactgcactctagcctgggtgacagagcgagactctgtctgaaaaaaaagaaagatataccacattcatggattgaaagatttgatattgttaagatgtcagtccctctaagctgtcctgtagactcaatgcaaaaaataactgaatacccacatgcattaaaaaagtgatccattcttcacacaacattttcaaaaattaactcaaaataaatcacagacctt

SEQ ID NO: 163878 - DNA, 647 bp, Homo sapiens
accaatccacatctagcaagctttgctaataacctcccttgtttttatggaacatgtccagtcatagcttatatgactgatttgaaatgcaagcttaaatttattccaaactcactaatgatcagctataaacacctaacataccctayatgtgagaggtgactgaaactgagaaaatgtaatttaccgaaggagaaactaaactgtgttatgtgcattggttctgacttaggaaagttttgccaatagttctttgttttgatttttcagaccaagggaggaagcacctcgggaagttgtaatatgaaactaatggagaaaaatatagcacccacccctgaaaaccttttgtattgtttcaatcacaaaacttaccccagtagaagtgttagagtaacataatattgccctctgctggtccttcatgatttttacatctaactgccttagtttaagttctcagcatggggggaaaatataagcaatattcatgtaataagcaaaaacaaataataaagattaaaataccgtaagttccacagtaacgtttccatgatatatatttttattttatatttagtttaaacaggaaaaggctacgatgtattttgaaattgctcgatgaataaaaaccctagcaagtatta

SEQ ID NO: 163879 - DNA, 608 bp, Homo sapiens
tgtagttgaagcaatagacacagggaaatttatatctttaaacatctgtatattaaaaaaagaaagtctccattcttactgcctcatttgacttccttaaaaataataaataaaataaaataaacgaataaaagatctcaaatcaagaacctaatttttccaccataactaaaactagaaaagcaaacaaaaccaaaagtgagcagaagggatgaaataaaaattagaatataaataatgacatagaaaaataggcaatatcaacaaatccaaaaattagttctttggaaagatcatcaaaaatgacaaactgttagctgaacagatgaagaagaaaraagaaagaagacccaaattattaactaggaatgaaaagggtgaatattactactaaccttacaaaggtaaaaagaattaaagatgaatactataaacatccatgtgccaactaaactatctagatgaaacagacaaattcctggaaagaagaaaacaagtgaagcacaactaaacaagaaattttaaaatctgtatagagctataacaagtaaagcaactgaatgaagagtcaaaaaaccttctacaaagacatattcacagatgacagg

SEQ ID NO: 163880 - DNA, 608 bp, Homo sapiens
tgtagttgaagcaatagacacagggaaatttatatctttaaacatctgtatattaaaaaaagaaagtctccattcttactgcctcatttgacttccttaaaaataataaataaaataaaataaacgaataaaagatctcaaatcaagaacctaatttttccaccataactaaaactagaaaagcaaacaaaaccaaaagtgagcagaagggatgaaataaaaattagaatataaataatgacatagaaaaataggcaatatcaacaaatccaaaaattagttctttggaaagatcatcaaaaatgacaaactgttagctgaacagatgaagaagaaagaagaaagaagacccaaattattaactaggaatgaaaagggtgamtattactactaaccttacaaaggtaaaaagaattaaagatgaatactataaacatccatgtgccaactaaactatctagatgaaacagacaaattcctggaaagaagaaaacaagtgaagcacaactaaacaagaaattttaaaatctgtatagagctataacaagtaaagcaactgaatgaagagtcaaaaaaccttctacaaagacatattcacagatgacagg

SEQ ID NO: 163881 - DNA, 537 bp, Homo sapiens
tacaacaatccgaaagtgtttgctaaaatgggtcaaagaagttgataccaattatatccagttgtcttctgtctgggataagtgggcttctgtttctaagcaaatgaattctctcattttgattctttctatagtatctctgatttgatagtattcagccttttcagagttaggaatcatgggaaaggttaaagggaaaattaaccaatatgagaaagaatggcctactgaaagaacctttcagaaaaaaggagtaagaagaacccaatattatttgtgcatcactggaatccttgtaactatatttcaatgttgatcttaaacgggggttacatagaaatagagagtaacatattttgttggaatrattgggctctaaagaagtgtttctcaaagttaagtcttcggccctttggtggggctgtaaaggtcttctagaagggccaagaacttaccccaagtttgatctcctcctgcactgtttatgtgcaaatgacatgaaattccattggaagttggaagctattaaaagagtta

SEQ ID NO: 163882 - DNA, 472 bp, Homo sapiens
gttaatagtgcactaacaacatcctggacagctgatatggtatcttacatctccagaatggtaccaaagcagttactgggggattaaaaatgagaatttgacagctgttgtaagatttcaytttactcttaccactgtgagttaaaaatgaatatcaggtcaaacattattgtgtgatgaaaccgtcaactcagttcttgattattaacccagcaggcaattctttttggggagtctttcctgcttgggtagaaagtctgagttctaatagggctttgtttgtttgcatttttcctataaccaattgtctctcttttccctcaatttttcattaaaacaaatacaaaaacaaaaaaacaatggggtagacaggttcacagtggttgacgtttgaatgtgccgttggcttatttttttagtagtgtctgttgatccatttttctaaatgtttaaaatagcatgacaaatgttc

SEQ ID NO: 163883 - DNA, 585 bp, Homo sapiens
aattggaattaacagaacactatctgttatcctgttattcacgtcaccaccaccaccaccagtaacatttacyaaacacgaatcctacctgggacttggttggtgttatacaaattaatcatcatcttctaagagcgtatttgctttcttgtctaaggctcaacctaacaatgccagactgtttaatttgtgaatgcaaagtattatttatgttcacaagtgagctcattttatcttgcaaatttaagtgttgcaaagatactgatgtgtgacagttgttttctcagaaactcctatatgggaaaactaagcaggttgactatatccagagcctttgactctacactgattcagcactttacatgatgtagcatatttaatattcagaagccactattccctccaggagatagtgacaaagctcaccttcaaagaagtttaaactccgtatcatcaggtataatatatacagaatcaataccaatctataaattacatgtgtaacaccatgcactcgtatgtctaaggaaatccaaaaattacaagtcagaggctaataatgcccaatcaaaaccagtaacagag

SEQ ID NO: 163884 - DNA, 619 bp, Homo sapiens
gagcagaaacctcaggctactgtagaagacctgatgagactgctctaagttaaaatgaggattggaggtcctgcagcagcctgtggagttgataggtgtgtgaaagcagctttgcctgccctggagcacatcctcaagggcaatggaataaactccttgactgagtctctggacttgtgcctgaactgcctgaccctatccacccctgtgccttccccattctstgagggccaattatcttctgcccatgcagcagcctcttgcattccccattctttttcctcgaatttgaggttcattctgtctctgcctttcactctcccagcacctctcagctgggttctttccctccattctgacagtgtcccaagcttagctgagtttgtctttccagcctgagtccccaaactgtgcttgggccgttctcgtatttcatttttgacaggactgtgattccttcctctcttctgagtttctctgtggagatgtttctcagaatcgcaggcctgtgtccttgtcgtgttccctgatagcacagaagtcttgattcaacaacaaacagtggcacctggtgcccccagcatttcctgattttgtatgatttcattaaaatatacct

SEQ ID NO: 163885 - DNA, 602 bp, Homo sapiens
gaggccagtttgtggactctttgtataggacaaagtctgtttttttcagctagcattagtatggaatctgaagcagaaacttattgatagaacttgaaaaataaaccaaaataatagaaawgcccgaggatgagggctaaaaaaggtttggggtcagaggaaagagaaagaaaaatataaattaagaattactccaaaattactttactaaggtatctttatagcacctaattatcatcctgttaccatgggccatacatgatgctaacatttgaccaggtacttaaaaaagttattgtaggccaggggcagtggctcatgcctgtaatcccagcattttgagaggcctaggcgggcagatcacctgaggtcaggagttcgagaccagcctggccaacatgatgaaatcctgtctctactgaaaatacaaaaattagccaggtgtggtggcacacacctgtaataccagctacttgggaggctgagacaggagaatcgcttggacccgggaggcggaggttgcagcgagctgagattgtaccactgcactccagcctgggcaacaaagagtgaaactctgtctcaaataaaaaagttatcat

SEQ ID NO: 163886 - DNA, 497 bp, Homo sapiens
ctcctgcctcagcctctggagtagctgggattacaggcgctcaccaacatgcccgactattttttgtgtttttagtagagatgggktttcgccatgttggccaggctggtctcgaactcctgacctcaggtgatccacctacctctgcctcccagagtgctgcaattacaggcgtgagccaccgtgcccagcctgagttttcatttctacattttaatcatacaacacataagttacattgcttggaaagtgtataaataaataaagatacttcaaacatacataagtgagttaaagggactctcataaattctcagatggagaaaaaagtgactaaagtcctgaagtatgatatttttctagcaactactaccaaaatacatttttttttatgtcaccgcataaagatgccttagaattttgcctaattttctaactaaggcgaccgatgaatagaacatgtattggaataatctgatgttagaatatgaggatgg

SEQ ID NO: 163887 - DNA, 497 bp, Homo sapiens
ctcctgcctcagcctctggagtagctgggattacaggcgctcaccaacatgcccgactattttttgtgtttttagtagagatggggtttcgccatgttggccaggctggtctcgaactcctgacctcaggtgatccacctacctctgcctcccagagtgctgcaattacaggcgtgagccaccgtgcccagcctgagttttcatttctacattttaatcatacaacacataagttacattgcttggaaagtgtataaataaataaagatacttcaaacatacataagtgagttaaagggactctcataaattctcagatggagaaaaaartgactaaagtcctgaagtatgatatttttctagcaactactaccaaaatacatttttttttatgtcaccgcataaagatgccttagaattttgcctaattttctaactaaggcgaccgatgaatagaacatgtattggaataatctgatgttagaatatgaggatgg

SEQ ID NO: 163888 - DNA, 324 bp, Homo sapiens
tgaattcttcattactcccacaaaaacaggaagtacacatgagagaaaaatctttcccatgtaatgagagtggcaaagcctttaattgtagctcactcttaaggaaacaccagataccccatttaggagacaaacaatataaatgtratgtatgtggcaagctctttaatcacaagcaataccttgcatgccatcgtagatgtcacactggagagaaaccttacaagtgtaaagagtgtggaaagtccttcagttacaagtcatcccttacatgccatcatagacttcatactggagtaaaaccttacaagtgtaatgagtgtg

SEQ ID NO: 163889 - DNA, 507 bp, Homo sapiens
cagcctctcccctctctgtggatcacaggccgatatcagctttcagaaatggaagacacagcaccctgatgttcaatgatgaatacagattagaatcatgtgggacactgcgcttgaacctacatgcatgggaatctctggaaaggaggcacaagagatatatttgcaaaatgtctcagcattctaatgcgaatccagggttgagctaaactcagagggagcaagcccagaacaacccctatcttctggctctggtctccccttgggtccttgttgtcaccaggatccagacagtggacagcaaargagcagaaagaaacatctaggggaggcaatatgggccagagcaggtgaggttgtgacaggggaagggtcacataaaccttcactgagaaggtgatatcagaacccaggcctagaaaaggaaggatgtttgtcacctgcaactgaggggctaaagagtcctaggcagagggacagcccaggtgaaggtcctgagacaggagc

SEQ ID NO: 163890 - DNA, 257 bp, Homo sapiens
atcctgcacttcctggtgttcctggggtgagggaatcaatgtttctcttgggacccatccctgaaatgggcttgtggtctggactgagaatgccctsattgtttgaggggcccgggtccaggccaccttctcatttcccagcaggaggggtgccattctgatgaagtcttgagtggcactgatgagcccagtgatttcctttgttacagcgaggacagagtgctggcgtttttctgctgggtgttggggggggcact

SEQ ID NO: 163891 - DNA, 519 bp, Homo sapiens
ctagggtattttcatgaataaactgatgtagattgtttcgatcaggccttatggaaataggaaaagcacaaggtcctaagggctctccagctatggcagcagagtgtaacattctttgtactggggtctctatttctgctactgaaggaggtggtacagatgttgctgcaactggagggggtggtaaaaaccaatttttatcctccctctcctgttttttgttttcaattggatctgtggggggggacaacagattctttcagatttttagactcagcctgctgcccagcagaataatgagataatggcagaacagtacgaaccagactccacgtgaagatagaagaatcaactttaagacctttttgatgagcctcttttaatccttttcctgctgtgtcccaattttccacatcaagagtgcctgcctgtggaaaccatgggccatgcatmataatctcctgcagaagcttaatgtctgtgaattaacctgagttccaggctgtctcaatagaactt

SEQ ID NO: 163892 - DNA, 496 bp, Homo sapiens
cctttccccaacagttttctctattttttttaatgtttataccattttttactagcttaaaatagaaaaatgttgatgaactaaatgttgatgaacagttgatacatttcattgttccatacatgctgaaatggacacaaacaaaaatggcgatttttaagaagttgttgaaaaactcacttgtggacaactgttatataagttaatttaatcgtgtgtatatgtatgtctacatgagtgcatggatgagcaagcccatggctcttatgaaacactcatcataatttaatcaataagttttatatttaacacttgaaattatctctacagtagtttccayggccttaaatttttcctacactgtcacactgagttaaacaatagtaagcatagtgctgtagtatgtgtttgcatgtgtgtatacataatgtgtgcatatataatcaatatataataccctttcatgaagttccatgttgttatccttgaactcatt

SEQ ID NO: 163893 - DNA, 603 bp, Homo sapiens
catgccgtaagtctcagccccataaattgatagctatatttgcaacatagagctgaaaagtatatgactgtccacccagaccaagacaaagtaaaatctcagcactctgtcaaacactttgaactgctcctactcccactagggatgtggaggttagtctgagaggccatggtaggggccggtccttactggttattactgacacatcagctcctgtgtccattagcccataaaatttcttttctttaatttgtattacacaggtaggtctattagaggttakgggttgggatagatttcccatgtagttgtgctcccaaaccctttgtttcctcatttctcttttcatggagaagggtgtaatttgcagagaataagcaacaattgagcaatatattctcctggttcaaaaacctgaagatcttgtgacattaaaactacttgaatttctccttcataattggagtcaactactccagggactacagtgatgcctcacaagttaagatggctcttgcctaaaattagtcccatgtatcctgctggtaaaggtctctaaatgccagggggagctttggtaggtttgtctcctccaactaatat

SEQ ID NO: 163894 - DNA, 243 bp, Homo sapiens
tggtgttcctggggtgagggaatcaatgtttcttctgggacccacccctgaagtgtggttgtggtctgaaatrtgaatgcccttattgtttgaggggcctgggtccaggcccccttctcatttcctgatgggggtacgattctgatgaaattttgagtggcactgattagcccagtgattttctttgttacagtgaggacagagtcctggcattttttcctggtagtagtggggaaccgcatt

SEQ ID NO: 163895 - DNA, 555 bp, Homo sapiens
aagttactaagcaaattagaaatggcaggaaattaccagcaaattagaaatggcaggagacagcatgagtaaactaaggtacagattactggaaaccmaaaataatgtacaaaaaaagacctgtaaaatgtgtaataagagtcagtgaaaaagagagagagagaatgagagagagagagagagaatggaccataggcaatatttgacatgtccgaacatctttaaaaatatctaggaatccctagaaggataaacaaaggttaccctaggcttgttgtggtaaaactgatgaatagcaataagaaagaaaaaaatcctaaaagcaacaagagaggagaaaagactacattacctgcaatggaggaataatgagactaaagatggaacacaatggaatgacacaatcaaagaaatgaaaggaaaagctgctaacctagaattctttaaccagtacaagcatttttcactgtaccttgatggaggtaaaataaacaggtttttcagacagaaactgccagaatgtgttgcctacaaacttgcactaaaaatataaag

SEQ ID NO: 163896 - DNA, 473 bp, Homo sapiens
attgtcccataagtcctagccagtgcaataaagccagaaaaataaacaaaatttattaaatcaagaaatataacttcccttattcatagacaacatactctacatatacatataaaaatactacttgaatctataacaccaaaagtgaatttaacatcacagtgtacaagattgacattcaaatatcaattttatttctatacattgttagctaataatccaagaatcaaatttaaatactattttgaatagcatagaaaatatcaaaacttgggaataaatgtaacaaacatatcccagagtactacatyaaacattttaaaacatggctgacacaaattcaagaagtccctcaaaaatgaattcaactttatggatataccaattttgatattgtgaatgtctttctaaattagtacagaaattcaatgtcatccatataaaaatggctgattctttaaatttattttata

SEQ ID NO: 163897 - DNA, 481 bp, Homo sapiens
tctttgactttcaagccaccaaaattgtgagcaaaataaacttccttgatttgtcaattacccagcctcaggtcttcagttatcgcaacactaaacggactaaacagcatgtcacgtggcagctggaggctgtcatcmctagtcaggtcaacacagtccattagatcactgctagccagtccagggcttgcatggatggcccctcatggtcccacagccagtcaacctcactcagagatgttgctttcctaacatgggacagaaacagttcacagtattttgcctttataattctacctggttctccactgaactccacctaacagctgacctagactctgtgcccagttgaactttctgcttggcaggaaatttttcactcagtgctcaatgtttagtctctatttaatagttttgttttctaaacaatatgtgtaataataccagtttcttgattttcttgattagacttttttttttt

SEQ ID NO: 163898 - DNA, 494 bp, Homo sapiens
ttgtgagcaaaataaacttccttgatttgtcaattacccagcctcaggtcttcagttatcgcaacactaaacggactaaacagcatgtcacgtggcagctggaggctgtcatcactagtcaggtcaacacagtccattagatcactgctagccagtccagggcttgcatggatggcccctcatggtcccacagccagtcaacctcactcagagatgttgctttcctaacatgggacagaaacagttcacagtattttgcctttataattctacctggttctccactgaactccacctaacagctgacctagactctgtgcccagttgaactttctgcttggcaggaaatttttcactcagtgctcaatgtttagtctctatttaatagttttgttttctaaacaatatgtgtaataataccagkttcttgattttcttgattagactttttttttttttaatatggagtcttgctctcttgcccaagctggagt

SEQ ID NO: 163899 - DNA, 573 bp, Homo sapiens
tgagcatctttatgtgcatgttcagatacatcttcaacactcatccaaggacttgacagctcagccttagcctttccttctggcacatgcagagtctcaaggtcaaccagaggtgagagattagggctttcatgggtcttttctgtgtgtgtgccaaatcctcaaatgataaagggatttggttatatgggtgagagatgagactgaagtaattgtctattgcactagttctcaactagaattgtgcatcacagtaacctgcagaaaaatttaaaaaaatctacaagtctaggctctcccctgaagattttgatagagtaagtctartaaagcgtggacatgtatgtttacaaatatttccttgaagccaggcatggcggtgcagcagctgtagtcccagctgcttgggaggctgagatgggaggactgattgagcttgggagtttgaatgtagcctgggcgacataatgagacccttcctctaacagtaacaacaacaacaaagtcctcaaaatctggatactattctggttaagaaccactgaatagataagtgtaatatgtaaattctca

SEQ ID NO: 163900 - DNA, 596 bp, Homo sapiens
cccttttagctcccgctctcattcatactaccactactcaccaaaagtgtactggtagagcctctaattccttaactgccttactaatttattgtaaaacaaaagtgagattttcaccacaaacaccctcaagttactatcactggtctttcagaaaattactcacagttggacccatccttcttcctatatgatcatgtgatattcttcctaytctacatcaattcctctacttgaattttttatttttataaatcattttatttttattgaaaaataatatacatatgtctatataatttttaacactaagctacaaaaataatatcaaggaaaaacaaatcttcttacactaaatcttcggtgccccatccctaagaagttctttgaaagcttcaagaaatttaaaaacttttcatacaaatgaggacatactgtttaccctttatgttcctttttgatccaatatgatcagttctttttcctttcattttattattttttcttcacagcctcctttacttgacccttaaattttctacaggtcttctgtcattgcctttccttccaaactatgaactctcactgcactatat

SEQ ID NO: 163901 - DNA, 535 bp, Homo sapiens
tgctttcctttctcattcctcccactccctayttgtgtttcctcttcatcccaaataaattattttcagtttaatccttggataacaagatcaactattgggagaattcaaactagccaagttcacttttattcctgtgtgaaacctgacaattctttgccaagtacaaatatttattgtattaatttgttaaacaaaacaattttgaccaaccaaccactataccaatagtcttgttgttgttaatctcttttccaaaagctacagacttattacatactttagaaattatttcattcaatagttataccaaattgttgcccgtgattaacatggatcgccatctttccagattctaacaacagttttttccctacccctttccaaccttgaagccattgacacatagtttagattgtatattattgaaaaatcatattcatggtacaatttatgcattattcaggactggctacgttgtgctgcagtaattaatgatctccaaatctaatttgcttacagcagaagagattta

SEQ ID NO: 163902 - DNA, 568 bp, Homo sapiens
tttgatgctttggcatttttgtgcctgaatttctttatctgtctaacattacacctttaccaaatttcatttagctgctctttgtctgctacacctttatatcatctttcatattcaaacattccacgtgctgcagctctaaataggagagatgttaatgaaatgcaaagactgtctcaacagttaaaataaaggggtttgtcctattataaagggaagagtgaaccagagtagaagtgagcccgtgataggtatctattgtttttcctccaggtgtgtcaacaacctaggtgaacaatttcttactctgtttctccaatgcaacagtraaggcagagcctcactacccacagattataggataatattcagccagctatgaagagccaatagcaatgaacacaggccaaactggacattattgagagcgaatattaaaactttagtttatagtaaccttgggacaactagcataaactatgcctgacctaaggaaattggtgtatataatcaccctgattctccctttatctcccacctctgtcctatgtacaaagtacttacaaca

SEQ ID NO: 163903 - DNA, 576 bp, Homo sapiens
cagcagtcctttgactcctttactttagcagcactcaggggtacagcagccttttatcttctcagcttgtccttcccagcataaaacctctatactataaacaagttgggccccaagagttttgacctgttgtgtctaaggcarggcttttgtccaatgagtggaaacttgggtgagggaagggagcctcattcctctcgaccatgctcacccaaaataaaacttgtaacatggagtttggagggcagatctaagagatgcctgtggcctgctcctttcagagtaaaactgttggttgcccgagactaggaattgcagggacagacagccttgtcttcttggccataaccacccaaaatagagcacctgaacaagcagttctaaatctgagagctgatggggaagctgtgcatgggataggagcaggtcctggcctggcctggcctaaatgcagcagattctcactcttcctgttcagatttcatagggcgtctcgtacccctgtttctccatttgatgcatgctgttaggacaactttcagagatttcagtggattgtttatgttttataattat

SEQ ID NO: 163904 - DNA, 545 bp, Homo sapiens
tattaccatatatccagcgaatgttttctgcatgtcgttttcttcctaccaagccaaagcttctagctggcaggctccatatttgtctctattcatcacaacacctatggtagaaaacaattgttggatgaattaatgactcaataaatcaatttwaaaaaaaaagtccatggctgggcgcggtggctcacgcctgtaatcccagcactttgggaggcagaggcgggcggatcacgaggtcaggagatcgagaccatcctggctaacacagtgaaaccctgtctctactaaaaatacaaaaaaaaaattagccgggcgtggtgtcgggcgcctgtagtcccagctactcgggaggctgaggcaggagaatggcgtgaacccaggaggcggagcttgcagtgagccaagattgcgccactgcactacagcctgggcgacacagcgagactatgtctcaaaaaaaaaaaaaaaaaaaaaaaaaatccaaaaaatcaaagcgagtccttggagacaggttgaaaagggagactgagactgaaaatggg
